United States Patent Application Publication US 2005/0228172 A9 - sequence listing, part 49

SEQ ID NO: 196570 - DNA, 499 bp, Homo sapiens
attaggaaatgaacaattaaaagagagctcgaaatatccaaacacttagaactacgaatgtctacataaattactatctttattacagaggaaagcaaacagtaactgaaaactaattaaaaataagctaaaatgagaacactgcatatgaactatgaaatctgtccaaatcagaacacctagggaaattttatgcatacgttaggatatagaagactttaaattatgtatattgtcaagatcctagaataagagcaagagatgtagaarggtgctattaaatgagattttcatttaactctttcaaccattgaacatgtaacatcttccagacactaaaaaaatactggctcacaaaatacaatggctaccaaaaccagataccatttgtgacctcagtcagcttagagttgattaaggaaaacagatactaaagtggcaaacaaaaatatacaagtaaataaataaataataaaacaaaacagatatcacaaagaac

SEQ ID NO: 196571 - DNA, 348 bp, Homo sapiens
ttttccaagcgaaacataaattcagtcatatttatgagcccaaccctgatcctcaggtgccttgggttacattactgggatctaccaaatggtcagtttctatctgctcagttcacaatcacaggaaagaacaaactctcttagttatttgacaatggcagagaccaaagagagattggacttttggatatatatgtctacaagaaacaaccaaaagaacagtgtattcccaagaacaaatgacaatcrtatcacataaataagtcaaaaggaggagctgaagggaataaaatagaaggaaaataaaagtcaatctttatattacttattctgggttaaaagtgtatg

SEQ ID NO: 196572 - DNA, 528 bp, Homo sapiens
ttttgtctccataaaaagccaatgatatctctactaaagtacattttctttgccttgtagtgytatgtgaaatgacttgtcagctaagcatggaacttaatggtacaatatatatcatcttcaatttcaatcaaatacttgaaatataaatttagacaaggacaaataaggtaataatgcagcttaaaccaaaagtatggttgtataaattacacatcagcagccaccagttatgatatacagcaggtgattcattataattcaactcacccttaagattttaggaagaagaataaggcaaatctacccttagcctgtgtggtactcattaaaatcacaacactatttcttctacagaatacgtggtaatgttttctaaggctagtctgatcaatctttgatttttctctttaggaatcttggaatttaagtagagttataaataagtgagagtagttccctcagttctcaaagattcattatctcatttataaggaacatgtttattggatgctacattcaactatg

SEQ ID NO: 196573 - DNA, 528 bp, Homo sapiens
ttttgtctccataaaaagccaatgatatctctactaaagtacattttctttgccttgtagtgctatgtgaaatgacttgtcagctaagcatggaacttaatggtacaatatatatcatcttcaatttcaatcaaatacttgaaatataaatttagacaaggacaaataaggtaataatgcagcttaaaccaaaagtatggytgtataaattacacatcagcagccaccagttatgatatacagcaggtgattcattataattcaactcacccttaagattttaggaagaagaataaggcaaatctacccttagcctgtgtggtactcattaaaatcacaacactatttcttctacagaatacgtggtaatgttttctaaggctagtctgatcaatctttgatttttctctttaggaatcttggaatttaagtagagttataaataagtgagagtagttccctcagttctcaaagattcattatctcatttataaggaacatgtttattggatgctacattcaactatg

SEQ ID NO: 196574 - DNA, 661 bp, Homo sapiens
cgcagagatataactcaaactgtcatggtttacatgagaaatgaatttttagagatattatgttgggacatggtgctaatgttagcctttccactctttccgcaattttatgcatttcaaagtttgatgcacttacaaatgtcatatggcagccaaaaaccaaacacttcctcctaccttattttctttttttcaccaaaaatttgttagamttttacttagctctagcagaagacacaaagatgaataatggctaatagtagagaatactccttgaggatctaattgtaatcgttctgcactttatgtatttttatagaaatatctttcaactgcatgcagttcatatagaaatagaatttacatatttaatgttttttatctcattaaaacatatgaccacctcatgttgataatggcaggggtgattggtagagaaaaaatttgttaaagtcatgaaataattgaaccagaaaggaatcaatatagcctgtcccactcatttatagatgaatacaccttagtatacaaaggagtgctgtgaaaaacaagattagcatttgttgaggaggatttttccttcgtactttgcaaattacctcaaagcagaatttaccctaactactccaagcctctgagaatctcacatattcccaaagac

SEQ ID NO: 196575 - DNA, 661 bp, Homo sapiens
cgcagagatataactcaaactgtcatggtttacatgagaaatgaatttttagagatattatgttgggacatggtgctaatgttagcctttccactctttccgcaattttatgcatttcaaagtttgatgcacttacaaatgtcatatggcagccaaaaaccaaacacttcctcctaccttattttctttttttcaccaaaaatttgttagaattttacttagctctagcagaagacacaaagatgaataatggctaatagtagagaatactccttgaggatctaattgtaatcgttytgcactttatgtatttttatagaaatatctttcaactgcatgcagttcatatagaaatagaatttacatatttaatgttttttatctcattaaaacatatgaccacctcatgttgataatggcaggggtgattggtagagaaaaaatttgttaaagtcatgaaataattgaaccagaaaggaatcaatatagcctgtcccactcatttatagatgaatacaccttagtatacaaaggagtgctgtgaaaaacaagattagcatttgttgaggaggatttttccttcgtactttgcaaattacctcaaagcagaatttaccctaactactccaagcctctgagaatctcacatattcccaaagac

SEQ ID NO: 196576 - DNA, 661 bp, Homo sapiens
cgcagagatataactcaaactgtcatggtttacatgagaaatgaatttttagagatattatgttgggacatggtgctaatgttagcctttccactctttccgcaattttatgcatttcaaagtttgatgcacttacaaatgtcatatggcagccaaaaaccaaacacttcctcctaccttattttctttttttcaccaaaaatttgttagaattttacttagctctagcagaagacacaaagatgaataatggctaatagtagagaatactccttgaggatctaattgtaatcgttctgcactttatgtatttttatagaaatatctttcaactgcatgcagttcatatagaaatagaatttacatatttaatgttttttatctcattaaaacatatgaccacctcatgttgataatggcaggggtgattggtagagaaaaaatttgttaaagtcatgaaataattgaaccagaaaggaatcaatatagcctgtcccactcatttatagatgaatacaccttagtatacaaaggagtgctgtgaaaaacaagattagcatttgttgaggaggatttttccttcgtaytttgcaaattacctcaaagcagaatttaccctaactactccaagcctctgagaatctcacatattcccaaagac

SEQ ID NO: 196577 - DNA, 403 bp, Homo sapiens
tgtcacttcaccagctggaaacctctgtgaccagtgatgcctttgcccaagttttgctgtggcctgctgggctcattctgacaactctgcctggcaggctttggttggcttgcactaccagcctggatctcacacctgccaagggcgagccagstggggagcggtgaggggtgtgtaagcgagtgtggggtccagtcactgagcatagccaggcatgccagctgctgccatcgagcaggcagcttcagatgccagcatgggcaccagctcctgtgaggccacagctggaccaggcatagccaggaagcaggaagcttccacagctggcatcaggaagtgtgatgatgcctggaagcttgaggactccaggaactacacagccccaaagacggagtcacagccc

SEQ ID NO: 196578 - DNA, 403 bp, Homo sapiens
tgtcacttcaccagctggaaacctctgtgaccagtgatgcctttgcccaagttttgctgtggcctgctgggctcattctgacaactctgcctggcaggctttggttggcttgcactaccagcctggatctcacacctgccaagggcgagccagctggggagcggtgaggggtgtgtragcgagtgtggggtccagtcactgagcatagccaggcatgccagctgctgccatcgagcaggcagcttcagatgccagcatgggcaccagctcctgtgaggccacagctggaccaggcatagccaggaagcaggaagcttccacagctggcatcaggaagtgtgatgatgcctggaagcttgaggactccaggaactacacagccccaaagacggagtcacagccc

SEQ ID NO: 196579 - DNA, 403 bp, Homo sapiens
tgtcacttcaccagctggaaacctctgtgaccagtgatgcctttgcccaagttttgctgtggcctgctgggctcattctgacaactctgcctggcaggctttggttggcttgcactaccagcctggatctcacacctgccaagggcgagccagctggggagcggtgaggggtgtgtaagcgagtgtggggtccagtcactgagcatagccaggcatgccagctgctgccatcgagcaggcagcttcagatgccagcatgggcaccagctcctgtgaggccacagctggaccaggcatagccaggaagcaggaagcttccacagctggcaycaggaagtgtgatgatgcctggaagcttgaggactccaggaactacacagccccaaagacggagtcacagccc

SEQ ID NO: 196580 - DNA, 412 bp, Homo sapiens
tcatgagaacagcatggcggaaactgcycccccacttgattcaattacttcccatcagatttctttccataaaacatgtggggattatggggattacagttcaacatgagttttgggtggggacacagccaaaccatatcagtgggtgttagctgtaacattcttttcactactctataggttcaaatttttttaaaataaaaaattggtgtaaaataaataaactaagctgagattaggaccatcctcaactacttggtaggagcaaataaactatgcctgaatgaagagataaatatatgaagtacgaaattacttcatctgtatctcagctgtcactcacaatagtatttgatcacatgcatactgacagcattctgacaattctcattcattgtaattttaaagttga

SEQ ID NO: 196581 - DNA, 443 bp, Homo sapiens
tacacagacttaaaattgtgactacaatttggctgtgtgattttttttttttcttttttttgagatagggtctctctctgttgctcaggctggagtgcaacggtatgatcacagttcactgcacccttgaacttctggggtcaagtgatcctcctgcctcagcctcccaagttgctgggattacaggaatgagccatgtgcatcactaatttttaaaaatttttaaatgtttctagagattaggtttttctctgtcatctaagctggagtgcagtggtgcagtcatggctcactacagccttgacctcctgggctcaagacatcctctcatctcaaccttccaagcccctaggattataggcatgagtgaccacacccagctagctatgatatattgctagccattaacaaagaagagtaaaaaraagaaaatacaacccaat

SEQ ID NO: 196582 - DNA, 599 bp, Homo sapiens
  misc_feature (1)...(599): n = A,T,C or G
tctttccttctccttttggcttcttattagttagggttgtttccatagtgaatgtcaaaaacacaattcaaactggcttaaatgaaaaaggaactttgttggctcatgcaattgaaagtccagggatagtagtagcttcaggcataattgggtcttggtgctcaagtattagctttctccatctctaggctccacattcccctgtgcaagcttcactcttagagaggctctctcaatatagaggcaagggtggccccrgcaactccaggcttgccaaccacagtgggatgagatccagctttcccagtagttccagccaatgtcccttttttttgacttgggtcaactgaacatccctgcaccaatcacagcagccaggggaatggatctattcattggccaggccgggtcacatatctaccttaggagcaaggcgagtgggtcagcccccattgagctacatggactgagagtaaagggaaagatggctgcaaaggaagatctaggggctgaattcgggagcagnagatgaaactcacanaacatcctctgtgggctcctcattcattttgaatgtagcaccttctcccatcaatcat

SEQ ID NO: 196583 - DNA, 599 bp, Homo sapiens
  misc_feature (1)...(599): n = A,T,C or G
tctttccttctccttttggcttcttattagttagggttgtttccatagtgaatgtcaaaaacacaattcaaactggcttaaatgaaaaaggaactttgttggctcatgcaattgaaagtccagggatagtagtagcttcaggcataattgggtcttggtgctcaagtattagctttctccatctctaggctccacattcccctgtgcaagcttcactcttagagaggctctctcaatatagaggcaagggtggccccagcaactccaggcttgccaaccacagtgggatgagatccagctttcccagtagttccagccaatgtcccttttttttkacttgggtcaactgaacatccctgcaccaatcacagcagccaggggaatggatctattcattggccaggccgggtcacatatctaccttaggagcaaggcgagtgggtcagcccccattgagctacatggactgagagtaaagggaaagatggctgcaaaggaagatctaggggctgaattcgggagcagnagatgaaactcacanaacatcctctgtgggctcctcattcattttgaatgtagcaccttctcccatcaatcat

SEQ ID NO: 196584 - DNA, 613 bp, Homo sapiens
agcaggctttctggagtggactgagccttgtggtcaagaaataggcaggcttggaggctgtcgggcttcccaccatgcagccaccatgcctcaccttcattagctgacaaagcagttctctgtcctcactggccacaaggggaggaggacacagcttttggaaacctccaggctgctatcctggaacctggagccacggccagggacagcttgagcgtcccctcccctctcatcttgtcctctgaggggtaggctgtgccccagctgaacggggcacctgtggctttgccagctgatggctgccatgtggsaatttggacctgggttgccagatcttcagattttccagcaaagctggaaatccagatgtttgtatgaaacttccccaatttaaaaaatgtttaaaaacactatgcaggacgacctatacacatctgcaggccagactcggtccctaggcagccagttagtgacctctactctctgccttcagacacccagggccacctaaacaaagggcccccatgacagtgatgggttgggggtggagaaaatgctctaggagagaccctggagtccacaggcaagaagggcatgggatcatcctttccct

SEQ ID NO: 196585 - DNA, 381 bp, Homo sapiens
aatccctattctgcttacctcagcctcatgtagagtgtgtatctacagcctggggctccagaaagagccagattggagcttctgcatccaccactgtggcctggctctggatgcctccatggtaccacgtggagcagtgaagaacggcctccacccaactctgtactgagctcctcaccatcccccacccttcctctggtgtcggtggagaggatgctctcccgacttgtgcactgacccccagtcttacccctttccatatccttaaggccctggactccctccactagtratttcatttcttccttcatttgggctccttatattccgtcttcaaacttctctagaccttcccatccttaaaaaactaacaaacaaaag

SEQ ID NO: 196586 - DNA, 501 bp, Homo sapiens
cagctgtgtgacctctggcagcccattcaatctctctgtgccttctcattgtgaacatgggaataataatactactgataaccatgagctattgttgtgagggtcaactgagatatactaacttgaaaaatgtcaactcatatatatcactggtctctggagtaggagctttgggaggtacagagaggaatcggatgtgaatcctgcctctcgagtatcttactggcaagaggaaagagaggcaagtacacaaggaamtatactcccaaatggcaagctgctatcttcttaggcaaaggaagataaagagatggtaccattgacaggatagcacaatctagacagtcactctttgcttcacttagcaaagttcaagggaaatattttatttgagcctaatgactctggacacttcccttaaaatgacatatgagaatataagtcagtttttctcctgttgagaggtggcaggctttggaatcaaccacacccttgtgaatt

SEQ ID NO: 196587 - DNA, 586 bp, Homo sapiens
ccaaagaatagagaaggaaacatgtgtgtccttaccctcccaaagctgcatcagtgatactttcatgtagcagcaaataattctgctctccctcatgtcagccaaaacatttgttttaccttctaactttacctttgaaaaactttaagtattccctccaagccctctgatctctaaggaacttaaaaataaactaatatatcattagttgtgccccagagtggtttctattagctttaggttcaggtttgcattacattactaagaaaaaaaattcaaggaacctggccaggtaccacatacagtgattacttcatcacttactaatctgtggccatgggcaaattatttaatatatctatctatctatctacccttataacatagtttaaagatgtaawtttttttctcctcatttaatctactcatagtattttacatgcaatgcacaatgtattataagagttaatggctgatttacaaagtaccttatattaacattgcatacatttagtattcaatatgttgtagctcttattttattttgtacatgagttctgttttgttcactcttatatcctcattg

SEQ ID NO: 196588 - DNA, 534 bp, Homo sapiens
taagattatgaaataggattatcaagtataaacaaaagaagtactaaatagtattgattctaaagtgttagcagttataaagcttatcaataatttagcaagtttttagtgggagataaatgattcagcaaatgtacctattgacagtaagatacaycagagatttgaaaatataccaatgtcaaaaacacaagttagaataggaaatttaacaatatgggaatattattgacatgtgaccattggtaaaaaatatgcgatagttagagtaaaacatgttttatatgattttggggaaagggaataaatgatgactgtttagagatgggatttattggagataccataataaagttattttagaaccagaatttgatagattgataataaaagaatgcaaagatgaaatggttagtgttgttattactaatgagaaaaacaaactttcactatctgacatacatcgtttgtctcctaatccttgtcttaaaggaaaggacaatgtgaaagaggctctagaaaacatttcaaagg

SEQ ID NO: 196589 - DNA, 575 bp, Homo sapiens
ataagggaattaatcctattcacaaatgctgagccctcaggacttaatcgcctcccaaaatctccctttttaatrccatcactttgagttttaagttccagcatatgaatttttgagcaacatattcttttaaaccatagtgctttcgtccttccatcatgatcaggactagttcatatccattcagacaagagaaaaagtaagcaaaaaacgggattgatcacctactacactttcttgaaatactggcagattggctttttgggtttgagatctgacaacaatacccttctgccttccgcatttgaacctcataggaacacaaatgggaatgaaggaaggaactaaagtttttttttctttgaaactttaagcaaacattagtttgcattaagagatgagcagtaaaattaaaattgcattccaaattatcttatcagaataaataagaatgcatttaagcttaatcaaagatagcttagaaaatatataacacactatttcagattttatattatttacagctcaacgtaagtcatcttgtgtaatagagagtagaggagcagcaaacctgt

SEQ ID NO: 196590 - DNA, 575 bp, Homo sapiens
ataagggaattaatcctattcacaaatgctgagccctcaggacttaatcgcctcccaaaatctccctttttaatgccatcactttgagttttaagttccagcatatgaatttttgagcaacatattcttttaaaccatagtgctttcgtccttccatcatgatcaggactagttcatatccattcagacaagagaaaaagtaagcaaaaaacgggattgatcacctactacactttcttgaaatactggcagattggctttttgggtttgagatctgacaacaatacccttctgccttcmgcatttgaacctcataggaacacaaatgggaatgaaggaaggaactaaagtttttttttctttgaaactttaagcaaacattagtttgcattaagagatgagcagtaaaattaaaattgcattccaaattatcttatcagaataaataagaatgcatttaagcttaatcaaagatagcttagaaaatatataacacactatttcagattttatattatttacagctcaacgtaagtcatcttgtgtaatagagagtagaggagcagcaaacctgt

SEQ ID NO: 196591 - DNA, 530 bp, Homo sapiens
caaatgcacagtttctgaacatccctacattgattattttgacttatatttttcttcatactaactaagaatcaccttttcctacacatttatatttgtrgtattgagtgaacatttctgttcacactgcaaaattctaatatatgtggtttatgaagcagaagtgagagttatgaactgtgtgaaggtgctatgactggccaatgaattggtaagaaggacacagatccacacatcacaaagtatggtattacctaaagacaaaagtccttataggaggcagaggagccatccaagagtagagcatttgcagtacattccactagaactccccctgaactctacaggcccaagtcggatgctggtgatcctgcctatgccaagatcaggaaaccacaagtttttatatcttccctgtccccgcctttatactatctattgtatcacattgtatcacctttccaggaaaattcatgttaataattaatatttttctactttacatggaattctctttgttatcaaattaa

SEQ ID NO: 196592 - DNA, 530 bp, Homo sapiens
caaatgcacagtttctgaacatccctacattgattattttgacttatatttttcttcatactaactaagaatcaccttttcctacacatttatatttgtggtattgagtgaacatttctgttcacactgcaaaattctaatatatrtggtttatgaagcagaagtgagagttatgaactgtgtgaaggtgctatgactggccaatgaattggtaagaaggacacagatccacacatcacaaagtatggtattacctaaagacaaaagtccttataggaggcagaggagccatccaagagtagagcatttgcagtacattccactagaactccccctgaactctacaggcccaagtcggatgctggtgatcctgcctatgccaagatcaggaaaccacaagtttttatatcttccctgtccccgcctttatactatctattgtatcacattgtatcacctttccaggaaaattcatgttaataattaatatttttctactttacatggaattctctttgttatcaaattaa

SEQ ID NO: 196593 - DNA, 496 bp, Homo sapiens
tgagttacacgtggctctgtaaatgtataaacacatctaagtgaggcaaagtaattggtctaagaccactcaggtaataaatggtggaaccaaaataaaatggtgttcaattttactgcaaatataacaaagacataaaagaactcgtaattacaataygattatttaaaataaaatacaataataaaataaagaatctcaaacctctctcttggaggatctgattccataggtttagcacagaacctgggaatctgaatgtaaaagaaacacattttattatcatctgaaaagtttgggacacacgtttacaaaattgttttattttatcatcttattgtgagttgaggaagtagcaaataaactcctaaaggaaattaaatactgtgtttactttagtgacatttagcctacagaagaactgttcttacgttatcaaagtcagatttaaagtaatcaattactcaaatacttttcttactagatactgtgacaa

SEQ ID NO: 196594 - DNA, 496 bp, Homo sapiens
tgagttacacgtggctctgtaaatgtataaacacatctaagtgaggcaaagtaattggtctaagaccactcaggtaataaatggtggaaccaaaataaaatggtgttcaattttactgcaaatataacaaagacataaaagaactcgtaattacaatatgattatttaaaataaaatacaataataaaataaagaatctcaaacctctctcttggaggatctgattccataggtttagcacagaacctgggaatctgaatgtaaaagaarcacattttattatcatctgaaaagtttgggacacacgtttacaaaattgttttattttatcatcttattgtgagttgaggaagtagcaaataaactcctaaaggaaattaaatactgtgtttactttagtgacatttagcctacagaagaactgttcttacgttatcaaagtcagatttaaagtaatcaattactcaaatacttttcttactagatactgtgacaa

SEQ ID NO: 196595 - DNA, 496 bp, Homo sapiens
tgagttacacgtggctctgtaaatgtataaacacatctaagtgaggcaaagtaattggtctaagaccactcaggtaataaatggtggaaccaaaataaaatggtgttcaattttactgcaaatataacaaagacataaaagaactcgtaattacaatatgattatttaaaataaaatacaataataaaataaagaatctcaaacctctctcttggaggatctgattccataggtttagcacagaacctgggaatctgaatgtaaaagaaacacattttattatcatctgaaaagtttgggacacacgtttacaaaattgttttattttatcatcttattgtgagttgaggaagtagcaaataaactcctaaaggaaattaaataytgtgtttactttagtgacatttagcctacagaagaactgttcttacgttatcaaagtcagatttaaagtaatcaattactcaaatacttttcttactagatactgtgacaa

SEQ ID NO: 196596 - DNA, 614 bp, Homo sapiens
ttgcataatacatatttttctattattaacataatgaacttatttaagttaaagtcttacatagcataatacagttgaatcatatttttaaatcaaaacttgcaatctctgcttttctgattggattatttaatctattcacttttaattttcttattttgggagttagatttatgtcttggactttacttttaaatttttatgtctcatatgttatattttttgttcttctatttctactttactgctttcatttgcactaggagaatatattttaatgtggcgttttaattcctttaatgtgtttaaagktatatttcttatgacttcttttctggttgttatagagcttaccatagaagtcctagactcatactcatctaacttaattcttgtctgatatagatatattattcatataaagttatattttactatccttccatttgttccattatttttatacacattacatctttaaatgttattaagccaaaaacgtattattataacaattacttcatagaagtttgtcttttaaagaagctgacattttttaaaaaatttaaataagtatgtatttatagcttttgtaatattaactttcttactta

SEQ ID NO: 196597 - DNA, 534 bp, Homo sapiens
gaattcttgtcattgcagaaaatcaatgttgtgttctgatttggggcattctagcttgcaartagaggcatcttagctgacaccaaatgctccctaaggatattccaaagataaaattgatgtcttcattttgaagggcattgataaagttttacatttgtctttattgtagtgaagatttttaaatttaaaaaataatgtctgaattgattgattaattgctttatgcaggcagcaacacagggtgaaatacaaataggtgattgacaagtgctgattattcaagagaagtagataatccatttatggtgattatgtctagtttttcttcgttttttaagtagctattttttgaatgcagagtttgtaattactccaaatgaagtcaagacccaagacataacaaaaagattagagggtctgaagaaaactggatggttttgacacatgtgaacttatatcctagtctattttcatattccaaaagcgaaccaaattgacattttggcttttcaagggtttttagattataat

SEQ ID NO: 196598 - DNA, 533 bp, Homo sapiens
ttttcctggggtctttcaaaagcatcaattcaaaaggcctaaatcaacagcaacaataacaacaacaaaaatgcttcactttctattgaagggagaagctcagctaaaaggcctgttcccatagagggttccttttctctttacataggtagaagccgcttaaaagcaagaagtcagaaggaaaccccaactgccaggagaatctcagaaacagccataaaaagcgttgtcagagttcacytataaactaaatacttttatatctgtgctttgtgtctgattgttacaaatatgccagttatttaagtagtgccatctaatataaaatacaatctttgtaggtgataatattttagtattataagtgttataatttgttgcaatttttagtgcttaaagctattggcaactcattaatataaaagctagtcacacaggcctgcatttaatattagacaaaaagttataaaatacatattttatctatcaaaacactgtgtaaagtggacatccctaggcatacgagatctata

SEQ ID NO: 196599 - DNA, 203 bp, Homo sapiens
tttacctgcatcatcccacattacaaattytccaccctggcaaagacatccacccctgcctatctccaccatttcctttggaccaataagccttctacttactttacaacttccctacctatcttggtgaaactgccactgcagaattataagtaatgagagaaacctaacgtgactgactccatcttgcttttaacccacag

SEQ ID NO: 196600 - DNA, 584 bp, Homo sapiens
acccacaggctaaggtttttctgtttgtttgtttgtttgtttttgcttattctagcatggaggccaagaaaactatgagaagaatttagttgatagttaaactttgagacaaggaaaactgataccccttcttgttcagagattgacgccacattcacaagaaaaggtagaattatggtagaggcttgaactttgctaaagaataggcataaacaatgacctgccactgcctatcttgtttttctgtaagttgcttactgtccccagaggtgcataaccagaggttgcaaaatttataacttccccaactactcctatagataacatcactattgtaaaacctaaagaactggtcttggaaatatttttcagagttggcatttcagcagaccaagagatgcctctagtcctaagacccccctcccaggaactaactcagttgcatgaagacagtttagatacccctgtggtttcatccctggccctttgatggtttcagttccctaaccccctgcccaccaaagtayccttaaaaactctagcctctgaattcttggagagtcagatttgagaaatttctccca

SEQ ID NO: 196601 - DNA, 404 bp, Homo sapiens
ctgagttctccccacacctctcttcccactccttctctgtctccgtggctcaattctttcctcctctcactcacatttaggcatccctgaagtttctctctggggctgacttctcttttctccttcaaatgatgtcattaaaatacctcttacagctttaaatatcacttccttgcagatgccctatggctccgaccacctcgggagtcagtgtcttaagctcaaaactgcwactcagcactcagatcatagatgctataggtctctgaaaagcctatgggtgactcatacgtccgatgggaggaactgcgactggcagaagcagaaggtgcaacctagcctggcaaagggaactgggtgttccagccctctaagcagggcctgcaaaccaaacctgcataagg

SEQ ID NO: 196602 - DNA, 404 bp, Homo sapiens
ctgagttctccccacacctctcttcccactccttctctgtctccgtggctcaattctttcctcctctcactcacatttaggcatccctgaagtttctctctggggctgacttctcttttctccttcaaatgatgtcattaaaatacctcttacagctttaaatatcacttccttgcagatgccctatggctccgaccacctcgggagtcagtgtcttaagctcaaaactgcamctcagcactcagatcatagatgctataggtctctgaaaagcctatgggtgactcatacgtccgatgggaggaactgcgactggcagaagcagaaggtgcaacctagcctggcaaagggaactgggtgttccagccctctaagcagggcctgcaaaccaaacctgcataagg

SEQ ID NO: 196603 - DNA, 404 bp, Homo sapiens
ctgagttctccccacacctctcttcccactccttctctgtctccgtggctcaattctttcctcctctcactcacatttaggcatccctgaagtttctctctggggctgacttctcttttctccttcaaatgatgtcattaaaatacctcttacagctttaaatatcacttccttgcagatgccctatggctccgaccacctcgggagtcagtgtcttaagctcaaaactgcaactcagcactcagatcatagatgctataggtctctgaaaagcctatgggtgactcatacgtccgatgggaggaactgsgactggcagaagcagaaggtgcaacctagcctggcaaagggaactgggtgttccagccctctaagcagggcctgcaaaccaaacctgcataagg

SEQ ID NO: 196604 - DNA, 555 bp, Homo sapiens
gacccatgaatggagaggctacagaaacaagggaggatgctacaaatgggccccatggcatggggtccctctcatcagtgtgaatctgactactratgcagctaaatgtttgtcctgtcaccagcagaggctgatgctgagtctttgatatggtaccagcccttaagaagaccaaccagccatgtggtggcaggatgattacaataggcccctccacctaacagggaattgtcacctaattcatataggggtttgactaacctgcccattgtgcttcctccagctctccatgcaaagtcttaaagaataccaggtttaatggcatagaatcttgaacaatattgattcagaccaaggaatacattttatgacaaagaaggtgtgtgaatatgtaactaccatataccacatcacctggaagataccaacatacagaacaatgaaatcatttttaaagacttagagtaagtgccagattggggacaacacctgcagaactggggctctttcctcgcagaatgcaatatatacaatgaaccaagggtcatgccgggt

SEQ ID NO: 196605 - DNA, 566 bp, Homo sapiens
aatggacccatgaatggagaggctacagaaacaagggaggatgctacaaatgggccccatggcatggggtccctctcatcagtgtgaatctgactactgatgcagctaaatgtttgtcctgtcaccagcagaggctgatgctgagtctttgatatggtaccagcccttaagaagaccaaccagccatgtggtggcaggatgattacaataggcccctccacctaacagggaattgtcacctaattcatataggggtttgactaacctgcccattgtgcttcctccagctmtccatgcaaagtcttaaagaataccaggtttaatggcatagaatcttgaacaatattgattcagaccaaggaatacattttatgacaaagaaggtgtgtgaatatgtaactaccatataccacatcacctggaagataccaacatacagaacaatgaaatcatttttaaagacttagagtaagtgccagattggggacaacacctgcagaactggggctctttcctcgcagaatgcaatatatacaatgaaccaagggtcatgccgggtatagtgt

SEQ ID NO: 196606 - DNA, 571 bp, Homo sapiens
cggtgcttgggcaatggacccatgaatggagaggctacagaaacaagggaggatgctacaaatgggccccatggcatggggtccctctcatcagtgtgaatctgactactgatgcagctaaatgtttgtcctgtcaccagcagaggctgatgctgagtctttgatatggtaccagcccttaagaagaccaaccagccatgtggtggcaggatgattacaataggcccctccacctaacagggaattgtcacctaattcatataggggtttgactaacctgcccattgtgcttcctccagctctccatgcaaagtcttaaagaataccaggtttaatggcatagaatcttgaacaatattgattcagaccaaggaatacattttatgacaaagaaggtgtgtgaatatgtaactaccatataccacatcacctggaagwtaccaacatacagaacaatgaaatcatttttaaagacttagagtaagtgccagattggggacaacacctgcagaactggggctctttcctcgcagaatgcaatatatacaatgaaccaagggtcatgccgggt

SEQ ID NO: 196607 - DNA, 600 bp, Homo sapiens
agatctcttccatgccagtcctttatactcatacrcactgccctcccttctaccacccttggtgcctgttaacaactaatctgttctccatctgcgtacctttgtcactttgaagatgtcacgtagatggaatcatgcaacatgtggcctgttgagatcatctgtcttcgctcagcataatatatgctctttcattttatttctgagtagtattttatgctatggatgtatcacattttatttagacatccatacactgaaagatatttgggttgtttctgattttcactattacaaatcgggcttctatgaatcttcaaatttgtgttgatttatatttcaaagggtcactatggctgctttgtgggtagtagactgcaggggtaagagtggatgcagggagtgaggagctactgccatagtccaggcagacatgacaatggattcaaccaactggagaggtgaaggatgtgggacaggctcttgggttgaatatgaggcacaaaagaaagaaaggagtcaatgacaactttgtgaatttgaactaccaggtgaaaggtagtctcatttactgagatgagcctgactgtgggaaggaga

SEQ ID NO: 196608 - DNA, 596 bp, Homo sapiens
ctgtagtggtttagaaccaaacctgcaatatttcttaggtatgccaacatcctattaataatagtttgcttatatgctacactcctctcagggctcacatgcactacacgtatttccctggctaaaaagggtcttgggggacagaagagtgtggaggctgaaattcaggccatgctttttgacaagcccaatgccctattagaagtttgggtccttgttcatctttgttatttttgttaataacaaacacactgaggcatttcatcttctccaaggtcactatatcagaaatggatttttttttcttttaactcatctgtatctgttacaactttaagcagaatgtgactcaagcactacrtttccatccacaagactgggtctgagttatttttgaacagctttatgatatgcttaggtaggcttataacttttctcctccaaataatacttttctttggaaaacaagccctgtggagaattccttccatcaagttgcttcagtttaacctatttctagaggactagtacatgcagaattggcaactacaggggatgaaaagttcaaaaagtaggtcctacaagatgtaacaaat

SEQ ID NO: 196609 - DNA, 596 bp, Homo sapiens
ctgtagtggtttagaaccaaacctgcaatatttcttaggtatgccaacatcctattaataatagtttgcttatatgctacactcctctcagggctcacatgcactacacgtatttccctggctaaaaagggtcttgggggacagaagagtgtggaggctgaaattcaggccatgctttttgacaagcccaatgccctattagaagtttgggtccttgttcatctttgttatttttgttaataacaaacacactgaggcatttcatcttctccaaggtcactatatcagaaatggatttttttttcttttaactcatctgtatctgttacaactttaagcagaatgtgactcaagcactacatttccatccacaagactgggtctgagttatttttgaacagctttatgatatgcttaggtaggcttataacttttctcctccaaataatacttttctttggaaaacaagccctgtggaraattccttccatcaagttgcttcagtttaacctatttctagaggactagtacatgcagaattggcaactacaggggatgaaaagttcaaaaagtaggtcctacaagatgtaacaaat

SEQ ID NO: 196610 - DNA, 508 bp, Homo sapiens
ttgcttcagtttaacctatttctagaggactagtacatgcagaattggcaactacaggggatgaaaagttcaaaaagtaggtcctacaagatgtaacaaataattttctaaacatcaaaaaaagagaaagaatccgaagacaaacctgaaattgaagatgttggttctgctgaggaagaagaagaaaagaaggatggtgacaagmagaagaagaagaagattaggaaaagtacattgatcaagaagaactcaacaaaacaaagcccatctggaccagaaatccagatgatattactaatgaggagtacagagaattctacaagagcttgactaatgactgggaagatcacttgtcagtgaagcatttttcagttgaaggacagttggaatacagagcccttctattttcccatgatgtgctccttttgacctgtttgaaaacagaaagaaaaagaacaatatcaaattgtatgtatgcagagttttcatcacggataactgtgaggag

SEQ ID NO: 196611 - DNA, 405 bp, Homo sapiens
tttggcacatgcacaaccctgtgagtaactgtgttcttaaaattaatgccttacgcacctttctgccctaccctaatcttggccttggaagggagatgagaggaacttcaaagtgrtcaatttataaggctcttcatttttgctataatacttatgatttgtgcacttttttgtgtacatgtgttaatgtgttagatttcaattttttaaagaaatgcttttcaaaatcaggacaaagaatgaatagtaataaaaattagaaacattttgaactcaaaaataataaaagttgcatttacaaaataagtgggctgaagctaagacaatgttttaatgcatatgttttaaaagtagaaagacaaataaaagtgaactaagcgtctacgttaaagaacagcatattca

SEQ ID NO: 196612 - DNA, 546 bp, Homo sapiens
ctaggccagtctaatcttttcacatttttctgcctgctttatattctagctgcaytggtagctgattagatggtgcccacccagattaagggtgggtctgccattcccagtccactcactcaaatgttaatctcctttggcaacaccctcgcagacacacccaggatcaatattttgcatccttcaagtcaatcaagtttacactcagtattaaccatcacatcgagttattaaatgtatctctaagatgtgtcttaaagcaaaagtgaccaaaatcagagcaataaaccttaatcttattgaaagtatttctgagatatgttacagagcaaaagtgcctgaaatgagaccaatagaccttaatcttttattggtgctgtgaatctttaattaaaaatcaatcttagccctcatttgtaaagctcccagaagtaatttccccttgacaactactgtagttctgagggaaaaaattgagtcttatcttcaattctaacatatctttgcatagcaatctgaaaagtcagatatttaatcgtcatgaat

SEQ ID NO: 196613 - DNA, 546 bp, Homo sapiens
ctaggccagtctaatcttttcacatttttctgcctgctttatattctagctgcactggtagctgattagatggtgcccacccagattaagggtgggtctgccattcccagtccactcactcaaatgttaatctcctttggcaacaccctcgcagacacacccaggatcaatattttgcatccttcaagtcaatcaagtttacactcagtattaaccatcacatcragttattaaatgtatctctaagatgtgtcttaaagcaaaagtgaccaaaatcagagcaataaaccttaatcttattgaaagtatttctgagatatgttacagagcaaaagtgcctgaaatgagaccaatagaccttaatcttttattggtgctgtgaatctttaattaaaaatcaatcttagccctcatttgtaaagctcccagaagtaatttccccttgacaactactgtagttctgagggaaaaaattgagtcttatcttcaattctaacatatctttgcatagcaatctgaaaagtcagatatttaatcgtcatgaat

SEQ ID NO: 196614 - DNA, 582 bp, Homo sapiens
attgtggtagagaaattcaggcagagaaaatgtgagcaaagtcacaaataagtggggaaaaagggaarggagaatgatgcagacacactgaagacattgattcataaagaggaagacaatgacaattgaaagaatttgcaatccaggacctggtgttctcattaaagaagaatgtctgtattggtgacagcccaaataaaaggaggtctgaagcgtgagaacgtctagggatgggaaagggttaataagaaataaacaagaggtgtgacctgtagatatgagtttaggcctcatgaatttttagtgagccaagaaacatgggtatgtgaatttttctcaatcatctggggctaacaaataattttattttttttatttatttttatttatttatatatatatatttttgagatagagtctcactctgtctcccaggttggagtacagtggcgtgatctcgactcactgcaacctccgcctcctgggtttgagcaattctctgcctcagcctcctgaagattacaggtgtccgccacctatgcccggctaattttgtttgtatttttaatagagacggggctt

SEQ ID NO: 196615 - DNA, 568 bp, Homo sapiens
aataactgccttaaaacatttatcaaataactctagcatctctgtcttctcaatgttgcatctatttattatctttattttccattcgtttgagatctttctgattctttgaataatgagcgatttttaaattaatcctagacattctgggtaccatattatcaattctggatcttatttaaaccttctagtttagctggctttctctgataccactctgacagktggaaaggggatcttactacattacttccaggcaaaggtaaaagctcaggttctcaacttggccttcattgataattaagacagggggctctccctctttgctcctagccagaagtggaaattttagttactcactagacctccactgagacctccctggctgggagggttaggagtgtcttactacctctccaaacaaccttcattgataacacaagggataaggaagttgcttcattatttccggttggtagtggaagccctgactttccactacacctcttatgacaacaccccagagaggaggagaaagaaagtgttgggggaggtccaggttccacag

SEQ ID NO: 196616 - DNA, 568 bp, Homo sapiens
aataactgccttaaaacatttatcaaataactctagcatctctgtcttctcaatgttgcatctatttattatctttattttccattcgtttgagatctttctgattctttgaataatgagcgatttttaaattaatcctagacattctgggtaccatattatcaattctggatcttatttaaaccttctagtttagctggctttctctgataccactctgacaggtggaaaggggatcttactacattacttccaggcaaaggtaaaagctcaggttctcaacttggccttcattgataattaagacagggggctctccctctttgctcctagccagaagtggaaattttagttactcactagacctccactgagacctccctggctgggagggttaggagtgtcttactacctctccaaacaaccttcattgataacacaagggataaggaagttgcttcattatttcyggttggtagtggaagccctgactttccactacacctcttatgacaacaccccagagaggaggagaaagaaagtgttgggggaggtccaggttccacag

SEQ ID NO: 196617 - DNA, 594 bp, Homo sapiens
actgtgttaaaacagatagatgcctcttgctcataagagtggggaataatcacatactgttcttggatttaaaattttgaatccatatcacttctttattcagctaacaaagcgtgagcacttataayacagtatgttaaacagacattatatgacatgctctgtggtttaggggtctgatatggtttagctgtgtccccaccccatattcatcttgaattttagctctcataatcaccacgtgttgtgggaggggcccaatggagggtaattgaatcatgaggatgggtttttcccatgctgttctcatgataatgaataagtctcacgagatgtgatggctttataaagggaagttccactgcacatgctctcttgcctgctgccatgtaagatatgcctttgctcttccttcaccttccaccatgattgtgaggcttccccagccatgtgaaactttgagtccactaaacctcttcttctttataaattacaccgtctcatgtatttcttcatagcagtatgaaaatggactaataattttaggatgtaagtgctgttttcagtgacaccttctgcatattcttttgctat

SEQ ID NO: 196618 - DNA, 567 bp, Homo sapiens
tttgccttttaaccagggtttgctgactgcagtacctgaaaaagacagttctggcatccaattccaccttccaactctggcaactactgattgaaaccaggaaggaaactgacccagggccagccaatttgagtcaaacactaaggagattctatgccttaagaaatttaatcaggagacatagaaggtattawcagagtggaggaccctacacccaaaatgtaaggatgcagaaagcagggccagagaggagccatccacataggctatgagaaaagaaaactgaggaagcctataagaagtgggagagaaagaaacagataaaccagagacaagccaagaaaagtagaaaagagggagaaggatgtagaaaagaatctggatcactggctttccagttcagtctccaagaaacatggagtaacttcattatctgtcctgaagcagccacgtattttgaaaaaataaccaagaacaccaagttgggatatgcttcatactggaggccctagatttcattctggcaatttagaaaccatccatcccaaacaatcccacagccatttg

SEQ ID NO: 196619 - DNA, 567 bp, Homo sapiens
tttgccttttaaccagggtttgctgactgcagtacctgaaaaagacagttctggcatccaattccaccttccaactctggcaactactgattgaaaccaggaaggaaactgacccagggccagccaatttgagtcaaacactaaggagattctatgccttaagaaatttaatcaggagacatagaaggtattatcagagtggaggaccctacacccaaaatgtaaggwtgcagaaagcagggccagagaggagccatccacataggctatgagaaaagaaaactgaggaagcctataagaagtgggagagaaagaaacagataaaccagagacaagccaagaaaagtagaaaagagggagaaggatgtagaaaagaatctggatcactggctttccagttcagtctccaagaaacatggagtaacttcattatctgtcctgaagcagccacgtattttgaaaaaataaccaagaacaccaagttgggatatgcttcatactggaggccctagatttcattctggcaatttagaaaccatccatcccaaacaatcccacagccatttg

SEQ ID NO: 196620 - DNA, 567 bp, Homo sapiens
tttgccttttaaccagggtttgctgactgcagtacctgaaaaagacagttctggcatccaattccaccttccaactctggcaactactgattgaaaccaggaaggaaactgacccagggccagccaatttgagtcaaacactaaggagattctatgccttaagaaatttaatcaggagacatagaaggtattatcagagtggaggaccctacacccaaaatgtaaggatgcagaaagcagggccagagaggagccatccacataggctatgagaaaagaaaactgaggaagcytataagaagtgggagagaaagaaacagataaaccagagacaagccaagaaaagtagaaaagagggagaaggatgtagaaaagaatctggatcactggctttccagttcagtctccaagaaacatggagtaacttcattatctgtcctgaagcagccacgtattttgaaaaaataaccaagaacaccaagttgggatatgcttcatactggaggccctagatttcattctggcaatttagaaaccatccatcccaaacaatcccacagccatttg

SEQ ID NO: 196621 - DNA, 567 bp, Homo sapiens
tttgccttttaaccagggtttgctgactgcagtacctgaaaaagacagttctggcatccaattccaccttccaactctggcaactactgattgaaaccaggaaggaaactgacccagggccagccaatttgagtcaaacactaaggagattctatgccttaagaaatttaatcaggagacatagaaggtattatcagagtggaggaccctacacccaaaatgtaaggatgcagaaagcagggccagagaggagccatccacataggctatgagaaaagaaaactgaggaagcctataagaagtgggagagaaagaaacagataaaccagagacaagycaagaaaagtagaaaagagggagaaggatgtagaaaagaatctggatcactggctttccagttcagtctccaagaaacatggagtaacttcattatctgtcctgaagcagccacgtattttgaaaaaataaccaagaacaccaagttgggatatgcttcatactggaggccctagatttcattctggcaatttagaaaccatccatcccaaacaatcccacagccatttg

SEQ ID NO: 196622 - DNA, 343 bp, Homo sapiens
cttatatttgccccacttgttttatcctcgagtagattctcctatggtagcatctgcattatgtttataactctatttcattaaattagtcaccaacttgtagtattcttccatttaatgaacatcatatatactctctcacaatgccaccaccaaacacacatactaaatttagttactccctyattacttacattatttagaaaatcttttgtatttagttttcctgtcactcacttctgccttaaccgaagagctctttgagcgaaatcatatttctgcaatgttcagataaacattctgtgagataaaacctttagcctcaataaggtggaatcacatt

SEQ ID NO: 196623 - DNA, 343 bp, Homo sapiens
cttatatttgccccacttgttttatcctcgagtagattctcctatggtagcatctgcattatgtttataactctatttcattaaattagtcaccaacttgtagtattcttccatttaatgaacatcatatatactctctcacaatgccaccaccaaacacacatactaaatttagttactcccttattacttacattatttagaaaatcttttgtatttagttttcctgtcactcacttctgccttaaycgaagagctctttgagcgaaatcatatttctgcaatgttcagataaacattctgtgagataaaacctttagcctcaataaggtggaatcacatt

SEQ ID NO: 196624 - DNA, 575 bp, Homo sapiens
tttaaggatacatattaactttaccttcagtatgtgcaagacaatgattctgcgtggggttttttctctctttggtctctaacactcactcaggtgggttgttccaaattctgaactgagacggcgctaagaaacataattatagtcacaaactgtattaggcaattctcgcattgctatgaagaaatacctgagactgggtaatttatttaaaaagaagtttagttagctcagagttccacaggctgtacaggaagcatagtgacttctgctttgggggggcctcagtgagtttccaatcatggtggaaggcaaagaaggagcagtcgtcttacatggtaggagccaggagcaagatagagagccgagaggtgctacacacttttaaaccatcagatctccccagaactcactcagtatcacaagaacagcaccaaagggacagtgctaaactattcttaaaggatcasccccacgatccagtcacctcccgctgggtcctacctccaacattagggattacatttcaacatgaaatttgggtggggacacagatccaagctatatcacaagct

SEQ ID NO: 196625 - DNA, 558 bp, Homo sapiens
ttttaaaagaaagtatatagttcttttttaatggcagkttaatcacaaattacagacatagaaaaattttgaaaaatctaatttcagctgctcatcccaattattctgcaaactttatttgtagcaggatttgacccatctcattttaaattattcaagcacctcatctcatcactttttaaaaattgtttctcattttcatgcccttacctgcagcaaaatttataatctggagctcaaatttccattttcttggtgttaggccattactctttactatacccggaagtctttttaacaccagggaaacataaatgtaatagagcaatttgggagaaaacagcaggtcaccatatggtaacaaatggcagaggatagttataaaccttttctacatatttttcctttatcaaataaataataataaacactgtgttcatctcactacattcctactcaaaattttcaattgctctctattgcccctgtgataaaagtacaatttactctgcttgggatttaaggcacattgcaaacttattcttaattaacatctct

SEQ ID NO: 196626 - DNA, 558 bp, Homo sapiens
ttttaaaagaaagtatatagttcttttttaatggcaggttaatcacaaattacagacatagaaaaattttgaaaaatctaatttcagctgctcatcccaattattctgcaaactttatttgtagcaggatttgacccatctcattttaaattattcaagcacctcatctcatcactttttaaaaattgtttctcattttcatgcccttacctgcagcaaaatttataatctggagctcaaatttccattttcttggtgttaggccrttactctttactatacccggaagtctttttaacaccagggaaacataaatgtaatagagcaatttgggagaaaacagcaggtcaccatatggtaacaaatggcagaggatagttataaaccttttctacatatttttcctttatcaaataaataataataaacactgtgttcatctcactacattcctactcaaaattttcaattgctctctattgcccctgtgataaaagtacaatttactctgcttgggatttaaggcacattgcaaacttattcttaattaacatctct

SEQ ID NO: 196627 - DNA, 603 bp, Homo sapiens
tgtgttttctgactgctctaccaactgcccgtttccccatctctttctttctccttgatcctccctattccctgagatacaacaatatcgtaagcaggccagttaataaccctacagtggcttctaggttttcaaataaaaggaagagttacagatctctcacttgaaatcaaaagctagaaatgattaagttaaatgaggaagatatttcaaaagcaaaataggccgaaagctaagctcttgcagcaaatacttagccaagttatgaatgtaaaggaaaagttsttgaagaaaattaaaagtgctactgaagtgaatacagaaatgataagaaagtgaaatagcctttttgctgagttggagaaagttttagtagtctggataaaagatcaaaacaacagcagtattcccttaagccaaaacctaatccagagtaaggccctaactctattccattctatgaaggccgagagaggtgaagaagctgaaaaggaaaagttgagagttagcagagatcagtgcatgagatttaagaaaagaagctgactccataacaaaaaagtgtaaggtaaagcaccaagtgctgatagagaagctgcagca

SEQ ID NO: 196628 - DNA, 515 bp, Homo sapiens
atgaaattgaattgagtgacctaagaggacagtatcaactttatatcatttattatctttgtagtttctgactgaacaaaagtgccatttataattatctccttctaattgttatagttcaaaaaccaaaaatggaaaatctatatatgacaaatgaaaactatcctataggcatgagtgtatctaataatttatgtgttcatttttcaatcatctttgctgcctctttacaaaaaaaattcatacctccataatgaatatttcatcttgaatatttatcatggaatgtgttcttttaagtttttaacattacactttttattggagctcttaaatgtagacgtagtgtatcaagtactccagcaaagcaatgtattgttttctgtccttaattttcrtacattattacctgaaagactgaattatttcattagttttgaataatttgaaaaaaatagttcatagacttctaaaatttaaactttttaatttttcataaatagttttctccaggc

SEQ ID NO: 196629 - DNA, 522 bp, Homo sapiens
ccaataatttggccatgttatcatatatggaagtgcccaaaataaatagaccagaaaggcactacgttttttttgaagaaattgtacagacaaaaccatctcaagtgtgattttcaaaaacctgtgtttattcaaacttcaaaacaattcctcagaccctaaaccttctcagggagaaagtagactgaagaagtcctctcatgtccattccaggtatttccatggtgagaaagtcacaaggaagaaacttccagagagcataatcagaggccatgggaacgtaatggagagggaggttttcccaagaaacagaaccggggtayccagggaagctaactcaggaacttagccccctagctcccgagataccctgaacaactcttcacagaagtgggaaatgagtctgggatccacagagccaggaagatagatagaagttagttcactaggaagttagatagaagagaatagggcgcaaagagaggcaacataaggaagataggcatagcagacaagaagaaa

SEQ ID NO: 196630 - DNA, 570 bp, Homo sapiens
gcgtccagggcattccctggacttgggctagcctaggttcactgaggcaaggtcttccttggcggtcaaaagccacctagtatccaaggaaaatgagaatcagatacgcacgtgataatcctggactctggaagtgggctcagcctctgcgttcttacctgtttttgttttccagttctgcaataagctgtctttgttgtttgttggcatcaaagttaaagctcaagtcagtgggaggacgagtctaaagtggggaagtsgggagaaagtttttttttttctgatccaaatatacccagagttctagattgactgatttttaaaaaagatttttgacatataatttacatatcataaatccacccgttttaagtatacaattcaatgagtcttagtaaatttaaacagttgtgcaaccaatcaccacagtccagttttagaacattttccatcaccgcaaaaaattccctcatgccagtttgtcaccagtcgccactcccacccccaacctcaggcagccatgcgtctgctttctgtctatagttctgccttttctagaaacttcatata

SEQ ID NO: 196631 - DNA, 573 bp, Homo sapiens
gaatagaagtcttcctataggccaggcctggtggctcacgcctgtaatcccaacactttgggagaccaaggcgggcggatcacctaaggtcgggagtacaagaccagcctggccaacatggcaaaaccccatctctactaaaaatacaaaaattagctgggcgtggtggcacacacctgtagtcccagctgctcaggaggctgaggcaagagaattgcttgaacccaggaggcagaggttgtagtgagcctctgcagtgatcacaccactgcaatgcagcctgggtgacagagtgagactccgtctcaaaaaaaaaaaaacaaaaaacctttcttggcctcagttccctttctaggtaccctctatatctctccttcccatttcaraaaaacttctttaaagggttatctgtagaaagaaacttcaatttctgttctgccatttcctttcaaacacacccagtcagactttcacctcctgttattttgccaaaactatttatgtcaagcacactggtgacttctaaaccacagaatccagtggtcagttttcagtagttaaccttacttgatc

SEQ ID NO: 196632 - DNA, 425 bp, Homo sapiens
caaactttcacactgcacacataaaatattttagttatgtaatgctaccacacatcagcatcttatgagaaatcttgagtctctttacttgaagcaccccctctccaatatacagtatgatacactgatgtgcagaatgtgattagtttattaatcatatgtgaaaatattagtagctacatatggccagaatagatttttctctctacaaatgtaagttagtgttgatagaatttgttatgcgatatttggttctttggtttcagtctcaatgctttcttcttggcatttcattgactctgtaaattaacctcagcatcaattttcttttaaattcaayagttattcaaattgatcgaaaattaaacttgtatgtagctagttatcacttgtgggttacactttaattgacggtttctgatgtc

SEQ ID NO: 196633 - DNA, 402 bp, Homo sapiens
gaattcaaggataaataaaatagggggtttcctcctcaagtaggaagacaagtcaataaatgtatgaaaattaaaatatatattacataataataaggctgaatggagtattatgggtaaataatgagaaattattcttgtctcaggaattgagtaaggcatacaaagagcttctagggctttgcagaataattaggcatttgacctttgcagaaaatgatcaactaaaaattccagacagagaaagtgacgtaacctaggrtagcaggtgcaaagggaagaggtggcaggtaggcatgttcagagaataagaaatactcctatgtggctagaacattgtggaatttagaaaaaaatgaaattttgtgagtactgggaaaaaatttactagaatatctttat

SEQ ID NO: 196634 - DNA, 385 bp, Homo sapiens
ttattacacattctatctacctctgkttttgaggaagagagcttagtgttacagagaattcatttccctctccaaactcccttcctcccttttgacacaaaagcagagaaaagctgcctgtcggttatcaaaagtatcttttccttcctgcctgcaattaagtgctacacacacaccaccccccaccccaataccccctcacagtccaactgcagaatcaccaatgactgaaactaaacactgatgctacttggtaaatgctggtcaattacatgaatctttcacaaagtagcaactattgtgtccatttactggggaaaacagaagctaagacatttgctcaaaggtcatccccttaaaagaacgtaataagcagagctaggat

SEQ ID NO: 196635 - DNA, 385 bp, Homo sapiens
ttattacacattctatctacctctggttttgwggaagagagcttagtgttacagagaattcatttccctctccaaactcccttcctcccttttgacacaaaagcagagaaaagctgcctgtcggttatcaaaagtatcttttccttcctgcctgcaattaagtgctacacacacaccaccccccaccccaataccccctcacagtccaactgcagaatcaccaatgactgaaactaaacactgatgctacttggtaaatgctggtcaattacatgaatctttcacaaagtagcaactattgtgtccatttactggggaaaacagaagctaagacatttgctcaaaggtcatccccttaaaagaacgtaataagcagagctaggat

SEQ ID NO: 196636 - DNA, 385 bp, Homo sapiens
ttattacacattctatctacctctggttttgaggaagagagcttagtgttacagagaattcatttccctctccaaactcccttcctcccttttgacacaaaagcagagaaaagctgcctgtcggttatcaaaagtatcttttccttcctgcctgcaattaagtgctacacacacaccaccccccaccccaataccccctcacagtccaactgcagaatcaccaatgactgaaactaaacactgatgctacttggtaaatgctggtcaattacatgaatctttcacaaagtagcaactattgtgtccatttactkgggaaaacagaagctaagacatttgctcaaaggtcatccccttaaaagaacgtaataagcagagctaggat

SEQ ID NO: 196637 - DNA, 385 bp, Homo sapiens
ttattacacattctatctacctctggttttgaggaagagagcttagtgttacagagaattcatttccctctccaaactcccttcctcccttttgacacaaaagcagagaaaagctgcctgtcggttatcaaaagtatcttttccttcctgcctgcaattaagtgctacacacacaccaccccccaccccaataccccctcacagtccaactgcagaatcaccaatgactgaaactaaacactgatgctacttggtaaatgctggtcaattacatgaatctttcacaaagtagcaactattgtgtccatttactggggaaaacagaagctaagacatttgctcaaaggtcatccccttaaaagaacktaataagcagagctaggat

SEQ ID NO: 196638 - DNA, 572 bp, Homo sapiens
tggaattgcccagtctgtttcactaagtcagtcaactgttaagatgtttttwaaatataattcatatttcatggtaaatctacttgcattttttcctagttggaacataagtggttttaaaactcataactaaataagaaagactgcttacacttttactcggttttaaatctccaaggccatcaaaccataacaagatattgacagtgaccacttccaaaaagtggcatactaaacaaaatacaaagtattggaaagagttattacctgaaattcaaacaaaacacaagttaaagtatttaaaaatcattaataagtttaattagtgtcacattatatgataccaattacaaagtatttacttactattcatatagtagaattttagggcaagtaggagaaaaaatgactttttaataaatttcatttatcaaatttacaccatattaatgaacggattgccaaattgtctaattttatacctatcaacacacataatttacaccacttcctcaaattagataccttatttcatatccaatgtatgaaatatttatgtttggggttgtaaa

SEQ ID NO: 196639 - DNA, 363 bp, Homo sapiens
aactgccaggagagtggtggcaggtcccccatcctcagctgggtgggcctggatagaacagcaaggcgagggcacatttccctggccattccctccaggcacagcygtgacctgttcattccaaatttgtggaagtatttccacacacacagaactgcaaatagcagtggacatggtgagaggcgtttgcacatgggataggcaggattttggaggcagagcctccagggcttgccgatgggttagctgcagggcttgagagggaacggagaatccaggatgatgtgttcaaatcggtccattcacctcttccgttccacgcctgtgctgggcactgggagagacagatgcacacaggagccc

SEQ ID NO: 196640 - DNA, 331 bp, Homo sapiens
ggaggtagcagtaagttgagatagagccactgtaccccagcctgggtgacagagactctgtacaaaaaaaaaataacacggaatmaaatcataattgcctggggaaggagcaaggaaaaggggagaaaaggattataaaggggcatgaggaaatgttctagggtgatgaatatgctcattacctggttacattcatgagaaaacttatcaaattacatattttaagatgtaccctttatagtatgtcaacattacaggtactctcacaaagctatcaacaaaaataggaaagaagcagcagcaagcaacaacagccataactactgcctgg

SEQ ID NO: 196641 - DNA, 436 bp, Homo sapiens
agattatttatgatgtgtaatacaatgcagatgctacataaatggtcgtgatactgtattctttagggaatratgacaagaacaaagtctgcacatgttcaatagaaacataaccgtccaatttattttctgaatattttccatctgctgttgctgaatctacagatgcagagctcctggatacgagagccaagtgtgctttgagagtagggtgggtgaggttgctaatgagtacaggggagcaggtgttgatcaggaggaccctgcactggggcatctggacgtcctgcctcaggacttgagactccagttggatggcacaggtagactcagcccaggtcaaagccgtccccttgaagtttctttttatcccaagctctttctggaccctggaattcggcatcccctaggccctgcgtggaaggacagatgaacc

SEQ ID NO: 196642 - DNA, 422 bp, Homo sapiens
gattatttatgatgtgtaatacaatgcagatgctacataaatggtcgtgatactgtattctttagggaatgatgacaagaacaaagtctgcacatgttcaatagaaayataaccgtccaatttattttctgaatattttccatctgctgttgctgaatctacagatgcagagctcctggatacgagagccaagtgtgctttgagagtagggtgggtgaggttgctaatgagtacaggggagcaggtgttgatcaggaggaccctgcactggggcatctggacgtcctgcctcaggacttgagactccagttggatggcacaggtagactcagcccaggtcaaagccgtccccttgaagtttctttttatcccaagctctttctggaccctggaattcggcatcccctaggccctgcgtggaa

SEQ ID NO: 196643 - DNA, 436 bp, Homo sapiens
agattatttatgatgtgtaatacaatgcagatgctacataaatggtcgtgatactgtattctttagggaatgatgacaagaacaaagtctgcacatgttcaatagaaacataaccgtccaatttattttctgaatattttccatctgctgttgctgaatcyacagatgcagagctcctggatacgagagccaagtgtgctttgagagtagggtgggtgaggttgctaatgagtacaggggagcaggtgttgatcaggaggaccctgcactggggcatctggacgtcctgcctcaggacttgagactccagttggatggcacaggtagactcagcccaggtcaaagccgtccccttgaagtttctttttatcccaagctctttctggaccctggaattcggcatcccctaggccctgcgtggaaggacagatgaacc

SEQ ID NO: 196644 - DNA, 436 bp, Homo sapiens
agattatttatgatgtgtaatacaatgcagatgctacataaatggtcgtgatactgtattctttagggaatgatgacaagaacaaagtctgcacatgttcaatagaaacataaccgtccaatttattttctgaatattttccatctgctgttgctgaatctacagatgcagagctcctggataygagagccaagtgtgctttgagagtagggtgggtgaggttgctaatgagtacaggggagcaggtgttgatcaggaggaccctgcactggggcatctggacgtcctgcctcaggacttgagactccagttggatggcacaggtagactcagcccaggtcaaagccgtccccttgaagtttctttttatcccaagctctttctggaccctggaattcggcatcccctaggccctgcgtggaaggacagatgaacc

SEQ ID NO: 196645 - DNA, 436 bp, Homo sapiens
agattatttatgatgtgtaatacaatgcagatgctacataaatggtcgtgatactgtattctttagggaatgatgacaagaacaaagtctgcacatgttcaatagaaacataaccgtccaatttattttctgaatattttccatctgctgttgctgaatctacagatgcagagctcctggatacgagagccaagtgtgctttgagagtagggtgggtgaggttgctaatgagtacaggggagcaggtgttgatcaggaggaccctgcactggggcatctggacgtmctgcctcaggacttgagactccagttggatggcacaggtagactcagcccaggtcaaagccgtccccttgaagtttctttttatcccaagctctttctggaccctggaattcggcatcccctaggccctgcgtggaaggacagatgaacc

SEQ ID NO: 196646 - DNA, 457 bp, Homo sapiens
gaacctcccgcctcgacctctcaaattgctgggattacaggtgtgagccaccacacccggcctaaatttcttatgtgccatgggactgcaaaacatcattattaggggcagctggatggaaggtataggaggatactatagtgccttttcaatatttctgtctaaaatctaaaatcatttcaacaggaaacatttatttcaaaacatgaaggtggttatccttccatgagtttgaagtacaaaggcaggctcacggtgtcgtcagaattcagaacgatggtcgtggggctgggggtgctgggaggggcygggcatggttggctttgtgatctggggtctggtgtgttccatctctgaatctctctcgagctgcactctttcttaatacattttcataagtttaaccaaaaataaaacgaggatgcgaagcttgcttgggttgttaagcctagggaaa

SEQ ID NO: 196647 - DNA, 392 bp, Homo sapiens
cagggcctaggggatgccaaattccaggggccagaaagagcttgggataaaawgaaacttcaaggggatggctttgacctgggctgagtctgcctgtgccatccaactggagtctcaagtcctgaggcaggacgtccagatgccccagtgcagggtcctcctgatcaacacctgctcccctgtactcattagcaacctcacccaccctactctcaaagcacacttggctctcgtatccaggagctctgcatctgtagattcagcaacagcagatggaaaatattcagaaaataaattggacggttatgtttctattgaacatgtgcagagtttgttcttgtcattattccctaaagaatccagtatcacgaccatttatgtagcatctgcat

SEQ ID NO: 196648 - DNA, 392 bp, Homo sapiens
cagggcctaggggatgccaaattccaggggccagaaagagcttgggataaaaagaaacttcaaggggayggctttgacctgggctgagtctgcctgtgccatccaactggagtctcaagtcctgaggcaggacgtccagatgccccagtgcagggtcctcctgatcaacacctgctcccctgtactcattagcaacctcacccaccctactctcaaagcacacttggctctcgtatccaggagctctgcatctgtagattcagcaacagcagatggaaaatattcagaaaataaattggacggttatgtttctattgaacatgtgcagagtttgttcttgtcattattccctaaagaatccagtatcacgaccatttatgtagcatctgcat

SEQ ID NO: 196649 - DNA, 164 bp, Homo sapiens
tggttctagatacaactgatactctgatacaacctgggtaaatgtggtcttgagtagtaaattatctgtgaagcttctccgaactttgccacataaatgagcctgctcttrttgtgaagtaaatcttactctaatctgtatgtgagtcagtgggaaataactga

SEQ ID NO: 196650 - DNA, 214 bp, Homo sapiens
tttgaacaccatacaagtatgtggtycttggtttatttggtcacttgtaatctctttaaaattttattttaaattaggaagtattttagaaatacaagaaagtcacacactatgagattaaacagatgttaacattttgccccattttcatcagactgtgcatgctttttttgggggggaataaaatgtcacagataccactaaagcccgtttc

SEQ ID NO: 196651 - DNA, 214 bp, Homo sapiens
tttgaacaccatacaagtatgtggttcttggtttatttggtcacttgtaatctctttaaaattttattttaaattaggaartattttagaaatacaagaaagtcacacactatgagattaaacagatgttaacattttgccccattttcatcagactgtgcatgctttttttgggggggaataaaatgtcacagataccactaaagcccgtttc

SEQ ID NO: 196652 - DNA, 214 bp, Homo sapiens
tttgaacaccatacaagtatgtggttcttggtttatttggtcacttgtaatctctttaaaattttattttaaattaggaagtattttagaaatacaagaaagtcacacactatgagattaaacagatgttaacrttttgccccattttcatcagactgtgcatgctttttttgggggggaataaaatgtcacagataccactaaagcccgtttc

SEQ ID NO: 196653 - DNA, 580 bp, Homo sapiens
gagagggcagaggtgactggagaggcttcctctgaaggagaggcttcctctgaaaaagaggcttcctcaggatgcacattcatttcatgacaagagccaagtccatcaggcacttcagcaccttgtccaaaatgtctgctgatagcaccatcctgtgtgcgatgctgccaagctcctgggctttggggcagccccaggaggagggcgtcatttcttgttctgagaagtggtggtcaggcccaggtgacaccaggagtccaggccctgactcctytgtgtctcagcttgaccccttgagaccacccccttccttggaggtttatgccagcggtgagctgacatcctacctcctatatcctggtgggtcacaaatactaactttaaaagaagcaacgacacccccaccagacacccactcctgtcaatatggaaatatggcccgggaacctcactgccgggaatactcaccgggttgtactcctcatatgccaggaggatgtggagtagttcccgctgcctaggaaacagagaaagggggctttggtttgttttgtgcagatgttgttaatttcactttgtc

SEQ ID NO: 196654 - DNA, 580 bp, Homo sapiens
gagagggcagaggtgactggagaggcttcctctgaaggagaggcttcctctgaaaaagaggcttcctcaggatgcacattcatttcatgacaagagccaagtccatcaggcacttcagcaccttgtccaaaatgtctgctgatagcaccatcctgtgtgcgatgctgccaagctcctgggctttggggcagccccaggaggagggcgtcatttcttgttctgagaagtggtggtcaggcccaggtgacaccaggagtccaggccctgactcctctgtgtctcagcttgaccccttgagaccacccccttccttggaggtttatgccagcggtgagctgacatcctacctcctatatcctggtgggtcacaaatactaactttaaaagaagcaacgacacccccaccagacacccactcctgtcaatatggaaatatggcccgggaacctcactgccgggaatactcaccgggttrtactcctcatatgccaggaggatgtggagtagttcccgctgcctaggaaacagagaaagggggctttggtttgttttgtgcagatgttgttaatttcactttgtc

SEQ ID NO: 196655 - DNA, 423 bp, Homo sapiens
aatgaccaccccaaagggagagtctcctctctcytttacaggtgagagaaccaaggcacgcaccaatgaggttgcacagagcaggccaggaaaacccaccctggggaagctgagccttcctgggcctgggcagcccatcacagtgacagggccagtgagggggccacacactccagcatctgccaccagaatccttcaccagacagcttttctctacctcttcccaccaaagacctgaatggggcttaggaacatggatgctgttgaggacacaagtcagggtctggcccgtggatttaggagcctcaatgggaccgatttgtaaactgcctggtaacatggaaaacaccagcagactccagaggccacggtgaaaccggggcagaaaggaaatccctgcatgaaaatgacggcagcccctgc

SEQ ID NO: 196656 - DNA, 394 bp, Homo sapiens
ggagagtctcctctctcttttacaggtgagagaaccaaggcacgcaccaatgaggttgcacagagcaggccaggaaaacccaccctggggaagctgagccttcctgggcctgggcagcccatcacagtgacagggccagtgagggggccacacactccagcatctgccaccagaatccttcaccagacagcttttctctasctcttcccaccaaagacctgaatggggcttaggaacatggatgctgttgaggacacaagtcagggtctggcccgtggatttaggagcctcaatgggaccgatttgtaaactgcctggtaacatggaaaacaccagcagactccagaggccacggtgaaaccggggcagaaaggaaatccctgcatgaaaatga

SEQ ID NO: 196657 - DNA, 534 bp, Homo sapiens
tgcattactgtcttcttcagtgtttagttgattttttgtagtaaaagkcttaaattctttccttgtttccttttgtgtacattctatagctattttccttttgattaccatggggattacacttattatcctaaagttataacactaatttgaatttatacaagtttaacattaataacataaaaaaattctgttcctttacagctctgtctcaccccttttggttgctgatgtcagaaaattacatctttatactttattagtatgaagtattactaattattactagtagtatgaagtattaaacataatctaataattcttataaatatattagtgtcttaaatcatgtagaaaacaaaaaggcagttacaagccattgttacaataatactagctttcataatttgcatatatttacctgtattgaaatctttatttcttcatagtccttcaagttactgtctaatgttctttgagttcaccttgctggactccgttgtttctgcagggtgggtctagtggtaacaaatc

SEQ ID NO: 196658 - DNA, 534 bp, Homo sapiens
tgcattactgtcttcttcagtgtttagttgattttttgtagtaaaagtcttaaattctttccttgtttccttttgtgtacattctatagctattttccttttgattaccatggggattacacttattatcctaaagttataacactaatttgaatttatacaagtttaacattaataacataaaaaaattctgttcctttacagctctgtctcaccccttttggttgctgatgtcagaaaattacatctttatactttattagtatgaagtattactaattattactagtagtatgaagtattaaacataatctaataattcttataaatatattagtgtcttaaatcatgtagaaaacaaaaaggcagttacaagccattgttacaataatactrgctttcataatttgcatatatttacctgtattgaaatctttatttcttcatagtccttcaagttactgtctaatgttctttgagttcaccttgctggactccgttgtttctgcagggtgggtctagtggtaacaaatc

SEQ ID NO: 196659 - DNA, 455 bp, Homo sapiens
cctgctgggttttggacacgcatgaggcctgtagcccctttgttttgggcatttttttttcttttggaactggagcatttactcaatccttgtacccccattgtatcttggaagtaactaacttctttctgattttacaggctcataggtggaagggacttgccttgtctcagatgagawtttggacttggacttttgagttaatgcaaatgagttaagacttagaggactgttgagaaggcatgattgtgtttttaaatgggagaaggatgtgagatttgagaggggccaagggtagaataatatggtttggctttgtgtttccactcaaatctcatgttgaattgtgatcccgagtgtttgaggtggggtctggtgggaggtgattggatcatggggatggtttctaatggtttagtgctgtctccctagtgctgtctaaagatagagttctc

SEQ ID NO: 196660 - DNA, 455 bp, Homo sapiens
cctgctgggttttggacacgcatgaggcctgtagcccctttgttttgggcatttttttttcttttggaactggagcatttactcaatccttgtacccccattgtatcttggaagtaactaacttctttctgattttacaggctcataggtggaagggacttgccttgtctcagatgagaatttggacttggacttttgagttaatgcaaatgagttaagacttagargactgttgagaaggcatgattgtgtttttaaatgggagaaggatgtgagatttgagaggggccaagggtagaataatatggtttggctttgtgtttccactcaaatctcatgttgaattgtgatcccgagtgtttgaggtggggtctggtgggaggtgattggatcatggggatggtttctaatggtttagtgctgtctccctagtgctgtctaaagatagagttctc

SEQ ID NO: 196661 - DNA, 455 bp, Homo sapiens
cctgctgggttttggacacgcatgaggcctgtagcccctttgttttgggcatttttttttcttttggaactggagcatttactcaatccttgtacccccattgtatcttggaagtaactaacttctttctgattttacaggctcataggtggaagggacttgccttgtctcagatgagaatttggacttggacttttgagttaatgcaaatgagttaagacttagaggactgttgagaaggcatgattgtgtttttaaatgggagaaggatgtgagatttgagaggggccargggtagaataatatggtttggctttgtgtttccactcaaatctcatgttgaattgtgatcccgagtgtttgaggtggggtctggtgggaggtgattggatcatggggatggtttctaatggtttagtgctgtctccctagtgctgtctaaagatagagttctc

SEQ ID NO: 196662 - DNA, 607 bp, Homo sapiens
tttcccacatttttctgtcttcttctgagtcctccaaactattccaacccttgcctgttacccagctccaaagttgcttccacgtttttgggtatctttacagcagcagcccactctactggtaccagcttacggtatcagtccattctcatgctgctatagggacatacccaagactgagtaatttataaaggaaagaggtttaattgactcacagttccatagggttgtggaggcctcaggaaacttacaatcwtggcagaaggggaagcaaacacatcctttttcacatggcagcagtagggagaagggcagagcaaacggtggtggggaaagccctttataaaaccatcagatctcatgagaactcactcactcccacaagaacagcatggaggtaactgcccccatgattcagttacctcccaccaggtccctcccatgtcatgtgggtattatgggaactacagttcaagttgagatttgggtgggaacacagccataccatatcagtttatatatttttaatcacatttggaagtgttttggcaattgtttcttcaaactttttcttcagctgagtgcagtggctcatgcctgtaatccc

SEQ ID NO: 196663 - DNA, 432 bp, Homo sapiens
atgagatatttaaattcaaatttttcttatttataatataatcatttgcatgtaagcaacatcaaaaactattttttaaagcaggttttgtacaggttatttcaacaagaactcaatttttcttgataaaaaaatgaaaatttaaaatgccacggaaatttttgtgttttcattatatcctttccatatcctccaatgcaaatgttataaatcagcctataagtggaggtctrttcttaaactaacatctcatttgtttgagctaaaagccaaatactttaactcatttacccatgaaaatttttgtttcacatgtaaagtaaaacaaacacaggggcaaacctttataacatttattatagaggagaaagagagtaggatagttaagaatatatttcttctgagagagatttcatctgtgtagtttttaga

SEQ ID NO: 196664 - DNA, 524 bp, Homo sapiens
tccaatatgccaaggtatgatgtttcagggtagcatattctgattcctgtcaattcattcactcattccatgtttattaagtctctgctgtgtgccatttatttagtgtctgctatgttctcagcacaaggaatacgagaatgatgaaaacaaatacaaattctggctcaygtggattttaatcagatataacctttttattctggatgattttcatagcattctacagacacattagaaaacatcttcctggaatctcagcacaatacaaattatatgagaaagacaattttatatatgtgtataaaatgtaactttcagaatatattgttttatttattccttgaagaaaacactcacacagatttgttctaagattctatttgtaacatggaattgttagttatgtacagacacttttaaacaagactttcctagtacattaccttaaggattcttagattcaagtatcaagagcgatttggggcttttattctcggctacatagcttcattatatctaat

SEQ ID NO: 196665 - DNA, 404 bp, Homo sapiens
aatattcactaattgtcatggaaatgcaaataaaaaacacaatgcaatattatctcaccctakttaaaatggctattatccaaaagacagaaaataacaaatgctagtgaggatataaagaaaggggaacactcgtacactgttgatgagaatgtaaattaatgcagccactgtggaaaacaatatagagcttcctccaaaaactaaaaatagaattaccatatgaacctacaatcctcctgctgggtatatatccaaaagaatgaaaatcggtatatcgaagagatggctgcactcccatgtttattgctgcgctactcacagtggccaaaatatggaatcaacctaattgcctatcaatggatgaatagatatagaaaatgtgaaacctagacatgaccaca

SEQ ID NO: 196666 - DNA, 560 bp, Homo sapiens
aatatattgtgagtacgttaatctctcccctctgaaaatgtgtttcaaaataaattaaaaatattttgtattattaatcccttgcaaatgtttgttgcacacycaccaagtaaatgacaatatcctgaccattgtacagaaaaatgataaacaagatttaattctcggccttaaagaacttgtaacctaaagtcaattttccatgtagtcacactgaaatctgccactgacaacctgcatactcacatagatctgtcgatgagtctcttaaatctttcatgtagtcatgaaaaactaccgcaggtatttctatccgttatctggagaaacccacatacaatatgctcagaaaaaaaagatacaattttgtctataatcaacactataaaagtgaaagaaccaaggagtaaaaggagtacagaggagtgagagctcacttttaggtggagtgagtgaggaaagcttcagagagagaatggaattgcagccagattttgaaaaatgttttcaattgcaatagtaaagaggtgaaaaattgacaaggtaaggaaaagtggtgg

SEQ ID NO: 196667 - DNA, 560 bp, Homo sapiens
aatatattgtgagtacgttaatctctcccctctgaaaatgtgtttcaaaataaattaaaaatattttgtattattaatcccttgcaaatgtttgttgcacacccaccaagtaaatgacaatatcctgaccattgtacagaaaaatgataaacaagatttaattctcggccttaaagaacttgtaacctaaagtcaattttccatgtagtcacactgaaatctgccactgacaacctgcatactcacatagatctgtcgatgagtctcttaaatcttycatgtagtcatgaaaaactaccgcaggtatttctatccgttatctggagaaacccacatacaatatgctcagaaaaaaaagatacaattttgtctataatcaacactataaaagtgaaagaaccaaggagtaaaaggagtacagaggagtgagagctcacttttaggtggagtgagtgaggaaagcttcagagagagaatggaattgcagccagattttgaaaaatgttttcaattgcaatagtaaagaggtgaaaaattgacaaggtaaggaaaagtggtgg

SEQ ID NO: 196668 - DNA, 595 bp, Homo sapiens
agtcacagtgactacttagatggtatcaggaaaaagccaacctagaatgtaaccagtgaaaacaaaatgctctactgtggggaaytgatgtattttacagcttcttggtgaaatgagaaagacagtaattgaatgacaagaggaaagagaagagacatgggcatctcaaggctgagcaaagagaaagttggagaataagaatgtgtcagactgtcattcaacactattgagcagagaaagttccagggctggagggaacctgtcggcactgctttctctgggtgatggcaggacatagagccctaggtggaatgctggccagattccagtccctccgctgagcatgcttatgcagggtacaacctgcacaaatgcacattgtgacaatgacagggttacagtagtatttagtaaccttcataggaataatctcaagaaacaaggttatttcatcacactaccaaaactcactgataatatgcctcaagacctgtgtgtattctgaccatggatttttgctcagcaaacctctagtcttaatatttcctaagaaacagggtaactgtgagcttctcaggcatatgcaacagtaaat

SEQ ID NO: 196669 - DNA, 608 bp, Homo sapiens
aacttcacagaggagcctgtaagtgccccttttggttttacccttcctggaaagttccttaatccaatgggatctgatttcatttcatgcttggcacttgcattgtatacccactcttgacttcaaccgtgctgtttaccttgacttgtctccatgacccagtatgctttgttgcttattcattcaacactactattatgtgttagctgaacctggcttgatttagccttttattccagtcagctggatccccactgaggtaatcattttggcaccttatccaatagctggctccctgccaatttcattttgtgaattgggtagacatcactgaaatttaactatccctgggtgaactgatgccactgagtttctgaacaagcaattgagatctcagtggtgaaggtgagtttccaggtgctgttcaccttggcagtcacttggcctcttcttttactatttcttgtctttttgtttttaaatttttaaagtattttatgggtttttttttttttttagggacagggtcttgctctgtcatccagcctgkagtgcagtgccatgatcatagctcactgtaaccttggacccccgggctcaagcaatcc

SEQ ID NO: 196670 - DNA, 606 bp, Homo sapiens
attgaattttttattttgctgatgaagcatgttgtagagctacttttcacatgctaattgccgatttttacatcttattttatgaagtgttcattaaagatatttgcctgatattttttatttgactgctattttttaaaattattgagtgtacatgaattctttctaaattcttgatatactttgtcatatatttcttgagaatattttctcccagtctgtgacttgcatttacatattcttaacagtatattttgttacacaattttttaaaacattgatagaatacaatttatcagattttcatttataatgaatgatttttgtcccctaaaaattctttgactactgcagggttgtgaagatattctcttgttttcttatagacattgtataattttaggatttacatttaagttaagggtacatctcwaatatatttttgtgtattgtgtgaaataagggttgagatacattttgttccctgtagatattctgttttactagcactatttgctgcaacttgacccattgaattaacttggtatctttgtaaaaaaaaaaatcggttgactgcatatctgtggatctatttctgaactcttc

SEQ ID NO: 196671 - DNA, 519 bp, Homo sapiens
gtgttaatagtgttccttgatacgtaaataggtaaacgtttgtcacttaaatagacattgcatttgattgtttggaaagacaatgtggtaaatctctctgtctagttctagagttccatacrgctctgcatgatgagcagggcttgagctctgtgttctctgctgtctatcttccatctctgtctcattccttctgcatttgaatgaaggagtaaaggaagctagacatgaatgagctaaaactttgtgcatagaagagtattgctaagccctttccctttctctcatggatacaatatttgttaagtaaattaataaatttctccaggtgactgtttttttctttccagatggacttgccagtttcaaaagtttcctgaagtctgaattcagtgaggaaaaccttgagttctggattgcctgtgaggattacaagaagatcaagtcccctgccaagatggctgagaaggcaaagcaaatttatgaagaattcattcaaacggaggctcctaaagaggt

SEQ ID NO: 196672 - DNA, 618 bp, Homo sapiens
acatatcttcccacagcagctttgctcagtgatacccacatgggaaaaatcccaggggatgttgcttactctttttgcccacactgctttggatacttatctactgtccgaaggccttctttccccactcaattcttcctgccctgttattaattaagatatcttcagcttgtagtcagacmcaatcagaatcacagaaaaatcctgcctaaggcaaagaaatataagacaagactatgatatcaatgaatgtgggttaagtaatagatttccagctaaattggtctaaaaaagaatattaagtgtggacagacctatttcaaaggagcttaattgatctcacttgttttagttctgatccagggagatcacccctctaattatttctgaacttggttaataaaagtttataagatttttatgaagcagccactgtatgatattttaagcaaatatgttatttaaaatattgatccttcccttggaccaccttcatgttagttgggtattataaataagagatacaaccatgaatatattatgtttatacaaaatcaatctgaacacaattcataaagatttctcttttataccttcctcactggccccctccacctg

SEQ ID NO: 196673 - DNA, 569 bp, Homo sapiens
cactatttcgcttcctgcattagcaaattttacttacagtcaaaagtgcagatttatactcctgacgtgtctcattcacagctaaataataggccataggacttttggtaggtttaaacttttaattctgtatttcatgattataagtcttgctagaattttttctaatctttagtagatttgattaaataatgattcacagaatttagtaacagaatcaaactaagccatgtatgagggtaatcgagatgaggatattaactcaaaagaaatagggtgatttttaaaggattaataaaattctgaaatgttaagtagaagattacattgtctagtcttgtatttcctccttctgttgctctctttcattcacacactctcagtttctcatatttgtagctcatttatttggttatttcctaagaatattgaaagtgaagcaactatgtgactgtattcttcaggtaaacactgactgcrcttgttggattttccctatttttgtgacttcaagaataatatgccctgctgaatacatgccatttcacattctgaaactgggtagagtg

SEQ ID NO: 196674 - DNA, 568 bp, Homo sapiens
acattttttaagacttagcacacagatgtcattttcaccaagaagacttccttcacacccatcagaccccaactggccaaaatgggtgatattcctccagtttggcayactttcactaaagatatgtctctaccaattagataagataaatgtttgggatggttagagaattctctttgaagtgtgttgaaagagccaatgtctggtattttaacttctgaaaaaaaaatctggacatgtaaacttccagatacccatctcctcccaagttcctaggaagataggccaagaaaggaaattaaaattactatgtcttttaactatgccctcaggaaacaatatccctcccatgtctcagtgttatccaatgtgatgaataccaagtcagagaggcgggaaggctggtaccaagacagacaggaagctgttgggaccactgataaccccaaaccactccaggcagatagttacctactctgtctccttcaaagtcgctgcgtatcaaatttccttgactctgtggctttgctcctttcctggataagtagactagatacctattgggttc

SEQ ID NO: 196675 - DNA, 498 bp, Homo sapiens
ttgtctatctttctctcttatgctagtaccatactatcttaattgtttgagttttatactatatttaataaattataagatgcatgtttattttatgtttagcccatctgatgatggaatatcacttggccagagggcagtcataatgcagatttttttcctaagcaactgcaaatttaattatagatggtcatattgtagtcacttacattaagttatatgcattatgatttatacatgtgatgtgtgyaattactacttgaattgctttaaaaatatgcactatggtttctcattgaaaggaagattcattgtatattcataacatccccaaaacatagcagttgggcataaagttgcaaaacaaattattgttggagaaataaccataattttatatttttaaagacaatatcaaatgcttaatagaaccttataaattaagataatcataagtaggtgacactattttacatttatttattaagatacatgcaa

SEQ ID NO: 196676 - DNA, 498 bp, Homo sapiens
ttgtctatctttctctcttatgctagtaccatactatcttaattgtttgagttttatactatatttaataaattataagatgcatgtttattttatgtttagcccatctgatgatggaatatcacttggccagagggcagtcataatgcagatttttttcctaagcaactgcaaatttaattatagatggtcatattgtagtcacttacattaagttatatgcattatgatttatacatgtgatgtgtgcaattactacttgaattgctttaaaaatatgcactatggtttctcattgaaaggaagattcattgtatattcataacatccccaaaacatagcagttgggcataaagttgcaaaacaaattattgttggagaaataaccataattttatatttttaaagacaatatcaaatgcttaatagaacctwataaattaagataatcataagtaggtgacactattttacatttatttattaagatacatgcaa

SEQ ID NO: 196677 - DNA, 565 bp, Homo sapiens
acaaacattgggagcagccaggactgaggagccaatatcattgagatggaagaaatggtagagaaattagmcaaaattctgaattcagttccccctatgtcagtgatagattcctatgctgcatatgcatggtatggaggctatgaaaccaagcagaatgcatcttgcatttgctaaagcagagatcttgacagtgttgagggtttaaaaataacattgcgtcataggaagactttgtctaaattaagattatctaattttccaatttttttccctcacaatcttatagcttcgtttgccattaaaactgattcatttggaacttattccagcataaagtccaagatagactttattttttgccatatggctatccatttgtctttgaaccacttatttaataatcaacctttatattctgatttgagatgttatcttcatcacagagaaaattggcgtcttaaaataaatgtaaccaaaattagagtcagacattttgctctcaaactcaccctcctctgtcccttctccaatgtttcctatttcaatgaatgataccactagt

SEQ ID NO: 196678 - DNA, 422 bp, Homo sapiens
caggagtttccacttttccttcttcctcattttctcttgctgccgccatgtaagaagtgcctttcacctcccactatgattctgaggcctccrcagccatgtggaactgtaagtcctattaaacctctttttctttctagtctcagctatgcctttgttagcagcatgaacacagactaataccaagtgtcacttgtgtataatttaaaattcataaaaaagtagcatcaacaaaacaaagaactaaaatctggatactggggaaatcagggaagagaggggagtagaggacaaaatgttatcgggtatcttagcagagtggccaaagtacttttaagaacagggatagctaatttagaattacaagttttatgttttcttgtactgaaaaccctatctgcctcccaatgccttctgtaaag

SEQ ID NO: 196679 - DNA, 564 bp, Homo sapiens
acagggcatggtaatattaagagatgtcctaatggatctcctgtattccatgcatactcttccttacctccattgtggagtagtagactgatttcattttgatagcccaggtcagtcaccccagctaacactctaactcccttcttagcctgctgatttaaaggtaggaggagcccaaagtgtccaggtggcaatcttaacttccagtttaatggaatcattcttgtgtctcctgatagcagtgttccttgctctggaactaagacctctaggccagcagaacacaatgtcgcaggaacaggaagcaaaaattttgctagtggatcactaggggtgatggtgagtggtgccacttccaattccgccccttgattcctggacccgtgaatcctggctatgggagraacaataccatatattggatgctgattcagagaatacacagccttgtggagaactttgctccagccctgcaaagtactgtcacctagttggcattgtaattatgacttcaaaagatcattccatcaattcagctgcttcaggataatggggaacatggta

SEQ ID NO: 196680 - DNA, 458 bp, Homo sapiens
ccatttgtcctttcccaccataaaagccctcaccctaccagtcagggagccaatgtgggggttctaccagctgctaagtgtgtctatgccaattatgcattctggcactgagaaaatgatgacaggatgagtccagggacccactggacccactgttagtcagatctgagctaaaactccattaattacctgacctccmtaagtccctactttaactggagaacaacaatgacattttaggtaccctggaatcaacatcagctcagaatcagtgtccagtagtccctgaaatgtctgatcatttccctttccccactgcacagttaccctggtaaaaacccggaggtctccttggggaagggtgcgagagagattcactgcataaattgtcgataatgaagtggagtccttcctcagtgggacccagcctccccttcattcaagggattctgggtctt

SEQ ID NO: 196681 - DNA, 471 bp, Homo sapiens
cagctctaatggcttccatttgtcctttcccaccataaaagccctcaccctaccagtcagggagccaatgtgggggttctaccagctgctaagtgtgtctatgccaattatgcattctggcactgagaaaatgatgacaggatgagtccagggacccactggacccactgttagtcagatctgagctaaaactccattaattacctgacctccataagtccctactttaactggagaacaacaatgacattttaggtaccctggaatcaacatcagctcagaatcagtgtccagtagtccctgaaatgtctgatcatttccctttccccactgcacagttaccctggtaaaaacccggaggtctccttggggaagggtgcgagagagattcactgcataaattgtcrataatgaagtggagtccttcctcagtgggacccagcctccccttcattcaagggattctgggtc

SEQ ID NO: 196682 - DNA, 471 bp, Homo sapiens
cagctctaatggcttccatttgtcctttcccaccataaaagccctcaccctaccagtcagggagccaatgtgggggttctaccagctgctaagtgtgtctatgccaattatgcattctggcactgagaaaatgatgacaggatgagtccagggacccactggacccactgttagtcagatctgagctaaaactccattaattacctgacctccataagtccctactttaactggagaacaacaatgacattttaggtaccctggaatcaacatcagctcagaatcagtgtccagtagtccctgaaatgtctgatcatttccctttccccactgcacagttaccctggtaaaaacccggaggtctccttggggaagggtgcgagagagattcactgcataaattgtcgrtaatgaagtggagtccttcctcagtgggacccagcctccccttcattcaagggattctgggtc

SEQ ID NO: 196683 - DNA, 458 bp, Homo sapiens
ccatttgtcctttcccaccataaaagccctcaccctaccagtcagggagccaatgtgggggttctaccagctgctaagtgtgtctatgccaattatgcattctggcactgagaaaatgatgacaggatgagtccagggacccactggacccactgttagtcagatctgagctaaaactccattaattacctgacctccataagtccctactttaactggagaacaacaatgacattttaggtaccctggaatcaacatcagctcagaatcagtgtccagtagtccctgaaatgtctgatcatttccctttccccactgcacagttaccctggtaaaaacccggaggtctccttggggaagggtgcgagagagattcactgcataaattgtcgataatgaagtggagtccttcctcagtgggacccarcctccccttcattcaagggattctgggtctt

SEQ ID NO: 196684 - DNA, 375 bp, Homo sapiens
acaacatttaattacaagtatttgcaaattatgtgattatatttggagaaaatccaaattaatttccaaataaattattagaattaataaggcaatttagaaagaacactgaatatraaattaatatttataattcaaatacacttctcatcgacaacaaacaaactgtaatttaaaagtgccttcaaactagcagtaaagatataaaacatcaagaaatacatctttagaaagtatggatttgttttacagacaagttgtaaacctttagaaagattttaagaagatgcaaagagaaggaatacgatgttcataaacaggaatattgatattaaatatgtcaattagcttcaaatgaattcgtaagtataattc

SEQ ID NO: 196685 - DNA, 640 bp, Homo sapiens
atcaaaggaggagttgtagaagatgaggccaaaaagggagattcaaaatcataaagagcattgaatattaggctaaagttgagagttttgcaaattttaagcaggtaatagaccaaatgtgcatctcagagcagactagtagttatttggagtacattaatgggtatcagatgggagattgagaggccagtagaaaggataaggcagtaaccgaggccatgcaccataagagcctggatgaagctacatctatgcaggtggagaggcaggaataggttttcatagagtttttctagagaaattctgcagagtcaggtgacttttgagtgtatggagtgagtcagaagtaggaactagggatgattctgtggtttctagttggagtgactccatataagatcaggccatcaccaaggtaggaaatagagaaggagaaacaacatttgacctsgaatttacaaacagtccttagagttgtgctttttaacaccctcaaaggcattaaaaatattaatatttcctatttgttataccctttcctagaaggcaatgggtagtaaaaataccatggcctgacagaggagaaacaagaagaagagaaggcaggcagatctcaaaggtatggtggagagagaaaaag

SEQ ID NO: 196686 - DNA, 489 bp, Homo sapiens
gggattgtgcaagacctgcttctggagggattgtaagagagcacctaaatatgcttattaagaaataaagaggatacatttcttctacaaaactggtaataaaataatttcatgtaaatatgtatttttaaaaaattagcccttgatatattctgttatgttattattaagatccaaataacctgatgaacataattctcaaattctgatgcagttaactattccctgtcagcggtaagtggatgatgcatacactcatttccccattctaaaaggttcatgttattaayttttcctttatggacctttcctcttgactcagggcaatgaaaagtgaaggacttttgtggcatctgactaccagggtgatctccttcatttcagagcagagggtggtatgtaagggtgctggtatgtgttcattttggatgagggagagtttctaattactcacttttgagtgtaaaaaatacagaccagaaatgagtg

SEQ ID NO: 196687 - DNA, 501 bp, Homo sapiens
tatcccaattctaaaggtcagctgctgagagattattgtattcttttagggttatttatatctctttgatttttcatgtttcttgtcttatgttgacttctacacatttgaagaagtacagactgatttcagtctttgcagactggagttgtctgggaaatctctttaccagtcatgttgttcagagattctgagaaggctgtctggcatggttcatgggcaaacttgctactggagtcttcaggcaggctggcctggtacctgggtcagtaggtgsatgagactagcacctggatacactaggatagatctgttaatttggtccacatggatgggcctgaagcctatatctgtaggggccagcctgatgcctgggtttatgagggctaatctggcactggggtggcccctgaaccttagttggcggggtgcagccagatggtgacatggtatggtgggcttggcacctgggttcactgggatgagctggagcctgaattc

SEQ ID NO: 196688 - DNA, 570 bp, Homo sapiens
actcaggtcttgccttcatgttttatgccttatacatgcaaactgctgtggtttccatgtacctcttttttttcttttttttaaattgagacagggtctcactctgttgcccaggctgaagtgcagtggtgcgatcacagctcactgcagcctcaacctccttggcccaagtgatcctcccacctcagcctcccttgtagctgggactataggtgcacaccaccatgcccagctaatttatgtattttttgcatagacagggcttcctcatgttgtccaggctggtctcgaactcctgggctcaagcagtctgcccgcctsagcctcccaaagttctgggattacaggtgtgaaccaccatgccccgctgccccttctttacttagctatattttccttactaagagttagttccctagcccatcagaaagattcccaggctggctacttcgggatgacccttgcattttttattgaaatcatttctgaatcttttttcccactagcttttaagacataggaactatatcttgttcagctttgcgcttccaattataaaaaaatgcctgg

SEQ ID NO: 196689 - DNA, 535 bp, Homo sapiens
gtgttagcaagcccaatcaggccagttattgggtctccaggtggctcacttgggtgccagaaatggcgggtgacctggttctcaggctacttggcagcaagtgggggcatgggtgatggcagtagtagtggtgggacaaccctgtgggacacaagcagtctgtgccagtrttggctgtgggtgcggtgattgggtggatcagtttccaggtctgcaggtggcttaccagctgtgatgttagtggcaggttgagtgggcctgacttcagacaccaggaagagtgctcagctgctattggtggtggactggctgagcatccgggtacctgatggcaggcttgtgtactgagagggtgacgctgggccagatggacttgtcctcaggcctccctgtggtgcatgtgagtgctggctgtggtaggaagaggtagagtattcctaggctactggtggaatgcttaggtgaggacagtgtggctgtgctgtggaccagctacttgggacagcagtgttgttttcagttgggagcagccaca

SEQ ID NO: 196690 - DNA, 535 bp, Homo sapiens
gtgttagcaagcccaatcaggccagttattgggtctccaggtggctcacttgggtgccagaaatggcgggtgacctggttctcaggctacttggcagcaagtgggggcatgggtgatggcagtagtagtggtgggacaaccctgtgggacacaagcagtctgtgccagtaktggctgtgggtgcggtgattgggtggatcagtttccaggtctgcaggtggcttaccagctgtgatgttagtggcaggttgagtgggcctgacttcagacaccaggaagagtgctcagctgctattggtggtggactggctgagcatccgggtacctgatggcaggcttgtgtactgagagggtgacgctgggccagatggacttgtcctcaggcctccctgtggtgcatgtgagtgctggctgtggtaggaagaggtagagtattcctaggctactggtggaatgcttaggtgaggacagtgtggctgtgctgtggaccagctacttgggacagcagtgttgttttcagttgggagcagccaca

SEQ ID NO: 196691 - DNA, 558 bp, Homo sapiens
gactcctgtagctaggattgtgggagtcttcagagggaatgtggactgctggggttctctcacttactcttttcctgcattagggagtctctccaggcttccaggcaatctcagccaaacaggctgccttgcttctgtctccttccttgctttggtgcatcctgtcacttgtttgttaaattctagtgttctctctttgatgatctcttcaaaatgtgattatgtaattcctgcttaggtttctctccatggaagaggagaagaccagaggcatctagtcagacatcttgaagccactccccatgatactgtcttaggaaaacaatcaacatgtagcattcatggataccaaagggaaaatgggtaaacacatttttttttttttagacggaatctcgctctgtcacccaggctggagtgcagtggcgtgatctcggctcactgcaagctctgcctcccgggttcacgccattctcctgcctcagcctcccaagtagctgggactataggcgccygccaccacacccggctaattttttgtatttttcaatagagacg

SEQ ID NO: 196692 - DNA, 580 bp, Homo sapiens
tgtatattcacactttttctaagagcagagtacgtccctgacttctcacctatttctaaatttcaaagaggatattatcaactgaaaatcaaattcttcaccagtcctgccaattcagggccacagcagcagcatcatgtaggtcacttaactggagccccatgaaataccaggtctacctatcagccattcaagctactgtgcttctgttgtttgtccatttctcatttttgtaccagtattcccatcctaagcattataattacctgtgtaacaacctcatctcttttaagagattttggttcttatgattggaaaggttaaagagtgacctataggtcactttccaattatgaaaacaaaaaattaagaaatacatatattttcattatttcactccattgttcaaaaatctaaaaggcctccagtggaagaaaatctggtgtcttcagcctttctagccctttggaatggratctcaccgaagctcacaccccctgatttctccagctgcctgtcttgtatgcgctgctcatggtcttccccacctgtctcccatggctcatgctttgcccactct

SEQ ID NO: 196693 - DNA, 553 bp, Homo sapiens
tattgcccttggtctcttactgtgtgccaagggctgtctgtgtccctaaagccacactcccataaagtggccctctccatactgccttctatggctgtgtgttctagtaaatggtacctgctccatcctgttatccttttagtgttggatggactagtctttatcccactctatcacatctgatttcattaaatcctgtccacactttgtaaatagtgatttctactgcattctcctcaaactactcatttgagggtgtcatatttttcatgtcacagctctatgataaaccagtgctctgttctcatattacagcaatgatgttgttgaatgccagatcatcaaatatcaycaatatagcccattgataagacacaactatttattgcttacagagataagagacagagacgatttaccctcaatagagctttgatagtatctcagacggggaaaggcaaagttggattttattaagaattagaaatttggtttaatgcagatctttcaatgtgagagcttgtttagaattggataaggtttatgatttaat

SEQ ID NO: 196694 - DNA, 553 bp, Homo sapiens
tattgcccttggtctcttactgtgtgccaagggctgtctgtgtccctaaagccacactcccataaagtggccctctccatactgccttctatggctgtgtgttctagtaaatggtacctgctccatcctgttatccttttagtgttggatggactagtctttatcccactctatcacatctgatttcattaaatcctgtccacactttgtaaatagtgatttctactgcattctcctcaaactactcatttgagggtgtcatatttttcatgtcacagctctatgataaaccagtgctctgttctcatattacagcaatgatgttgttgaatgccagatcatcaaatatcatcaatatagcccattgataagacacaactatttattgcttacagagataagagacagagacgatttaccctcaatagagctttgatagtatctcagacggggaaaggmaaagttggattttattaagaattagaaatttggtttaatgcagatctttcaatgtgagagcttgtttagaattggataaggtttatgatttaat

SEQ ID NO: 196695 - DNA, 576 bp, Homo sapiens
tcatgcacgctgataaaaacaaagatcactataatttaaacccaccctcagacctttacatgataggaagatgatcacacatccaccgtggagaactattgctcatggaaaaaaaaatgtagataaatcagcaggcccagaaagctgagctgtgtaagttatattcataaaatatttatgaatattttaatataaaatgtagctgaattttttaaggccaaggatataggacataaatcaaacaaacaaagatactttaatactttaaaatcctttagggcttctgtaactttagcaaacgctattgtaacacaaagctttgatttagccttaaagctcagcaagataggttaataaattactataattttgggagtttattcccccttcccttcaaagtcaaatgtcacactcagacttactcaacaaatgaaagcaaaaacttcttaaggagttttgaaataygacatgtggaagaaggcattctatatcctggtttgaagtattccattacaaagtttttataatttttattccaataaataatatgtcccataaaataatcatataacttac

SEQ ID NO: 196696 - DNA, 576 bp, Homo sapiens
tcatgcacgctgataaaaacaaagatcactataatttaaacccaccctcagacctttacatgataggaagatgatcacacatccaccgtggagaactattgctcatggaaaaaaaaatgtagataaatcagcaggcccagaaagctgagctgtgtaagttatattcataaaatatttatgaatattttaatataaaatgtagctgaattttttaaggccaaggatataggacataaatcaaacaaacaaagatactttaatactttaaaatcctttagggcttctgtaactttagcaaacgctattgtaacacaaagctttgatttagccttaaagctcagcaagataggttaataaattactataattttgggagtttattcccccttcccttcaaagtcaaatgtcacactcagacttactcaacaaatgaaagcaaaaacttcttaaggagttttgaaatacgacatgtggaagaaggcatyctatatcctggtttgaagtattccattacaaagtttttataatttttattccaataaataatatgtcccataaaataatcatataacttac

SEQ ID NO: 196697 - DNA, 463 bp, Homo sapiens
agaggtcaaacaatttaagacagaggtaatgggaagaacaaagctaggtgactataacatgatgttatcaagagagaaacatgcagtcatcagaattccagtagtcctgcttctccaaaacaaggcagccagagcaaacaatgaacccgacttcccagaggctgtctctgaagagagcacctggaagggagtccatcactaacatggtatgtggcrgacatggaggtggtaaaggaagaataccaccttatgaggaaactgcttgcagaaagaaagaaacaggaaagtttcccttgattcctctgtttgcctcactaccaacttccctaccattatttcaatcattagccagtcttatgatttttctctccaacacatatcataattttaccacttttcactatcttctctgacaccccacaaatccaagccaccatcacctctctcccggattactataata

SEQ ID NO: 196698 - DNA, 447 bp, Homo sapiens
ttcatctattttttttgaggaacatagwcatttcaaaaggcatgtgtatatttttaagacaaaaactgattttaaacattatgtgatgatttttaacactgatgttaaaaatgatttatatattttaagtccttctgaaaaatccttgagaatccacttattgccactatcctgtttagcaaattctaatataaatctaactgacagaattgtgggaaaggcagagtaatataagagagtagctgtgtcactgaaggccatgtgaaatacttggaaagccaggataaggaactattaccagacacaaaatgtcactacagatatcttataaaatattccattttgttctacttaaaaagttatctgcaatgggtgaaaacatttccaatttaaatcacacacaatttttctggtaataggaccatcaatgtggtacttcttgtgtag

SEQ ID NO: 196699 - DNA, 386 bp, Homo sapiens
ggcacttttgtctgtatgaaaaaccctttcaggcagataccctttctcaatgatgttcttagtggtgtctgggaacttatctgttgcctgttggttggttgtcaraagctgcttctcctattatcttgacattctttaagccaaatctctttctaaaattatcaaattatcctttactggctttacattctccagctttaaatccttcactttccttttgctttaagttttcatatagggagttcattattttcttgaattgcattaaaatctatagatttgtctttattatggcaatcctgtacccacataaacgtgcattttcaatatgaaataaaaagatttcacaaaagtgcaaggttttcaagcctgctggtgtagctgca

SEQ ID NO: 196700 - DNA, 386 bp, Homo sapiens
ggcacttttgtctgtatgaaaaaccctttcaggcagataccctttctcaatgatgttcttagtggtgtctgggaacttatctgttgcctgttggttggttgtcaaaagctgcttctcctattatcttgacattctttaagccaaatctctttctaaaattatcaaattatcctttactggctttacattctccagctttaratccttcactttccttttgctttaagttttcatatagggagttcattattttcttgaattgcattaaaatctatagatttgtctttattatggcaatcctgtacccacataaacgtgcattttcaatatgaaataaaaagatttcacaaaagtgcaaggttttcaagcctgctggtgtagctgca

SEQ ID NO: 196701 - DNA, 386 bp, Homo sapiens
ggcacttttgtctgtatgaaaaaccctttcaggcagataccctttctcaatgatgttcttagtggtgtctgggaacttatctgttgcctgttggttggttgtcaaaagctgcttctcctattatcttgacattctttaagccaaatctctttctaaaattatcaaattatcctttactggctttacattctccagctttaaatccttcactttccttttgctttaagttttcatatagggagttcattattttcttgaattgcattaraatctatagatttgtctttattatggcaatcctgtacccacataaacgtgcattttcaatatgaaataaaaagatttcacaaaagtgcaaggttttcaagcctgctggtgtagctgca

SEQ ID NO: 196702 - DNA, 602 bp, Homo sapiens
aattgtagtcatttttcagatgtgtatgttactttttaaaatgtatttgctccattgttatctatcaggaatggtaattttttacatcaattccagcacttatgttgcttatgccattttcatgtcctggctggctggaaagtgcctgcatactggacttttcagtgacatacagatacaaaagcaaattccctcaagtcaagcggaaaaggatttaaaactcagtgtgcmtccctgttggagcaagagagcctattgcaaaaacaaagagtgaagagaaaattctatccttggaagcttctcaacaacacaaccacagcttttcatgtaatagctccaatgttcccactacagccattaaaaaggtaatgaaacaaatcacttgctattcatcacaattatgatagatggaatccaactggactaacttgggggaaaaatcacatctcaaagtggatccatttcagaaaacagcaaagtgtgaggagtagggataacacttatttcccataaacaatatagtcaggcatttgatctatctaaaccaatagattactgtcttgatatatctttccgctgcaattttgtcttttattttatta

SEQ ID NO: 196703 - DNA, 596 bp, Homo sapiens
tactgagaaaagtccccaacagtttttcaacacttaccccattttctcccttcctcatctagtagtccccggtgtctactgctcccatctttatgagtatccaatgtttaactcccacttgtaagtgagaacaagcagtatttggttttctgttcctgggttaatttgcttaggataatggcctccagctgcatccatgctgctgcaaaggacatgattttattcttttctgtagctacgtaatattccattgtgtatatgtaccacattttcttcatccaatccaccattgatgggcactaggttgattccatgtctgtgctattgtgaatggtgctgcgatgaacatgcaaatgcatgtatctttttggtrgaatgatttgttttcttttggatatatacccagtaatggaattgctgggttaaatgatagttgttttaagttctttgagaaattgccaaactgcttcccacaatggctgagctaatttacattcccaccaggagtgtatagcattcccttttcattgcaaacttgccaacatctgttgtattctgagtttttaataatagctattctgactagtgtgagatgg

SEQ ID NO: 196704 - DNA, 596 bp, Homo sapiens
tactgagaaaagtccccaacagtttttcaacacttaccccattttctcccttcctcatctagtagtccccggtgtctactgctcccatctttatgagtatccaatgtttaactcccacttgtaagtgagaacaagcagtatttggttttctgttcctgggttaatttgcttaggataatggcctccagctgcatccatgctgctgcaaaggacatgattttattcttttctgtagctacgtaatattccattgtgtatatgtaccacattttcttcatccaatccaccattgatgggcactaggttgattccatgtctgtgctattgtgaatggtgctgcgatgaacatgcaaatgcatgtatctttttggtagaatgatttgttttcttttggatatatacccagtaatggaattgctgggttaaatgatagttgttttaagttctttgagaaatygccaaactgcttcccacaatggctgagctaatttacattcccaccaggagtgtatagcattcccttttcattgcaaacttgccaacatctgttgtattctgagtttttaataatagctattctgactagtgtgagatgg

SEQ ID NO: 196705 - DNA, 612 bp, Homo sapiens
agatctaaagagtgaagagtatcagtgaatgatacccgagagaagatatgaaacccatgggcaaaagcatgagtggcctggtatgactaaaacaagaaccacagggaagtatgartgtaagaccaatctggacaggtgcattgtcatttattggagaaaagctatgactaggatattaacaggagtttagaccatatagaaatcagttgttttcaagcattttttagacttttgtcaaataaaatattacacagaggccttatctatggaacagatgaatagagtgcctctctgaagcaggttagaagccttaggtcctgcccaccagaatctctttaatctttcttccgagtctcctcacccagaagactctgaggctaatggaaagactgagaaactgtgacacagagtttgaagaatacaaatatttgtaaaaagaaacaacccagaactgtcgaacaaggcaatgtaactggcagaaatgtgaaggataggtcaggctgggtgaaggataggtgagcctaggtggtagatgaggaatagaaaagatgtggctttgatacagtatagttgaatagcaactctcctagattttttttttaaagactgatc

SEQ ID NO: 196706 - DNA, 436 bp, Homo sapiens
cttgtttttttttcagttgaaaaacaacactaaggaacatcatcaaaacccttccaatgtttattgtagatccctagccatgtaaaatttcaattccactttgttttcttatcaagatccttaaatcacaaagccagcaacacttcatttattcatcagacaacacattcttattggatacttaatatgtgccrgtcatgactctgtggttctagtgacaaagaagagaataaaataaacaaaaacacctgtccttctgaagcttatattcacagaggttggcaagttttgctgcaaaaggctagatagtaaatacatattttaggcttttggagccatatgaaaatgatcataacacatgaacaaacgtgtgcagctgtgttccaataaaactttactcacaaaaatgaatggggagctagattttgtctatggg

SEQ ID NO: 196707 - DNA, 557 bp, Homo sapiens
tacctgaaaactagaaatgcatattcttgggataacccasatctactgaattagaaattctgagggtaggagccagcaattatgttttaacaaaccctccttatgactctgctgtgcacacaagtttgtgaaccactgccttaggctgtgtgtttctgaaatctgagagctgttaagtaatatcttctttatcctccatctcatatttctgtttttcatttccctttagtttgactaacctaatgtttataagttataaaatcttttgtaattgccagtagacagagcagaatcccattcatatgcttctcaatttgcaacagaaaaacataattttctcttttttcacctgccttcgggttgtaatactggtgtggacctttgacatctcaaattttctatatcctcaggctttcctatcttggccggtaacaaccttacccttctagcatctttgctctacctgaatagatccagactccaaccacagctcaccacctccaccgccaccgcctccatatgattcacccacagtaacttccacctggatgattgtt

SEQ ID NO: 196708 - DNA, 440 bp, Homo sapiens
attaatttataaccagtttgttgaacaggcatggcatgtggatagctattaaacacacacacacgtatacattgatatggtttggttgtgtcctcaaccaaatctcatcttgaattgtagttcccataatccccacatgtcatgggagggaacaggtagagataagtgaatcatgggggtggttttccccatcctgttctcrtgatagagagttctcacaagatctgatggtttcataaggggcttccccctgtgctggggactcattctctctcctaccatcctgtgaagagctaccttttgccatgattgttaagtttcctgaggcctccccagccatgcagaactgtgagtttattaaacctctttcctttataaattacccagtatcgggtatgtctttattagcagtgtgaaaggacaactacatacatacaact

SEQ ID NO: 196709 - DNA, 413 bp, Homo sapiens
cttggaaaagtgtttatttttcactaaagttaaaaggatgtgcattaaatctagcaattgcattcataggtgtctacccaggagaaataagtgcatgtgtgcaaaaagatatttacaaaaatacttaacaatagcagaatatttgcaatatgctgaaactgtaaataatccaaatgtccatcaacagaagaatggataaataaattacatgtgtagaagggaacactttatatagcaatgraaaagaatgaattggggctatacacaacaatatggatgaatcagagaaatgttatttttaataagctaatctcaaaagaatacagtatgatttcatttatataaagttagacaacagggaatgctaatcaaggtgatagaagtcagaataatggtgagtttggagtgggaga

SEQ ID NO: 196710 - DNA, 433 bp, Homo sapiens
aagaaaatgatatctaagttggatccttaagaatcagtaggtattagttaagccttggaaataaaatgagggtctagggtagtatatctcaagaagaaggaatggaatatccacaattctggaactttaatgtggctgcaacgtaagagcataagaggtgggtgttaggggaagacactgaaaagaaaaataagctcagtacattgtaagacatttaaagaaatgttgattgtttccagaaggcaaggacaactaatttctgatagggaccatatcagatttgcatttcagaacgattgtcctggcagcattagtgctaaactggcaaacctgtgaagaggctcttgtaaaaagtaaagttactgatcatgatgaactagacwaaggcaaaaacaatgaatatagagaaaagtgaatgagactgaaagatatt

SEQ ID NO: 196711 - DNA, 616 bp, Homo sapiens
atgtgtttaagtacctctaaaatacacgccctcagattatccagaataaaccagcagtagctgcacaaattatttcatattgacgtttgcaggtagaaagtgatttaytaatccattccttaaatagaataaataaactcagaggtggtaatacaatgatcatattttaattgagagttactattccattggttaatagtcaatttaaatttctggtcttgcatggaatgctaaatacacaggtgcctctagaatctgctaaaacctccccaaaaatgacagtgaagaggttaaaaaaactattgcaaatccacaagggaaaaaacaacaagacagaacaaacaagagctgttaactacatcttgtaagttaaaaagttaatagacaactagactagttacgtgagcaaaactgaaaaccacaaagagacagaattaaagtaggctgattcactgtgcagaatagaaggaaggctcagggtttggaaaagtcagatatctcacaaggcaggaagtgtgtctggaactgattataggaaagattgttggaaagtttgtatggcaagcagttacatcttcagatgtctcccctcaagacagataaacaagcacttact

SEQ ID NO: 196712 - DNA, 616 bp, Homo sapiens
atgtgtttaagtacctctaaaatacacgccctcagattatccagaataaaccagcagtagctgcacaaattatttcatattgacgtttgcaggtagaaagtgatttactaatccattccttaaatagaataaataaactcagaggtggtaatacaatgatcatattttaattgagagttactattccattggttaatagtcaatttaaatttctggtcttgcatggaatgctaaatacacaggtgcctctagaatctgctaaaacctccccaaaaatgacagtgaagaggttaaaaaaactattgcaaatccacaagggaaaaaacaacaagacagaacaaacaagagctgttaactacatcttgtaagttaaaaagttaatagacaactaractagttacgtgagcaaaactgaaaaccacaaagagacagaattaaagtaggctgattcactgtgcagaatagaaggaaggctcagggtttggaaaagtcagatatctcacaaggcaggaagtgtgtctggaactgattataggaaagattgttggaaagtttgtatggcaagcagttacatcttcagatgtctcccctcaagacagataaacaagcacttact

SEQ ID NO: 196713 - DNA, 573 bp, Homo sapiens
attgtagtcatgatgtgggatctaaaatagaaaagcaggtcagcagcatgctgtatgaactgattcctgagcatggtttatttatatgcatgggtgcaccacctgttatacaaacaaaaatggtaatgctttttactctcaggactacagctccccccaatcattctttccccctccatcctattagcttatttgaaataatttgataaataattcaaacataacttgttatctggtctctatgagytcagcagttctataagcagaaacttttaagaataaaaaagcctactagaaatatatatatatattcgtcaagatatatataaaatatatatatggatatatcaagaaataataacctgaacagccaacaaaaagctagtaactttagaaactgtagtaaacagtattattcaattataagccaattggctactgaaatagattttatacattaattaatattaaatttaagagatctgtgattttactgttttgacatatcctaaccctaattatctttaacttaaaaataacacaaggaaatgaaaacatgggatgaattttcaa

SEQ ID NO: 196714 - DNA, 573 bp, Homo sapiens
attgtagtcatgatgtgggatctaaaatagaaaagcaggtcagcagcatgctgtatgaactgattcctgagcatggtttatttatatgcatgggtgcaccacctgttatacaaacaaaaatggtaatgctttttactctcaggactacagctccccccaatcattctttccccctccatcctattagcttatttgaaataatttgataaataattcaaacataacttgttatctggtctctatgagttcagcagttctataagcagaaacttttaagaataaaaaagsctactagaaatatatatatatattcgtcaagatatatataaaatatatatatggatatatcaagaaataataacctgaacagccaacaaaaagctagtaactttagaaactgtagtaaacagtattattcaattataagccaattggctactgaaatagattttatacattaattaatattaaatttaagagatctgtgattttactgttttgacatatcctaaccctaattatctttaacttaaaaataacacaaggaaatgaaaacatgggatgaattttcaa

SEQ ID NO: 196715 - DNA, 544 bp, Homo sapiens
tctgtttgacatcaatcatgaggtgttaatcattgtgttatattattttctaaatgatcttatataggtaaaaatttaaaaaaaaaaaacctatgaaaacctatgggatctgccttcacagcaaaccagtaaaccagtgtccaatcattcccatcataggcatagacagacaaatctcagtgyggcatcttagcaggaattaagtcagggaaggaagccaacaatttctattaaaccattcctggaagtcaagaatagtgtttttcattcactacccactcttttgggatcatcaatattttctaaatcaataaagtatatacttgaatattttaagggaaggagacacttataaaagtcatgtaaccaatggtttgcacatcaaaaagtccttgatggaaaaattagtaaaatctccaagagaatcaccatatatctctagctgagaccaaggttgctgctgcccagatcactggggaggaagggaaagtttgtctatttccagcccattgatccaatattggaaacaagctccaagttcgtt

SEQ ID NO: 196716 - DNA, 576 bp, Homo sapiens
tccagtgatcatgctccctagtatttatccaaatgaaatgagaactcatgtctacatacaaacctgcaatgaatgtttacagcagctttattcatcattgccaagatttggaagcccaagatgtccttcgataggtgtatggataaacaaactgtggtgcatccttacgatggaatgttattcagcactaaaatgaaatgagccatgagaagatacagaggaatcttaaatgcatgctgctaagtgacagaagtccgtctcgaaaggctacatactgtatgactccaactctgtgacatcttggaaaagtcrtaactatagagatagtaaaaatatcaatagttgccaggaatttgggtagagggagggagggacaaataggtgaaacacggggaatttttaggggaattaaactgttctgtattatccaaagtaagaaaccaaactttaaaacaaaaactatatgatgatcttagtaggtgcagagaaagcatttaataaatctaccattcattactggttatttaaaaaaaaaaaaaaaactcatcgcaaaatagaaatagagaacttcctcaa

SEQ ID NO: 196717 - DNA, 618 bp, Homo sapiens
acttagtgggagcggaggctagtggctcagagggacctcagctctctgtgcttggtctggcaggtgactgaaagggcccctaggtctctatcacaaatacttaaggtagctcaaaggtcataggtcctcaacatgatggaaacraaggattggtgtccttgagcagagcctggctggtagccaaaggggcccttggttccccaaaaggcagttttttagagttccgtgctccaacattttcactgatgtcacccatgtcaatgtttttaaggaagcctgccagagaattctgacatgcagcctgggtttgagaactggattaaatccttttgactcctgtcaaaaggtgtggcgaaaagtgtattccagtttctgctactctcccacataaattaagcagagaactccaggatctcaaaaaaggaaactaagccacctattcaagtagaggtatcaaagaaggaagaagtacatccacaatgcaattcccccaaaaggtcctctcttgagcattcttttgggagctattgtagctggtgatgattcttcttagactggagctcccattgcagattcatggaagaagccaaggtggtgactcagatctctattccactg

SEQ ID NO: 196718 - DNA, 618 bp, Homo sapiens
acttagtgggagcggaggctagtggctcagagggacctcagctctctgtgcttggtctggcaggtgactgaaagggcccctaggtctctatcacaaatacttaaggtagctcaaaggtcataggtcctcaacatgatggaaacgarggattggtgtccttgagcagagcctggctggtagccaaaggggcccttggttccccaaaaggcagttttttagagttccgtgctccaacattttcactgatgtcacccatgtcaatgtttttaaggaagcctgccagagaattctgacatgcagcctgggtttgagaactggattaaatccttttgactcctgtcaaaaggtgtggcgaaaagtgtattccagtttctgctactctcccacataaattaagcagagaactccaggatctcaaaaaaggaaactaagccacctattcaagtagaggtatcaaagaaggaagaagtacatccacaatgcaattcccccaaaaggtcctctcttgagcattcttttgggagctattgtagctggtgatgattcttcttagactggagctcccattgcagattcatggaagaagccaaggtggtgactcagatctctattccactg

SEQ ID NO: 196719 - DNA, 618 bp, Homo sapiens
acttagtgggagcggaggctagtggctcagagggacctcagctctctgtgcttggtctggcaggtgactgaaagggcccctaggtctctatcacaaatacttaaggtagctcaaaggtcataggtcctcaacatgatggaaacgaaggattggtgtccttgagcagagcctggctggtagccaaaggggcccttggttccccaaaaggcagttttttagagttccgtrctccaacattttcactgatgtcacccatgtcaatgtttttaaggaagcctgccagagaattctgacatgcagcctgggtttgagaactggattaaatccttttgactcctgtcaaaaggtgtggcgaaaagtgtattccagtttctgctactctcccacataaattaagcagagaactccaggatctcaaaaaaggaaactaagccacctattcaagtagaggtatcaaagaaggaagaagtacatccacaatgcaattcccccaaaaggtcctctcttgagcattcttttgggagctattgtagctggtgatgattcttcttagactggagctcccattgcagattcatggaagaagccaaggtggtgactcagatctctattccactg

SEQ ID NO: 196720 - DNA, 571 bp, Homo sapiens
gaccagtcgctgcccttctctggaccacatttacctcatctgcaaaataagaggagttgattcattgatttctaattcccctcctcttctaaaatcctgtgatgtctaaaatacaaaaatcttaaagcatgctattccagggctcctcctcaaaccaaataaactagagtctccaagagtggaatgtggatgtcagtagtttttaaatgttcccaggtgattctaatatgcagccagagttgctaacagttaaactttaagaacctgccatggtgtgattgtacatggtatgggaaagaaggagagaataaagactaaagtctttcaagaaaaatgaatgggataaamatcagtaacatttttgtagtttaattaaaatctcatatttttccatctttcttttgcttcttttgtttttaccatattcttggaacatggttcagtatttgttttccctcttctctcttaaacctgccttactaagacatttcactacaatgaatatttcatgtgaggaattgagaaagtgatcaaaagcggtattgcttgggaaatacagcttacaagatct

SEQ ID NO: 196721 - DNA, 605 bp, Homo sapiens
gtaaactaatattttaaaatttaaaatttgtaaaaagcctacatttgacaaagctatagtaattattcacaagtagggacgttaaaattcatccataatcatcatcatttgagccagagaaagactgttgcaaatatctaagttcaaaatttaggacatgcaggtatgatttgacagcttgggtttacatatttagataaacacaacatagtattatttaaataaaatttcctggccagaggaaggactgcatttcaagagtccaatgtaaagattaacacatttttccagtcttgagatgctgctgctccctgagtggaactttcatggtaatatttcctacagtttctttttgaggggaaaaaaatgctaaatgctatcactttkcagactgtcccacacttaaacctatatcaaggtgttcaggaacataacacgagtgaaggttagagaaattgtgagaaaaaaatttgaagaataagatgatggtgacttataatttgatagctcctctaagcttggctgagcaccctctagggttatcttgtacatcctgatcttgtggactaagtaccttcttgtgtatcaattctcacattaaagga

SEQ ID NO: 196722 - DNA, 627 bp, Homo sapiens
ctctgtcctagcaggttgattcttattgtctgctcctatgggttccctggctttttagcccctagttgattttggccaatgaagccccaggaagagctaggtaggtaggaggagaggagaatgagatcagggtttttattccctcatctccttccctgcccagtcattgccggttggctgcttctactgaaggctacaactcctgttagattgcctgtgcccttgccttctcaggcataagagtcgtaacagcttctttatacgctattcccagagtactggattatccattgttgggttccttttaatagtcctttgttaagctcacaccatttgaatgtgcccgtctctttactgccaggctcctgctatrcaagtaggaataatgctcacctctcaggggaggaggattgatggcttcctctcgccatatctgcttccagcactctaacctgcttcatgttcagacaaaaaagtcaaccaatgtggtatttttttcaggaatactggaaggatgttctgcaaaaaataccttctatgccccacttcccttgtaatgtctttattaggagattaaatctttcattctatttagagataaggttttaattgcaaagatccttagga

SEQ ID NO: 196723 - DNA, 449 bp, Homo sapiens
aagccttttttaaatttatagtgttaagttaaaatttttatatagtgttttacattcacttgagaccatcttcacatacattaaacacatcctcactayagctttgagcagaaaagcatgtgtctatactcaggaggctgaggcaggagaatggcgtggacccgggaagtggagcttgcagtgagccgagatcgcgccactgcactccagtctgggcgacagagtgagactctgtcaaaaaaaaaaaagtgtctgatgagaaaagactcaagataataaatatggtgtttcatcataaagggtgttgggaagtagcatttgtgcaagaagatacatgtaataagtaaaacagagagtaattaaaatttattccagcttggtattatagaaaaggtgggaaatgtagcctggatcgggattgttaggtgagttcacatacacctgcatga

SEQ ID NO: 196724 - DNA, 449 bp, Homo sapiens
aagccttttttaaatttatagtgttaagttaaaatttttatatagtgttttacattcacttgagaccatcttcacatacattaaacacatcctcactatagctttgagcagaaaagcatgtgtctatactcaggaggctgaggcaggagaatggcgtggacccgggaagtggagcttgcagtgagccgagatcgcgccactgcactccagtctgggcgacagagtgagactctgtcaaaaaaaaaaaagtgtctgatgagaawagactcaagataataaatatggtgtttcatcataaagggtgttgggaagtagcatttgtgcaagaagatacatgtaataagtaaaacagagagtaattaaaatttattccagcttggtattatagaaaaggtgggaaatgtagcctggatcgggattgttaggtgagttcacatacacctgcatga

SEQ ID NO: 196725 - DNA, 563 bp, Homo sapiens
atgcctggttctttcactttcttaatggagtactttgaagcacaaaattttaaatttccataactttattgaaaatttaattctcaattactactgatttatttatttgctgttccttgtggttttaatgtcatctctcagaaatcattgactaatacaaggttgcaaagatttatatctatattttcttttaagagttttatagttttacttcttacatttagacccttgtgttttatctccactgtggtagtggatatataagcttacacaggcaataatataayttaacacacacacacacatacacaaaatacacaaaacagatgaatgctagtcaaactgaggaaatctgactaagatttcaatgtcaatatcctggatatgatattatatgatagttttgcaaaatgttaccaacagggtaaattgggcaaagtgtgagagggatttctttgtattattttttacagctatatgagaatctaaaattagctcaataaaaattttaattaagaataatagtctgtggaaattgctacttttccttttctttattcaaa

SEQ ID NO: 196726 - DNA, 453 bp, Homo sapiens
actgttatagcaatatctcatttaaaggctttcttayagcatcttcactgcattcaaatgattttgtatattgaagagaggagaataacaaagtaaaagtatactaggaaatgtatttgactctgcaatattcagcaatacaattgtacagaaacatccactgcatgtttttaattctgcccataacttgcctgctcacagatatccctggaactctgtgacaacaatttgtcaattgtcacatttctagaattctgttcattgctgctgcagtgtcatacacttaaataaagcctgatttatatttttcttgttttgaccacagttgaataatacttcaaataagcatattataaagcccttcatagaggaaatttttaaaaaataacatttggtctttacctgaaattgcaatcaatcacacctttaaaaatgcatcttcacagccgaatt

SEQ ID NO: 196727 - DNA, 457 bp, Homo sapiens
gaattcaaattcctttcacctttagacactgttatagcaatatctcatttaaaggctttcttacagcatcttcactgcattcaaatgattttgtatattgaagagaggagaataacaaagtaaaagtatactaggaaatgtatttgwctctgcaatattcagcaatacaattgtacagaaacatccactgcatgtttttaattctgcccataacttgcctgctcacagatatccctggaactctgtgacaacaatttgtcaattgtcacatttctagaattctgttcattgctgctgcagtgtcatacacttaaataaagcctgatttatatttttcttgttttgaccacagttgaataatacttcaaataagcatattataaagcccttcatagaggaaatttttaaaaaataacatttggtctttacctgaaattgcaatcaatcacacctttaa

SEQ ID NO: 196728 - DNA, 457 bp, Homo sapiens
gaattcaaattcctttcacctttagacactgttatagcaatatctcatttaaaggctttcttacagcatcttcactgcattcaaatgattttgtatattgaagagaggagaataacaaagtaaaagtatactaggaaatgtatttgactctgcaatattcagcaatacaattgtacagaaacatccactgcatgtttttaattctgcccataacttgcctgctcacagatatccctggaactctgtgacaacaatttgtcaattgtcacatttctakaattctgttcattgctgctgcagtgtcatacacttaaataaagcctgatttatatttttcttgttttgaccacagttgaataatacttcaaataagcatattataaagcccttcatagaggaaatttttaaaaaataacatttggtctttacctgaaattgcaatcaatcacacctttaa

SEQ ID NO: 196729 - DNA, 638 bp, Homo sapiens
cgatcatgcaggatggataggagatgaatcgtagaaaaatggaggcagggcaacgaaaatgacctcagtcctttcctggagtaaatgggaagacacattctatgggaaatcatgacaacagaataggttcgttccagccgaatccgacttagagttgacttttaaaacgcctttaatagtaaaagtaacggagcactcaagaagattttgaaaacgaactcacagatttatcccacgaccccaacaccctcaattactttcycgtctgcatattttctttctgcccatgtgtggcctgcacttccccttgtaatgggaaacatgctccatgagaaacggaggaagtgagcccaaaagacgctctaggctgcttctctctctctctctttttttttccttcatttatttattttttactatgtttataaaccatgccgaggaagtcccctcccctagacaccaacctgcttttgttttttctaggttttgttgttgtcgttgctgctgctgtatttaaattgaaataaattaccatttcttgaaaaaattcatttattattgatttatttatttttaatatgataccaactggttttgagctccctctcaccgtgggagtttagtctctggccccggca

SEQ ID NO: 196730 - DNA, 469 bp, Homo sapiens
actacacttcagcctgggcgacagggtgacacctcatctctaaaaaataaaataaaataataaaaaawttttggaaatttttaaagcgtctgctccacagagccacattttgcattgtgcagtttcgtttttcagacctttctcctctcttccatctgactgccctgagatccagcactttttgcttccacatctgaggctgtcgctggaaacaaggtctccatcccatttgcatgacatgagcacagtcgggatttgtattcattctgtgggtgtgtgtatattcgtgctctccacaaaagaaccactcagcattgctttttcaagccgagctttaaaaggcttatttgccatgacatccagcacttgtaatttgaggtcataccccgaggaagaattgctaaatctgtgtaaaatgtttctgactccttttcttacagattctgtcagattatctctttaagaattc

SEQ ID NO: 196731 - DNA, 554 bp, Homo sapiens
ttttttcatctcccaaaaagatgattctcaataaaaaaaatagcagccactgaattaatgtgggcattgtttgcaaatgaacacacgctattgtttcatttcctatattgccctatgaaactgagtaaagttacatttcttgactcagatgtatcaactaaaatgttttatgggtaaacaaaaggagatatttgaaaacagatatgttgaccccctacagtgtatagctgattctgtcagattataccaacaatcatactttctatagtatatcaagtgataagctgaatcttggcaaaaatattttttaaaaacctgctatcttttgctcgtacatacttctacttgaataatgcagttagaagttgttttcttgatttttatgaagattttaataaaaattcagtaaatgtaaaaaaaaaaattgttrataacttgtccaaatgcaatctgaactttgcttagaaatctgcatatttgaccaatggggcaaatgtaaacttttgcaagcttcattcagtctgtaaacagtttatcaaataaaatggaaagat

SEQ ID NO: 196732 - DNA, 575 bp, Homo sapiens
gtattgaaattatatttttatatataaaaatatatttgaaagatcgaaactttcaaaaattccagaagtaactttcctttctagggatgccttatcacatattattttcccaaatatttattttgttttataaaagtctttaggttttttcatttgaataagtaccctagtttttaatggaagggataaagtgatttttctttaaacaatgaggtagtgtatgatttgatccaaaataaaataccagtggcttgttatcttccaaagagaactctacagtcctttgcttgcacattccttattagtctccttggcaacaggtaatcacttgtttcccttaaatagatgagatgccaacaaatatgtaatagtggtttgatacatcagcaaagaaaagtgctataatgacagcataataaatctgaacatgaaaagttaatagtcacattagtgacagcctaactatagtgtgagaagcacayggagcttgaattttctgcttccatttcattctttttgtgacacttggttcttcctagaatgctctcctcctctctccctccctttgcgtagcc

SEQ ID NO: 196733 - DNA, 574 bp, Homo sapiens
tttaggccaaatgagaagtctgttacacaggtctattatatttgctccctcctttgtttttagctctactttctccacttctaatggttccttccagtcttcatctttccttaattccttaaacccaattctgatcttttcccatgacagagtagcagggctatctgaaaaatgtgtctcctctacaatattaagtagtccaacataaaaaggtgactatagattaaaatggattggagaagtaaaaacctaaataaatataagtaatacagtaatttaacaattgttggcattgtctgccaagtagttaacaatttatcaagcagtgggctaaattttatgtacactatttctattgaatccttacaacatggrtattattgtcttgattttacaggcaattgatattttcacaggtgttaaacattttgttcagagttacatgacctggaagtggcagaatcaggattttaatacacattagcttgttcccaaagccagtgtagagtggaaaggatcattcaaagccaattaataatttactacaaatgcagtcatcttttatctagaattc

SEQ ID NO: 196734 - DNA, 452 bp, Homo sapiens
acgcactgtcctggacccagtggccctggggctgatgtgtaagagagtacagctgctgcccccagggcttaagcacaagtgactgagagctactgcacccagcatggaggtgcaactgaggcacatgcttccacccttaagactgaggcatgaatgaggcaccattctagagccccacgcccaacagacttcacactgtcttggagcccagggctgctgaggcttaggtacaagaaaagagctgactgctgactctagggctgaagttccagtaccacttccaatgacacatgagtgaagtgtgttctrtcacccaccagcctaggctactgtcactgaaagtggcacttccttctccctcaatgacagggaagtagtgtggccattgctatcctctacctaagcatgttatctgtggcctagggaccgccccacccctccttaccatggcc

SEQ ID NO: 196735 - DNA, 621 bp, Homo sapiens
cttgtctgtggaagagatggtcttaataaggcaaccattagttaaaatacatgcaaacgcaggacagaattagttatggcttagtcgggaccccttcctattgaagagagaaagtgcaacaaaagaaataaggatgaygcatttaaattgttgttcccttccacacccccactgccagctgtctattgcctttttcagggttggttttgttcagaatttattacattcttgactgggaaaatagaagtagcatatcttacatgatgttggcataagtgcgatcataataagtgagtactaagtgaattagcaactactccaatattggtgaaatgtacattctggttgagcatatgaatgacctacaatatggcttacactcaggatggaaaggaatacagaatatttttctggacatatgcaagtatgtgagtagctgcattggtcactcgaataaagaatttttattcctgagaggataaaagcaatgcccctctagtgctgatgtattaaaccagcttagctattaatcactgtcatccattttactgatgaagaaattaagggcaaggcattagttgactatttaagttaccctgttggtcagggacaaagtctaca

SEQ ID NO: 196736 - DNA, 596 bp, Homo sapiens
aaaggtttctcctaatctcttaactatttgtgaaaatattagttcaagcacttctaccttcatcccctggacttatagcaatgacattctctttttatcttagatccttcaagaactacttttccctcacttacatcacctatatattattttgttgtggtggttcatttattttgctaagatattcttagaatgagaagaaagaaatgcctattgttccaaagcttatctcttagaatgttttaaggatgtgagagtatggaaaaacttttaagtgtggaggaattaaaagtaggtcaaaacagaaatgtaatataacaattacctgtagatttttattaaatggacttaaataagtttcaaagtcactttataaactttagaataatctctgggcaatcagcattttctcctctttctcctgcaaaattttgctttctaaacctgggcaatttaaaaaacaatgaagaayggcacttcttcccatagcctttctggttccctgttatttttcataatgtctgtatttctgaaaagtttgccatttagaagagtttttctctgtgtagatgaatgactctaaatgtttaagtttg

SEQ ID NO: 196737 - DNA, 622 bp, Homo sapiens
gcatatagaaaatatgggacatcattgagcaaactgaccttcacatcataggaaattaagaaagagatgagaaagaaaaatgcctggaaagcatatttaagaaaataattgcaaaatttcctgaaatttggagaaagatracaacatcaagatacaggaagctcagaggttgccaatcaaactcaactcaaagaagatttcactaagacatatcataatcaaattatcaaaaattaaagacaaaaaaagaatactgtaaacagtaagatataaacatatcacattaaaggcagctccaatacagctttcagaggatttctcagcagaaaccctacaggccaggaaagagtagaatgatatgtttataacactaaaaggaaaaaaaaccactaatcaagaataccaggtaaagctgaccttcagaaatgagggagaaataaaaactttcacagaaaaacaaaagctaagggagttaatcaccactaggccttctgtacaggaattactaaagagagttatttaagtttaaataaaagctttctaattaacaacaaaaacatatgaaagtaaagaacgcaatagcatacatattcatacacataattttctcatacaaaaattt

SEQ ID NO: 196738 - DNA, 622 bp, Homo sapiens
gcatatagaaaatatgggacatcattgagcaaactgaccttcacatcataggaaattaagaaagagatgagaaagaaaaatgcctggaaagcatatttaagaaaataattgcaaaatttcctgaaatttggagaaagatgacaacatcaagatacaggaagctcagaggttgccaatcaaactcaactcaaagaagatttcactaagacatatcataatcaaattatcaaaaattaaagacaaaaaaagaatactgtaaacagtaagatataaacatatcacattaaaggcagctccaatacagctttcagaggatttctcagcagaaaccctacaggccaggaaagagtagaatgatatgtttataacactaaaaggaaaaaaaaccactaatcargaataccaggtaaagctgaccttcagaaatgagggagaaataaaaactttcacagaaaaacaaaagctaagggagttaatcaccactaggccttctgtacaggaattactaaagagagttatttaagtttaaataaaagctttctaattaacaacaaaaacatatgaaagtaaagaacgcaatagcatacatattcatacacataattttctcatacaaaaattt

SEQ ID NO: 196739 - DNA, 622 bp, Homo sapiens
gcatatagaaaatatgggacatcattgagcaaactgaccttcacatcataggaaattaagaaagagatgagaaagaaaaatgcctggaaagcatatttaagaaaataattgcaaaatttcctgaaatttggagaaagatgacaacatcaagatacaggaagctcagaggttgccaatcaaactcaactcaaagaagatttcactaagacatatcataatcaaattatcaaaaattaaagacaaaaaaagaatactgtaaacagtaagatataaacatatcacattaaaggcagctccaatacagctttcagaggatttctcagcagaaaccctacaggccaggaaagagtagaatgatatgtttataacactaaaaggaaaaaaaaccactaatcaagaataccrggtaaagctgaccttcagaaatgagggagaaataaaaactttcacagaaaaacaaaagctaagggagttaatcaccactaggccttctgtacaggaattactaaagagagttatttaagtttaaataaaagctttctaattaacaacaaaaacatatgaaagtaaagaacgcaatagcatacatattcatacacataattttctcatacaaaaattt

SEQ ID NO: 196740 - DNA, 633 bp, Homo sapiens
  misc_feature (1)...(633): n = A,T,C or G
tttctgtttaaatgatctttccaatgctgacagtagattgttgaagtccccaactattattgtattgggatctatctctcactttagatttaataatatttgctttatgaatctgtgtgctccagtgtttgatacacatatattttaaatagttatttcctcttgcagctttatacctttatcactacatggtaatcttctttggattttttatttgtttggttggttggngttttttttaattgtttttgacttaaagtcattctgtctggtatctgcttacttttgctttctgtttatgtggagtatctttattcatcccttcactttcagtstatctgggtctttacagatgaagtgagtttcatgtaggcagtacatagttaggtcttattttttttaattcatttggacagcatattcctgttacttggggaatttaattcatttgcattcaggttattataggtgaagacttcctcctatcactatattgatttttttctggctgttttgtatatcctttattcactgcagaatacacatcattttcatcagcacatagaacattctcctagattgaccttatgttaggacacaaaacaagtctcacaacattcttaaaaattgaaa

SEQ ID NO: 196741 - DNA, 633 bp, Homo sapiens
  misc_feature (1)...(633): n = A,T,C or G
tttctgtttaaatgatctttccaatgctgacagtagattgttgaagtccccaactattattgtattgggatctatctctcactttagatttaataatatttgctttatgaatctgtgtgctccagtgtttgatacacatatattttaaatagttatttcctcttgcagctttatacctttatcactacatggtaatcttctttggattttttatttgtttggttggttggngttttttttaattgtttttgacttaaagtcattctgtctggtatctgcttacttttgctttctgtttatgtggagtatctttattcatcccttcactttcagtgtatctgggtctttacagatgaagtgagtttcatgtaggcagtacatagttaggtcttattttttttaattcatttggacagcatattcctgttayttggggaatttaattcatttgcattcaggttattataggtgaagacttcctcctatcactatattgatttttttctggctgttttgtatatcctttattcactgcagaatacacatcattttcatcagcacatagaacattctcctagattgaccttatgttaggacacaaaacaagtctcacaacattcttaaaaattgaaa

SEQ ID NO: 196742 - DNA, 525 bp, Homo sapiens
ttatgttaggacacaaaacaagtctcacaacattcttaaaaattgaaatcacatcaagtatctttttggaccacaatggaataaaactataaatcactaacaagatgaacatttgaaactatataaatacataaaaattaaacaatatgctcccaaatgaccaatgagtgaaggaagaaattaagaaagaaatataaagatttcttgaaacaaataaaaataaaaacacaatatacagaaaaacctgtgaaacacagcaaaagcagtattaagaggcacatttatagtaataaatgcctacatcaaaaaaagtagaaaratttcaaaataacctagaaatccatctaaaggaactagaaaagcaagaacaaactgaacccaaaattaaccgaaggaaaaataaagatcagagcagaaataaatgaaattatgactaaaataataaagaaaaacaataaaacaagaggttggttttgaaaagataaacaaaatcaagaaaaagagctagatttttttttaaaaaga

SEQ ID NO: 196743 - DNA, 525 bp, Homo sapiens
ttatgttaggacacaaaacaagtctcacaacattcttaaaaattgaaatcacatcaagtatctttttggaccacaatggaataaaactataaatcactaacaagatgaacatttgaaactatataaatacataaaaattaaacaatatgctcccaaatgaccaatgagtgaaggaagaaattaagaaagaaatataaagatttcttgaaacaaataaaaataaaaacacaatatacagaaaaacctgtgaaacacagcaaaagcagtattaagaggcacatttatagtaataaatgcctacatcaaaaaaagtagaaaaatttcaaawtaacctagaaatccatctaaaggaactagaaaagcaagaacaaactgaacccaaaattaaccgaaggaaaaataaagatcagagcagaaataaatgaaattatgactaaaataataaagaaaaacaataaaacaagaggttggttttgaaaagataaacaaaatcaagaaaaagagctagatttttttttaaaaaga

SEQ ID NO: 196744 - DNA, 525 bp, Homo sapiens
ttatgttaggacacaaaacaagtctcacaacattcttaaaaattgaaatcacatcaagtatctttttggaccacaatggaataaaactataaatcactaacaagatgaacatttgaaactatataaatacataaaaattaaacaatatgctcccaaatgaccaatgagtgaaggaagaaattaagaaagaaatataaagatttcttgaaacaaataaaaataaaaacacaatatacagaaaaacctgtgaaacacagcaaaagcagtattaagaggcacatttatagtaataaatgcctacatcaaaaaaagtagaaaaatttcaaaataacctagaaatccatctaaaggaactagaaaagcaagaacaaactgaacccaaaattaacmgaaggaaaaataaagatcagagcagaaataaatgaaattatgactaaaataataaagaaaaacaataaaacaagaggttggttttgaaaagataaacaaaatcaagaaaaagagctagatttttttttaaaaaga

SEQ ID NO: 196745 - DNA, 525 bp, Homo sapiens
ttatgttaggacacaaaacaagtctcacaacattcttaaaaattgaaatcacatcaagtatctttttggaccacaatggaataaaactataaatcactaacaagatgaacatttgaaactatataaatacataaaaattaaacaatatgctcccaaatgaccaatgagtgaaggaagaaattaagaaagaaatataaagatttcttgaaacaaataaaaataaaaacacaatatacagaaaaacctgtgaaacacagcaaaagcagtattaagaggcacatttatagtaataaatgcctacatcaaaaaaagtagaaaaatttcaaaataacctagaaatccatctaaaggaactagaaaagcaagaacaaactgaacccaaaattaaccgaaggaaaaataaagatcagagcagaaataaatgaaattatgactaaaataataaagaaaaacaataaaacaagwggttggttttgaaaagataaacaaaatcaagaaaaagagctagatttttttttaaaaaga

SEQ ID NO: 196746 - DNA, 350 bp, Homo sapiens
attggctccacgaattctaccaaatcctctagcagctgcagcagccgcagcagcagtggcagtgagttcccccttcagtcttcgaactgctccagcagcaacactgttccagacttcygcgcttcctccggcactcctgcggccagctcctggacccattcggaccgcccacactcctgtgctgtttgctccttactaaattccaaataggagtaattgtactgcaataatttttcaaaaaacaaaaaacaaaacaaacaaaagagaactatgcagtgtttatttatagtttaaagtatatctgaagagccaggacttttgatagtgaattgaaaaggttataaaaaagt

SEQ ID NO: 196747 - DNA, 350 bp, Homo sapiens
attggctccacgaattctaccaaatcctctagcagctgcagcagccgcagcagcagtggcagtgagttcccccttcagtcttcgaactgctccagcagcaacactgttccagacttccgcgcttcctccggcactcctgcggccagctccyggacccattcggaccgcccacactcctgtgctgtttgctccttactaaattccaaataggagtaattgtactgcaataatttttcaaaaaacaaaaaacaaaacaaacaaaagagaactatgcagtgtttatttatagtttaaagtatatctgaagagccaggacttttgatagtgaattgaaaaggttataaaaaagt

SEQ ID NO: 196748 - DNA, 550 bp, Homo sapiens
aacaggtaacacaatgatttgaacacagtctggctcagttgcatgtgctcttcatttgttttttattgtttaaaatttaattttttataaaataattgaattcatcctgatttattatgcatgctgaaagacaacatcttaaacatttgactataaaagaaactaagcgtggcccaagctagagtcaattacrtatatccaaataccataatgctaaggtattaagttgcttaaaatcatttagaaggaggaaagaaaaggaaaacctatagctctcaactaacctcttgtgcagaatggtaagaataaaccacagggcttcattgcacctttttttccccctgcaaaagatgagaaagtaggaaaacgattcgcttttcttactgtttcccaaaggctgattcagatttctttgcactactctaccaaagactctgggacaatatatgtgacaaggagttaaaaataatgggtgaaattcagtgagaagagaaagatttgagatggtttgggcttgcatttctgtgccatttttctgccagcgccctgt

SEQ ID NO: 196749 - DNA, 550 bp, Homo sapiens
aacaggtaacacaatgatttgaacacagtctggctcagttgcatgtgctcttcatttgttttttattgtttaaaatttaattttttataaaataattgaattcatcctgatttattatgcatgctgaaagacaacatcttaaacatttgactataaaagaaactaagcgtggcccaagctagagtcaattacgtatatccaaataccataatgctaaggtattaagttgcttaaaatcatttagaaggaggaaagaaaaggaaaacctatagctctcaactaacctcttgtgcagaatggtaagaataaaccacagggcttcattgcacctttttttccccctgcaaaagatgagaaagtaggaaaacgattcgcttttcttactgwttcccaaaggctgattcagatttctttgcactactctaccaaagactctgggacaatatatgtgacaaggagttaaaaataatgggtgaaattcagtgagaagagaaagatttgagatggtttgggcttgcatttctgtgccatttttctgccagcgccctgt

SEQ ID NO: 196750 - DNA, 474 bp, Homo sapiens
gaattcctcactcccgtctgctagagtggtatagctgtagaaagtgctttaaacggcctagaaatcccaaagccaccaaatgaggctgtggagaaatcaagtgctccactccactttgcagggtacctgatttgggtaggtccagtcaccagccagaagttctggctttgggcactgcttccgctctgttcttacaaatctgcttcactaccaggctcaaggmtgattcaggtgaggggattctttattctccaggtcccaaggacaattcctggggaacaaagtgtggagttgctaggcgaaacttgatacatatttagatatatggcatatagtctccatttgtatgctcggtcctgaaaattttgggggtctgtcttatagaacccatccatatacaggatgctgtgttaatcacaggaggtaaaaaataaatgcaatataagttgtatatgcaagagtaataggactcta

SEQ ID NO: 196751 - DNA, 617 bp, Homo sapiens
tattactttttttctctacaaggtaaattgcmctctttcttttctttagcatctgtaaattagggactcattctaggaaagaagccttggcatgtctttttagcctaatttaatatcaaagcattgtccttagttgataacaatcacctcagcaatctatatcaatgtcttatcatgtcagtgccttaatttctaagtcaaagaggattatattctctactcatttagtatataaatatactccataacataactagaacagtgtctgccagactgttggtaattgataaacacggatgctgctgccatcaaatttgttaggcatttgcttatcttttaaaagttggagttatatccctgtcaggtaggtgctagactgaaaattggcatagcaataaaaaagcatatcattgacctcctaagtgaaattttcatccttaatcattttcctcttataatttttcaaataatatttatttcactcttttctttatgctcctttggctctcaaaacatccccctatcatggggccaagatgttggggaaatttcacgaatcaaaaagaatcctattagtataaactagtgattgtgagactttagtatgcgtcagaatc

SEQ ID NO: 196752 - DNA, 618 bp, Homo sapiens
aattgtctgtttctctttgcagttctatcagttttttgcttcatgtgttttgaagatctattactatgtgtgtaaatgtttaggattgctgtgttctatcggagaattgattcctttataattatgaagttatcttttttaaccctgctaatattatatactgtgaaatctactttctatgataaaatatagctacttcagttttctttttattagtgttagtattgtatatcatttgccatacttttatagttaatttgtgtctttatttgaaattccttttataaggcagcatatagttggatcttgctatcttattcaatatgacaatctcttttaattaagatgtttagatcattttcatgtaatttgattattaacaggattgggtttaactctatcgtctatttggtttacatttgtactagactgtgttttttcgtttcccttttttttctgccttcttttagattaaatttttaaaatgatttaaactaatcttttttaacctattagctataacttttagattgttarcttagtaatcactttagggttcgtatcttaatttattacagtttactttcaagtgataatatatcattgcacatacagcat

SEQ ID NO: 196753 - DNA, 657 bp, Homo sapiens
aagaaaaaggcaggcattgaatatgagttgcaatagtgccattatcaacatacatttatgcagctgtcactatatacagggcagtatgttagctctgggaaacagactgtataataggatcaatatatcccctataatgagttatgcaaacagaagaagtggctgggagatctaagtgatacaaatacctgtarataaaactcttaaaaacccagagaataaagatgttagcaagctgattctgaagtatgcatagctttcaaatatctagaattgtcatcaatgtgtattattcctctcatatctatatatatacacatacacacacacacagacacacacacacacacacacacacacacacacacatatatatatatataaaatcttctaggaatacaaaaacacttttctactcctcagcagtaaaaatgtagaactttccctgggatagaaaagacacatatataaaaaagattaacagaacaagaaggcacagataccaagtaaataacataaaatgcaatataaaatttcataacgggttgggtagtagaaaataatatacatagaaagaagtcattcaaagcgttaagaattggatctaagccctgggaagatgtttgcgctcatatacacagagaaaacagaaaaaca

SEQ ID NO: 196754 - DNA, 657 bp, Homo sapiens
aagaaaaaggcaggcattgaatatgagttgcaatagtgccattatcaacatacatttatgcagctgtcactatatacagggcagtatgttagctctgggaaacagactgtataataggatcaatatatcccctataatgagttatgcaaacagaagaagtggctgggagatctaagtgatacaaatacctgtagataaaactcttaaaaacccagagaataaagatgttagcaagctgattctgaagtatgcatagctttcaaatatctagaattgtcatcaatgtgtattattcctctcatatctatatatatacacatacacacacacacagacacacacacacacacacacacacacacacacacatatatatatatataaaatcttctaggaatacaaaaacacttttctactcctcagcagtaaaaatgtagaactttccctkggatagaaaagacacatatataaaaaagattaacagaacaagaaggcacagataccaagtaaataacataaaatgcaatataaaatttcataacgggttgggtagtagaaaataatatacatagaaagaagtcattcaaagcgttaagaattggatctaagccctgggaagatgtttgcgctcatatacacagagaaaacagaaaaaca

SEQ ID NO: 196755 - DNA, 657 bp, Homo sapiens
aagaaaaaggcaggcattgaatatgagttgcaatagtgccattatcaacatacatttatgcagctgtcactatatacagggcagtatgttagctctgggaaacagactgtataataggatcaatatatcccctataatgagttatgcaaacagaagaagtggctgggagatctaagtgatacaaatacctgtagataaaactcttaaaaacccagagaataaagatgttagcaagctgattctgaagtatgcatagctttcaaatatctagaattgtcatcaatgtgtattattcctctcatatctatatatatacacatacacacacacacagacacacacacacacacacacacacacacacacacatatatatatatataaaatcttctaggaatacaaaaacacttttctactcctcagcagtaaaaatgtagaactttccctgggatagaaaagacacatatataaaaaagattaacagaacaagaaggcacagataccaagtaaataacataaaatgcaatataaaatttcataacgggttgggtagtagaaaataatatacatagaaagaagtcattcaaagcgttaagaattggatctaagccctgggaagatgtttgygctcatatacacagagaaaacagaaaaaca

SEQ ID NO: 196756 - DNA, 563 bp, Homo sapiens
ttcttaatatcctttctttcaccctatataccagtctatgtgcctctcccaacttaaattactagactcaggaatatcagttatagttttgaaaagggtaaagaatgtctaaattagtttatggccttggaaaaattactaaattaaatatcacagcaacatcagtaagtaaaacatgcctgattagtaattctcatactgyaagaaatggaaataaccagatagataacaattaactagattttattaggaaacaaataattattacaacaacactgatctggcaaggtttttactaagtttggcaattcttgtaaacttaaaacttcttccaccccaacaccattcatagaatggagtccctatttccattaggcaggccaggaatactgagttccttatcactctcacactagctcactggtagagcagagggtcagtgctagagaaagtaaggtgagaagacaagaggctaccacccgtattttctgccatgcttgtaaacaaaggtgtgactttcaccctaatctctgacgccatggctcagagattttgggcagtgg

SEQ ID NO: 196757 - DNA, 563 bp, Homo sapiens
gctttctcaaaaaaaattgactacatttgaaactgtggagaaattcaagcccaagggcactttcaaaaatatgaagattttggtagtaaacaatcttttaaaaaggctgatagctctataagagcaacaaattaaactatatgctaggagatttaccagaaaaaaaaaaaatagaaaaaaagagccctacaggggtcaraacaaatcccaaagactggcctgtaaaactacctctgcaacaaggcctgcatttaattggatcagactgtgaaataatttatgtccccgggcattatcaaaaacagtagagcaaatcattgcccattagtggagccacatagctgagtgtgatgccaaaccaggcagataacttaacaaagatcaggaaaagcaacagttgaagagacagttgccaacaacattgtcatccagggtgattgcgtgcttaaaggtgcaccatcaaagaagaactatggaaaaaatagacttcaaaaaacagtttaggtaagtcatgaaacagaaacaaaaaaagaacaaaattaccaggtcctcagagaaataag

SEQ ID NO: 196758 - DNA, 563 bp, Homo sapiens
gctttctcaaaaaaaattgactacatttgaaactgtggagaaattcaagcccaagggcactttcaaaaatatgaagattttggtagtaaacaatcttttaaaaaggctgatagctctataagagcaacaaattaaactatatgctaggagatttaccagaaaaaaaaaaaatagaaaaaaagagccctacaggggtcagaacaaatcccaaagactggcctgtaaaactacctctgcaacaaggcctgcatttaattggatcagactgtgaaataatttatgtcccygggcattatcaaaaacagtagagcaaatcattgcccattagtggagccacatagctgagtgtgatgccaaaccaggcagataacttaacaaagatcaggaaaagcaacagttgaagagacagttgccaacaacattgtcatccagggtgattgcgtgcttaaaggtgcaccatcaaagaagaactatggaaaaaatagacttcaaaaaacagtttaggtaagtcatgaaacagaaacaaaaaaagaacaaaattaccaggtcctcagagaaataag

SEQ ID NO: 196759 - DNA, 590 bp, Homo sapiens
atggaatatttgcttcaaattgccatctaagatatgttcaaggataactaagacaatattcaatttttatcttgtgtgaagactttagaacccagccctctactctccaagtctgggaatatgaaattctgttccacgtcccagactgatcacttacaacctcccatgttgtcgctttatgacctagagtgccacaaccatcagcccatgtcactaatattattggctgctgctaaatcacctgtcaaattttctgagttctcagtcaatttactctgaatgttaagcttgctctttagtgtccatgtttcttttgatkctgtttacataagaattctccaaagactcaggcttgacctcagtttcatgcttagatgctcttccagtaacaccatttttttttcttctcagtgccagaaaaaataaaattcaagtattgtttagtgtcatatgccctggcctgcatgaatgactaacgtaaatttgaagaagactgcttttggtttttgtgtctgcttaaaattcaaattccctaatctaactctttgtgtgtttaactatttcatagacaccagatcgtgtcaaaaata

SEQ ID NO: 196760 - DNA, 589 bp, Homo sapiens
tggctatagaagaactggctcagtcagtccaaataatgaatcctttctccctgtgttggacctagcctcccttagaaacagcacttggattttaaaaacttttcacctatatagatggtttcagtgggagtgttactgccctctagacacgaattsgtaatgtttttcattgatatgttcactggtggctactaataggcatttactgggtaggagactgatatgatggacattctacaatacccgagactaacactataaagaaatgttttacattgttcacaccttttgaagaatatgtcactaaatcactaagtaggtgaaaagcctatttgtatttatctgtagctaccttccataataaaactgtattttcatacagttttaatgtatgctaaatgctccagaaatgccactactgtgtttatagagtgaatttcttgctttttttttttgtaaaaaattttatgtagagttgttagctatttcagaaaaacacaccccaacagcattgcttgatatttgggcttcagtacacactcctatgtgtactcatagctgtcacatttcaaggatgctacaacgtggt

SEQ ID NO: 196761 - DNA, 620 bp, Homo sapiens
acggttatcactcctgatagagctgatcctaagaacaatttagtggttttagcccactgctccctgtgaccttactatgcagaatcacagtcatggccaagagtatcattcccaactttttttttttttttttttttttgcctcaaaatctgattttcttgttccatgaaatgcttggctcgggctcacaatatactacttttgtgtccttgggaaattttcttaacttctagrgttttctcatttttgcagctctgtactgtggaattactttataaatacatacaatttatacaataaaaaatgaaattattttataagtatgtacagttattttaagtatgtaaaacacttcgcaaattagctacttgttgtttattcacagatgcatacacacatgctttcaaacaatcatttctggtatatagggggcaataatcagctatggcaccatcttaaagttgtcatgttttattccatctctaggttctcaagatatatttttggcagttacttcatattttaataatggaacattaacaggcaaataaaaactaatcagggagtggacctttcagtgtgcaagggaataaatgtattctagtgacaaaacttagtgt

SEQ ID NO: 196762 - DNA, 577 bp, Homo sapiens
ctggccaagtctctttatcatggacttttcagtgtagcattagatagtgaccatagcagtatatggaatgagagacagcttcaatagcagatgtagctggagaggcagcctaggaatattttggagaggaagttaagaactagctgagaggcaaaaaagtagtatatgggtagataggatatgagtgtagagcttatttgcaatttgttattgggtatggcaaacattgctaacgtaacagtgattggcatatttggaaggggagctgtgcatacccaagtaaagttaagacagggtagttttactttggagattgatctctccagatttagcatcagactttagagccagaagggttgtagagttacagtgcatcaacattttcatgatcatttaactcttaaaacaatgtgacaacagcatgrtgtggccatcctgcgaattccttgtgaatagtggctattgatgtctgaatatttttgccacaaactccctgcgtacagcttggtacagggcatgtatttaatagatatgctagactagtcttcttcttcttttaatattgatgatttttgta

SEQ ID NO: 196763 - DNA, 562 bp, Homo sapiens
agatcttttgcagcaggggacaaaggggtggaggaaaactggcaattattacatggaaatcattaaccattaaaaaataaaaatgacgagcaaagtgtcatttatataggggcaaggggtggtttccagggctcgaagtccatggtgtgtgtgtatgtgtgtgttattaaacattaggagataaaatgaaatacaatcctaaaatgtgttttgcatttatatgatttctagtttgtttatttatttmcatgcatttgcatctaaatgacattttctaaaactgtacccataatattgtcgcaaaatgtgtagttgcgtgactctaagcacctttggttaaaacccctctattttgatttttatgaaaaaaataatgttatttgggctaaatctatggaacctggacaattaaaaaagtgtttattatgtgcccattcagatgtgatttctaaatgtactctttttagttactctttccaacaactttgcagtagcttaaaaatgttattcttttcaattgtttgaagctcagagaaggcacagaacataaccaattaagtga

SEQ ID NO: 196764 - DNA, 435 bp, Homo sapiens
tggaggaaaactggcaattattacatggaaatcattaaccattaaaaaataaaaatgacgagcaaagtgtcatttatataggggcaaggggtggtttccagggctcgaagtccatggtgtgtgtgtatgtgtgtgttattaaacattaggagataaaatgaaatacaatcctaaaatgtgttttgcatttatatgatttctagtttgtttatttatttacatgcatttgcatctaaatgacattttctaaaactgtacccataatattgtcgcaaaatgtgtagttgcgtgactctaagcacctttggttaaaacccctctattttgatttttatgaaaaaaataatgttatttgggctaamtctatggaacctggacaattaaaaaagtgtttattatgtgcccattcagatgtgatttctaaatgtactcttt

SEQ ID NO: 196765 - DNA, 453 bp, Homo sapiens
aatgccccacctttagaactccactgtttcctacacttagccctgcccctctaatagtgcttcagaaacacttctctgctttctttcagagccagatattagaaagccagtgttaagattggattgtgttttcagggaaccaggtttgaaggccaattctgatctgaagcagccaggctgcagggtggggaaatgtttcccttgcatccgaataatagttctaattgtttttcttgtttttcccctttagaaacacattatatacataaaatagggtctgtagcattaagtatagaaatgtgcatctatgaggggaaagccaatgatctttcaaaacatgtttttcaatcttagaaaatgcattctgaattctaaacaaatgaccacagccaaattttgggaatgcaacttccatyaaatgctatcagtgatataggacagcagaatggacta

SEQ ID NO: 196766 - DNA, 593 bp, Homo sapiens
tttgggtttccttcaagccacaagatgacactgggcccatgccatttgaatgtcagagtgcttttgtatatgaaaaaacaatccaccaaacatttttttaataaagaagtcactttgatggaaagtcattcattgcaaaaatattcagtacagtatctcttgatatagtgattagcagtagattttaaataattatatttacccagaaaagttaataaagtttcaaattctgctgcatgcagtgtagtatacttatagattcagaataaagtcatgaattatctaaccaaaaatgcattcactaatcattagggtaaagcaaatcaaaactacaagataccacttcacatacattagaacgactattaaaaaaaaaaaagaaaataacaagtgttagcaaggatgtataaaaattggaayctgtgcattgctggtgagaataacaatggtactgtcactgtggaaaacagtatggcagttcttcaaaaaaattaaacacaggccaagtgcagtggttcatgcctataatttcagcactttgggaggccgaggagggagaattgcttgagcctaggagttcaagaccagcctgg

SEQ ID NO: 196767 - DNA, 328 bp, Homo sapiens
aattaaataaattgaataatatatttaatgcagataacttttgaaatacatatgaaagttttaccctaactataagtcacatatagaaagagtataaaagtaactgtacacctttamtttttgtaatgtgaatacccataaaaacttctccctactaatggtataaattattgtccacaatcaagaattctccatttactttgccccccccaccaattctctccttactaaatttaatcaatattgtaatttatgttgactgtgtttttgcacattttagggttaccttcttaaatatgtatccctaaacagtggatttagttttgcc

SEQ ID NO: 196768 - DNA, 617 bp, Homo sapiens
gcatgtgcatatatgcatacatatattgatattaaaatgaacacttaagtgttttyataattatcaaattgctttatttcagtgaagcctaagaacaagttttgttatgccctcaggaaaaataaaagataacaaaattatccctcatgggtacctcaaattatggccttactaaaattatagctgtacatgcaaaacaacatattcatgagtggttggttaaaacctgaaattatggagaaggctgaattgacatatacagcattatcggcaaaaaccttcacacactgtgccctctaaaatgaggctttattttctgtctgaaacattgacaagggatattcaatatgggatatgccaatgcatactcgtttatctgtcatgcatttttcttattctaatttctccatagagtttagcagtcatgacttttgtaattattattgcattattccctccattcatataaaattataatttctctttagtaaaataaagcatgcaatttgactaatttgtatttaatgcttatataccaacagtagaatatttagcagattgatataacaccataattcatgatacagtattccatatataatactcatgatcagaag

SEQ ID NO: 196769 - DNA, 617 bp, Homo sapiens
gcatgtgcatatatgcatacatatattgatattaaaatgaacacttaagtgtttttataattatcaaattgctttatttcagtgaagcctaagaacaagttttgttatgccctcaggaaaaataaaagataacaaaattatccctcatgggtacctcaaattatggccttactaaaattatagctgtacatgcaaaacaacatattcatgagtggttggttaaaacctgaaattatggagaaggctgaattgacatatacagcattatcggcaaaaaccttcacacactgtgccctctaaaatgaggctttattttctgtctgaaacattgacaagggatattcaatatgggatatgccaatgcatactcgtttatctgtcatgcatttttcttattctaatttctccatagagtttagcagtcatgacttttgtaattattattgcattattccctccattcatataaaattataatttctctttagtaaaataaagcatgcaatttgactaatttgtatttaatgcttatataccarcagtagaatatttagcagattgatataacaccataattcatgatacagtattccatatataatactcatgatcagaag

SEQ ID NO: 196770 - DNA, 488 bp, Homo sapiens
aatagagatagaaagacaatttaaaaattgctaaaacttagatttggtatttttaaaaaataaacaaattagaaaagamgagaaaaatcaaataaaattaaaaatgaaagaggcaatatttcaactgatggcacaacaattaaaaaatcataatagactattatgagtgacattcccccaactattggacaaactagaagaaatagataaattcataaaaatataaaatctactaagtgagaagtaagaagaaatagaaagcctgaaaagaccaataacaaataaagaggtttattcagttatttaaaacttcttaagaaacaaaagcttagaactagatggtttcacaggtaaattcaagaaaaaaaaaacttttaaaaaataatcaatactaatgttacttaaacgttttcaaaaaatagaaaaaaaattgaacactttctaactcattcaataaagccaacatcaccttaatactaaggcatgag

SEQ ID NO: 196771 - DNA, 532 bp, Homo sapiens
ttgatttactatttacgttgttttaaatgtttgtttctatgtctgatttttcttcctgagaaataggtacacttatcaataatactggtgaaacatttatgtacaatttgagccaccttacctttccttctagttatatgaagctgtatattattactaaaggacttccactttaaaaggattaattcatagatttattaagaacattatttacatgtttattgcctctgtagagtgatactgttcattgaacaaaaaactttttctatatcctcacttttttttttttgccatgcacatgctatagtttatttttaatacagattctcaacttgtgtgaactttactacataatctaaggaaattttaaccaaactcaaataatcgaaagaggcagaagaraaacatacttgccagataggaaaataggcacattggagtaaaaactacgtaaaagtaatttctaccaaaatcaagcagtatcctaatatatgttgacatactagattattaaaattatgtgtggaatcgt

SEQ ID NO: 196772 - DNA, 590 bp, Homo sapiens
aagttctggcttcagtgctaacatgttaaagcagcttggaaattatcactcctgccatcataattgcaacaacataaatatggaaaacctgaaaatcagtgacttttcttggaaacattagagaattgagtgcattatcctgttcttgcattgctataaagaactacctgagactggataatttattaaacaaaaaataggcttaattgactccaggttccaaaggctgtacgggaagcatgcctggggaggcttcaggaaacttacagttatggcaaaaggcaaagagaaagcaggcatgtcctacatggctgaaacaggagaaagagggagtggggaaggtgccatacacttaaacaacaagatctcatgagaactcactcmctatcatgagaaaagcaatggggaaatctgccaccatgatccaatcacctcccaccaggcccctcctccaatgctggagattacaatttgatatgcaatttggtcaaggacacaaatccaaaccatatcactgagactgcaaggcaaaagcaccgggaaatctggagagggatggatccagagagtcacaggctacatttgcttac

SEQ ID NO: 196773 - DNA, 581 bp, Homo sapiens
ataaaaagttttaatttaggtacatcagaaataatcagatgaattgtcaattctagtaaatgaagtggttgtatgatggtttctatgagctgtatgctatcaatggtaatatttttcactttttctggaagtgtcatataatataattaaacttgtcttctgtcttttgcaattgtaaaagatgtcttaaaaaaagcttaaatatgggccgggaatggtggctcatgcctgtaatcccagcactttgggaggycaaggtgggaggatcacgaggtcacgagttcgaggccagcctgaccaacatgttgaaaccctgtctctactaaaaatacaaaaattagctggatgtggtggtgcgcacctgtaatcccagctactcaggaggctgaggcaggagaatcgcttgaactcgggaggcggagagtgcagtgaactaagattgtgccactgcactacagcctgggcgacagagtgagacttcatctcaaaagaaaaaaaaaaaagcctaaatacatggaacttaagtaatacatagaactacttaatgtaagaggtagcaataagagtcatgtgtttggatt

SEQ ID NO: 196774 - DNA, 554 bp, Homo sapiens
tataattatttaagataagtcttttatattggagtagaatgactctctaatccartgtgaatggtgacattataagaagacatggagacataaagataaagccacgtgaaaacggtggcagagattagagtgttgaatctacaatccaaggaatgccaagggttacctgggctatcactagaaaccaagagcgagatgtgggacagtttctccctcagatccctaggaaataaccaactatgttgaaaccttgatttaagacttctagactcaagaattgagagaataaattcctgttgttttaaacaatccagtttttagtacctggttatcacagccctaggaaactgatacatcttattatatcaacttttcttatattcttttatctttattcctctgctcccactttcctagttgtgcttttcagtaactaactcctacttttgctttaagctcagttctctaatgcatgtctgtacctctgtcatacaatccacactcttagctattaattgatatatatctatatcatatcctttatcataatatga

SEQ ID NO: 196775 - DNA, 543 bp, Homo sapiens
tggctcttagtattctgaggtatgttttgtcaatgtttttgtctagtttgttgaggatttttaacatgaaggaatgttggattttgttgaaagccttttctgcatctatttggatgattgtatggttttgtctttagttctgttcatgtgataaatcatgtttattggtttgtgtacattgaaccaaccttgcattaccaaggctaaagcctacttgattgtggtggattagcttttcaatatgctgctggatttggtttgctaatattttgttgaggatttttgcatctatattcatcaaagatattggcccgaagttttgtttgtgtgtgtctctgccaggtttttgttcatgatgatgttgacctcatagaataagttagagaggagtccctcctcttcaattttttggaatactttcagcgataatggtatcaaytctactttatacagctggtaggattcagctgtgtatccatgtggttctggactttgtctagttggtaggcttttcattattgattcaatttctgaactcattat

SEQ ID NO: 196776 - DNA, 532 bp, Homo sapiens
tatggtctggttacaagtggaatagcattcttatttgtctctaaaaaccactttttaaggattaatgaagtctcttcaatgaacatttcttatatttcttatattaacaaaacctgatcctatcctgaagacactacttccttgactcccttccaggtagaatttgttgtcttacactctgactacacatcactgcacmaaactatggtaaatgttcttttcacttcctcagtgtttccgtgttgttattccttgatctattttttaaaatgaaaaaaaagaaaagaaaagaaaacccactttgcccctttagagctcatgccattaggataaatgcctttacccttacacatccatagtatctaacattttattgaaaatgttgtcccatgggatgcattattaatactaattgtagaaacccagtccaacaatatggcttttcaggtccttcacgttctcatctccaacagcttatcttcataacacgttttagtttcctactctttagactttagcacctgcaacagca

SEQ ID NO: 196777 - DNA, 546 bp, Homo sapiens
aggaatagtgagagaatggaaaataaatgtaaattatgatatatgtttctcaagaacttcatagtccttgattttgtaatcaatttgataaggaatatatatatgttyaaataacttcattaagagtatgaaaattattaaaacatttaatgactatgagtgctaaaggcatggagaataaagaaaacacttggataaaataaattaagcaaaaatttctagagaaggacagcttttgttatgattttaatggcaacagtggtgcagattggtagaaagaaatatctgaatagggttagatggacttgagcagtaaagaaatgaaggcagggatagcaaaaacacttttctagaaaggtcatagaaacagcaaatgaatgtattcaattatgggccaatatcctgaatttggacccagttgcttaaatgcataattccagcagtcctcaattttgtttcattgatttatgttttccccatctccactagaagcttggccaatttgatgtcaatggaaatgcgtgagatttttattcagcattcaca

SEQ ID NO: 196778 - DNA, 546 bp, Homo sapiens
aggaatagtgagagaatggaaaataaatgtaaattatgatatatgtttctcaagaacttcatagtccttgattttgtaatcaatttgataaggaatatatatatgttcaaataacttcattaagagtatgaaaattattaaaacatttaatgactatgagtgctaaaggcatggagaataaagaaaacacttggataaaataaattaagcaaaaatttctagagaaggacagcttttgttatgattttaatggcaacagtggtgcagattggtagaaagaaatatctgaatagggttagatggacttgagcagtaaagaaatgaaggcagggatagcaaaaacacttttctagaaaggtcatagaaacagcaaatgaatgtattcaattatgggccaatatcctgaatttggacccagttgcttaaatgcataattccagcagtcctcaattttgtttcattgatttatgttttccccrtctccactagaagcttggccaatttgatgtcaatggaaatgcgtgagatttttattcagcattcaca

SEQ ID NO: 196779 - DNA, 555 bp, Homo sapiens
tggttccaaaatctgtttttcatgttattctttggggtgtgatctgttcctgattagtttaatgtttgtgccttaattgtagtatatccttaaggaaattgagtatcggtagactatttattgcagttgaagatatagcaaaagaaataagtttctaggagggaaatacctacaagtgaatgataatacagtgttagtgtaaaacagtctttcactaaagaatatatataccattatttactcaaaaaatattcagcaacaattttacccacaggtgaaatgcactggagtgtcctaattttgtatcatgtgtccwttctgccattctcaggctaatggcactcttcacgacaagcctgattgcactgttaagctccagaggaaaaaatgtggctatagagtatattaaaatacatacaattgaaaaggaagatgttcatttttgcaagcagaagattaccaacagaatgctaaaattaaaggtcagttttagaatgagctctcatattatggagtttacgaacaaactatgtattatataagaaaagaaaaaac

SEQ ID NO: 196780 - DNA, 373 bp, Homo sapiens
caagtaggctgctttctttttcttttgatcttttggggagttttttatattttttgtttttgaatttttgcagggggcagaatttctcctttactcttaagctggaagaagaccctactaaacccacacatgaaaaacataatttaaaacttaagttcatcatttgccatttgaattattataattaagcatgttaaattgtccattgcttcaatgtctgagtttttctgtgttcagagtactcaaatatgaatactgaaaatattttttaccactgagacaataaaraaagtatcatcaaatggagcaagtgactgaaaggaactgtggtcactacaaatgtcaatgaagccagaaatagtcctttaaaaac

SEQ ID NO: 196781 - DNA, 564 bp, Homo sapiens
tgagggcaaatatttagggtaaaatgtgggagctaagaacacaaagtacattgattctctattatggctagcagatatctaagaatgttagcataggtctttgaataaattttgcttctaagagaagttactgtttattcctaattggacagggaggagtctctttgaagaggaacctctacttcactttttacaagctaaagacctactggacattcttagatggatctttacagtgatctatggacctaaagtaagaatttatccatagcttggtgccaacttttgcctctggctgccattactattacaaagttttatctactaaattgactcatatctaaaagtaccagcagccaccaaataattttgcatttagatgcgtaaggatggttgcttccactttattccctaaatcaagcttggcatgcttttagtttttaaagtamatctgtagtttgacttgaataccctcatccatcattaggtaacttttaaaagctgatgttatttcagggtggaattctcttctacttctcttatcctctcatacccttagttttt

SEQ ID NO: 196782 - DNA, 491 bp, Homo sapiens
tcagcatggtggtgggcttatccccagccatgtttatccatgatgtaagtaaagaattgtatttatccagagttatacatgtgtcaaagacaaatccagagaggcacaaaacagtgattataaggataaagcatgaaattaagcttggtgaacaagtgatggaatagcaaggggataagagacaataaaagatggtaggatcaatgaaggagatatactaatctttttaattggacccattttttaaagcacttattctctcagaatcttaattttgttatttgtcacgttatgtatttttgtgtcatgtaaaaataatgataaatatagcattaatccactcatccattcacctattcaacaaaattttactgatggatactaagtgccagatgctgtgggatataaagttaaataaaacttgacctcaagsacattatagtctagcaaagaaaacaggtaaatgaggaaccacagtacagtgtggtaag

SEQ ID NO: 196783 - DNA, 413 bp, Homo sapiens
accacaaaagttttctcctagtytttttctgaaagtgttatagtgtgaggttttatgtttgtgtctatgattcatcttgagttaattttatatatgaatgagttatgaattgtttatttttgtgcttatgaatatcccattattccaacattacttgttgagaagactgtcccttctccatcacatacatgtgggtctactcttggactctttattctattgatgtgtttgtggaacttgacaccaaaactatactgtcttgattactgtagctgaataaaattattagaacttttgacattaggtagtattagtactctatctttttttcaaagttgttttggctattctagttctttgcatttccatatgaaatttaatattactttgtcaatctctacaaaaaaagactc

SEQ ID NO: 196784 - DNA, 386 bp, Homo sapiens
agaccacaaaagttttctcctagtctttttctgwaagtgttatagtgtgaggttttatgtttgtgtctatgattcatcttgagttaattttatatatgaatgagttatgaattgtttatttttgtgcttatgaatatcccattattccaacattacttgttgagaagactgtcccttctccatcacatacatgtgggtctactcttggactctttattctattgatgtgtttgtggaacttgacaccaaaactatactgtcttgattactgtagctgaataaaattattagaacttttgacattaggtagtattagtactctatctttttttcaaagttgttttggctattctagttctttgcatttccatatgaaatttaatatt

SEQ ID NO: 196785 - DNA, 394 bp, Homo sapiens
ttctcctagtctttttctgaaagtgttatagtgtgaggttttatgtttgtgtctatgattcatcttgagttaattttatatatgaatgagttatgaattgtttatttttgtgcttatgaatatcccattattycaacattacttgttgagaagactgtcccttctccatcacatacatgtgggtctactcttggactctttattctattgatgtgtttgtggaacttgacaccaaaactatactgtcttgattactgtagctgaataaaattattagaacttttgacattaggtagtattagtactctatctttttttcaaagttgttttggctattctagttctttgcatttccatatgaaatttaatattactttgtcaatctctacaaaaa

SEQ ID NO: 196786 - DNA, 402 bp, Homo sapiens
ttctcctagtctttttctgaaagtgttatagtgtgaggttttatgtttgtgtctatgattcatcttgagttaattttatatatgaatgagttatgaattgtttatttttgtgcttatgaatatcccattattccaacattacttgttgagaagactgtcccttctccatcacatacatgtgggtctactcttggactctttattctattgatgtgttygtggaacttgacaccaaaactatactgtcttgattactgtagctgaataaaattattagaacttttgacattaggtagtattagtactctatctttttttcaaagttgttttggctattctagttctttgcatttccatatgaaatttaatattactttgtcaatctctacaaaaaaagactcc

SEQ ID NO: 196787 - DNA, 612 bp, Homo sapiens
atgagcatttcatctaacaacttttatcccatgtaactctatgtttcatagtcttaataaactactcctagagtaaaaatagccttgtagttgcacattggtttacaagataggaggtactcagtctgactgctctttagartggcagatttgataatgcatgtggccacattttccacttattggataagcatcctgatgtgggagcactcacatgtacatgaagctaagtagctttcaatggtctgagggcaaagacagcactcttatatgactagctgaaagtttgcaagatgacctaagtagtgtgaaattggccgaggttttggatttcatttccagatatttaagtctgaatttttcataaacagcctttggggatgggacaaatcagatcaattgatctttagagacctaaagaaattaaattagtctgagtcagttactgcactaaaccatctagtaattgaattgctccttgtaactgattgaaaacagccctatccttaacaatatagggagcttttctttataagagatctgagagaaaaacacatctttttatgacatgatgacagatattgcacttttctaacctaattgaatatgatg

SEQ ID NO: 196788 - DNA, 219 bp, Homo sapiens
atccacaactacactagagtgaaaggtatattaccactttgatttctgttcaagaaagaaatatattcagtattataaagagaaattgaagcaggctgctggatagtatatctgatytgtgactttcttggatttggtgacaacagagatgaatatttcactcttagttttttaaaaaagctgttgaagttgcattggctattaattttattctcttct

SEQ ID NO: 196789 - DNA, 323 bp, Homo sapiens
accattaacactaattccagaagtttcagccccccaaataaacttcatacctgctggcagtaactacccatttccctctttctccaactcctggaaaccaccaatctattttctctctatatagatttgtctattctggacatttcatgttaagtggaatcatatgatatgtagccttttatgtctggcttcttttagttagcacagtgttttcaaggttcaccactctgtagtataaatcagtacttcatttttttkgcttaggagtattccattgtatggcttagtcttttttaaacaatatttttagtgaatacatagta

SEQ ID NO: 196790 - DNA, 323 bp, Homo sapiens
accattaacactaattccagaagtttcagccccccaaataaacttcatacctgctggcagtaactacccatttccctctttctccaactcctggaaaccaccaatctattttctctctatatagatttgtctattctggacatttcatgttaagtggaatcatatgatatgtagccttttatgtctggcttcttttagttagcacagtgttttcaaggttcaccactctgtagtataaatcagtacttcattttttttgcttagkagtattccattgtatggcttagtcttttttaaacaatatttttagtgaatacatagta

SEQ ID NO: 196791 - DNA, 591 bp, Homo sapiens
tacttgtggggttcttaattgtggacactctagtagattcagagtctagtgacagtgggctacaaggaacatggtgggctcacaaagaagtttaatccacaatctctgtgctgctaattattaataccccataaaagctgttcaggaatgtgtagcatcaacccagagctcccatacaattttagtgataatagatccattcagtttttttttgctgtcacgtgcaaaagcaattattttccctagaattagattaaatagaaatagagaaagtaattgttttgaattctttttctaattagtgcactaaaattaaatcattgctgtagctaattggtaaatctgggtgtataagagcacctgtactattcttgcaactttcctgaagtttgaaattatatcaaaatgtaaagaaatttccactgatactcctaggaattatgaaagttggattaaaatgatattagcagtagataattctcataatgagagaaaattcgaagacatctgaaaactcatgttgaatttaagttactcctttgctcaaagtatggcagtattatyagatatggtgacacatcaattgagcaa

SEQ ID NO: 196792 - DNA, 562 bp, Homo sapiens
gatttacccttaatgtctctgttggaggtggtgtcaccttctttagcatcatttagagccagttccagctctgattagctgtgcatgtcatccgacatctagcgcagtgcatgggcatggtgatttatcctcattatttgctgatgaattattgtgaaagcatattaatgaactataaagtacttcagaagtagaacgtattttaagtatagttgttcgttacaaagagacatagctcatgtcctggaggattttaaaatcttgytgatatttgtaattgtagactctatcgattgcctgggctttagaggatgtttataatttatttcaaaaaaaaaaaaatattttccccttccctcccaaaactgactttcaaaaacaagtcctagttggaataagtggatgaaacaaggcttcattcttcagagagtggtagctgtgtgtgagaaggttcgctataaactctttcctgtatctctcttcatatacatgtcttagctgttgctgtccatgagaacaggtttctgatttatgtagcttatttgcttccctgtttaccaat

SEQ ID NO: 196793 - DNA, 547 bp, Homo sapiens
gagttgcaagaagaccataaagaaactctgtacaccctttatgcagatccacaattgttaaccttttgccctatttactttatcatgtgcatttacagtgagtagtgtgtgcataaacacacatgcacacgcatagatatgtaatatatacaaattatttttctgaaccccttgagagtaagtagcatgtcatgccccattatctctaartaattgaaagtgtatttcctaaaaacaagattccactacataatcacagtagggttagcaacttcaggagatttaacaatgatgcagtactttgacatatcgtctgtattccagatttgtcaaattacacagtaatgtcatttgtagcatatcttttcttcagtacagatccacttcaagatcacatattgcatttagtcgtcatgctactttagtctccttaaatatagtatagctcttcagcctgtctttgtctttcatggcaaaaggattcctattgtattagaaatcatgaattcatactgatacctctaattccaatgcactcccacagagt

SEQ ID NO: 196794 - DNA, 547 bp, Homo sapiens
gagttgcaagaagaccataaagaaactctgtacaccctttatgcagatccacaattgttaaccttttgccctatttactttatcatgtgcatttacagtgagtagtgtgtgcataaacacacatgcacacgcatagatatgtaatatatacaaattatttttctgaaccccttgagagtaagtagcatgtcatgccccattatctctaagtaattgaaagtgtatttcctaaaaacaagattccactacataatcacagtrgggttagcaacttcaggagatttaacaatgatgcagtactttgacatatcgtctgtattccagatttgtcaaattacacagtaatgtcatttgtagcatatcttttcttcagtacagatccacttcaagatcacatattgcatttagtcgtcatgctactttagtctccttaaatatagtatagctcttcagcctgtctttgtctttcatggcaaaaggattcctattgtattagaaatcatgaattcatactgatacctctaattccaatgcactcccacagagt

SEQ ID NO: 196795 - DNA, 461 bp, Homo sapiens
ttcctccgcacacgcccttttgcctgccgycacgtgagtcgtgcttttgctcctcctttgccttctgccatgattgtgaggcctccccaggcaggtgagactgtgagtcaattaaacgtctttcctttataaattactcagttttgggtatatcttttttagcagtgtgagaacaaactaatacatgaggtaagggcaacccccaggagagaaaaccataataatgttcttttggagaagaactctctctcctttgttttttgtgagtctttcataatttttcttttagcagtttgtttccatcaattactttaaatttaatgccatcttctcacgaacaaattagtattacaaagcaatttattgtctgatcactgagccagttataactaaatgctactgattaacatggatatttggtccttgcttaatgttatttcaaaaattaaatttccaacttg

SEQ ID NO: 196796 - DNA, 461 bp, Homo sapiens
ttcctccgcacacgcccttttgcctgccgccacgtgagtcgtgcttttgctcctcctttgccttctgccatgattgtgaggcctccccaggcaggtgagactgtgagtcaattaaacgtctttcctttataaattactcagttttgggtatatcttttttagcagtgtgagaacaaactaatacatgaggtaagggcaacccccaggagagaaaaccataataatgttcttttggagaagaactctctctccttygttttttgtgagtctttcataatttttcttttagcagtttgtttccatcaattactttaaatttaatgccatcttctcacgaacaaattagtattacaaagcaatttattgtctgatcactgagccagttataactaaatgctactgattaacatggatatttggtccttgcttaatgttatttcaaaaattaaatttccaacttg

SEQ ID NO: 196797 - DNA, 488 bp, Homo sapiens
gtaaacttctgcatcattttctctgcttagcactctattttctcaccaaactgatgccctgtcaggagttccagttcatttggctagagtgagaacatctgtttaarttatctgttgttgcctaacaaatgtcaaagaaaaaaattattcgtgacactcggtaaagcacagtaaggcagacatttttcagaacatcttggtaggtgaagggatggcacagtggggtcctgcagtaggggagagacattgtgctcaacctcaaacaacaaaaaagtggacatttctatctagaaaaagcagggtgggctcagtgggtggaaaattactaactggaaacatcaggggtaagggaagattctggctgaactgacctaacaggattcttgctaaaggcaggcagtgctgatcagacatcacctgggtgctggtggagggggaggaaaatgatcaggtatcgaaggtgatcagatactgaggatggggaattc

SEQ ID NO: 196798 - DNA, 488 bp, Homo sapiens
gtaaacttctgcatcattttctctgcttagcactctattttctcaccaaactgatgccctgtcaggagttccagttcatttggctagagtgagaacatctgtttaaattatctgttgttgcctaacaaatgtcaaagaaaaaaattattcgtgacactcggtraagcacagtaaggcagacatttttcagaacatcttggtaggtgaagggatggcacagtggggtcctgcagtaggggagagacattgtgctcaacctcaaacaacaaaaaagtggacatttctatctagaaaaagcagggtgggctcagtgggtggaaaattactaactggaaacatcaggggtaagggaagattctggctgaactgacctaacaggattcttgctaaaggcaggcagtgctgatcagacatcacctgggtgctggtggagggggaggaaaatgatcaggtatcgaaggtgatcagatactgaggatggggaattc

SEQ ID NO: 196799 - DNA, 488 bp, Homo sapiens
gtaaacttctgcatcattttctctgcttagcactctattttctcaccaaactgatgccctgtcaggagttccagttcatttggctagagtgagaacatctgtttaaattatctgttgttgcctaacaaatgtcaaagaaaaaaattattcgtgacactcggtaaagcacagtaaggcagacatttttcagaacatcttggtaggtgaagggatggcacagtggggtcctgcagtaggggagagasattgtgctcaacctcaaacaacaaaaaagtggacatttctatctagaaaaagcagggtgggctcagtgggtggaaaattactaactggaaacatcaggggtaagggaagattctggctgaactgacctaacaggattcttgctaaaggcaggcagtgctgatcagacatcacctgggtgctggtggagggggaggaaaatgatcaggtatcgaaggtgatcagatactgaggatggggaattc

SEQ ID NO: 196800 - DNA, 488 bp, Homo sapiens
gtaaacttctgcatcattttctctgcttagcactctattttctcaccaaactgatgccctgtcaggagttccagttcatttggctagagtgagaacatctgtttaaattatctgttgttgcctaacaaatgtcaaagaaaaaaattattcgtgacactcggtaaagcacagtaaggcagacatttttcagaacatcttggtaggtgaagggatggcacagtggggtcctgcagtaggggagagacattgtgctcaacctcaaacaacaaaaaagtggacatttctatctagaaaaagcaggrtgggctcagtgggtggaaaattactaactggaaacatcaggggtaagggaagattctggctgaactgacctaacaggattcttgctaaaggcaggcagtgctgatcagacatcacctgggtgctggtggagggggaggaaaatgatcaggtatcgaaggtgatcagatactgaggatggggaattc

SEQ ID NO: 196801 - DNA, 474 bp, Homo sapiens
tgtgagtaaacttctgcatcattttctctgcttagcactctattttctcaccaaactgatgccctgtcaggagttccagttcatttggctagagtgagaacatctgtttaaattatctgttgttgcctaacaaatgtcaaagaaaaaaattattcgtgacactcggtaaagcacagtaaggcagacatttttcagaacatcttggtaggtgaagggatggcacagtggggtcctgcagtaggggagagacattgtgctcaacctcaaacaacaaaaaagtggacatttctatctagaaaaagcagggtgggctcagtgggtggaaaattactaactggaaacatcaggggtaagggaagattctggctgaactgacctaacaggattcttgctaaaggcaggcagtgctgatcagacatcacctgggtgcyggtggagggggaggaaaatgatcaggtatcgaaggtgatcaga

SEQ ID NO: 196802 - DNA, 494 bp, Homo sapiens
aagacacatataaatacggtctactaatttttgacagagatacaaatgcaatctattagataatagatagtttttaaaaaataaatggcgttgatggtagtgattcatatcagacacaatagacttacagacaaggattatcggaaaagataaagagagagcatttcaagatgacaaaagagtggattgagcaagaaaatataacaatcctaaatacstgtgcacttaattaacaggggctcagaatatatggactaaaaactggcaacactaaaaagaaaaacaaattcacagccatgattggagattttaacagcttttattgataattgatagagcaatagaaataaaatcactaaggatatagttaattggaacaacactatcaatcaccttgatctttttgacatttatagtaaaccacgcccaacaactgcagaatacatattattttcaaatgtacatggaatgctggcccaattggaacatatgtt

SEQ ID NO: 196803 - DNA, 512 bp, Homo sapiens
agatctatgatacataggtagagatacagaaatatattgatagagatatagcasttttgatactcatactgtatttgctattggaaatcattatcctcctggtggaccctgtgaaggcttaatcagaacagttgaagttgtgcctatgtttgataccatttctttttgctcagcccatagacacatgcctgcacagttggcctggtccattaaagacattatacagaaaaaggcttcatgtaccaactactctataaaaagagaggtgacctagcatagaaactgtgaatacaggtcttgaagataaacagacaggtttcgattcaagcttggtcacttactggccacgtgaccttgaacaaattgcttagcgtctctaaaccttgagctttctcatctattatgaggacacccttatcccatctagttcatattcatatatgtgtgtgtgtgtgcgtgtgtaaataaaataatacacaatggcaccgaataaggcattgttatcactactg

SEQ ID NO: 196804 - DNA, 579 bp, Homo sapiens
acataggtagagatacagaaatatattgatagagatatagcagttttgatactcatactgtatttgctattggaaatcattatcctcctggtggaccctgtgaaggcttaatcagaacagttgaagttgtgcctatgtttgataccatttctttttgctcagcccatagacacatgcctgcacagttggcctggtccattaaagacattatacagaaaaaggcttcatgtaccaactactctataaaaagagaggtgacctagcatagaaactgtgaatacaggtcttgaagataaacagacaggtttcgattcaagcttggtcacttactggccacgtgaccttgaacaaattgcttagcgtctctaaaccttgagctttctcatctattatgaggacacccttatcccatctagttcatattcatatatgtgtgtgtgtgtgygtgtgtaaataaaataatacacaatggcaccgaataaggcattgttatcactactgcaagatgatagaacagtagtaggggtaaggaaatataagcgagtagaacatagatttagggaatctcaaagcagaaac

SEQ ID NO: 196805 - DNA, 350 bp, Homo sapiens
atgacctaatgataacagactggggtggggaacccagaagacctcttcatttatgttctccttggcctctctgtgccacattccttcctcctgggtatagggtaggagccctctggaatgaaggtsttatgacctatggtcagacaagttaggtcagagagtttctttgtggccatctacacagagagatggggaaaggttaaaattatatttctatgttttatgccttgctttaggagaaaggggttctagtttctatgatccaccttggaaaggagaaattctggtttctatgacttgcttctggggagaaaagggggcaggagacaggaaggcaggaaaagatcaga

SEQ ID NO: 196806 - DNA, 472 bp, Homo sapiens
cccattgctactacagaaaaattatggcttttctcttttttatccacctcccaaatattaaatatgttccccaacattattttttaaatgccattttaagtgtcattttttagccactgtagtaaaagggagaactttgaaaggtgggtggagcatcaacatcaaatgatatctggtagatataatgcatattttattcttagggcctttcaaaaaaggtagaaggcaaccctttcacaagtgtttttgtcttctcttccctccaacatgcaaaatttagggaccacctttcttttctcctctcttgcctcacaaatgcacattttcttgtacttttgttyaatataaatatttgatatcatctgctgatagattgattctttccatttaattcaactgtgtataataacttctagtgtaattccatttagtgttgttattattgtcacagattttactccttttttttttt

SEQ ID NO: 196807 - DNA, 575 bp, Homo sapiens
ggaaaaatttagagtgtgtgtttatagcgtacggctttgaattaggtgtgtgtgtctgtgttcttgaaaagtaatgtgcatcaaattctggtaaataaaatcctattttaaatgcctaaagaaggtccatgtttaaaaaaytcctctgggaacttattttgtgaagtgaaaattcactccctccttcccaatctgtcagtatatttggattttcagataaatttcttcattgatgtgttctaaatatacatgtttaaaaataaacatttatagattgcttaacatgtatcaagcatttgttagtgccgagcatatggcacctcaaggagcttatattctactggggaagagacagtaaactgtaattgtacaagtaatcaatcaattaattacaagtgggtatgtgcaacagaagaaagtaccaggtgctcaggcagtttgtaacagggaaatctatcctaggtaagggtctcagggaaggcaagaagctgtggtgcacatggagaggtgctagggtagctttgaggctggaagtgtgcataagtcagatcgtggcttgggcaagacccgtaatg

SEQ ID NO: 196808 - DNA, 633 bp, Homo sapiens
aactcctgaccttgtgatctgcctgccttggcctcccaaagtgctggaatcacaggggtgagccaccgggcccggcccctttttacttcttcaatgtgattattagaaaatttacaactacataygtggctaggaataattttgatataatcaaaataaatgaacaatgatgtttatcataacactattttgcaaacaacctaaaatattcatccacagggaaatgataagctatattagtatacatccaccctaaggaatgccttgtagccctttaaactgaacatatcgattactatttcttttagttagcaactgctgctttcactgcccagttcccattctcccaaaccccaattttttcagaaaaattaccctaattttctctggaaaatcattcgttcatattctcagtctttactctctgagctggtcctacctttaagatgcagaaggcaggtaatccaagtttggccaatttgtgtctttatcctccagcctcagtaatttgttcaagagtgggcacttgcttgaagtcagttcagagcaaatttggactttcaaagaactggacttgaaggaaagaagactgttaaagcctgttgatatttgtagccagttgtcctcttctca

SEQ ID NO: 196809 - DNA, 576 bp, Homo sapiens
ttttacaggctcgtagatggaagtaacgtgccttatcttggatgagactttggactgtggacttttgagttaatgctgaaatgagttaagactttgggagactgttgggaaggcattactggttttgaaatgtgaggacatgaggagtcaggggtgaaataatacagtttggctgtgtcaccacccaaatctcattcccataattcccaaatgttgtgaaaaaacctgttgggaggtaaattgaatcatggaggtgggtctttcccttgctgttcttgtgatagtgaataagtctcatatgatctgatggttttaaaaatgggagtttccctgcacaagctctcttctctcatctgcttccatgtgagatgtacatttcaccttccaccatgattgtgaggcctccccaggcacgtaaaactgtgagtccaataaacctctstgtgtgtgtgtgtgtgtgtgtgtgtgtgtgtgtatgtgtgtgtaaattgcccagtcttgggtatgtcttcatcagcagcatgaaaatggactaatacacaaggtatcctggttctatcatcagaactgactagg

SEQ ID NO: 196810 - DNA, 255 bp, Homo sapiens
attgtgggaaggtaaatatatgcagaaaactaatggaatgtaatggttatttagtaaggattgtaraggaaactgttcctgcatctgctgtttctcaattgcctttagctcaaaataatctgcatgccaataatatattgtggggtgacatacctgatctccttcactagattgtatgctgctttgcaacaatatatacagaacctcacttttttacattctctctactatttggtattttcagacttaatcttt

SEQ ID NO: 196811 - DNA, 409 bp, Homo sapiens
atcagaagattcctgaactagggcacgccatgtactcctgaaagaggaggcaccttacaaagaacaggggcattaaatgaaaatgcacatgctaaaatttgagactgcaccccccccaacatccttcttaccccactgggcttccagaaagtttgaagcctgtgtatatgtgtgtgtataaatataaacagtccaaaggggtgtgtgtgtgtgtgtgtgtgtgtgtgtgtgtgtgtgtgttcasacacaccctctgcaggcaaatgactagaaagagttttctctagggaatctgataaatctaggagaaaagacctacagacgttggcatctctgaaatcatggtgcgacaaagcacacagacaacaagttccatatatacttatagaacttatatttttttaatatt

SEQ ID NO: 196812 - DNA, 344 bp, Homo sapiens
cataaaaaaatattgaaataatggcatttagagcaacatggttggaattggaaactattcttctaaatgaaatatctcaagaatggaaaaccaaacattgtaggttcccacttataattgagagctaagttataaggacgcaaaagcacaagaatgattcaatggactttggggactcrgagggaaggtggggagggaggtgagggataaaagatgacatattggggtatggggtacactgcttgggtgatgggtgcaccaaaatctcagaaatcaccactaaataacttgttcatgtaaccaaataacacctgttcccaaaaaacctattaaaataaaaatta

SEQ ID NO: 196813 - DNA, 344 bp, Homo sapiens
cataaaaaaatattgaaataatggcatttagagcaacatggttggaattggaaactattcttctaaatgaaatatctcaagaatggaaaaccaaacattgtaggttcccacttataattgagagctaagttataaggacgcaaaagcacaagaatgattcaatggactttggggactcggagggaaggtggggagggaggtgagggataaaagatgacatattggggtatggggtacactgcttgggtgatgggtgcaccaaaatctcagaaatcaccactaaataacttrttcatgtaaccaaataacacctgttcccaaaaaacctattaaaataaaaatta

SEQ ID NO: 196814 - DNA, 514 bp, Homo sapiens
gccaagttccataagaaacgttgcctttttgttactgttagtaaatcatgggtcaaatatgtagataattggagttttatttatatctctttcttaacagtggaactaaaggttggaagggacattgtggagtaagcccagaaagtagaccagatgcctcatatgtaggacaaaatttggacttgggactttagggtcttcaagggtcttttattaactgaagggtctttaagataccatccggctgtatttatatatggtgatggtcttcaaacttatttttcacatataccttaacagaaatttgaaaaacaacgtacccrgtcatacatttttctgcagaagtttaaatagtgcaaaagatacaacatccagcatataagtattgatattttttaaaatcagacttgttaactatcactcatttaaatatttataagggaaattaagtatcatggtagtttgatatcaactatcatctcatattaaaaaaatattgaccatttgaatggta

SEQ ID NO: 196815 - DNA, 478 bp, Homo sapiens
ttacaggcacgtgccaccatgcccagctaattttgtatttttggtagagacagggtttctccatgttggtcargctggtctcgaactcccaacctcaggtgatcctcctgcttcagcctcccaaagtgctgggcttacaggtgtgagccaccacgcctggacttaaagtttttctgatttctacattgcaactaaattctcctgtaaatagaaaaatactttttattacttataagaacaaataattggtttgagttttaaagatgaagcactaacttttgttttcatcgtgcacttgtccctatttgtgctgctcactgtctctcagcatgtcctggtctttctccttgcacttaccctcctcctgctgaacaatctccatgcactgtccaacaccaccagcaattccagctctcccttggcctccccaaaatgggtgcaggtgtcaggatgtcaaacacatcctaaatgcaaaagc

SEQ ID NO: 196816 - DNA, 479 bp, Homo sapiens
ttacaggcacgtgccaccatgcccagctaattttgtatttttggtagagacagggtttctccatgttggtcaagctggtctcgaactcccaacctcaggtgatcctcctgcttcagcctcccaaagtgctgggcttacaggtgtgagccaccacgcctggacttaaagtttttctgatttctacattgcaactaaattctcctgtaaatagaaaaatactttttattacttataagaacaaataattggtttgagttttaaagatgaagcactaacttttgttttcatcgtgcacttgtccctatttgtgctgctcactgtctctcagcatgtcctggtctttctccttgcacttaccctcctcctgctgaacartctccatgcactgtccaacaccaccagcaattccagctctcccttggcctccccaaaatgggtgcaggtgtcaggatgtcaaacacatcctaaatgcaaaagcg

SEQ ID NO: 196817 - DNA, 517 bp, Homo sapiens
agccgacagccagtgagaaaacaagacctcagtcctactgccacagggaactggattctaccaacaacttgaatgagcttggaaaccgattcttcccaaaacatcccaataggaaggcactttagaccctgtgcagagaacccagccatgctttgctagacttttgacctacagaaccaygagctaattaatggtggtgttttaaccttctaaatttgtggaaatttgttacacagcaatagaaaatgaatatgccagtcttggatttaaaataaaaatattcacaaacactaaataataagattaaggacaaattttgtttcatcccacaattaaatgactggacacaaatttatgtgtgcagaacatgctgtgattggcttggtgaagggtttatctattgagaaaacaaagttgctttcaaatagtacatgtagttcatagtcacccccatctgactcttaaagttacaaatactgaacttttgaatggagaataaaagtctcaaaaaggagta

SEQ ID NO: 196818 - DNA, 449 bp, Homo sapiens
accaacaacttgaatgagcttggaaaccgattcttcccaaaacatcccaataggaaggcactttagaccctgtgcagagaacccagccatgctttgctagacttttgacctacagaaccacgagctaattaatggkggtgttttaaccttctaaatttgtggaaatttgttacacagcaatagaaaatgaatatgccagtcttggatttaaaataaaaatattcacaaacactaaataataagattaaggacaaattttgtttcatcccacaattaaatgactggacacaaatttatgtgtgcagaacatgctgtgattggcttggtgaagggtttatctattgagaaaacaaagttgctttcaaatagtacatgtagttcatagtcacccccatctgactcttaaagttacaaatactgaacttttgaatggagaataaaagtctcaa

SEQ ID NO: 196819 - DNA, 517 bp, Homo sapiens
agccgacagccagtgagaaaacaagacctcagtcctactgccacagggaactggattctaccaacaacttgaatgagcttggaaaccgattcttcccaaaacatcccaataggaaggcactttagaccctgtgcagagaacccagccatgctttgctagacttttgacctacagaaccacgagctaattaatggtggtgttttaamcttctaaatttgtggaaatttgttacacagcaatagaaaatgaatatgccagtcttggatttaaaataaaaatattcacaaacactaaataataagattaaggacaaattttgtttcatcccacaattaaatgactggacacaaatttatgtgtgcagaacatgctgtgattggcttggtgaagggtttatctattgagaaaacaaagttgctttcaaatagtacatgtagttcatagtcacccccatctgactcttaaagttacaaatactgaacttttgaatggagaataaaagtctcaaaaaggagta

SEQ ID NO: 196820 - DNA, 513 bp, Homo sapiens
ctgccacagtgtgattgcggggagtgggtgaggaggtgtgagacatagaaatgtacgattatgatatggtgagatgagcactctgtggcgttagggtaatggagaggcaggtaagagagttaagaaagggaggaacccttcctggtggtaattaaatctgaactgggttttgatggataaatcactgtgtctgggattggaggagggcagaagagtgtgtggaatagtattytaagactgaggaacagcatgtgcaaaagtaggctgccatgatgaaacagcttggtgtgttcaggtcactgaactaagagttgtttggagcatggagtgtgatggggaggacttgatcagggagcagagctcagttcatgaagtgtattagtcaggagggttttctaagctttgctgcagtaacaaatcaacttcatcatcttggtagtttaactcaacgaaggttacttctcacacacaatgtgtgtccctcacaggtcaattgatagccaagtagacaga

SEQ ID NO: 196821 - DNA, 435 bp, Homo sapiens
cagtaaggcccaggcatttcagcacatgtggagatagctcttcttgctccagaacaccctgccatgtagggcaaggccttgtcaggcctgcattgtaatttttttgttttgttttgttgaaatggggtctcactcccatctggagtgcagtggcrtaatctcagctcactgcaggctcaacttcctgggctcaggtgatcctcccacctcagcctccagagtagctgagactactagtgatggggtttcaccatgttgcccaagctggtgttgaacttctgggctcaagcaatctgcctgtctaggcctcccaaagtgctgggcttacaagcatgagcactgtgcctagcctgcattgcagtttgacttctctgtcttcccaatcttgtttcctgtcccttccctttacatattttgactcctaataaacaccat

SEQ ID NO: 196822 - DNA, 552 bp, Homo sapiens
cagtggcttacatcagcaaaggattgttacttgttcatattacatgtgggccatgagtcaactacagatctgctccatgtgtcttttttttttttttttttaracggagtctagctctgttgtccaggctggagtgtagtggcgcagtcttggctcactgcaacctctacttcctgggttcaagtgattctcttgcctcagcctcccgagtagctgagattacaggcatgtgccaccatgcccagctaatttttgtatttttagtagagacaagatttcaccatgttggccaggctggtctcaaactcccgacctcaattgatctgcccgcctcaacatcccaaagtgctgggattataggtgtgagccaccgcacccggcccacatgtcttcttcattctgagatctaggctaaatgtgcagcccctctctgagatgaacaccagtctcatggcagaggggaaagagcaatggtgggccttctgatgcacttagagcttatatttacatatggtaaatagaacagtgtattggccaaagcaagtcaaaatg

SEQ ID NO: 196823 - DNA, 589 bp, Homo sapiens
acctttacttacaaaatcagtaaaatggaaccatatgaaattgctggtagttctaccaattttgaaccataaaaaaacaaatttcatgtggctcaccctcataccggttgagtatcccaaaaccaaaaatacaaaatctaaaatgctccaaagcctgcaaactttttgagcactgacattcctaccaaaggaaatgatcattggagcatttcagacttcagattttcagagctgggatgctcaactggtaagtataatgcaaatatcccaaaatccaaaaaaaaaaaaaaaaactccttgaaataaaaaaataaaacaaaataaaataaaataaaataataaaaaaccacttttggtcccaagcattttggataagggaractcactcaacctgtataatctaggataataatccatattctgtccctatatcaacagtaaattgtttatgaagccatagatagtaaaaattaaacatgctaattctgtcttcagccaccaaggcaaccatgtcccaggaagtaacacagggaaaatatgttcttattaacatcttatttttttcttattaacaccttatttttctgtt

SEQ ID NO: 196824 - DNA, 622 bp, Homo sapiens
tcctgaaaaacaaactagcaaacctctctaattgggaaactatgtgtacaagcccagaaaagttgcatccccccaaaaaagttttcaraggtccccagaatctatagccaggatgattagtgagttcttccctcaatgaagccagtccataaagactgggaagtgtcactgttttttcaaatgcataaaagtcagctcccatgtcccccccccaccccaaaaatcacaaggcatacaaagaaacagggaaacatagccaaatcaagaaaaaagataaattttctaggagaccaagcccaaaggacaatagagatcgtattgattacttgacaaataatacaaaataactgtcttaaagaggctcaattatttataagacagcacagataaatacctaaacaaaatcagaaaaacaattcataaacaaaatgaaaatatcaacaaagaagtagaaactatacaaaacaaccaagcaaaaattatagagctgaaaagtacaataactgaattgaaaaatatactagagacatacaacaacagacttgatcaagtaggaagaattagcaaatgtgagaatagatcataaaaaattattgagtcacagaagaagaaagaataaaga

SEQ ID NO: 196825 - DNA, 458 bp, Homo sapiens
atgcatttttgactttcagttaaatttggcaaaattaagccttttctatcccactctctcttctgaagccaaaaaaaaaaaatagtaagtaaaatagctctgcctttggtgaaactaggaaacaataaatatcaaaattctcaatctaaaaagatcagctgccaagtgcaaygaaagctgaaccaaaaagaggggagctactggaaaatgacttatgtctttgcagacccatagcagaaaacagggaaatggtctgaaaaactaaaccattatgcccttgcttagagcagagggggctgggaacatccctgtgctatactcttcacggagtggttggagaggaagggagctgacaagaaggctcacagaccattatctttgtaggatctttggagtcaatgtgacagggtaaaaattagctctgcaagtgctgatattcaacagctaaaattgaaggc

SEQ ID NO: 196826 - DNA, 367 bp, Homo sapiens
atcttatgttgttgaacttttctgtttgctgaaagtgtttagagctataattggttcctgcatattgatttgatatccaggaatcttgcttaactgtcttgttaactccagatttttttttttttaatttcctacccacrtaatcaaaccatcttcagagtatttcttcttttatcctttataccgctaaaaaaaaacgtcccgtctcattggctgggccctttcataaattgcccagatgaatataagcggtaaaaataagcattcttgtcttgttcctggcctcaaataaatgttctcaatatggtgctctattaaatataatgatatattaatatattacattccgttaatcagggaaatatgt

SEQ ID NO: 196827 - DNA, 574 bp, Homo sapiens
ttccaatacatcagcacacataatttttattatttcttttttggattccattcagacctgatacaagtaaggagyaatccttgaagataacccttgccataaggcctctaaataaatgagtgaatggatgagacattttattttagcaaaagccttattgaagagtcatttaacaagatccttctgcatatcttcaatatacttttacttcaggtttaagcaattccatataatatagggagataggtttctggaagtaacttctttgttttgtggaacttgatctcatgttttgattaccccaactctttcattttcttcaacattcacaacctccataataagcaaagaacatctttattagagatgtctattgtgaaaaattatgaaatgctttggaacagggaaaaatactactgggtgtcctgtatagctcactctttcaggttttctcaaaatgtcattgttttttagctaattttcaactctgtcagtcatagaaaacataatgtaaataattatcatctttagaaatgcaaaataataatgtttgagggagtgcaatttatgactg

SEQ ID NO: 196828 - DNA, 249 bp, Homo sapiens
gcttttagcatatgctaaagggaaaacccaaaaggattaaactgttgtcaacaaatcaataataktccagaaaaaagctcaagagtatttgtaaaatgcagaaaaaaaagaaaaataaataatcaagaacccaacaaagttgaattttcagttctatatgtgatgcaaaatcccaaggcatgcaaaggaagcagaaaaatgtgacctataatgaggcacaaaatcacccctttctgcaaatgcttattt

SEQ ID NO: 196829 - DNA, 534 bp, Homo sapiens
ctgaaattctggataggggagtaaaatgtctaatgtcaggacccaatttacagatcttaaaatatctgaatcattaaatattggactattggaaaagcaacagttttaatcaatcaacaattcaatcactgtaaattattttgagcacctgtggtaagttcaaaacagttcagttagctttcatttgttttatatgtggagtgatattacatgctgcttcagtgtaggaattatgttcaacaatggcatgctttgaccactagaagcacacaaaacatacatgttaatttataaaggtgaacaagagctgaaactattagtccaatagtgatagggagacttgggtttttcttactgctgaattgtgttctccatcaccctactccaaaakggccttaatcttaaagtgaaaattaaaacaaaggctattagtgtggaaaggatcgtataggcttcctagaatacccttctatttaatgtatgggtctcctaataatctaaatttatgtatgctcatttgtgatgtgattctca

SEQ ID NO: 196830 - DNA, 572 bp, Homo sapiens
atcaggttgagctgggctgtacataagaaggcccccactcatgttagctttttttacatcgttacaccgttctttaaatgcttacatgctaataagaggaactgagctcatctgcagagttctaagattttacatacaaatgcttgtgtaagsaaagtagctttctccctagtacacatttctctaatcaggtgagttagggaagggcttcagagggacacttagatagcaatacaggtggtgatgttgtgttttggcagggcgaggggagctgagggaggagcagagaggtctagaaaatgtttaaaatatctaaaagaattttaagttgaattaaaataggctgaagcaaatgtttatatcttggttgtatagctgttttttgtttttgtttttgttttgagacggagttttgctcttgatgtccaggctggactgcagtcccgagagctcggctcacagcaaactccacctcctgggttcaagcgattctcctgcctcaagcctcccgaatagctgggattacaggcgtgcactaccacacccagctaatttttgaatttttagtagag

SEQ ID NO: 196831 - DNA, 572 bp, Homo sapiens
atcaggttgagctgggctgtacataagaaggcccccactcatgttagctttttttacatcgttacaccgttctttaaatgcttacatgctaataagaggaactgagctcatctgcagagttctaagattttacatacaaatgcttgtgtaagcaaagtagctttctccctagtacacatttctctaatcaggtgagttagggaagggcttcagagggacacttagrtagcaatacaggtggtgatgttgtgttttggcagggcgaggggagctgagggaggagcagagaggtctagaaaatgtttaaaatatctaaaagaattttaagttgaattaaaataggctgaagcaaatgtttatatcttggttgtatagctgttttttgtttttgtttttgttttgagacggagttttgctcttgatgtccaggctggactgcagtcccgagagctcggctcacagcaaactccacctcctgggttcaagcgattctcctgcctcaagcctcccgaatagctgggattacaggcgtgcactaccacacccagctaatttttgaatttttagtagag

SEQ ID NO: 196832 - DNA, 562 bp, Homo sapiens
cacacttccagagaatttcagggagagtttacttgactctgagcagaataagggcagaaagacagacagaggattttcccttaagaaaatttattcgttagttgatgttatttggatttgtagacctgggattcacatcaccgggatttaggattacttttttaaattgacatatagtaattgtacatatttatggggcacatagtaatgtttcaatacacacattgtatagtgatcagatcatggtgattagcaccttcattgtcttaaacatttatcatttatttgtgatgaaaacattcagcatcttatttctaactatttgaaactttaatatattattatttactgttcccacactggtgatggggcctaagtaccattgagagaaacaaatataagttgtctataaaaagaaggtactttagcytaggtttcagggactcatcacatgggttttataggcaataacaaagacatgctagtagataaacacacaaggaaacaaggtattttgagttaaaaccagtaaaaaacagcctacaatagaaatagacctgtg

SEQ ID NO: 196833 - DNA, 573 bp, Homo sapiens
gatttggttattgatacttgtgtatacttcacaaagttttggtgtgtttttcagctccatcaggtcatttatcttctctaaactggtcattctagttagcaattcctgtaaccttttgtcaaggttcttagtttccttgcatcagtttggaacatgctcctttagctcagaggagtttcttattacctaccttctgaagcctacttctgtmattttgtcaaaacccactctctgtccagttttgtgcccttgctggagaggagttgcaatcatttggtgaagaggcattctggtttttggaattttcaacatttttgcactggtttttcctcgtcttcatggatttatctacctttgagctttgaggctgatgacctttggatagggtttctgtgtgggttttttgttgttgtttttgttgatgttgatgttgatgttgatgttgatgttgatgttattgctttctgattgttagtttttcctctaacagtcaggcccttcttctgcaggtatgctgcagtttgctggaggtccagtccagaccatattttcctggatatcaccagtggaggc

SEQ ID NO: 196834 - DNA, 573 bp, Homo sapiens
gatttggttattgatacttgtgtatacttcacaaagttttggtgtgtttttcagctccatcaggtcatttatcttctctaaactggtcattctagttagcaattcctgtaaccttttgtcaaggttcttagtttccttgcatcagtttggaacatgctcctttagctcagaggagtttcttattacctaccttctgaagcctacttctgtcattttgtcaaaacccactctctgtccagttttgtgcccttgctggagaggagttgcaatcatttggtgaagaggcattctggtttttggaattttcaacatttttgcactggtttttcctcgtcttcatggatttatctacctttgagctttgaggctgatgacctttggatagggtttctgtgtgggttttttgttgttgtttttgttgatgttgatgttgatgttgatgttgatgttgatgttattgctttctgattgttagtttttcctctaacagtcaggcccytcttctgcaggtatgctgcagtttgctggaggtccagtccagaccatattttcctggatatcaccagtggaggc

SEQ ID NO: 196835 - DNA, 505 bp, Homo sapiens
ttttttgaaggtaagcatggtgctctgttgaaggggcagaagtcatacacaactgaataatttggcaaggaacattccttgtrttctttgtctgcattttcacttcttctgtgatctttaaaacactagagacattgaaggcagatcttccccatctagtctactcagagtcgcacactaatctctgaaaatatcctcacagacacaccgtaaatgatattttaccaggtttttaggtcttccttaatccagtcacattcacacctaaaattaagtgcacaagtgcaccccttgtcaacttgacaccatacacaacttcttaaattgtattctaaatgaaacagtaacaaggtaatagttctatttaacatgatgcaactatcaccatacttgaccccatacagaacttcttaaattatatttaatttccaaatgagacaataacaaggtaatagttctatttaacatgatgcaactatcctgtgcaccgaaaatgcatgaattc

SEQ ID NO: 196836 - DNA, 387 bp, Homo sapiens
ctatgtgtcaggccgtgtgctgggggctaaaaatacagagtgaagatggcagagatcctgcctttacaaggttcagcatctagtgmggaaaagactggtcagccagcaattgcggtggcatttggcatgtgaatggacaagcgttttagagcagtgcttctcaaactttaacgtgcctgagaatcacctgaggacttgttacattccaaattgactcagtagtctgggttaggtctgagattctgcatttactgaattccatgaactctgaggtcttctaacattccaaaaaatccaatgtaacaagctctcatagtgatgttaatgttgttggccccaaaagcatacttggagtgacaaggttccagatgcagaaagctggagcag

SEQ ID NO: 196837 - DNA, 563 bp, Homo sapiens
ttaacctctgccctctccacttctgaaggtcatgttcccatttttttgcaaccacatcatgtcctcaattctcattaagcttcgggacagctaacacagagacacttaagctcaactccgtaaggcagggaggagggagggaggcgaatgggaatgttttcttcctgcctgtcttatttttctccatttcagggtccccttagaaattgggtctctgtcctgtctgataagtgagtcaacagctgattgggaaatggtgctgggaatagaatggttctacagtcccggaaaagtggcatctgggcccagcccctgactctttcacaagcgattcctgtctcagtcttgcctgctgataaaacaataaattagtatgtggtgrccctccctcacctcttgcttcctatcccagtgggtctgagtcctatctccaatgaggaagatttcatttccggtatttgacaaaagtggtcactgacctatgatttcccctccagggaaagcttgaagcatgcctgaccttttgatttatggatctccattgcctacaatttattagccag

SEQ ID NO: 196838 - DNA, 527 bp, Homo sapiens
cacatctcagatcatcagagccagggtctgagctcaactttagagaaaggcaacctcacatataaaagctaatggtacttcgtcggctttccagagaattaaagtaaaattcaaaatatttcagaggagaatcagattcacacttttctagacatttcattacaagaatttggcttgggatgggactgtagggaaaaggtgttaatggacagatgacaaaatgggacagagtttagggatggaagtggagtatcagtgattcaatggatggaaaatagttttggcatttactgacccctcttccacttgttcctcctccttctgctgctcctccttttcctctttcacctccctctttcattagtcatgttacccttttttttttttttaccatgggagaattagagatgatatatatataaagttatccttgacagggtggggaaaggattttcaatttgtagcaraaaggaagggcctacttgggctgcagtatctcttagacaggttggaagcattattttcag

SEQ ID NO: 196839 - DNA, 521 bp, Homo sapiens
cagaatgaatcagtacttgactgatttaagtataaaatgccttggtttgttaaacacaaccccatattggggagaattggacttgggttctactagcagttgtcccaaaatttgctattcttaaacaagttgtcttccctctcaggacttcaaagtcaccatcaaaaacttagaaacatctcaagttaacaacctaatatcacaactaaaacaactagagaaccaagagcaaacaaatctcaaagctagyagaaaacaagaaataaccaagatcagagctgaactgaaagagatagaaacacacacaaaaaaaaaaattcaaaaaatcaacacatccaggagctattctttttttaataaaaataaataatatagatcactagctaaactaataaggaagaaaagagagaagattcaaataaacacaatcagaaacaacaagggggatatcaccacggaccccacagatatacaaacaaccatcagagaatattataaacacctccagtgttttctatttt

SEQ ID NO: 196840 - DNA, 561 bp, Homo sapiens
ttccaacaataacacataatagttatttccaattctgtcaattattgattgagaattcttccaattctctcttttaattttcagaccaaccttccataccaatgcaaaatttcagcttctttcactcatgtttcactaatgagaataaaaatattctcagctccagaatgtgtgaaattacttgctctgatgtatgtatctactcaatacgtgccatataacacatcaaaacaggggcacagggactcctgctgcagcaccatattgtcttagagagttatgttatctggaaaactaggactagaacaatggcagatagaactgccggccatgaatgatggggcaagatagcatcctgttgagagagttcaactctgtaagaattcatctgaaactcctcccatttatggagacagaaaaatttctcaccccattattatttatgaaatgagtcakaaaataatctaaaaaagaaagttacttatctgcataaaaacacatacataaatgtttttagcagctctgtacattgcaaaacccaggaacaacccaaatgtcctt

SEQ ID NO: 196841 - DNA, 559 bp, Homo sapiens
ccaacaataacacataatagttatttccaattctgtcaattattgattgagaattcttccaattctctcttttaattttcagaccaaccttccataccaatgcaaaatttcagcttctttcactcatgtttcactaatgagaataaaaatattctcagctccagaatgtgtgaaattacttgctctgatgtatgtatctactcaatacgtgccatataacacatcaaaacaggggcacagggactcctgctgcagcaccatattgtcttagagagttatgttatctggaaaactaggactagaacaatggcagatagaactgccggccatgaatgatggggcaagatagcatcctgttgagagagttcaactctgtaagaattcatctgaaactcctcccatttatggagacagaaaaatttctcaccccattattatttatgaaatgagtcagaaaataatctaaaaaagaaagttacytatctgcataaaaacacatacataaatgtttttagcagctctgtacattgcaaaacccaggaacaacccaaatgtcctt

SEQ ID NO: 196842 - DNA, 502 bp, Homo sapiens
aaattaagatattttaaccagaattaggataattctctctttccactctaaatattccttcatcataagtggtgtggggttgagtgacagtggactagctacagcatttttgaaatctagctaaggggaaactgagttggacatgcatttgatttgggcttagtagggtgtgatttgtatggttcctaatcacttctatataaaattattactagacatctatgtygacttacccggtgttgcaacacacagaagccagaccctaggtcacactgtgttatgaacataatctaaaacatgaggagaaagtgaaaggtataagagatgtaggattggggtaacagtccaataaaagctactctgtgaacatttattcaagtattacagctcatacatgagaaaacctttctaagagacttcccacatttgacaaaaattctaaacatgaaaatgtccctgtctgacagctttgaagagagcagtggttctcccagcatgcagc

SEQ ID NO: 196843 - DNA, 364 bp, Homo sapiens
taagctgggtagtatatgtattacctttccctagattttatcatgtttgtggtacttacgaggtttttaaaacataawtgtgttgtgatttttttctcattttaaataattcattcccactccaaattttgaattgatatctttgtacctacttttatggaatggttccctcacattgtataagcactaaagtaacagaaagactgagtttgcacctctttcacaatgactgttttataccatcttctcagtccacaaacatttgacccaactttcctgcccctcatcttagcccccaatactcaccgtcatacttgacttcctgttgataaccgtgcttgcctcacacctcccagcagataga

SEQ ID NO: 196844 - DNA, 591 bp, Homo sapiens
ggtggggggccagtgagtcaggagtgttggttggctgggttggcaatgaaatcataaggagtagaagctgtcttgwgccaagtcagttcctgggtgggggccacaagatgcgatgagccagtttatccacctgggtggtgccagctgatccataaggtgcaggttctacaaaatatctcaagtactgatcttaggttttataatagtgatgttatccccaggagcaatttgggaagggtcagaattttgtagcatccagctacatgactcgtaaaccataatttataattttgtggtgaattcattagtcctacaaaggcagtctattccacaggcaagaaggaatttgttttgggaaagggctgttaacgtttttgtttcaaagttaaactataaactaagttcctcccaaagtcagttcagcctacgcccaggaatgaacaaggacagcttggaggttggaagcaagatggagtcagttaagtcagacatctttcactgcaacaatcctcttagctatattctgcaatggcggtttcagcccttcagctcaaaaggcctctttgtcgcttaatttgcttttgcctttgt

SEQ ID NO: 196845 - DNA, 504 bp, Homo sapiens
acaaaacagtttcacttcttacggggagatctgctgattgaagattaacctgcagcaaaaaaggaaamgtgaaaagcttggaggaactagtcaaactagagaaagtgttactctttgttttgctgttcagcgtgggatagcaggggctggagaaaggagatacctgcaatgtaaacatgtgatctactttcacaatatctaaacaattcacagtccaacagagtgaagaataaacactgccatcaaacacatgtatgtgtctggtgtctctgaaaggtgacttcatcatcatgaatgagaatataaagggcgagaggcaaaatatgtagctaagcagaaacatgctcaatttcattaccaaacagaccagatatcactgcctttagtcagaaatatactcacctgattgtcatttctctaatcaaccagcagactccacacaataaaaaatccccttttgaaatacttgaatctctggctctttgctaaggtttcatggaattc

SEQ ID NO: 196846 - DNA, 598 bp, Homo sapiens
ttgggaataagcaaggacagcttggaggttagaagcaagatggagtcagttaggtcctgtctttttcactgtctcagaattttgcaaaggtgagtttcataactttaattgatgactatcacagttttcataaataatgtaggtaaatgaataaaataaaatagacagatgtaatgggataaatacttgtaggcaaacttgtcataatttagaatmtaaagttatactaaaatatttcattatttaggtattttccaataaaaatatattgtaggaaaacattctttctagaaaaaagtgtccttttaaaaaaggtggacaatttttttctaattcaaagcttaaaggttgtgtacaaaacaaggtaagaggagccaggaaataagagagatgtaaagaaacttatagaaataaagaggtatattttggtaagaaagcttaaagagaaataattttatatgagaaagaatattacatggtaaatttagacctagaataaaatgactggttgtttaagaaagggatgttcaggacaaaccagaaagtccaagcatgtcatgaatggtctgggtaagtcacaatgaaagaatttatttaa

SEQ ID NO: 196847 - DNA, 557 bp, Homo sapiens
aaatttttaaaaaatcaaaaaacagaatacatggaacaaccaatacatgaacttgyctctaacaccctctcccgcctcatctctctcctgagtctcccctcactcactaagcttcagtctcattggaattatttccttcctcagattcaccaaccccttttctgcccccaatcatgctgtttttctctgcatgaaacatgtagttaaatgactttagaatatcagaagtacacacagtaaacataattaactaatactgtaagctaaacatacagtttgatatggtaatacctagtcagtaagcaaatgttgtacaggaaggagaaagaaaaaatggtagaacaaaagagagagaaaggaaaactgaaaggctttcatttcaaaacaagactttaaaaaaattttaatgcttcatgaatttgtgtgtcatccttgcacagggaacatgctaatcttctctgtattgttccaatttttagtatatgtgctgccgaagcaagcactcaaaaacaagatttttaagaaggttttaaacttaatctaatattgccagatag

SEQ ID NO: 196848 - DNA, 545 bp, Homo sapiens
caaccaatacatgaacttgtctctaacaccctctcccgcctcatctctctcctgagtctcccctcactcactaagcttcagtctcattggaattatttccttcctcagattcaccaaccccttttctgcccccaatcatgctgtttttctctgcatgaaacatgtagttaaatgactttagaatatcagaagtacacacagtaaacataattaactaatactgtaagctaaacatacagtttgatatggtaatacctagtcagtaagcaaatgttgtacaggaaggagaaagaaaaaatggtagaacaaaagagagagaaaggaaaactgaaaggctttcatttcaaaacaagactttaaaaaaattttaatgcttcatgaatttgtgtgtcatccttgcacagggaacatgctaatcttctctgtattgttccaatttttagtatatgtgctgccgaagcaagcactcaaaaacaagatttttaagamggttttaaacttaatctaatattgccagatagaagtatgtgacaaattcaagatct

SEQ ID NO: 196849 - DNA, 574 bp, Homo sapiens
taaacatatggctatggatatctaaaagcaaacacacaaatctagaccaacctgggctctaaaagtctagatgaacccaaattatttctgaggctcctgggaagctttggtcaagtcactcaggctcagtttactcattcataaagtgagaacaatactttttcttgcctgaaatcacaaaaataacttgagaagactataaaataacagtagaaataggaaatagactgtcacattattattttaaaaacctaagacacagtgagtttgatttcctactaacataaatgtgttttacatttgtaacactgcaatgaagcatagaagattttttaaatctctcatcagaacaaattgccagagtcctgtcaattattttyctcatcatagtggttaatgaccatagttatcagaggacttttacaagcatggtgttttggttaaattttaactctcactacaattcttgcattgtttgctggatacttctgtttggagaccctgtagttttgatagtggaaacaggaataattttcctatttcatggaatgtggatctaatttttctgagttta

SEQ ID NO: 196850 - DNA, 570 bp, Homo sapiens
tttctgctgcctctttggtttggacttcagtagaagtgaattgatgaatgaaagcaggggaaaggaataaaatatttctttatcaggtggcacacaagaagcagaatggtggaatttatgttgaaatgtgaagtagcagtggctactgcagttatatgtggttactgtggctggtggttgcagggttccatatagacataattttctaaaatattaattttctactgtcttattccagacttacagagtttcttggaagtatctctaggcatcccagtggcaagtatggggaaaatgaggaagtgagggtagtgagctccaaatagttctccccgctgtaattggaacattctttgatttccctgcttggtatactagacttcagaytttgtaaggaagaaatttattgttgctaaaagtacctaaggaaaacaatctattgaaatatttttctataatcttttagttattttttaacatctcatacagttggcagcaattggactagaaataacccaacataaatacaaataaattttgaagcaaatcctgtggctttaaagattattg

SEQ ID NO: 196851 - DNA, 459 bp, Homo sapiens
gtggctgaaacccaggcatcaatattttttgaaaattcccctgatgagcctcatgtgaagttgaggttgagaataactgctctagagccaggctagctgggttgaaatattgtctcygttttttactagctgtgagaccttgggcaagctagttaaccagtaaaatggtattaattatagcaccttcctcatatgggtttgttgggagaattacatgaattaataaacagtgtctagcatgtagaggagctcagcagtgctaactattgctattacagagatagatcattaaaaaaaaaatccctaaagtcacattccctcgtatccagcacctaggagaaatgagcagatttttgagtggatgaatatggtgtaaactccacctagctcactttcctagtctctgcaggtttgtctttccggataacaattgggtgaaagttccggtcattttatttg

SEQ ID NO: 196852 - DNA, 275 bp, Homo sapiens
ctttacctaagtagaatgacctctgactcaataaagtgctgacaggtggagggaggtagtgtatttaaaaaaaaagtgagagtataggggcagcattaataaatgctgtgaaaacactatattgtatatttaaggggcaacaagcacaagtttayttttgtctcttctcctcagtgtctgacatttggacatcccggtgtacaattctcaaaaaagagagagggttcaacttgttatttttttaaggagacggtagttattcttggtttctttcc

SEQ ID NO: 196853 - DNA, 505 bp, Homo sapiens
tgactccattcttgcttctggcctcacagactggctgcctttgctttttcctgggcctagggcaggctaaccatggggagaatttagtttataatttaactttgaaacaatgatgataatagtccctccctaaaactaatgcccttctggctcacagactgaaaactaataaaagtccacaagactaggattatgagaagggtctgaattytaaaatgaaggtgtagtttctataatcccttactgctcaggagtcacgtggccagaggtcacaagatgtgtcttccccagttgcttctatagataacatcactattgtagcatctaagattggtcttttgagatgtttttcagacagcattctggcaactgactgaccccacccagacccatgactcaaccagtcctgtggcccccatccagaggtggactcagcacatgaggaccattttctatacccctatgatttcatctccaaccaatcagcagcacccattccctagcc

SEQ ID NO: 196854 - DNA, 209 bp, Homo sapiens
aaatgcctaaaagatcttaaataggattatctggattacatgagtgttttaraaagtctgccatggtggcagtgtggagactggattacagaggcaggggttggggaggggagaggtgagactcaggcaaaaaaaaaaaaaaaaaaaaaaagaggtcagctggcaaccatttcaattctctttgagaaaaaatatgagtgtaaaccaaa

SEQ ID NO: 196855 - DNA, 209 bp, Homo sapiens
aaatgcctaaaagatcttaaataggattatctggattacatgagtgttttagaaagtctgccatggtggcagtgtggagactggattacagaggcaggggttggggaggggagaggtgagactcaggcaaaaaaaaaaaaaaaaaaaaaaagaggtcagctggcaaccatttcaattctctttgaraaaaaatatgagtgtaaaccaaa

SEQ ID NO: 196856 - DNA, 606 bp, Homo sapiens
aagtattgtgaatgaaatagaagcgaacttctgaaagagaataatggagggtaggcagaggggcaggaaaagaataggacagtgggtggtgttgaatctgttctctgaggttgtggtagtgaagctgaagccttttgttctaactttgcttagtgggagaaagaccttttcagtcacaccgagcttgtatattcagggacttgctgaggacatattataccagatgaggatgggaagtctggtagaaatcacataatcatagccttaagggctctttggaaatggtaagaaagataggttttgtttctcttgcacaaataatagggtggttttaattagtgggagcataatctaatttatgatttaaagtacatctctagctgctgtatcaagactagcttgcagggatgagtgaggtgttaaaagacttgggttgagttcatgtgagaaattatggaccctrcgcaaacaatggtttggcagagacagagatttttttttgtatgtagacttgatagcaattgctgatgaacttaatttggaaaggtggtggttgggcaaggtagaacagaaagtaatttagaatgatttctaggtctctggctt

SEQ ID NO: 196857 - DNA, 535 bp, Homo sapiens
gtttcttaatcatagaaagtattctgggtctactgaactaccaagagcttatgaatgcatgtggaacagaggtatgaccagagtcaaaggttttctatttcttccttgatgtaaaaccctgcatatccatttcttcctgctttttatccaatcataaaatgttgattctaatgatagaagcaaaattagaaaattatgattctaagttatattaatgaacttaaaatagtccagtaaaaagaaaaaaaaaacttgataggtwctacccctgttcaccaaagtctggcccttctgcatttctgggctccagcaatcctcctgcctcagcctcccaagtagcaaggactacaggcagatcattcccccttgaattacacagtgtgactgttttggtcaatctaatgttaggaggagtgaggtatcttatttctgatggaaagcaatgatccattattcagcctgactcttcccttgctgcagctagtgtgaaagcttatattgctgtggaggtaccataaattcagagcaaaagcac

SEQ ID NO: 196858 - DNA, 628 bp, Homo sapiens
gttttgtttttagaagattttggtaaggatgtaatattctctatatttgaaaaccatacttgtgtttttatcattagtcataaatattcctagttgtgtggtgatttaattaaacttgtaaaagctttatatattttatattttgattatatctactaaagaaatattttttggattaatttagttattctgtggttttttctttttctagttgataacatttgtctttaacttgcctatttctccactattcgttttttttttatttatcatatcctacttttttttcaacttcttaacttgatgtttaattaatttaattcattatttaaatgtaagcatttcactttataaacctcagaagccaatgtggatacatcctaaagcrcttaaaagtattcccactttcagtaataatctctagttgttttagaatttcctaactgagcaaatttttcagaggaatgttgattaataatcaaatggatgttttatttggtttttgctcaattaattcataattttattaccttttgaaagaacatgtggctgaagtagtttctatttattggagttttctgagattttcttcatgatctaatatatgactgtgatcagggaataattt

SEQ ID NO: 196859 - DNA, 457 bp, Homo sapiens
tttcttctccacactttggaatttggaggatgagttgtggagaataaaaaaaaaagtggtgggaagaaaacatttacttgtctgtgtttattctctgctgggtcttagtyggcaaagctacctttgtagtaggtcctcttttcttttatccttctttgttgttctttcaaacaaaatttggagatgttacccactttgtcccagtttctgattctggtgaaatcaaaattcaaatctttctgtcgttttaaattttaatattttcgtgactatttttttccttttttggatggattacatttggtttttgcttcaacaaatttcttatttcggatttaggtacacaatgatttgtttgtgaattgatatcttagacagtcttctgttgcctaatgtatttcattccctcttttcactctccaataaatacatttatcatattatgttaatgaaagat

SEQ ID NO: 196860 - DNA, 517 bp, Homo sapiens
agcaatcctactacttgttatatgtccaaaggaagtgaaatcaatatgtcaaggagatatctgcactcccatgttagttgcagcattattcacaatagtcaaggtatgaaatcaacctatgtgtccatggaggaatgaatgcataaagaaaatgtgtatrtgtatatatatatatatatatatacacacacacacacacatacatacagccacacatatacacacacacacaatgaaatactgttcatcttttaaaaagaaggaaatcctgtcatcatgacaaaatggttgaacctggggtatattctgttaagtaagccagacacagaaagaaaaatgccacataatctcacttatatttagaatattaaaaaagttgaattaatggaagtagagattagcatgatggttatcagggtctggggatggaattggatagggagatgttggtcaaaggagaaaacatttcagttatataaaataagttcaacagatctattgtacaacatggtgactt

SEQ ID NO: 196861 - DNA, 517 bp, Homo sapiens
agcaatcctactacttgttatatgtccaaaggaagtgaaatcaatatgtcaaggagatatctgcactcccatgttagttgcagcattattcacaatagtcaaggtatgaaatcaacctatgtgtccatggaggaatgaatgcataaagaaaatgtgtatatgtatatatatatatatatatatacacacacacacacacatacatacagccacacatatacacacacacacaatgaaatactsttcatcttttaaaaagaaggaaatcctgtcatcatgacaaaatggttgaacctggggtatattctgttaagtaagccagacacagaaagaaaaatgccacataatctcacttatatttagaatattaaaaaagttgaattaatggaagtagagattagcatgatggttatcagggtctggggatggaattggatagggagatgttggtcaaaggagaaaacatttcagttatataaaataagttcaacagatctattgtacaacatggtgactt

SEQ ID NO: 196862 - DNA, 517 bp, Homo sapiens
agcaatcctactacttgttatatgtccaaaggaagtgaaatcaatatgtcaaggagatatctgcactcccatgttagttgcagcattattcacaatagtcaaggtatgaaatcaacctatgtgtccatggaggaatgaatgcataaagaaaatgtgtatatgtatatatatatatatatatatacacacacacacacacatacatacagccacacatatacacacacacacaatgaaatactgttcatcttttaaaaagaaggaaatcctgtcatyatgacaaaatggttgaacctggggtatattctgttaagtaagccagacacagaaagaaaaatgccacataatctcacttatatttagaatattaaaaaagttgaattaatggaagtagagattagcatgatggttatcagggtctggggatggaattggatagggagatgttggtcaaaggagaaaacatttcagttatataaaataagttcaacagatctattgtacaacatggtgactt

SEQ ID NO: 196863 - DNA, 517 bp, Homo sapiens
agcaatcctactacttgttatatgtccaaaggaagtgaaatcaatatgtcaaggagatatctgcactcccatgttagttgcagcattattcacaatagtcaaggtatgaaatcaacctatgtgtccatggaggaatgaatgcataaagaaaatgtgtatatgtatatatatatatatatatatacacacacacacacacatacatacagccacacatatacacacacacacaatgaaatactgttcatcttttaaaaagaaggaaatcctgtcatcatgacaaaatggttgaacctggggtatattctgttaagtaagccagacacagaaagaaaaatgccacataatctcacttatatttagaatattaaaaaagttgaattaatggaagtagagattagcatgatggttatcagggtctggggatggaattggatagggagatgttggtcaaaggakaaaacatttcagttatataaaataagttcaacagatctattgtacaacatggtgactt

SEQ ID NO: 196864 - DNA, 599 bp, Homo sapiens
tcagtggtggcattagattctcatagaaacctgaaccttactgtgaactgcgcctgccagggatctaggttgtgcactacttatgagaatctaatgcctgatgacttgtcactgtctcccatcatcatccccagatgagacagtcaagttgcaagaaaacaagctygctgctcccactgattctacatcatggtgagttgtataattatttcattatatattacaatgtaataataatggaaataaagtgcacaataaatgtaatgtgcttgaatcatcccaaagccatctcctgaaactctgttctgagaaaaaattgtctttcacaaaactggttcctggtgccaaaaaggttggggactgttggcttatagtatttcatacagtagcatactgtacaggttgtaagcctaggggaaattggctataccatatagcctaggtgtgtaatagtctataccatctaggttcctgtaagtacactctgtgatgtttatacaaggatgaaaccacctaatgatacatttctcagaatgtttccctgtctttaggcaatgcaagactctatgaaaagagaataaaagcaaattgtatttatt

SEQ ID NO: 196865 - DNA, 599 bp, Homo sapiens
tcagtggtggcattagattctcatagaaacctgaaccttactgtgaactgcgcctgccagggatctaggttgtgcactacttatgagaatctaatgcctgatgacttgtcactgtctcccatcatcatccccagatgagacagtcaagttgcaagaaaacaagctcgctgctcccactgattctacatcatggtgagttgtataattatttcattatatattacaatgtaataataatggaaataaagtgcacaataaatgtaatgtgcttgaatcatcccaaagccatctcctgaaactctgttctgagaaaaaattgtctttcacaaaactggttcctggtgccaaaaaggttggggactgttggcttatagtatttcatacagtagcatactgtacaggttgtaagmctaggggaaattggctataccatatagcctaggtgtgtaatagtctataccatctaggttcctgtaagtacactctgtgatgtttatacaaggatgaaaccacctaatgatacatttctcagaatgtttccctgtctttaggcaatgcaagactctatgaaaagagaataaaagcaaattgtatttatt

SEQ ID NO: 196866 - DNA, 599 bp, Homo sapiens
tcagtggtggcattagattctcatagaaacctgaaccttactgtgaactgcgcctgccagggatctaggttgtgcactacttatgagaatctaatgcctgatgacttgtcactgtctcccatcatcatccccagatgagacagtcaagttgcaagaaaacaagctcgctgctcccactgattctacatcatggtgagttgtataattatttcattatatattacaatgtaataataatggaaataaagtgcacaataaatgtaatgtgcttgaatcatcccaaagccatctcctgaaactctgttctgagaaaaaattgtctttcacaaaactggttcctggtgccaaaaaggttggggactgttggcttatagtatttcatacagtagcatactgtacaggttgtaagcctaggggaaattrgctataccatatagcctaggtgtgtaatagtctataccatctaggttcctgtaagtacactctgtgatgtttatacaaggatgaaaccacctaatgatacatttctcagaatgtttccctgtctttaggcaatgcaagactctatgaaaagagaataaaagcaaattgtatttatt

SEQ ID NO: 196867 - DNA, 584 bp, Homo sapiens
ctgtaagttaaatagaattctaaatgagaatatcatagttcaagctctggtcaagggcttctgaatttacgcctctgcccagtggtctgtgatgttgcacaaggtgtcattttcttcatttgtatcattttcatcacttgtaaaaactttggtctcattttctttcacttgtaaaataagggtttggtagatttcctctaagaactattctataaatgtccttatttaagtctccatagatactttcaaagtcagcttattagaagcagcatatttacttaacttaatgagtaggccactttcccccttctcaaaatcctcatatacattgagaaaattttataccatagtattttttccattatctcatttgaaactcaaacaaatatatgcattccattttcamagatggtgaagttgtagtgcaagaatttcagggacttgcccaagtatacattggctaataagggataaagccaggaagccaggtttctaatttctataaaggtattctttttattccatctcattatctaattgtgtctagttcaagggtttcgattctaatgggtagttaaacagtt

SEQ ID NO: 196868 - DNA, 645 bp, Homo sapiens
ttttacgtcagcatgctgtattttaaaataagtamatttgaatgcataatcttcagtaagtacttggaaagttctctgctattaaaaataatcagttattggactcagtatcaatccacaaagtgtagggagagaatatacctgataccgattgagatccatgtcttacaagcctaaaagagggatgaaacaaaaaatccctgggcaatgtaagattaccgatctcttcagaccaaatacatggactgacaaagtaggtataaagaattacaaaagaatctagtagaattttggattctagtagcgtgtataatatagtaaactctattgtagtataaagtatatatagtggactatatttaaaattgccattaccttataaaacacaaaagaaagtatttccaaactaggcctttgcaactattattctatattgtctggatggaaattggtgccctaaataaagggctgtgtacatttagaaaagttatttatttttcttacaataagttacgtatttctcagcacacattcatctataaaataaaaatacaagtaatacgttgcaagtaacatctaatagataggtggggttttgtgaccacattctgggtaatgcagtgtgagcagaaattatgtacacca

SEQ ID NO: 196869 - DNA, 576 bp, Homo sapiens
tcagatgcatagttagaaaatattttatcctattgcacaggctccctgtttactctgttcattatttcttttgctgtgcagaagttttgtagttaagtcccatatttctattttttagttacatttgctattgaggacttagtcataaattctttgcctaggccaatatgcagatgaaattctccctaggtttcttccaaggattttcatagtttcaggtctagcgtttaagattccaatccatcttgagttaatttttgtatatggtgttaggtagtggcccagtttcattcaaatggcttcccagttttcccagcaccatttatcgaataaagtgtcctttctccattgattattttggttacttttgccaaagataagttggtttcaagtatgtggttttatttctgagttgtatatttattccatttttctatatgtctttttttgtatcagtgccatggacttttgttcactatagccttatmatatactataaagtctggtaatgtgatgcttccgaatttgttcattttgcttaggattgatttggatattcaggctcttttttggttt

SEQ ID NO: 196870 - DNA, 418 bp, Homo sapiens
aataataataatggcttaatgatgggagcccatgtactattattgtccttcttcaaatggatgggggaaaattaataaagactaccactcactgagcatcgactatataccttgtatatacctgcctctaattcttaaaaccatgctgacagagcagtatcattattcccattttacagacaagccacacaatcaccatgcggtagagttaaggttcaattcaggtttgtttcccttgaaagcctaggtcctttstactatcctgcactgcctcctcacctaaaaacccaattcaactagtcatatgaatgctggcaattttcaatatggaatttctcttgaagaagcttgttctgactgccagcctcctgaaagacaattttcacaatgttatcataattgatcgtgaaccggggac

SEQ ID NO: 196871 - DNA, 418 bp, Homo sapiens
aataataataatggcttaatgatgggagcccatgtactattattgtccttcttcaaatggatgggggaaaattaataaagactaccactcactgagcatcgactatataccttgtatatacctgcctctaattcttaaaaccatgctgacagagcagtatcattattcccattttacagacaagccacacaatcaccatgcggtagagttaaggttcaattcaggtttgtttcccttgaaagcctaggtcctttgtactatcctgcactgcctcctcacctaaaaacccaattcaactagtcatatgaatgctggcaattttyaatatggaatttctcttgaagaagcttgttctgactgccagcctcctgaaagacaattttcacaatgttatcataattgatcgtgaaccggggac

SEQ ID NO: 196872 - DNA, 506 bp, Homo sapiens
ttcaatttttcagtgcactcaataatactagttgagaggataaaacaatgaatgaatgaatgaaacaaggggaaagagagagacataagacaggcagacagagaaagaaagaagagaggaacactctggtggtcccattatgcttgaaggtttttctttgaagtagaaatgattcttgtaacaaatctttcatccttcttcccttgcagacttgctccctggctttctttcaggtttgatgattgaccaagtagcagctgtaatatgggatggaggcatattctgactctgctaagagagggccacctccctgtgatatgggtgacattttgatttattcctcygtaagtcatttttttctgtacatgttcactcctacctgctcatatctactttagaaaaaagaaaaatgggatttaaaaaatgacactttatgagattggcattttcctctgtgatattcttcccccaaacacataacttgagtgtaattgtgagaaaaatat

SEQ ID NO: 196873 - DNA, 412 bp, Homo sapiens
gttttaaatttatttaccactgtgtccctagggctcagaacagggctgaacacctgacargcacattcaagaaacatttcttgaatgaatgatggatggactgcaaaaaaaaaaatgtccctccagaatatgatgtccaggatagcacgaatgggagattgggtacactgcaggtacagactagagtagggagcagaagctctggtcctgtagatgagttgtgtgtcattgaatgaatgacacatgacttctaaaatgttggcattcaccacatgtcaatcacagcatgaaacagagctctggaatgccagtctccagcaagggcagggcttttacagtgcagttgcatacaagtcccctgggaataaagggtgatgggtcacttttttcttacaggcttgtgtctacaaga

SEQ ID NO: 196874 - DNA, 555 bp, Homo sapiens
atttgagttaaaagtattgaataggagaagctctttccacaataccatttctcagtgatgacactattgacacttaagtccagataactttgttgtggggggctgtcccgtgcattgtaggttgttgagcagcattcctggactatatctgattagtaactactccccctcccagttgtgacaacmaaaaggatctcctgacactgccaaaagtcctcaggagtggattgatgtgggaaaggacagtcactcttggtcgaaactactggaatagactgacaactatgtgatgtgtgcctggaactgctaggggatctcatgtgaaaaaatcttgcctgatagtgatgccaacacatagaaaggtagggccaagagaagacacgaagacccaataacattcttgaagctcctacatattttgttctcctatgcattaagccagtaccaactaagcgagggtgttcactctcaccacttctattcaatatggtgttatgtaggtcttatccagatccagttccaaatacaaaaactgcaagtaaaaggcataaagat

SEQ ID NO: 196875 - DNA, 585 bp, Homo sapiens
aagtaattgcagatcttgaatttaaatctaggtcatcttgactctcataatatatctaatccaagtgtacacatttcttccctttgggtcctttttgggaaatacgacatatacggctaaggttaacaactgttgtcagaaaagcagctcttaatgagaaagwttggtgtttcagaagactcctggaatgcaacttcctgttcttatgatatttgaaaaatatacataaaggctgaaaataattttgactaaaaatcaaaacaaaaatagtctcttggaaatagtcatcttctggctgaattaaatggccttgctcctgcagcacatgttgtctgccttttgtgaaatctctggctgcatggtaaggtgctttgcaccaggttcctggccttatgactaagcggtggcagttgtggaggggtgaagtttggggcattcactatgtcccatcttctctctcagttactctctgaacaggtggttcccactaataagactttgcttccagcaaaattgctgaaaaagacttgaatccctacatgcattcgtgtatttatacacttcattccaaaagaaaagggccat

SEQ ID NO: 196876 - DNA, 517 bp, Homo sapiens
ggaagtaatttgtaattatttagagccatgctggtgatgtggtctttaaaaaatagaatgttcctcatccttaataacttagaaggctgagatgttaaatgagaaatcatataacttcctgagatcattgtagagctaagagtctgtttttgagttaacacgtactagggtaactcaaacttcattttaacagtcactcaccctcaacctgtttttttttttgtttgttttttktttttgagacaaagttttgctctttttgcccaggcttgagtgcagtggtgcagtctcagcccactgcaacctctgccccccgggttcaagcgattctcctgcctcaacctcccgaatagctgggattacaccctcaaccttttttttttcctccttgaagaactctttttactcctgtaaaatctggattcctgagttccagggtacagagtttatggaatagcatatggaaccattgccattccagggttatggaagaggatctggaaccattggttataaa

SEQ ID NO: 196877 - DNA, 588 bp, Homo sapiens
caccctgccccccgtcgccaaaaaaagaaaaaaaaaattagcttggtatggggcacatgcctgtagtcccagctactgaggtgggaggtgaggaggctgaggtaggaggatcgttggagcccaggagaccaaggctgcactgaggcatgttcatgccactgtagtccagcctgagtgacagagtgagactctgtctcaaaataaaataaatacaaaatgtaattgttgaaataagaaactcagtagatggattagacatcagaagagagaattaattgattagacaatcatctccaaaaaataagtcagaatgttacacagcaagacatgaggatagatgatagggcagaaggtggtgaggtggagatgggsagagagagagcagaatgaggtctaaaatatgtcctagtggaatcctaggaggagataataaaattatattagaaagtgagagaaatagaagctctaagggttatagaagcaagtccacataaatcagtcacaacaaatgtaaatggactaaagttaccagttagaaagattgaattagtaaaacaaaatccagctgttttaatctattatatttaa

SEQ ID NO: 196878 - DNA, 615 bp, Homo sapiens
agtgatagaactaagcagaagatcaacaaggaaatagaaaacttgaaaaaattataaaccatctagacataatagatatctatagaactaktcacaataaaatggcagaatatgtatttttctcaagcacaaatgtagcattctccagtacagacaatatgccaggtcacagcgctcaatgtgtttaaaatgattaatcactcacacatgttctgtgaccacagtgcaatggaattacaggaggaaatttgaaaaattcataaatatatgaatactgaacatgcaatcctaaatggatcaaagaagaaatctcaagggaaattagaagtactttgaaatgaataaaaataaaaactcaacaaattaaaatacatgggatgtagctaaagagtgattagattgaaagttatagctgtaaatgtctatattttttaaaaaacaaaaataataacctaacctcataccataagacactggaaaagtaagagcaaaccaaacctaaagcaaccacaaagaaggaagtagcaaagattagagtataaattaacaaaatagagataggaaaaaatagaaatggaatgaaatgaaaccaagagttgattcattgaaaagagc

SEQ ID NO: 196879 - DNA, 569 bp, Homo sapiens
acagtcaaaactctgaattattcatcaccaygtcctgaaaggagcaaagatgtgagagaaggtcaggaggaaagtggaagaatcagaaaggaggagctggggctcctgtttgatttgtccataaaggagagattgatgagcagctctcctgatggagaagatattctgaggaagtggcaattaggggcatgtggggacaggtctgaacatcaaaaagaaaccaagaggatttatcaatgtttcagcaatttcaccccaaagtaggtgatggaacaaccaaggatgccataggaagtgtgtgtatgtaagtgtggtgagcactgggggaagctctgaatctaagtgaggaataatcagctttaggaccaggaaaacaaaggaaggttacactagccagaaagctagcatccaaaaaaaagctagtttggactgagggaaacaccaggtgtcccatgaagagtgggacagtcaggtcaaaacaacacagtggtggctagatatgctctcgcttccctatttaccaggtgtcttcttggcagcaggggagcagaactctaaggctacaactt

SEQ ID NO: 196880 - DNA, 569 bp, Homo sapiens
acagtcaaaactctgaattattcatcaccatgtcctgaaaggagcaaagatgtgagagaaggtcaggaggaaagtggaagaatcagaaaggaggagctggggctcctgtttgatttgtccataaaggagagattgatgagcagctctcctgatggagaagatattctgaggaagtggcaattaggggcatgtggggacaggtctgaacatcaaaaagaaaccaagaggatttatcaatgtttcagcaatttcaccccaaagtaggtgatggaacaaccaaggatgccataggaagtgtgtgtatgtaagtgtggtgagcactgggggaagctctgaatctaagtgaggaataatcagctttaggaccaggaaaacaaaggaaggttacactagccagaaagctagcatccaaaaaaaagctagtttggactgagggaaacaccaggtstcccatgaagagtgggacagtcaggtcaaaacaacacagtggtggctagatatgctctcgcttccctatttaccaggtgtcttcttggcagcaggggagcagaactctaaggctacaactt

SEQ ID NO: 196881 - DNA, 569 bp, Homo sapiens
acagtcaaaactctgaattattcatcaccatgtcctgaaaggagcaaagatgtgagagaaggtcaggaggaaagtggaagaatcagaaaggaggagctggggctcctgtttgatttgtccataaaggagagattgatgagcagctctcctgatggagaagatattctgaggaagtggcaattaggggcatgtggggacaggtctgaacatcaaaaagaaaccaagaggatttatcaatgtttcagcaatttcaccccaaagtaggtgatggaacaaccaaggatgccataggaagtgtgtgtatgtaagtgtggtgagcactgggggaagctctgaatctaagtgaggaataatcagctttaggaccaggaaaacaaaggaaggttacactagccagaaagctagcatccaaaaaaaagctagtttggactgagggaaacaccaggtgtcccatgaagagtgggacagtcaggtcaaaacaacacagtggtggctagatatgctctcrcttccctatttaccaggtgtcttcttggcagcaggggagcagaactctaaggctacaactt

SEQ ID NO: 196882 - DNA, 648 bp, Homo sapiens
gagagaggaaaagggagaagacaaagggaacaatcaatgcccctattctaggaatcgatgttctagatccccaaagcagaggggaggcaaaagaaatcataactaaggtatagaaccagagattttaaatttgaaagagacaaataggtgtgtctgaggagctcctgttattgaagccaactgttactgtggtaacacacagaacttgctttgagcactttgtatatgtgtactatcatrcatttacatgcacctacacacagagacacggcgacacacgtagatatgcttctagcacacaacctaagtgtggcactgtcattacaaacaataggcacctggcctcctttctctttgctctaataagagatggcttttgtaatcaggaaaacgatcaaaatgcccagtccaaagaaccaatagagacaagtgaactgaaataataacttcgcctcttgactttgtgtgttaattggtgattctttcttctgaactccccttttgctcacaggctgttgtgatgctaaacgatgttgcaatgtgaacagctaatgtgcacctttgctggtagctgtctttcccacatatgccttgattttagtgactgaatgttagcaattgctgttacacatctggactgattgatga

SEQ ID NO: 196883 - DNA, 524 bp, Homo sapiens
actatgttttctattaataaagagtttactacttcttttctagtctttatatttttatgtatttttcttgacttagaacactggctaggrcatctaataagaaatagagagcagacattcttgtcttgttcctgaatgtgagaggggagtatttagagtttcactactaattacgaatttacctgtaagctgtttttattttacttaatcagggtgatgatgttgcattctattcttattttgcagagagttgctttttttttttatcatgcatagctgatgaaaattgctaaatgatagttctacattattaaaatgtatatttcttattctataaatagatttaataatgtattctataaatatgatgatttgcattcactgttcttttaaacgtaaaccaactcttcatccgtgggataaatcccattgatcataaagtattatcatttttatacattgctggattctattcagaaaaatttgtttaaggatttttgaatgtatgttcttgaagtgtattt

SEQ ID NO: 196884 - DNA, 524 bp, Homo sapiens
actatgttttctattaataaagagtttactacttcttttctagtctttatatttttatgtatttttcttgacttagaacactggctaggacatctaataagaaatagagagcagacattcttgtcttgttcctgaatgtgagaggggagtatttagagtttcactactaattacgaatttacctgtaagctgtttttattttacttaatcagggtgatgatgttgcattctattcttattttgcagrgagttgctttttttttttatcatgcatagctgatgaaaattgctaaatgatagttctacattattaaaatgtatatttcttattctataaatagatttaataatgtattctataaatatgatgatttgcattcactgttcttttaaacgtaaaccaactcttcatccgtgggataaatcccattgatcataaagtattatcatttttatacattgctggattctattcagaaaaatttgtttaaggatttttgaatgtatgttcttgaagtgtattt

SEQ ID NO: 196885 - DNA, 401 bp, Homo sapiens
gtttaaccatggagaagtttttattacaaattcaaactttttaataaatgtaatcttattcatgttttccatttcttctaagttatttatttgttagtttatctattttatataaggtatcaaatttatttatgatttgttattgggcataagattattcataacaatcccttattattttttaagttctgcagtggttacaatgatgcactctttctttcttgctagtgataacttgtatttttcactttcattaattccaatcawtttatcaattttattaatttttaattaatgttttatcaaccttttcacaaaaacaaactttacctttgtatgttatatacatatatactgtttttatattttcaattttattgattactgcttcctttaattct

SEQ ID NO: 196886 - DNA, 460 bp, Homo sapiens
aaaccttcagatggtagagggaaaatcttccctctcctacagtatccacctatctttagttttcagggcacaagtttgttctatgacctaatttttctgattgatctaagaagagttgattttcagcttattcagattttttccttgtgacaataggagtgatggcttccgagttctttacatgttggactgaaattgaaaatctgagtttgttttcatcaaatgcttcttggcatgggtagtaatttttaaatcatatgccagatattttgggtgatacattccagagagtatgaattatgctgttaatttttctgatgctgttagactttgaatgtaaaattctatataccttacaaaataatcaattaagtgttaggtaaaataaccttagaaaatttgctrccttatgcaactttttaaaaagcaaaatgaaacatggttgtgtggaaggaaaata

SEQ ID NO: 196887 - DNA, 566 bp, Homo sapiens
gtttttctatttactctaattgttttcctgtttctcagtacatatgcttcattattcatttattcactcattcacttaaaaaacattcattaagcccactatattgtgcattgtattatactaggagctggaaatagaaagatgaatagaatagctcttcacttcaagtgtagccatatatatatatatggtaaaaaatgcaaccaagcccataagcccagatgctatgggaacatagaaggagacactagacactatgtccccatacttgaccttagagtgccaattgagctatggcttgttacttattgtttccaaccagttgagtgctctataatcatttcagtcaaatgtagtgaaatagttaattatcttctgtgaatttgaagagcattataataacaataatgataacaaaaatggtgagtgctcagcaagtatgtgtaatgaaggaatgagttttatagatgaaaaatctgaggcttgaagggttaaataatttacacaagttctgggttagtaattgacagarctgaaacacaaaactgaggttgactattttcaat

SEQ ID NO: 196888 - DNA, 491 bp, Homo sapiens
gtttctttgaggttggttactggaaaattattgtgttcctttggtggtttcagttttcttgtgtgtgtgtgtgtgtgtgtgtgtgtgttcctgttgccttgcattgatatctccatattcaatggagcagacaacttttccagattttacggactggataagtagggaaacatccccaaaatgggtggatgtaaggtcatcgaatgggtggtgtccagcagttccagttccagggacggcacagtggcatagtttttatgcagttctgttacctgaggcagtgttggcaaatattgcaggagtattcggctgccaakgctgtgggtgtctgcagtggccacaggggatgtttgggtttctagtggtgaagactgctgagattctcctgatctctcttggcactggttcaggttcacaggtactttcatgatggcacatgaaacagtcacacagctggaacctggatcataagcacatgtatagtgacagtg

SEQ ID NO: 196889 - DNA, 491 bp, Homo sapiens
gtttctttgaggttggttactggaaaattattgtgttcctttggtggtttcagttttcttgtgtgtgtgtgtgtgtgtgtgtgtgtgttcctgttgccttgcattgatatctccatattcaatggagcagacaacttttccagattttacggactggataagtagggaaacatccccaaaatgggtggatgtaaggtcatcgaatgggtggtgtccagcagttccagttccagggacggcacagtggcatagtttttatgcagttctgttacctgaggcagtgttggcaaatattgcaggagtattcggctgccaaggytgtgggtgtctgcagtggccacaggggatgtttgggtttctagtggtgaagactgctgagattctcctgatctctcttggcactggttcaggttcacaggtactttcatgatggcacatgaaacagtcacacagctggaacctggatcataagcacatgtatagtgacagtg

SEQ ID NO: 196890 - DNA, 491 bp, Homo sapiens
gtttctttgaggttggttactggaaaattattgtgttcctttggtggtttcagttttcttgtgtgtgtgtgtgtgtgtgtgtgtgtgttcctgttgccttgcattgatatctccatattcaatggagcagacaacttttccagattttacggactggataagtagggaaacatccccaaaatgggtggatgtaaggtcatcgaatgggtggtgtccagcagttccagttccagggacggcacagtggcatagtttttatgcagttctgttacctgaggcagtgttggcaaatattgcaggagtattcggctgccaaggctgtgggtgtctgcagtggccacaggggatgtttgggtttctagtggtgaagactgctgagattctcctgatctctcttggcactggttcaggttcacaggtactttcatgatggcacatgaaacastcacacagctggaacctggatcataagcacatgtatagtgacagtg

SEQ ID NO: 196891 - DNA, 618 bp, Homo sapiens
attgttcccatctcgagaagtctcatgcctttcatttacttcctttgactgaactggggaaaatatctcaaaagtcctttattgatttgggccttttaattagcaattagctatccagtctctactagaaatgatgatcaagtgtctggaaatgcagttggtgtggattttggattcattccatattctgctaatgggatttcagaactgggataaggaagcttgcttctcttttaggactgattacttaaaacttttttcattgtagaaagtttgaagaaatataccccccagaagtagcagagtttgtgtacattacagatgatacctacaccaagaaacaagttctgagaatggagcatctagttttgaaagtccttacttttgacttagctgctccaacagtaaatcagtttcttacccaatactttctgcatcagcagcctgcaaactgcaaagttgaaagtttagcaatggtgagttaactttcattttgttgaatggtgattctttggtaataattaggggtaagccctaattcctttgtamaggaacctagttcctttgtacagcagtggtgaagagatttagtattcagagggagattaatgctgcagt

SEQ ID NO: 196892 - DNA, 560 bp, Homo sapiens
aaaaaccaatttggcaaaaggaaaaatggacaatgttttaaaaccttagggagacggggaagtgagctggtggcgctttcatcccaaaggatataccttccctccatttcctgggccgtttccattccacgcttatcttcagcaataactgaaccacatcgggatgcgtcgctcatttaaaatcagaactcttccctatgggatctactcccagccactgattgtgttcctgtgttctaccggcaggtccagcctgaccaggcgcagactctgcgcgcgcggagcagcgcgcgatcctggggatgcaggggtcaycccggaggtctcggcctcgggcggtgggcctctcgccggcagcagggggcgctgcagaacctcggtccccatcctggagaaccacctccccggctcagccggtctgcgccgcccgccaccatccgaccccaagttctctacctagttctgagcgttcttcctaaaaaagacagtaaaccctgcggcactcccagtgttacgtgacagaaaaaatacagagcatctcaccctgtgaaaccgatcac

SEQ ID NO: 196893 - DNA, 399 bp, Homo sapiens
gacgtggagccgcccggcgcgcgccttcccgccccccgcccggcaccgccctccgaggcgcgggccgcggccgggcccggtactcacaggtccggcccgtgggagaagggcggcgggcagtagccgtgcggctcccgctgcgagggcgccgagcgcggctccagccccccgttgacgcccctccarccccggcggcggcgctgcggctccgcgccctcgtcctcgccctcgtcttcctcctcctccggcgccgggaaggtcacccttgcttgttctttgcacttcctgaccttggtggacatcgcgccggctgcggtccgagtgtgggggtgccggctgccggcctcctccgccttcgcggcagtgcagtcttcccgcggcgccccttcaccacctccc

SEQ ID NO: 196894 - DNA, 577 bp, Homo sapiens
aagatgctttggaagatgtgttattttggctaatattttagggctgcaaaataccaaatggtgccatctgaacctgcaatatgtttctattcaaatctagaagaggaacttaggctcaggaacagatcaaacttctatggaatttggccttctagatgccttgagtacattttgataaagtatacaaggtccccagggaaaattatgtttattatgagccaatttttaacatatattttccattaaatagttctattacagtagtacatcctgccaacattttgataaatgtgagcatattgctcacagtaattttaacctttgggaatatattacatcacttacaaagctcaacttccacaaaatgtttcttgggaatgttgactccagaaatgttatcaaggagaataaatggattatattttttattccaaatgaatgtattmtaatttactaggttaattgtattttttcctagttaaacctcttcactcagtctaactcaagagtttttgaatcacacagttttaacagcattctcaatcagccaacacgttatcaggtaagcattcattag

SEQ ID NO: 196895 - DNA, 557 bp, Homo sapiens
gaaaaagtcacttaagctaactagacgtcccagagctaaaggctgggcaacccaaatgatagtcgccaaagtttaattccgtttaattccctaaaaggcttagagtcagccttcggacagcctcgctcactaggtggctcagcttaaaataatcggaagcgtcgggccctaaatcctacctctccccgccccgcgcaggcgttttctcccgccccagccagtttgtttctccctcctgccccgcccctgctcagtttcctttggtttacccttcactcgcctgcgaccctgtcgccttgaatgacgtcaaggccgcgagcgctttcattggtccatttcaatagtcgcgggatacttgaactgcaagaacagccgccgctccggcgggctgctcgctgcatctctgggcgtctttggctcgccacgctgggcagtgcctgcctgcgcctttcgcaacctcctcggccctgcgtggtctygagctgggtgagcgagcgggcgggctggtaggctggcctgggctgcgaccggcggctacgactattctttggccgggt

SEQ ID NO: 196896 - DNA, 589 bp, Homo sapiens
gattggtctttaaatagtgatcagttaatttttaataaatgtgaaatcattctgaatttctcagaggatgctatttataattaatttgagcacgtcttctgattcttgcaataactgttttgttcagtggtcagttctgattgtttaatatgactgcttagtgattatggcatagtttttcacatttataaataagactagttcggtcggcattgcgtgtacccaacaagagaaaaatctatattgtgctggtagagaatacaaatactgattttaagattctgctagtatggtcatgcagagaagggygggacaaagaaggagcctggcaggtccacacagcatctgtctcctgagtgcagtcgaaagttatttgagaaactcctctttttctctctagaatcaaagctcatgctgggtgttttctgccattaaatagagaagactatctgagatttaacctgagggcagcttctcagagaggagcctcctgcagctgttcctgtggtctttaattaattacatggcacctgcctgatggctcactgaattttttcaatccgactggctttgatttgaggttaggccg

SEQ ID NO: 196897 - DNA, 528 bp, Homo sapiens
caaaagtcaataatctcgtgagataagagtcttaaaaacttaaaaatgagaacccaaaatgtgttcataactcaaattttttcactagtttccacatctacggtgtcacacacatatttcaggtkgagcaaatgcttattttgtgaatgaataaatagcctgtcatttgagctttaatgggctctgctgtgttttaatgagaggaggatccaaccagcgtgtgtctagaaaaaagttaacaggatgtaactgaccatatctggagccatatggcaaagcaaaacattttcacatgaaagcttgccaagatgtgaatcgccttgctaccatgtgaagctacattctagcttaaaaaaaaaaactttacgtctttcaggtatatcagttaaattatattcatgattcttcagataatgagagatgatacttttatacaaatatagacagtgactcagacaagcacatttatacatacattcatggacctataaatacaatcaaataaaggctagagagaaactgttacag

SEQ ID NO: 196898 - DNA, 528 bp, Homo sapiens
caaaagtcaataatctcgtgagataagagtcttaaaaacttaaaaatgagaacccaaaatgtgttcataactcaaattttttcactagtttccacatctacggtgtcacacacatatttcaggttgagcaaatgcttattttgtgaatgaataaatagcctgtcatttgagctttaatgggctctgctgtgttttaatgagaggaggatccaaccagcgtgtgtctagaaaaaagttaacaggatgtaactgaccatatctggagccatatggcaaagcaaaacattttcacatgaaagcttgccaagatgtgaatcgccttgctaccatgtgaagctacattctagcttaaaaaaaaaractttacgtctttcaggtatatcagttaaattatattcatgattcttcagataatgagagatgatacttttatacaaatatagacagtgactcagacaagcacatttatacatacattcatggacctataaatacaatcaaataaaggctagagagaaactgttacag

SEQ ID NO: 196899 - DNA, 553 bp, Homo sapiens
agcgtgtgtctagaaaaaagttaacaggatgtaactgaccatatctggagccatatggcaaagcaaaacattttcacatgaaagcttgccaagatgtgaatcgccttgctaccatgtgaagctacattctagcttaaaaaaaaaaactttacgtctttcaggtatatcagttaaattatattcatgattcttcagataatgagagatgatacttttatacaaatatagacagtgactcagacaagcacatttatacatacattcatggacctataaatacaatcaaataaaggctagagagaaactgttacagtgaatcttggtgtttacgacatcatttyaattgtgttgactgagacttgggcaaaaagagagaaagacaaagaggacttaatcacataacactgagtagttgaaaaaagttgtttctcatttgggccaggttttttcaaatatgtgtgacttaactcccacgacaatccttaaaaataagcattatttttttcatttccagatacagttcaggggtgttaaatgattttgccaagggcac

SEQ ID NO: 196900 - DNA, 468 bp, Homo sapiens
gttacagtgaatcttggtgtttacgacatcatttcaattgtgttgactgagacttgggcaaaaagagagaaagacaaagaggacttaatcacataacactgagtagttgaaaaaagttgtttctcatttgggccaggttttttcaaatatgtgtgacttaactcccacgacaatccttaaaaataagcattatttttttcatttccagatacagttcaggggtgttaaatgattttgccaagggcacacagcatatatatacagaatttgtatctgacttggtgcccatggctttaaacacaacacttrtctgttttcagaacattaaaataccatgtatctacagccatactactcaaactaggtttgggggttgttcattaccctccctgttctcataatacctttgaaaagcagtatttgagttcactcctgctgctatagcaaaatactacaaactggctaatt

SEQ ID NO: 196901 - DNA, 368 bp, Homo sapiens
atcacaagggaagtgagattagataaaaaagaaaagagagccaagaactgatccctgtgacaccttaatactataaagycaaagagattaggaaacatccataaagaagaataaaaggagatatcagtgagtaagaagaaaagtagaagaagttggtatcctgaaaggcatataaagaaagaacaattgaagaaagtgtttgtattagtccgttttcatgctgctgataaagatatacctgagactgtacaattttcaaaagaaagaggtttaattggactcacagttctacgtggctggggaggcctcacaatcatggcagaaggcaaggaggagcaagtcacatcttacacggatagcggcaggca

SEQ ID NO: 196902 - DNA, 295 bp, Homo sapiens
gggatttccaaaacttaaaatcagagaaagcagcacttttttagactgtcaggttggctcaggtatgaaaaagaactgtttccacatctgatataatatatctgaaatagggaggtgagggggcagtgagaaattcttattartctctctttagtttggatcccagcagtgtcacttatgctttatgtattcctacgtttgaatcgactttctggatcattgtctactaatctggatgaaatcaaataccacaaggaattgtcaaatagcttggactacactcctaggagttcat

SEQ ID NO: 196903 - DNA, 645 bp, Homo sapiens
ctcttggtggaactggcttagttcttattcttctctcttggyatttagccatcaaattatctctgttaatttttccaactttccaacttccaaaaatttttgctgtctcccacttgccattgtcttcttcccgttttctttacacttgaaagtttgtaattcttttactctccttttggtggaatttctggaggaaccaaagttgagcacaggtgtataatgtaccatattcctgtaacaggagtatgggagctttacatttgttgctaactttggagcattttgattttattttaaaaggaaggcagcagtttcttaaacaaattaaaatgtatggcattttaatttgaaagtaaattcttatttattaagggaaaatttggaggctacatagagtgctaggttaaagtcagcatagttttttcaccagaagagtgcgaaggcaccatgagcctctgtcttacccaggcatatgtagaatcagagtcttgagcagggactgaggcttcctgtcggtattcctaagcatctaaagaaaaataaaaccttttaccagtcattcaagtgttttgtgtctgcatgtcaagaaccattcagaagctccaagtatctgaatatttggtgccctatagacaacatatctgt

SEQ ID NO: 196904 - DNA, 645 bp, Homo sapiens
ctcttggtggaactggcttagttcttattcttctctcttggtatttagccatcaaattatctctgttaatttttccaactttccaacttccaaaaatttttgctgtctcccacttgccattgtcttcttcccgttttctttacacttgaaagtttgtaattcttttactctccttttggtggaatttctggaggaaccaaagttgagcacaggtgtataatgtaccatattcctgtaacaggagtatgrgagctttacatttgttgctaactttggagcattttgattttattttaaaaggaaggcagcagtttcttaaacaaattaaaatgtatggcattttaatttgaaagtaaattcttatttattaagggaaaatttggaggctacatagagtgctaggttaaagtcagcatagttttttcaccagaagagtgcgaaggcaccatgagcctctgtcttacccaggcatatgtagaatcagagtcttgagcagggactgaggcttcctgtcggtattcctaagcatctaaagaaaaataaaaccttttaccagtcattcaagtgttttgtgtctgcatgtcaagaaccattcagaagctccaagtatctgaatatttggtgccctatagacaacatatctgt

SEQ ID NO: 196905 - DNA, 528 bp, Homo sapiens
tctggtctggcacgtagctgaccagggctgtgaccttggatgagcagggctggcatctggcaagaagccacctgagcagcatgggcttgcagacactcctggcaatgatcccaggctgattttctaagaaactcagaaatttcaggtccagtctgcttttcaaagcatttctaatttataccctacataaatgctatgttttttagaaataatctgttacaaaagggggaagcttgcctggtgcaggggaaagagccagaatgcctggctccatcttcagttctacccccatcatggtcaatcattctctgagtcttsgttcctcataacatggagaaaatgcctacctcacaggaggatgaaaaaacggagagttagagaacagcacagtgtggatctttacttccaattctagccttaagttcctgaatctacaatctgaataatgtgtttggtgctatgttgaaccctaagtcttaaatgcaatgtcagtctatgcaaaattctacacagtaattttctcacaga

SEQ ID NO: 196906 - DNA, 554 bp, Homo sapiens
caaaagttttcaggaaaggtcaattaagtgatttttttttttccttgcaaaaatattaaccccaactccttgaaaaagcttccctaaagtatgtcaagtatgatgtgtcttatggaaaacgtttttttaaagcagccattcccaaggttgtattttatattatggctaagtggaaagcaaatgtattcctcttggcaattttagcaaaaaaaaaaaaaaaaacaagtcacagaggttatcattatgtaacatcaaatacttggataaaaactagagaaattcagccatgtatccaaatagttggtatacaactatactaacatgtaatagttaaaaggaatttgctaattcatttgtttcatttagattgaagcarcaataactaacatgcttatcatgaacaaagcacagtgctagaaaatttggtattgggcatatgcagcaattaaaggccaaccaagtgtcaaacatttctaggtttggtacatagatggggaaggaagaaaacgggagtagaaaaatttgtacctagaaactattatggtaccagaact

SEQ ID NO: 196907 - DNA, 538 bp, Homo sapiens
tgaacttattccttctgtctaactgaaatttttctgtttgtttgaccaacatcttctcaatctctccaccctcagtctctggaaatcatcattttactctctgtttctatgagttcaacttttttacactctayatatgagtgagatcttgtggtatctgtctttctgcgcttggcttatttcatgtaacataatgtcctctaggttcatctatattgccccaaatgacaggatttccttcttttttgaggctaaatagttttccactgtgcatacatgccacattttctttatccattcatgtgataatggacacttaggttgatttcatgtcttggctattgtgaatagtgctgcaacaacatggaagtgcagctatctctttgacatacagatttcaattcctttggctatctacccaaatatggggttgcttgatcacatggtagttctatttttaattttttttagaagtgctgcactgttttccataatagatatactaatttatattcccactaatagtgtgcaaggattc

SEQ ID NO: 196908 - DNA, 343 bp, Homo sapiens
ctggggccaatccaccgcacagtccatttctcagaaccagggatttagtcctggaaggaatggtcttggttgtctttttgttycctgtgactgctgtaatgaatcaccataaatttaatgcactagaatttattctctcacagttctggacgccataagcactgggctgaaaccaaggtatcagcagccctgcgcttcctccagaggctcttggggagaatctgttttcctgccttttccagcatctagagctacctaccttggctccaaccccttcctctgtctttaaagccagtggcctagcatcttctttctctgattcttcttccctctgcttccttta

SEQ ID NO: 196909 - DNA, 529 bp, Homo sapiens
attcatacatgttctttgatgaaatgtctgttcatatatttygtccatttttgtttgggctgtttgtcttatttttgagcactatgattttttataaattctggatacaaatcctttatgtgttttgcagatatgtgttttgcaaatattttctcctgatttatttcttgtcttttcatattgttaatagcattttttaaaggagaaaatttttaatttaatgaggtcaagtttatcaattttttatgaacagtgcttttggtgtcatatctaagaaatctttgcctatctgaaggacacaaagatattttttctatgttttcttccaaagattttattgttttagctcttactttaagtttgtgatgcattttgagttcatttttgtatatggcatgtataaggtgagggtctaagttcactttcacacatatggatatcccattgtcccatcaccatttgttgaggagactttttcccagtgaattgcattgacacctttgtaaaacaaacaaacaaaaaagtctaa

SEQ ID NO: 196910 - DNA, 529 bp, Homo sapiens
attcatacatgttctttgatgaaatgtctgttcatatattttgtccatttttgtttgggctgtttgtcttatttttgagcactatgattttttataaattctggatacaaatcctttatgtgttttgcagatatgtgttttgcaaatattttctcctgatttatttcttgtcttttcatattgttaatagcattttttaaaggagaaaatttttaatttaatgaggtcaagtttatcaattttttatgaacagtgcttttggtgtcatatctaagaaatctttgcctatctgaaggacacaaagatattttttctatgttttcttccaaagattttattgttttagctcttactttaagttygtgatgcattttgagttcatttttgtatatggcatgtataaggtgagggtctaagttcactttcacacatatggatatcccattgtcccatcaccatttgttgaggagactttttcccagtgaattgcattgacacctttgtaaaacaaacaaacaaaaaagtctaa

SEQ ID NO: 196911 - DNA, 524 bp, Homo sapiens
agtagttagcaggtggagagggggaaagcattccaggcagacgggacatatgcaaaggcacagagaaggtatgaagcagcttcacccaggtcaggggagaatctatcctaagaccatgtccatatacctgtggtttaaaaaggcctggaacaaaaaatttggtagttgaatttttgaagaatcagcttgctattgcatgaggaataaaactggtacttcccccaaagcaaattgacttaataaaaaatctgattcaatccaagttgtccatcattgccctggagattcatgtgtttgacaaatattgaacacctcccctttgtcaggctcctccccttcatcaggcagtggagatatgatggtgcacctggaacctgtagtatagtaggacaacttctgataatgataggtgctgcggaggatagaaaacaaaatratgagtggggagtggtagagcagaggtgtctctctgaagggacgacgtatgagctgagacctgaatgatgaataaaatagttgctggc

SEQ ID NO: 196912 - DNA, 528 bp, Homo sapiens
caatggcacctacagccttacaaaatatatttcttcaataataagacttaaacatcaaaattactccttggtccatgggctgtagaatggatgttgtgttagcagtcatgaaacaacatgaatctccttktacatctccatcagcactcttgggtaaccaggtgcattaccaatgagcactactattttgaaaagaatatttttttctgagcaataggtctcaacagtgggcttaaaatattcagtaatctatactataaacagatgtgctgtcatctaggctttcttattttgtttatgaaacacaggaagagtggatttagcataattcttagagaccctagaattttcagaatgacacagagcgttggcttcaacttgaagtcaccagctgcatttgcctctaacaagagggtcagccatcctttgatgctttgaagccaggcactgacttctcctctctagctatgaaaggcctagatggcatcttcttccaacagaaggctgttttgtctaccttgaaagtct

SEQ ID NO: 196913 - DNA, 589 bp, Homo sapiens
taatggaaaaatagttgctattcacaattgcarcagaaactataaaatactcagacaaacctaataaaatatatatgaaaaaatgtataaaacttcacagaagagcaccaaaaaaaaaaaacttagatgataatattccactggggaaggctcaagtttgaaagtacagtaattctctttatattgatatataaatataaaatggccacaattaaaactcagacaagagatttttaacttaatgagctgattctaaaatccatatggaaaaaagcaatgcccaaaaatggctgacaaatttttgaaaaagaagtacaatgaataaggtcttgctctataggcagcaaaacatactatacagatatttgttaagataacatagctatgatgcagaaatagacaatcagatcaaataaccagaataaagaacagaaacagatacattataattagctgtggtttccatgcagtggaattgatcactaaaacttatgtctctagtgtaaatgaaacatcgtaccctttgatcaacctctcccttctctgcgttcttccctacccaaccccagccctagtgcgcagtaaccac

SEQ ID NO: 196914 - DNA, 589 bp, Homo sapiens
taatggaaaaatagttgctattcacaattgcaacagaaactataaaatactcagacaaacctaataaaatatatatgaaaaaatgtataaaacttcacagaagagcaccaaaaaaaaaaaacttagatgataatattccaytggggaaggctcaagtttgaaagtacagtaattctctttatattgatatataaatataaaatggccacaattaaaactcagacaagagatttttaacttaatgagctgattctaaaatccatatggaaaaaagcaatgcccaaaaatggctgacaaatttttgaaaaagaagtacaatgaataaggtcttgctctataggcagcaaaacatactatacagatatttgttaagataacatagctatgatgcagaaatagacaatcagatcaaataaccagaataaagaacagaaacagatacattataattagctgtggtttccatgcagtggaattgatcactaaaacttatgtctctagtgtaaatgaaacatcgtaccctttgatcaacctctcccttctctgcgttcttccctacccaaccccagccctagtgcgcagtaaccac

SEQ ID NO: 196915 - DNA, 589 bp, Homo sapiens
taatggaaaaatagttgctattcacaattgcaacagaaactataaaatactcagacaaacctaataaaatatatatgaaaaaatgtataaaacttcacagaagagcaccaaaaaaaaaaaacttagatgataatattccactggggaaggctcaagtttgaaagtacagtaattctctttatattgatatataaatataaaatggccacaattaaaactcagacaagagatttttaacttaatgagctgattctaaaatccatatggaaaaaagcaatgcccaaaaatggctgacaaatttttgaaaaagaagtacaatgaataaggtcttgctctataggcagcaaaacatactatacagatatttgttaagataacatagctatgatgcagaaatagacaatcagatcaaataaccagaataaagaacagaaacagatacattataattagctgtggtttccatgcagtggaattgatcactaaaacttatgtctctagtgtaaatgaaacatygtaccctttgatcaacctctcccttctctgcgttcttccctacccaaccccagccctagtgcgcagtaaccac

SEQ ID NO: 196916 - DNA, 571 bp, Homo sapiens
cccatgtggagtcccagtgagcgccccttaggaactggaaggctctggtccagctgagaggagtttgaggcaccagcaggcaggtgcaggagacaggcaggcagaactcccactgtgccccaaggctgtggccagtacagcttcctggcacmtggggtggtctggaaagaagagcaatattaatcttgcctgaatttctgcaacccatccagacagcacccacctgggcagagccagggaccctggatgtgagagctactctgctggggaagggaagggaggccactgacccaggcctcttcctgactcccccttcctcctttcctgccccctcctcttcatcaccttgaagaacagattgaaagtgtgaaaagctccttctcttcccatccctgtgcagttcagctattgggttcaaaatctgttaaaatatgttcaaatcctaggatttcagatcttggttttattcttcttacatgaagaagaaactgtaagtacacttccatttatttaaaaaaaatcatatgcaagatggcacgttagattctctttgcaaaccaagctgaataca

SEQ ID NO: 196917 - DNA, 571 bp, Homo sapiens
cccatgtggagtcccagtgagcgccccttaggaactggaaggctctggtccagctgagaggagtttgaggcaccagcaggcaggtgcaggagacaggcaggcagaactcccactgtgccccaaggctgtggccagtacagcttcctggcacctggggtggtctggaaagaagagcaatattaatcttgcctgaatttctgcaacccatccagacagcacccacctgggcagagccagggaccctggatgtgagagctactctgctggggaagggaagggaggccactgacccaggcctcttcctgactcccccttcctcctttcctgccccctcctcttcatcaccttgaagaacagattgaaagtgtgaaaagctccttctcttcccatccctgtgcagttcagctattgggttcaaaatctgttaaaatatgttcaaatcctaggatttcagatcttggttttattcttcttacatgaagaagaaactgtaagtacacttccatttatttaaaaaaaatcatatgyaagatggcacgttagattctctttgcaaaccaagctgaataca

SEQ ID NO: 196918 - DNA, 597 bp, Homo sapiens
agtggattggataaagaaaatatggcacatagacacatggaatactacacaaccataaaaataacaaaatcatgtcctttgcagcaaaatggatgtagctaagacaatcattaatttgctcaggacaatcaagaatgcaatcccatttacaatagccacacaaagcaataaaatacttagaaatacatctaaccaaagaggtgaaaaatatctacaaggagaactacaaaacacagagaaagaaatcatagatgacacaaacaaatggaaaaatattacatgttyctggattgggagaatcaatatagttaaaatggccatacttccctaagcaaattaattgtcctaagcgaattaatgaagaaccagaaaaccaaataccacatattctcacttgtaagtgggagctaaacattgagtactcatggacatcaagatggcaataatagaaactggggactactagcggggagggctaagagttgaaaaactgattattgtgcactatgctcagtacctgggtgatgggatcagtcataccccaaacctcagcatcatacaatatgcccaggtaacaaacctgcacatgtaccccct

SEQ ID NO: 196919 - DNA, 597 bp, Homo sapiens
agtggattggataaagaaaatatggcacatagacacatggaatactacacaaccataaaaataacaaaatcatgtcctttgcagcaaaatggatgtagctaagacaatcattaatttgctcaggacaatcaagaatgcaatcccatttacaatagccacacaaagcaataaaatacttagaaatacatctaaccaaagaggtgaaaaatatctacaaggagaactacaaaacacagagaaagaaatcatagatgacacaaacaaatggaaaaatattacatgttcctggattgggagaatcaatatagttaaaatggccatacttccctaagcaaattaattgtcctaagygaattaatgaagaaccagaaaaccaaataccacatattctcacttgtaagtgggagctaaacattgagtactcatggacatcaagatggcaataatagaaactggggactactagcggggagggctaagagttgaaaaactgattattgtgcactatgctcagtacctgggtgatgggatcagtcataccccaaacctcagcatcatacaatatgcccaggtaacaaacctgcacatgtaccccct

SEQ ID NO: 196920 - DNA, 612 bp, Homo sapiens
tggtgcatgctcaagattgtgctttctgaagagccctggagagggaatttctgaactattactagaccctggctgagcagggaacaaacttgtaaacttcctgtgtgtctccaaggcacacacaggtccaaatgtaatgcgtgaaaaacttactggttcaggggcttagggacaactctgactaatcagtggctggctgctaatctgtgttaagcagggatgattcctaggaagtcaggttcaaaaatttaaaattaagaaaaaawtaggctgggcgtggtggctcatgcctgtaatcccagcactttgggaggccaaggcaggtggatcacttgaggtcaggagtttgaggccagcctggccaatatggtgaaaccccatctctactaaaaacacaaaaattagctgggcatggtggcgcacacctataatcccagctactcgggaggctgagtcaggagaatcacttgaacccaggtggtggaggttgcaatgagccgagtttgtgccactgcactctagcctgggcaacagagtgagactccatctcaaaaaaaaaaaaaaaagaaagaaagaaaaaagaaaagaaaaaaatatgagcaagaacattag

SEQ ID NO: 196921 - DNA, 628 bp, Homo sapiens
ttttggctcaagagaaagtgggaaattatgcagcacgtgtcttccagggcctccagactcttctctccacagctttcctcccctctctgaagccttcactttctcaggtgctcatggtcatccagtattttcccctcatctctgttatcaaaattggctcttaggaaacgatttcaaaccagtcatgcacaatgcagtgtagttgttcctggggtgcttggtgtcttccacaatgagcaggrctggagctgtggctttttatcttttcacccctactgcctgggactgtgcctggaacacagtagctacttaatatgtacttatgaaatgaaggagtgtctacgaccatttgtatcttaaggcttaacctctataaaatgaaaactcaaaagcgtttcatgaggatacatgagcaagatttgggaagaatacactaagctccaatataattaggcaaatgagaggtatagtatgggacataaacccacccagagcctgctccctggtgtcctctctcccacagtccacatgtgtttgcatgctatagggcccaggtgcatgtcagggctgcacttttattccaaggcttataaatctggaacatatgtatctacacatgtgctggcct

SEQ ID NO: 196922 - DNA, 628 bp, Homo sapiens
ttttggctcaagagaaagtgggaaattatgcagcacgtgtcttccagggcctccagactcttctctccacagctttcctcccctctctgaagccttcactttctcaggtgctcatggtcatccagtattttcccctcatctctgttatcaaaattggctcttaggaaacgatttcaaaccagtcatgcacaatgcagtgtagttgttcctggggtgcttggtgtcttccacaatgagcagggctggagctgtggctttttatcttttcacccctactgcctgggactgtgcctggaacacagtagctacttaatatgtacttatgaaatgaaggagtgtctacgaccatttgtatcttaaggcttaacctctataaaatgaaaactcaaaagcgtttcatgaggatacatgagcaagatttgggaagaatacactaagctccaatawaattaggcaaatgagaggtatagtatgggacataaacccacccagagcctgctccctggtgtcctctctcccacagtccacatgtgtttgcatgctatagggcccaggtgcatgtcagggctgcacttttattccaaggcttataaatctggaacatatgtatctacacatgtgctggcct

SEQ ID NO: 196923 - DNA, 318 bp, Homo sapiens
actcggattaaacccttataatttctatcatgattgattttgttcatcttcaaattccaataattagaattcctacaggatgtgtgtgtgagtgtgtatctggtttattttctttagcataaatamatatttgagatttagccaaatatttgtgtgtatcatttatttttcctcatatttctgagttgcctatgtatttgtcagagtttgcttattcattagtctgttagtgaatattcagattgctttcagaattagcttttacaaataaaggacttaggtgcattctcaaacaggtttttgtgtaaatatatgctt

SEQ ID NO: 196924 - DNA, 318 bp, Homo sapiens
actcggattaaacccttataatttctatcatgattgattttgttcatcttcaaattccaataattagaattcctacaggatgtgtgtgtgagtgtgtatctggtttattttctttagcataaataaatatttgagatttagccaaatatttgtgtgtatcatttatttttcctcatatttctgagttgcctaygtatttgtcagagtttgcttattcattagtctgttagtgaatattcagattgctttcagaattagcttttacaaataaaggacttaggtgcattctcaaacaggtttttgtgtaaatatatgctt

SEQ ID NO: 196925 - DNA, 585 bp, Homo sapiens
gtatcctgcttgttgccttattagttgtttttctctcattgcaatcagctrttgccatgtaccttttgcatttggtggtcagggtcttcggaatcgcatgaatctgatatcaaatcccagttgtattgctgattagctgtgaaaaaagattttaaacttattattttcagtttactcatttattaagtaccaatattaatattgaaactggagaaatagattaaatggcatactgaatgaaaataagcttatatagtaattgttacataggaaaactctcaataaatcaatgctgttattattaccattaatattccctagatgtgaagattgccttcagaggaaacatactagagaaaaaaaaatgagttttacagaagtttttcagcagaagttgattggttttacacacacacatatacacgcacacatatttacacacataaatatgtatattttatatatatatatgcacacacgtttctatttaaaatgaaaaaagtacgttagtcatgtgtgcccaattttctgatacactaaaaaatggaaatatcttggcagacactattgataggctatgcaaat

SEQ ID NO: 196926 - DNA, 585 bp, Homo sapiens
gtatcctgcttgttgccttattagttgtttttctctcattgcaatcagctattgccatgtaccttttgcatttggtggtcagggtcttcggaatcgcatgaatctgatatcaaatcccagttgtattgctgattagctgtgaaaaaagattttaaacttattattttcagtttactcatttattaagtaccaatattaatattgaaactrgagaaatagattaaatggcatactgaatgaaaataagcttatatagtaattgttacataggaaaactctcaataaatcaatgctgttattattaccattaatattccctagatgtgaagattgccttcagaggaaacatactagagaaaaaaaaatgagttttacagaagtttttcagcagaagttgattggttttacacacacacatatacacgcacacatatttacacacataaatatgtatattttatatatatatatgcacacacgtttctatttaaaatgaaaaaagtacgttagtcatgtgtgcccaattttctgatacactaaaaaatggaaatatcttggcagacactattgataggctatgcaaat

SEQ ID NO: 196927 - DNA, 311 bp, Homo sapiens
tgagctctggggaggttcactgcaaaactgacattacaaagccatatagtaatcaggctatctaaagtcaacatgaagaaatgaattctaagracagtgagacaaaagcatcaagtaacctataaaggaaaacctattagactaacagcagacttctcagcagaaatcttacaggccagaagttcactctatctttaggcttatctttaatatccttagacaaaataactattagtcaaaaattttgtatccagcaaaactgagtctcataaatgaaagagaaataatgtcttcctcagacaagcaaatgc

SEQ ID NO: 196928 - DNA, 311 bp, Homo sapiens
tgagctctggggaggttcactgcaaaactgacattacaaagccatatagtaatcaggctatctaaagtcaacatgaagaaatgaattctaaggacagtgagacaaaagcawcaagtaacctataaaggaaaacctattagactaacagcagacttctcagcagaaatcttacaggccagaagttcactctatctttaggcttatctttaatatccttagacaaaataactattagtcaaaaattttgtatccagcaaaactgagtctcataaatgaaagagaaataatgtcttcctcagacaagcaaatgc

SEQ ID NO: 196929 - DNA, 393 bp, Homo sapiens
ttctagattatttttttccagagaaactaccagtgaattgtacagagcagaggatgctgtasaatagaatttctgcactctatatggccataaatcaaaatgatacattgctaagacagctccctggttatgatagaaagcagatagtggctgcctgtctggtatgtcacagcttgatctgatctgttgctttgaacatatcagtgtgaatgtaaatggaattaatttaaataatataaaactagaacctagaaagcctcagagaatgtgattttatgtttgctttaatgctttaaaattataaataactccctcaagaggtacgtagaggacatttaagggaagcctatggcacagccagataaaacggtatctggtgctaggatataccta

SEQ ID NO: 196930 - DNA, 610 bp, Homo sapiens
gactttgtcataactagaagactatctagaattgtgaatgaagtaaggaccccaaataaagacgcatttctaattctcatatttctggcccatgcagcaaatattgggtatgctagatggaagaaaaggtgttcaatatataacatcctcttccatatctcagttttgattccattaaaattaatacaaggaatrtagcagaatagtgagaaacaaacacatttagtctgatataggggatgcatattcatggcagttgagccttctaatattgaattccagagttagtgcagaagcaaagaatgtgtgctttctgtgagtgattcctaaataaaaagaacagagacatatgtttttaacaagtacttatgtgggattcataaaattaatttttatattatcctctccccatcaacaaattgttagggacaccatgtccgtgttttaaatgttcattaaaattgcattgtattttaatctcaacaatatcaatatagatttaatcctcagtcatgtatatcaacttttgtgaaaattaattttattttctttcactggcataagtttattttaatagttatttgaaaaaaaaaaaactcctggatttttt

SEQ ID NO: 196931 - DNA, 610 bp, Homo sapiens
gactttgtcataactagaagactatctagaattgtgaatgaagtaaggaccccaaataaagacgcatttctaattctcatatttctggcccatgcagcaaatattgggtatgctagatggaagaaaaggtgttcaatatataacatcctcttccatatctcagttttgattccattaaaattaatacaaggaatgtagcagaatagtgagaaacaaacacatttagtctgatataggggatgcatattcatggcagtygagccttctaatattgaattccagagttagtgcagaagcaaagaatgtgtgctttctgtgagtgattcctaaataaaaagaacagagacatatgtttttaacaagtacttatgtgggattcataaaattaatttttatattatcctctccccatcaacaaattgttagggacaccatgtccgtgttttaaatgttcattaaaattgcattgtattttaatctcaacaatatcaatatagatttaatcctcagtcatgtatatcaacttttgtgaaaattaattttattttctttcactggcataagtttattttaatagttatttgaaaaaaaaaaaactcctggatttttt

SEQ ID NO: 196932 - DNA, 610 bp, Homo sapiens
gactttgtcataactagaagactatctagaattgtgaatgaagtaaggaccccaaataaagacgcatttctaattctcatatttctggcccatgcagcaaatattgggtatgctagatggaagaaaaggtgttcaatatataacatcctcttccatatctcagttttgattccattaaaattaatacaaggaatgtagcagaatagtgagaaacaaacacatttagtctgatataggggatgcatattcatggcagttgarccttctaatattgaattccagagttagtgcagaagcaaagaatgtgtgctttctgtgagtgattcctaaataaaaagaacagagacatatgtttttaacaagtacttatgtgggattcataaaattaatttttatattatcctctccccatcaacaaattgttagggacaccatgtccgtgttttaaatgttcattaaaattgcattgtattttaatctcaacaatatcaatatagatttaatcctcagtcatgtatatcaacttttgtgaaaattaattttattttctttcactggcataagtttattttaatagttatttgaaaaaaaaaaaactcctggatttttt

SEQ ID NO: 196933 - DNA, 610 bp, Homo sapiens
gactttgtcataactagaagactatctagaattgtgaatgaagtaaggaccccaaataaagacgcatttctaattctcatatttctggcccatgcagcaaatattgggtatgctagatggaagaaaaggtgttcaatatataacatcctcttccatatctcagttttgattccattaaaattaatacaaggaatgtagcagaatagtgagaaacaaacacatttagtctgatataggggatgcatattcatggcagttgagccttctaatattgaattccagagttagtgcagaagcaaagaatgtgtgctttctgtgastgattcctaaataaaaagaacagagacatatgtttttaacaagtacttatgtgggattcataaaattaatttttatattatcctctccccatcaacaaattgttagggacaccatgtccgtgttttaaatgttcattaaaattgcattgtattttaatctcaacaatatcaatatagatttaatcctcagtcatgtatatcaacttttgtgaaaattaattttattttctttcactggcataagtttattttaatagttatttgaaaaaaaaaaaactcctggatttttt

SEQ ID NO: 196934 - DNA, 596 bp, Homo sapiens
acaaattcagtagtgctaatccagaaatccaaaatctgtaatgcttaagtgaacatttccttgagcatcacgtcagctctcaaaaagtttcagcttttagagcatttcagatttcagatatctggataaggaacactcaacatgcacttttctatattaaccttatttgctataaatttcatatatatatatattatttagttctagtagcttttgaaatgtattccttagtttttttccataatcatctcattttcaagtaaagacaattttgtttttcctattcaatcattatgcccttyatttttcttttataatggttagtgcttacagtaatgtgtagaagaatagtagtgagatgaacattctttcttttttcctgattttatgtggaatttttcaatattgcacctttaaatagtaccctgcctgaagattttttgtaggttgtggaaataaataacacctaataataacagagagaatctatatttattcagacgttttataacaagaaagtcagctgtcatcatatatgttttgcagagactcaaagaaaggctgaggaataggaaagttttgtacttggaaaagga

SEQ ID NO: 196935 - DNA, 596 bp, Homo sapiens
acaaattcagtagtgctaatccagaaatccaaaatctgtaatgcttaagtgaacatttccttgagcatcacgtcagctctcaaaaagtttcagcttttagagcatttcagatttcagatatctggataaggaacactcaacatgcacttttctatattaaccttatttgctataaatttcatatatatatatattatttagttctagtagcttttgaaatgtattccttagtttttttccataatcatctcattttcaagtaaagacaattttgtttttcctattcaatcattatgccctttattttycttttataatggttagtgcttacagtaatgtgtagaagaatagtagtgagatgaacattctttcttttttcctgattttatgtggaatttttcaatattgcacctttaaatagtaccctgcctgaagattttttgtaggttgtggaaataaataacacctaataataacagagagaatctatatttattcagacgttttataacaagaaagtcagctgtcatcatatatgttttgcagagactcaaagaaaggctgaggaataggaaagttttgtacttggaaaagga

SEQ ID NO: 196936 - DNA, 409 bp, Homo sapiens
atgagcatgttatttatatgcaaaccaaccaatccagaatccacaccctcacttgactcttattatatggctcctgtggtctgggacattatccctctgctttcatcaccycagaatcaggtgctggaacactagggactaaattacacaaaaagcactcacactacccagtcttaaacctgctcagctgcttacactgtctcactcattccttccaaggaaaaccatattaaaggctctggctcatgctttagtcttgctccttttgccttcactgactctggtacttccccatatggccccagtgcatgatgtgctgtggctcctgtttccagggctttatgtgtataagaacacgtgacagtcatttctgtctctgcacgtctctccataattaaatggagacaaa

SEQ ID NO: 196937 - DNA, 399 bp, Homo sapiens
acttgcctatgagcatgttatttatatgcaaaccaaccaatccagaatccacaccctcacttgactcttattatatggctcctgtggtctgggacattatccctctgctttcatcacctcagaatcaggtgctggaacactagggactaaattacacaaaaagcactcacactacccagtcttaaacctgctcagctgcttacactgtctcactcattccttccaaggaaaaccatattaaaggctctggctcatgctttagtcttgctccttttgccttcactgactctggtacttccccatatggccccagtgcatgatgtgctgtggctcctgtttcyagggctttatgtgtataagaacacgtgacagtcatttctgtctctgcacgtctctcca

SEQ ID NO: 196938 - DNA, 384 bp, Homo sapiens
tgttatttatatgcaaaccaaccaatccagaatccacaccctcacttgactcttattatatggctcctgtggtctgggacattatccctctgctttcatcacctcagaatcaggtgctggaacactagggactaaattacacaaaaagcactcacactacccagtcttaaacctgctcagctgcttacactgtctcactcattccttccaaggaaaaccatattaaaggctctggctcatgctttagtcttgctccttttgccttcactgactctggtacttccccatatggccccagtgcatgatgtgctgtggctcctgtttccagggctttatgtgtataagaacacrtgacagtcatttctgtctctgcacgtctctcca

SEQ ID NO: 196939 - DNA, 556 bp, Homo sapiens
gagaggtaggggtccaatttcaatcttctgtatatggctagccagttaccacagcacaatttattgaatagggaattttttttcccattgcttgtttttgtcagcttcttcaaaggtcatctagttgtaggtgtgcaaatttagttctgggtcttctattctattccactgactggtctgtgtgtctgtttttgtatcagtaccacgctgttttgatcactgtagccttatagtacagtttgaagtctggcaatgtgatacctctggcttttctttttgcttaggattgctttggctattcaatctcttttgtggttccagatgaattttataataggtttmattctaattatttaaaaaatggcattggtattttgataggaatagcattgaatctgtaaattgctttaggcagtatatccatttttaacaatattgattcttccaatccatgagcatggatatttttccatttatgtgtcatctctgatttctttcaacagtgtcttgtacttctccttgcagtggtctttgacctccttggttggatgaattc

SEQ ID NO: 196940 - DNA, 321 bp, Homo sapiens
atagcttaaaactaactttaaaaaaaaaaaagtcaatgtgactacttaaaaattytgttcagataattgcagggataccagtttgaaataatctgacttaaaatcatacatttatgtacataaaaataaatttggtatcaatgaaaacactaaaaactagaaaacaatctaacttctgaaattattctaaaatagtataagaatatattttatatatgcttgtaggaagggctctttaaaagtgtgacgcaattcataaaggaaaaaatgtttaaagataaatactgattaattgattattaagccagattcaggtaaccc

SEQ ID NO: 196941 - DNA, 189 bp, Homo sapiens
aatgagcttagatgaaattttaattgccatactcaagccacttaaatagttaaccaagacattctcccttgtttctacagtgatacatagtattgaaaattgctttgactgyacactcaaattattacagttcaactttcttcaacatcataaattgaaaggatatcatgtggatctttgttgttccca

SEQ ID NO: 196942 - DNA, 189 bp, Homo sapiens
aatgagcttagatgaaattttaattgccatactcaagccacttaaatagttaaccaagacattctcccttgtttctacagtgatacatagtattgaaaattgctttgactgtacactcaaattattacarttcaactttcttcaacatcataaattgaaaggatatcatgtggatctttgttgttccca

SEQ ID NO: 196943 - DNA, 338 bp, Homo sapiens
agaaaactggttgttaattagcacaagcacctataatagtgcctgatatatttagtactcaaaatatatgttaaattaaaaacaaatgtataaattaatggttgaatatcataataattactcaaaatgtaacataattccaaaggagaaaacttttttctaaaaaggctctctcaattgctctttctgatttactattttccccaaatctgtagttgcttcattattgtttggaattttgcattagttgtcaataaacaaaaaatatggatcatatcacagctctttcattkcttgagatatatgaatgtatgtgatatctttgatgtcctgtattt

SEQ ID NO: 196944 - DNA, 571 bp, Homo sapiens
ggaatggttcatttaattaagccatagttgttacttcgagtataattaattagtgaaggtatattgcttttatgggatataattaataggaaaataggttactgctctgtagcatagttataatttaaatgctgtggctttatagaatttaaaggtagggtctgtttattatkaattatgcctcccatcatctagctcatgtgaggtagctctggaacagcacattatttatgtttgctaataatttattttagatataatggttggttaggaaggagttcacggtgaagaaggtagatgtcacaaaaacatgcctgaaatggtgatggagaagacgaatccatgtatttattcatttaataaattatgctgtcattcaagcaaataaaaatagtctttaccctgaacattcatataaaaatatctgttgtataattaatcgtgtgcttctgaataaaatggatgaaagcatagtttacattataagcattaattcattaaaatttaccctgaacattgttatttggttttattagcaagaaatatagcacttggaatggtttattaaata

SEQ ID NO: 196945 - DNA, 571 bp, Homo sapiens
ggaatggttcatttaattaagccatagttgttacttcgagtataattaattagtgaaggtatattgcttttatgggatataattaataggaaaataggttactgctctgtagcatagttataatttaaatgctgtggctttatagaatttaaaggtagggtctgtttattattaattatgcctcccatcatctagctcatgtgaggtagctctggaacagcacattatttatgtttgctaataatttattttagatataatggttggttaggaaggagttcayggtgaagaaggtagatgtcacaaaaacatgcctgaaatggtgatggagaagacgaatccatgtatttattcatttaataaattatgctgtcattcaagcaaataaaaatagtctttaccctgaacattcatataaaaatatctgttgtataattaatcgtgtgcttctgaataaaatggatgaaagcatagtttacattataagcattaattcattaaaatttaccctgaacattgttatttggttttattagcaagaaatatagcacttggaatggtttattaaata

SEQ ID NO: 196946 - DNA, 418 bp, Homo sapiens
tattcacatttttaatgaatagtaaactaatgatatcttgttattcctatgctttgtctatcatacctacacataaatataagcactggtaagttctggttccaaacatagcttatatatgaatgccataatcattcaayatgcatacattagccttgaagtttgaagactaaaaattgtttgtaaaactatctagaaaaaatttattatgattacagccactattagatttcaaaagggttcatcagaaatctctgaggtatataatggggaaagaatattttgactaccactttaacaggtctgctgtttaataatattagtttatttttaattgatgtttcatggacatccagaatactagctataaaatcatatatgctgcataatgcaagcaaaacaaaagcacctataaata

SEQ ID NO: 196947 - DNA, 418 bp, Homo sapiens
tattcacatttttaatgaatagtaaactaatgatatcttgttattcctatgctttgtctatcatacctacacataaatataagcactggtaagttctggttccaaacatagcttatatatgaatgccataatcattcaacatgcatacattagccttgaaktttgaagactaaaaattgtttgtaaaactatctagaaaaaatttattatgattacagccactattagatttcaaaagggttcatcagaaatctctgaggtatataatggggaaagaatattttgactaccactttaacaggtctgctgtttaataatattagtttatttttaattgatgtttcatggacatccagaatactagctataaaatcatatatgctgcataatgcaagcaaaacaaaagcacctataaata

SEQ ID NO: 196948 - DNA, 418 bp, Homo sapiens
tattcacatttttaatgaatagtaaactaatgatatcttgttattcctatgctttgtctatcatacctacacataaatataagcactggtaagttctggttccaaacatagcttatatatgaatgccataatcattcaacatgcatacattagccttgaagtttgaagactaaaaattgtttgtaaaactatctagaaaaaatttattatgattacagccactattagatttcaaaagggttcatcagaaatctctgaggtatataatggggaaagaatattttgactaccactttaacaggtctgctrtttaataatattagtttatttttaattgatgtttcatggacatccagaatactagctataaaatcatatatgctgcataatgcaagcaaaacaaaagcacctataaata

SEQ ID NO: 196949 - DNA, 418 bp, Homo sapiens
tattcacatttttaatgaatagtaaactaatgatatcttgttattcctatgctttgtctatcatacctacacataaatataagcactggtaagttctggttccaaacatagcttatatatgaatgccataatcattcaacatgcatacattagccttgaagtttgaagactaaaaattgtttgtaaaactatctagaaaaaatttattatgattacagccactattagatttcaaaagggttcatcagaaatctctgaggtatataatggggaaagaatattttgactaccactttaacaggtctgctgtttaataatattagtttmtttttaattgatgtttcatggacatccagaatactagctataaaatcatatatgctgcataatgcaagcaaaacaaaagcacctataaata

SEQ ID NO: 196950 - DNA, 539 bp, Homo sapiens
gggaagctgcattaaaattggtaaaggaagaaacataatatgaaaggagggaaataatgaggtaaaagatgcagagactgctttccagacaaagtaagaatgaacttcactttggaataacaaagcagtgcttgcttggcaaggtgagtcttagaatctgactaacatcaacagggcagagtctcaggtaattaacaaaaccargaaggaacagggagcagcaatgctaaaacacaagaacccaggttactttgtcctacttcatagttgttattttcctaatcattggagataagctatgattaacagaaaaactacccatgtaaaatattgtcacccaacttttaagaaaaacaagaaagaagatacaaaacttagcaaacagaataagtaatttcagagaatcagaattaagacaagaaacaaatgtaattacagtaagtgtaattcatatcttcagagacatgcaagaagaggttgcattttagaaaatactgataatagctcttggattaaaaactcaacagatgctctgaaga

SEQ ID NO: 196951 - DNA, 538 bp, Homo sapiens
ggaagctgcattaaaattggtaaaggaagaaacataatatgaaaggagggaaataatgaggtaaaagatgcagagactgctttccagacaaagtaagaatgaacttcactttggaataacaaagcagtgcttgcttggcaaggtgagtcttagaatctgactaacatcaacagggcagagtctcaggtaattaacaaaaccaagaaggaacagggagcagcaatgctaaaacacaagaamccaggttactttgtcctacttcatagttgttattttcctaatcattggagataagctatgattaacagaaaaactacccatgtaaaatattgtcacccaacttttaagaaaaacaagaaagaagatacaaaacttagcaaacagaataagtaatttcagagaatcagaattaagacaagaaacaaatgtaattacagtaagtgtaattcatatcttcagagacatgcaagaagaggttgcattttagaaaatactgataatagctcttggattaaaaactcaacagatgctctgaaga

SEQ ID NO: 196952 - DNA, 538 bp, Homo sapiens
ggaagctgcattaaaattggtaaaggaagaaacataatatgaaaggagggaaataatgaggtaaaagatgcagagactgctttccagacaaagtaagaatgaacttcactttggaataacaaagcagtgcttgcttggcaaggtgagtcttagaatctgactaacatcaacagggcagagtctcaggtaattaacaaaaccaagaaggaacagggagcagcaatgctaaaacacaagaacccaggttactttgtcctacttcatagttgttattttcctaatcattggagataagctatgattaacagaaaaactacccatgtaaaatattgtcacccaacttttaagaaaaacaagaaagaagatacaaaacttagcaaacagaataagtaatttcagagaatcagaattaagamaagaaacaaatgtaattacagtaagtgtaattcatatcttcagagacatgcaagaagaggttgcattttagaaaatactgataatagctcttggattaaaaactcaacagatgctctgaaga

SEQ ID NO: 196953 - DNA, 430 bp, Homo sapiens
gacacgtaactcatgatacaaagatgaatttagtacagatcatatgcctaaacgtaaaatgtaaaaacaaagtgaaaaaaaaaggaagaaaaattacgtataggagaaaatatagaaaagtctttgacctcaggctaataaatactacttagacatgacacaaacaccatgtttcatcaaagtagaaattgacaactcgagttcatcaaaatgtaaaacatatgttcctcagraaacactgtaaaacaaatagaaatataagacactactgagaacaatatttgcaaaatatatgtctggcaaaaaagttgtgtccagaaaatataagaactctcaaaacttgataataaatctagcaactctaataaaagtaggcaaacgacttaaatgaatacttcttctctaaagaacatacgtagatagaaagtaa

SEQ ID NO: 196954 - DNA, 430 bp, Homo sapiens
gacacgtaactcatgatacaaagatgaatttagtacagatcatatgcctaaacgtaaaatgtaaaaacaaagtgaaaaaaaaaggaagaaaaattacgtataggagaaaatatagaaaagtctttgacctcaggctaataaatactacttagacatgacacaaacaccatgtttcatcaaagtagaaattgacaactcgagttcatcaaaatgtaaaacatatgttcctcagaaaacactgtaaaacaaatagaaatataagacactactgagaacaatatttgcaaaatatatgtctggcaaaaaagttgtgtccagaaaatataagaactctcaaaacttgataataaatstagcaactctaataaaagtaggcaaacgacttaaatgaatacttcttctctaaagaacatacgtagatagaaagtaa

SEQ ID NO: 196955 - DNA, 430 bp, Homo sapiens
gacacgtaactcatgatacaaagatgaatttagtacagatcatatgcctaaacgtaaaatgtaaaaacaaagtgaaaaaaaaaggaagaaaaattacgtataggagaaaatatagaaaagtctttgacctcaggctaataaatactacttagacatgacacaaacaccatgtttcatcaaagtagaaattgacaactcgagttcatcaaaatgtaaaacatatgttcctcagaaaacactgtaaaacaaatagaaatataagacactactgagaacaatatttgcaaaatatatgtctggcaaaaaagttgtgtccagaaaatataagaactctcaaaacttgataataaatctagcaactctaataaaagtaggcaaaygacttaaatgaatacttcttctctaaagaacatacgtagatagaaagtaa

SEQ ID NO: 196956 - DNA, 430 bp, Homo sapiens
gacacgtaactcatgatacaaagatgaatttagtacagatcatatgcctaaacgtaaaatgtaaaaacaaagtgaaaaaaaaaggaagaaaaattacgtataggagaaaatatagaaaagtctttgacctcaggctaataaatactacttagacatgacacaaacaccatgtttcatcaaagtagaaattgacaactcgagttcatcaaaatgtaaaacatatgttcctcagaaaacactgtaaaacaaatagaaatataagacactactgagaacaatatttgcaaaatatatgtctggcaaaaaagttgtgtccagaaaatataagaactctcaaaacttgataataaatctagcaactctaataaaagtaggcaaacgrcttaaatgaatacttcttctctaaagaacatacgtagatagaaagtaa

SEQ ID NO: 196957 - DNA, 560 bp, Homo sapiens
ctcaccgtgtcatttgctcsttgcattttctctttaatcatttcacttccatatagatttttgccccccagtactctaattaaacctgtcctccactttgttaatcttatagttatttttctcaccttacttgatttatcagcagcatttgaagtatattattctcataatactatcttcatttgactccctggttttatattatttgtatacttctctctctctctctctctctctctctctctgtctccctctctctctctctttcagtgttttcttctattcctcagattcaatgttggaatgccccaggcctcagtattttatttccccccaccctcatctttctctgcacttctttccttggttatctcatccaatctcatggttttacatgcactgtaaatgctaatgactcccaaatttatatttccatgccatatctctatcccaaattccacacttataaatccaattgcattttttacacttccacctgaatgttgtgatgataatgggtctatttttcctgagacccattcctcactctgcccagctca

SEQ ID NO: 196958 - DNA, 560 bp, Homo sapiens
ctcaccgtgtcatttgctcgttgcattttctctttaatcatttcayttccatatagatttttgccccccagtactctaattaaacctgtcctccactttgttaatcttatagttatttttctcaccttacttgatttatcagcagcatttgaagtatattattctcataatactatcttcatttgactccctggttttatattatttgtatacttctctctctctctctctctctctctctctctgtctccctctctctctctctttcagtgttttcttctattcctcagattcaatgttggaatgccccaggcctcagtattttatttccccccaccctcatctttctctgcacttctttccttggttatctcatccaatctcatggttttacatgcactgtaaatgctaatgactcccaaatttatatttccatgccatatctctatcccaaattccacacttataaatccaattgcattttttacacttccacctgaatgttgtgatgataatgggtctatttttcctgagacccattcctcactctgcccagctca

SEQ ID NO: 196959 - DNA, 560 bp, Homo sapiens
ctcaccgtgtcatttgctcgttgcattttctctttaatcatttcacttccatatagatttttgccccccastactctaattaaacctgtcctccactttgttaatcttatagttatttttctcaccttacttgatttatcagcagcatttgaagtatattattctcataatactatcttcatttgactccctggttttatattatttgtatacttctctctctctctctctctctctctctctctgtctccctctctctctctctttcagtgttttcttctattcctcagattcaatgttggaatgccccaggcctcagtattttatttccccccaccctcatctttctctgcacttctttccttggttatctcatccaatctcatggttttacatgcactgtaaatgctaatgactcccaaatttatatttccatgccatatctctatcccaaattccacacttataaatccaattgcattttttacacttccacctgaatgttgtgatgataatgggtctatttttcctgagacccattcctcactctgcccagctca

SEQ ID NO: 196960 - DNA, 560 bp, Homo sapiens
ctcaccgtgtcatttgctcgttgcattttctctttaatcatttcacttccatatagatttttgccccccagtactctaattaaacctgtcctccactttgttaatcttatagttatttttctcaccttacttgatttatcagcagcatttgaagtakattattctcataatactatcttcatttgactccctggttttatattatttgtatacttctctctctctctctctctctctctctctctgtctccctctctctctctctttcagtgttttcttctattcctcagattcaatgttggaatgccccaggcctcagtattttatttccccccaccctcatctttctctgcacttctttccttggttatctcatccaatctcatggttttacatgcactgtaaatgctaatgactcccaaatttatatttccatgccatatctctatcccaaattccacacttataaatccaattgcattttttacacttccacctgaatgttgtgatgataatgggtctatttttcctgagacccattcctcactctgcccagctca

SEQ ID NO: 196961 - DNA, 435 bp, Homo sapiens
caagatgggatataataacaaatgactcttgaaatcttcatgggtgccatgggaagtttyaagaacacaacttgaaagtgaattgcatgactttgttctgtatttcattgaccactactcattcagtaagcgtgaaagtaactgtgtatatcattgttagtatactatgcatgccagatacccaagactcagtcttaaacttttcctttcctttacacaccatgtatttagtcatcaattttggttcaacctactccactaaatagctttgacttccattcacttaccactttagattagtgctatagactcctattgtacctccttcatatcaatccccttaaaactcccaatagcttccattgtttcacccaaaagctcaaattcctttaatataaagtgttatatgaactggcaccccatatactttatatc

SEQ ID NO: 196962 - DNA, 435 bp, Homo sapiens
caagatgggatataataacaaatgactcttgaaatcttcatgggtgccatgggaagttttaagaacacaacttgaaagtgaattgcatgactttgttctgtatttcattgaccactactcattcagtaagcgtgaaagtaactgtgtatatcaytgttagtatactatgcatgccagatacccaagactcagtcttaaacttttcctttcctttacacaccatgtatttagtcatcaattttggttcaacctactccactaaatagctttgacttccattcacttaccactttagattagtgctatagactcctattgtacctccttcatatcaatccccttaaaactcccaatagcttccattgtttcacccaaaagctcaaattcctttaatataaagtgttatatgaactggcaccccatatactttatatc

SEQ ID NO: 196963 - DNA, 435 bp, Homo sapiens
caagatgggatataataacaaatgactcttgaaatcttcatgggtgccatgggaagttttaagaacacaacttgaaagtgaattgcatgactttgttctgtatttcattgaccactactcattcagtaagcgtgaaagtaactgtgtatatcattgttagtatactatgcatgccagatacccaagactcagtcttaaacttttcctttcctttasacaccatgtatttagtcatcaattttggttcaacctactccactaaatagctttgacttccattcacttaccactttagattagtgctatagactcctattgtacctccttcatatcaatccccttaaaactcccaatagcttccattgtttcacccaaaagctcaaattcctttaatataaagtgttatatgaactggcaccccatatactttatatc

SEQ ID NO: 196964 - DNA, 435 bp, Homo sapiens
caagatgggatataataacaaatgactcttgaaatcttcatgggtgccatgggaagttttaagaacacaacttgaaagtgaattgcatgactttgttctgtatttcattgaccactactcattcagtaagcgtgaaagtaactgtgtatatcattgttagtatactatgcatgccagatacccaagactcagtcttaaacttttcctttcctttacacaccatgtatttagtcatcaattttggttcaacctactccactaaatagctttgacttccattcacttaccactttagattagtgctatagactcctattgtacctccttcatatcaatccccttaaaactcccaatagcttccattgtttcamccaaaagctcaaattcctttaatataaagtgttatatgaactggcaccccatatactttatatc

SEQ ID NO: 196965 - DNA, 513 bp, Homo sapiens
ttgtgatctaaatatctcctctgtgtaagtgagatgaccgcacatcttactcagaatcatcatctattatccttgttcaaagcatatctgatgtgggaggaaaggacccagggattctcacagtgctatctgaccttaccttgctccacctgtacctcacaataatttttatccataaaattattagttaagtttgcataagatctccgatgcatgtragtctgatttgataatctaatactttgtgtatttttaaccacaataatgtgtttttatttttcaatttaatatgtattggaaatcttagtgattcaacacatgttaatctttatcatttctttaactcttagatatgtcatatttacttagccatttctctattggtggacatttaatctatttaatgggcttttggctatttttaaaaagctgtaattgacatcctattgcattttattgcacatatgttagtatttcgtaagacagaggatgagttaaggaaaattgtgctta

SEQ ID NO: 196966 - DNA, 507 bp, Homo sapiens
cttattcaaacttctcttctcttcttcagaggcaaacctgtataatttckttggtttgtttgtttgttttaagacgtagtcttactctgttacccaggctagagtgcagtggtacaatgtgagctcactgcaacctccgcctcccgggttcaagcgattctccggcttcagcatcccaaataactcggattaaacccttataatttctatcatgattgattttgttcatcttcaaattccaataattagaattcctacaggatgtgtgtgtgagtgtgtatctggtttattttctttagcataaataaatatttgagatttagccaaatatttgtgtgtatcatttatttttcctcatatttctgagttgcctatgtatttgtcagagtttgcttattcattagtctgttagtgaatattcagattgctttcagaattagcttttacaaataaaggacttaggtgcattctcaaacaggtttttgtgtaaatatatgctttcatttt

SEQ ID NO: 196967 - DNA, 518 bp, Homo sapiens
actattgtgcttattcaaacttctcttctcttcttcagaggcaaacctgtataatttctttggtttgtttgtttgttttaagacgtagtcttactctgttacccaggctagagtgcagtggtacaatgtgagstcactgcaacctccgcctcccgggttcaagcgattctccggcttcagcatcccaaataactcggattaaacccttataatttctatcatgattgattttgttcatcttcaaattccaataattagaattcctacaggatgtgtgtgtgagtgtgtatctggtttattttctttagcataaataaatatttgagatttagccaaatatttgtgtgtatcatttatttttcctcatatttctgagttgcctatgtatttgtcagagtttgcttattcattagtctgttagtgaatattcagattgctttcagaattagcttttacaaataaaggacttaggtgcattctcaaacaggtttttgtgtaaatatatgctttcatttttg

SEQ ID NO: 196968 - DNA, 493 bp, Homo sapiens
gtaacttctggataatactaggcatttgttcaagaactttgaggcaaaacaagatgacagtactcctggtgaaattcacctcaaaccacatatggcttcataggttcaaggccagttcaaatttatacagtgtcaaagtgagagccagttggtgaatgattataccatgactgttaaggagtaattcttatcctatatccttatcatacactccttatcaaggatagggctaggtgcttcaatagattttgtttcattaaaaaaaatagatttttaaatatattccttatcgaactagactatgagcaggcactgtggctcacacttgtaatctcaccagtttggggggccaaggtgggaggatcgcttgagcccagaagtttgagaccagcctgggcaacatagtgagaccccatctctgcaaaaaaaaatttwaaaaaattagctgcttgtgttggtgcatgcctgtaatcccagctacttatgaggcgga

SEQ ID NO: 196969 - DNA, 296 bp, Homo sapiens
gcttttcaaacccaaaatgtcttctcctgatctttactgtgctattccttcagcctggaatatctttctccaaccccaccactatctttcaaaaytgtattccaacaagaggaaaggggactttggggcacttcatttttcagcccttttctgaggatgaggggcaccgtactgtctaggcttcgtgtactgtggcaggtaacacagacatagccttgtctcttctttcttgctgaaagaacttgaatgtagttcaaggcagagtgttgggccctaggatgtaagtaataattgtc

SEQ ID NO: 196970 - DNA, 549 bp, Homo sapiens
tatgagtaaagatgattaccctccataatgtgagtaggcctcattccaccacaggtgaaaaccttaataggaaaaaggctgwctgtgcccaaggaagagggaattctacagaagagtccctttggactcaagctattatcttaactcttcactggactctagcttgctggactacactgcagcttttgctatacttgctatactccacaatcatgtgagccaattctttaaaataagtacttccctctccagtaggtaaacagacagagacacacacacacacacacacacacacacacacacacacacacgctattggttctgtttttcttaagaaccccagttaatgtactcttgcaccaaaaccagtactattttcttcaaggacactattaaatgaatcaaaacatatctcaaaccaactatcactaaaataggtatatgcttttccctaaaagactgggtcttttaaaaatctaactgtaagtattatttattaaacataatacatgacagaacacattagcataccactaatatatataaata

SEQ ID NO: 196971 - DNA, 371 bp, Homo sapiens
tggtattttttagatgagattaacatttaagtcagtagactatgagtaaagatgattaccctccataatgtgagtaggcctcattccaccacaggtgaaaaccttaataggaaaaaggctgactgtgcccaaggaagagggaattctacagaagagtccctttggactcaagctattatcttaactcttcactggactctagcttgctggactacactgcagcttttgctatacttgctatactccacaatcatgtgagccaattcyttaaaataagtacttccctctccagtaggtaaacagacagagacacacacacacacacacacacacacacacacacacacacacgctattggttctgtttttct

SEQ ID NO: 196972 - DNA, 598 bp, Homo sapiens
ctttaattctgattttaattatacctttaattctgtatttcggagagggggggttattaacttttgaaattattgtgtgggtattggtgtgagcatgagtatgaagaggatatgaatatgattcttggttctttacagatgacctgttcattatgtgtgttgtttattttaggttgtttgtctctctatcaacgtttatagaagctttttttgaacccatattcttacattttatccatctcaaaaaygaagttctttaattttaggatttttttttttttagttctttctttgatttcctctactccttttcgtctgtgtattaactcctcttatttagatattggacctttcatggattagacctctaatgttcacctgttttcccctcccccaagttttctattcctttatcactatattttatcttctaaaaaatttcttcatctttatctctaaacttcctttctctttgtctttttcatttctccaatcaaatttttaatttccagtgatcatttctgttacctgagagttcctgcatgtatgtacattgcttttctttcttattgtcttattcttgcttcatgggagcatt

SEQ ID NO: 196973 - DNA, 494 bp, Homo sapiens
gaattcttgtgacagaattggctttgagttatccttggggcatagtcacttagtcatggtgaccatttgtttctcaccatatgaacagtctgatcatttccattatctcatttagttcacaaaataatcctgcttgtaattattcgtatatttcagacaaggacagcgaggtttkgagagatcaattttatctggtgaacactaatgtttgaatataaaaatctcattttaatatggtggaagaccatgaaatcttagcattcgagggaccttaacttttatttacccttctctcctttctaattcccttctgctccattctagagaggtgaccattcaacacatgcttaggatgaatctgctagattcttagagagaggcttaatagctcacagaatcatttatagtttaaaagagttctagaaacagggcactcacaaacatgatggtacatatctacttaccgaagctcttctgccttttccattttgtgg

SEQ ID NO: 196974 - DNA, 469 bp, Homo sapiens
gaattcttgtgacagaattggctttgagttatccttggggcatagtcacttagtcatggtgaccatttgtttctcaccatatgaacagtctgatcatttccattatctcatttagttcacaaaataatcctgcttgtaattattcgtatatttcagacaaggacagcgaggttttgagagatcaattttatctggtgaacactaatgtttgaatataaaaatctcattttaatatggtggaagaccatgaaatcttagcattcgagggaccttaacttttatttacccttctctcctttctaattcccttctgctccattctagagaggtgaccattcaacacatgcttaggatgaatcygctagattcttagagagaggcttaatagctcacagaatcatttatagtttaaaagagttctagaaacagggcactcacaaacatgatggtacatatctacttaccgaag

SEQ ID NO: 196975 - DNA, 499 bp, Homo sapiens
ccatttcttaaaaaaaaaagaaatccaattctatttcttttctgaagcaattaatggttctcagttgggaggaagaacgttgagaagaaaaaaaaagagacccgtggaagaggatgacagtgggtaaaaattacacagaaaagttcagttctcctctacccaagtctgaagaagaggtaggtcttcaaggtttaaaacattcagcctgtgtttcccatcctggtgagaaacgctgtgcaggtgcggacatttccaacaagtcagaaagattcccttttccagatttacactgaccaaacaccctgcccagggagggccaaggacctcattcctcacccacccctggctgagcctgcatcaagggcagtgtctgacacacgcacccaggcctacagccttcagcagtccctgaaacctgacatgtytaagacagacatcaccccaacaaacccaaccccttgtttctcctatctcttttcttggtctatccagtctcaaa

SEQ ID NO: 196976 - DNA, 592 bp, Homo sapiens
  misc_feature (1)...(592): n = A,T,C or G
ttttataggctagaaagttgtggctcaaagaaaaaactcattcacagatagccagtggaagagtcaaaatttaattcaaagataaacagaatttccagattacataatatcagtccctctactctgtaaatctaccctactttaagagatawtactgcagggtacaagtcactatgggatctgaaggtaactgcatcactatttcataaaatattgatatggaaaagagtggtcataagcatgttttgatcctacgcccatgtctcctactgcaattattgtcaagcattacctgaacaccgaaagcttttattttacatatatttatataacgaaacactagcttgtttcttcaaatccatgtatatgaactataatggcaatttaaccctacttattaagtaaaaaaacccaaacataaattatatggtgtcccattgagtccctatatgaatatctcctttgattaaaacaccaccattttcatcagaagacataatttaaaagaagatttaagggaaaaatttgaatttaacatttcccctccagtcgtttctataaactgctgacagaannnnnnnnnnnnnnnnnn

SEQ ID NO: 196977 - DNA, 478 bp, Homo sapiens
tgattggatgtgggtggagagggagtgagtagaatcaaatatgtcagattttcaagttgaagactaagaaaatgttagttttcagaaatagtagagatgggaggaggagctaattgttggagaaagatgatgtgtttgattttagacatgtcagttgagatgatgtgggaataatagccaaggactgacatcctcaagatagagttgtcrtttttagggagaagtcagagagattcagactttgtcacctggacaccaaatttctgcaccctgtctgggactcgtgtatgtcctttattttaaccaagattcagaggggtgatcagatgaggatggggtggaaacatgggtggcttaaacagattgggtgttattagagaactgccttaaaaaacaaaacaaacaaacaaaaacagtgaaatacttataatggtttaaccagtcttcgtttttcctcatcttaaatattaaattcaac

SEQ ID NO: 196978 - DNA, 561 bp, Homo sapiens
  misc_feature (1)...(561): n = A,T,C or G
gagataaataattagaatagcagacacattaatatctcaaaaaattgtcctaaaaaaataatttgacaaggattatagaattaagaacttcagtctattctatttttcaatatgatacaacttgtttgtaattttatacaataaaaataaatgttttagttttaattaacacaatttattattttgattcctataatagaaagtatncttttttttttttttttttttttttacaaaataaggatttaaatatattttgagtaaagactcaaattggagaaagagtttaaaaataaaattttgtatcaggacaaataaaaataaraaattttgattctcctttttgaaattaaaaaaaaaacttattccccctcctttttttttaggacatttactttaaaaaagttgtaattgtaggtgcttctttctctgtttgaagtgtatataaaaatgcttttgaaaactatagagggtttttgtcagctttatggcccgaaaatatattctcaaggacccgggagnnnnnnnnnnnnnnnnnnnnnnnnnnnnnnnnnnnnnnnn

SEQ ID NO: 196979 - DNA, 561 bp, Homo sapiens
  misc_feature (1)...(561): n = A,T,C or G
gagataaataattagaatagcagacacattaatatctcaaaaaattgtcctaaaaaaataatttgacaaggattatagaattaagaacttcagtctattctatttttcaatatgatacaacttgtttgtaattttatacaataaaaataaatgttttagttttaattaacacaatttattattttgattcctataatagaaagtatncttttttttttttttttttttttttacaaaataaggatttaaatatattttgagtaaagactcaaattggagaaagagtttaaaaataaaattttgtatcaggacaaataaaaataaaarattttgattctcctttttgaaattaaaaaaaaaacttattccccctcctttttttttaggacatttactttaaaaaagttgtaattgtaggtgcttctttctctgtttgaagtgtatataaaaatgcttttgaaaactatagagggtttttgtcagctttatggcccgaaaatatattctcaaggacccgggagnnnnnnnnnnnnnnnnnnnnnnnnnnnnnnnnnnnnnnnn

SEQ ID NO: 196980 - DNA, 561 bp, Homo sapiens
  misc_feature (1)...(561): n = A,T,C or G
gagataaataattagaatagcagacacattaatatctcaaaaaattgtcctaaaaaaataatttgacaaggattatagaattaagaacttcagtctattctatttttcaatatgatacaacttgtttgtaattttatacaataaaaataaatgttttagttttaattaacacaatttattattttgattcctataatagaaagtatncttttttttttttttttttttttttacaaaataaggatttaaatatattttgagtaaagactcaaattggagaaagagtttaaaaataaaattttgtatcaggacaaataaaaataaaaaattttgattctcctttttgaaattaaaaaaaaaacttattccccctccttttttyttaggacatttactttaaaaaagttgtaattgtaggtgcttctttctctgtttgaagtgtatataaaaatgcttttgaaaactatagagggtttttgtcagctttatggcccgaaaatatattctcaaggacccgggagnnnnnnnnnnnnnnnnnnnnnnnnnnnnnnnnnnnnnnnn

SEQ ID NO: 196981 - DNA, 561 bp, Homo sapiens
  misc_feature (1)...(561): n = A,T,C or G
gagataaataattagaatagcagacacattaatatctcaaaaaattgtcctaaaaaaataatttgacaaggattatagaattaagaacttcagtctattctatttttcaatatgatacaayttgtttgtaattttatacaataaaaataaatgttttagttttaattaacacaatttattattttgattcctataatagaaagtatncttttttttttttttttttttttttacaaaataaggatttaaatatattttgagtaaagactcaaattggagaaagagtttaaaaataaaattttgtatcaggacaaataaaaataaaaaattttgattctcctttttgaaattaaaaaaaaaacttattccccctcctttttttttaggacatttactttaaaaaagttgtaattgtaggtgcttctttctctgtttgaagtgtatataaaaatgcttttgaaaactatagagggtttttgtcagctttatggcccgaaaatatattctcaaggacccgggagnnnnnnnnnnnnnnnnnnnnnnnnnnnnnnnnnnnnnnnn

SEQ ID NO: 196982 - DNA, 576 bp, Homo sapiens
cttataatttgacgttaaattgatttaactaaagaagcattcttatatttaaactaaaacaaagaatactgaacaaataataacagaataattgcttttagaactcaaaattctctgtaggcatattttgcaggattcgaatgatataaaatgaaattattcttaccaaggtgatatccaggatctctgcccttgttcaggaatagtttcagtayatacatacatgggttattgttagcaggaatgcatttctctctttgccttatctcattggtcaaatatatgatttaacattcattacagctgtgtaaagagggattaaattctcaatgcttaattactttagctagtttccatctgttagttgatttcaggccttttctccaacattagactacaaagaaattctgcaagcaatccttttgcatgacagacattttttgctaacaattcgacagatttaacattcaccttcaaattcatggaatgggaaccctggctgctatggtttgaccaagcatgtctctcataagctattgtgttagaaacttagtctccaaactcatatgttaatgg

SEQ ID NO: 196983 - DNA, 478 bp, Homo sapiens
ttgtaactattgggagaagataggggctgtaaaagaatccaaagcattcctcatttgtcagacctgataatttagggcatttttaatccggaggcaaagtgtaaccacaaaagggccctgtgagaatgagtgagagatttgggcagaaatgtcccaggggcagcccagtccttctctgggagaatttgaatccagggtcaagcactttgggaactccatggtgatactcctgggaagagccacccacaaaagttaaaarggaagaagtaaatagtccttgaagttattaaggagttaagacatcttaaaggtttttggtgctttcaaaatactacagttttagaagtgattaaaaaatggtccatattctaagtatcctctattataatgagcaaataaaaaagcattagaaacccagttatgaatctgtttatttaatatccttgacttgcacagtgtcctctaagatcataaatct

SEQ ID NO: 196984 - DNA, 577 bp, Homo sapiens
gcaaactagttcatattagcaggaattattttattttttcgagacagagtttcactctcgttggccaggctggagtgcaatggcgtgatctcggctcaccgcaacctctgcttcccgggttcaagcgattctcctgcctcagcctcccaagtagctgggattacaggcatacaccaccacacccagctaatttttttgtatttttgttagagacagggtttctccatgttggtcaggctggtctcgaactcccgacctcaggtgatccgcccacctcggcctcccaaagtgatgattttatttttatttttaattgtattaatctgcatctagataatgactttgtgaagggtgtgtgttgtgtgcaaaacttaargtattggttgagagttaaatacattatttttataatatgttgggtatagtctagttactaatgattttttttaagtacttttataaaaagttcatttttaaaattgtttgtttttaaaagccaatatacgttgcagaattaggaacagtatttatatttatttacacaagacattgtgccatagcatcctagtaaaacacc

SEQ ID NO: 196985 - DNA, 391 bp, Homo sapiens
cacagttttacaaatcttagttttaaataaattatttcagtgtrctgttagtcctctacagtcattttggtttaaaaagtgactatttatttatggtagcatatcaataatttattaatgttaaaaaatactgtgtatgacattacaaaccagaacagttcctgggggagaggattctaattgattggcagttctgagagggcaagaagaatggaactttatacttcaaaaggaggttttggttttaccaggtactgcttatgtaaatcgtttatttttatttcatcaaagcctggcaagtatatgcattccaatttaccattggcaaagctttatttatttttaaggttggatgttgaattaattttgtgggaaaatgagatttgtaagt

SEQ ID NO: 196986 - DNA, 391 bp, Homo sapiens
cacagttttacaaatcttagttttaaataaattatttcagtgtgctgttagtcctctacagtcattttggtttaaaaagtgactatttatttatggtagcatatcaataatttattaatgttaaaaaatactgtgtatgacattacaaaccagaacagttcctgggggagaggattctaattgattggcagttctgagagggcaagaagaatggaactttatacttcaaaaggaggttttggttttaccaggtactgcttatgtraatcgtttatttttatttcatcaaagcctggcaagtatatgcattccaatttaccattggcaaagctttatttatttttaaggttggatgttgaattaattttgtgggaaaatgagatttgtaagt

SEQ ID NO: 196987 - DNA, 547 bp, Homo sapiens
cttatataattttagaacacagacaacccaagcccacttttccctcgctggttccctaaggatgcaacatcaccctacgggtatgaaagagtgaatatacaaagagcatccagaccatacataaaaatagaccttttaattcataatctgcagcaaccaactcaggaaactaaccccttatccacagtgacagggcaggaagccacctgctaaacacaggtcagactattagtgacaatccagaaagccaaaaagtaatcccttaaaaatcagcccaaaatgatgaggacatgattaataactgacagcttccctaattttgttcccacttccagcttaggaccaaccaaagaaagccagatgtgccctcctaaccatcacatagcatgtcccgcttttagttaaccgtgtccagcttcccccatgccaatagcttctgctcaaggcatacctgaagccgtcccttttcttccactacaaagtgttctcscttctctgcctgactttgagtctctgccaaaacacaatgacagtggctgacttcctt

SEQ ID NO: 196988 - DNA, 551 bp, Homo sapiens
atgccagcctttttatgaactcttgaacaatctgttatcctaaagtctagagtgcatgtctgaccrtgcctactgtttcctttcttcactgttacggattccaacatgacttgatttctcacaagtttagtataacctttactctaacagtaagctctttctcgttcgttagaattaaaaacagaatagcaacattccttgttgcttccccttcacactaaaagatgaaattttcaataaagaatgccagagttctactttccacagaatgtcctaagagttgaaaagcttcctcactgttacttcttgcctctgggccactttatattctggaataagatccttcctctataacttctacgtggtcggaaagtctgttttacataatcacaatatgatcacttgtttctgctccctttcttcagcacctgggtgctatctaccttaagatcatggctttgtataaactttatacattttttcaaaaacaaggttactatattctattagagctgtttcctttgaaagaaatctatcttttggtgtgttat

SEQ ID NO: 196989 - DNA, 551 bp, Homo sapiens
atgccagcctttttatgaactcttgaacaatctgttatcctaaagtctagagtgcatgtctgaccatgcctactgtttcctttcttcactgttacggattccaacrtgacttgatttctcacaagtttagtataacctttactctaacagtaagctctttctcgttcgttagaattaaaaacagaatagcaacattccttgttgcttccccttcacactaaaagatgaaattttcaataaagaatgccagagttctactttccacagaatgtcctaagagttgaaaagcttcctcactgttacttcttgcctctgggccactttatattctggaataagatccttcctctataacttctacgtggtcggaaagtctgttttacataatcacaatatgatcacttgtttctgctccctttcttcagcacctgggtgctatctaccttaagatcatggctttgtataaactttatacattttttcaaaaacaaggttactatattctattagagctgtttcctttgaaagaaatctatcttttggtgtgttat

SEQ ID NO: 196990 - DNA, 551 bp, Homo sapiens
atgccagcctttttatgaactcttgaacaatctgttatcctaaagtctagagtgcatgtctgaccatgcctactgtttcctttcttcactgttacggattccaacatgacttgatttctcacaagtttagtataacctttactctaacagtaagctctttctcgttcgttagaattaaaaacagaatagcaacattccttgttgcttccccttcacactaaaagatgaaattttcaataaagaatgccagagttctactttccacagaatgtcctaagagttgaaaagcttcctcactgttacttcttgcctctgggccactttatattctggaataagatccttcctctataacttctacgtggtcggaaagtctgttttacataatcacaatatgatcacttgtttctgctccctttcttcagcacctgrgtgctatctaccttaagatcatggctttgtataaactttatacattttttcaaaaacaaggttactatattctattagagctgtttcctttgaaagaaatctatcttttggtgtgttat

SEQ ID NO: 196991 - DNA, 567 bp, Homo sapiens
ttcttgcctgcaccccagcaagaagataggcaagaataattcactgtttactattctgaccttgcctgaaccgctattgcagggctcttagcaccatgaatagtgtcagattactactcaagcatgctagaaggamaatttttattttgatataattcaacctaataattatttttaccttctttctaatctactaacatgacaaaaacttaattgtacagaatcatcatctcacttccaccacttggggttgtgtctaagtttctaggacatcaatagtgccaatagcgggttggatggcattatggtctgtctcttcttccctgtgtgttggccacaccagcgcctggtgccatgtctattgcccacctggtcctctgtcatcagtccacatgagtggcagcacagatgtcccctggaacccgtcaggtatggcactctctgtggccaccttttgctactgttgggcacttgggatttattccgctgcttgcacagactcttcagaaaattctgtgaggcttccaggaaacatgatgccaacatttcttctctgaggtcttgtta

SEQ ID NO: 196992 - DNA, 616 bp, Homo sapiens
gtatgttgggatgagtcacagatctgtggtaatgaaagtgcttgaagattaatgaggctgactacagtaaaagttagccaggagctcaatgtctaagtcatctccttcattattgcttaagtaataccagagcaaagatgagaagaggaaaatcatttaggtaaatgtgactgatgagacagtagctgtcacattaggtcatgttagttagtgtgctgttctaaggactggaaaagtacaagagtagtgaacagtttgcatattcattttattagaccgtattagtttactatttcctgaacattagcaggcgttagctttggctctgtagaacccaatggacactgtggtgccatttggacargattcaattatttattaaatttcacaaatttctctcctgacaatattaacagcagtggtgtaaaatcaaggtgcacagaaagaaagaaaactaagatgcaactcttattcaacctggctttctcctccattgactattccatcatccttttctccttactgtggttttatggactctgctgttctttccgcccattgcctctaaacccattcattgcagtctagttcttaatgctttattgttctgctattg

SEQ ID NO: 196993 - DNA, 616 bp, Homo sapiens
gtatgttgggatgagtcacagatctgtggtaatgaaagtgcttgaagattaatgaggctgactacagtaaaagttagccaggagctcaatgtctaagtcatctccttcattattgcttaagtaataccagagcaaagatgagaagaggaaaatcatttaggtaaatgtgactgatgagacagtagctgtcacattaggtcatgttagttagtgtgctgttctaaggactggaaaagtacaagagtagtgaacagtttgcatattcattttattagaccgtattagtttactatttcctgaacattagcaggcgttagctttggctctgtagaacccaatggacactgtggtgccatttggacaagattcaattatttattaaatttcacaaatttctcycctgacaatattaacagcagtggtgtaaaatcaaggtgcacagaaagaaagaaaactaagatgcaactcttattcaacctggctttctcctccattgactattccatcatccttttctccttactgtggttttatggactctgctgttctttccgcccattgcctctaaacccattcattgcagtctagttcttaatgctttattgttctgctattg

SEQ ID NO: 196994 - DNA, 616 bp, Homo sapiens
gtatgttgggatgagtcacagatctgtggtaatgaaagtgcttgaagattaatgaggctgactacagtaaaagttagccaggagctcaatgtctaagtcatctccttcattattgcttaagtaataccagagcaaagatgagaagaggaaaatcatttaggtaaatgtgactgatgagacagtagctgtcacattaggtcatgttagttagtgtgctgttctaaggactggaaaagtacaagagtagtgaacagtttgcatattcattttattagaccgtattagtttactatttcctgaacattagcaggcgttagctttggctctgtagaacccaatggacactgtggtgccatttggacaagattcaattatttattaaatttcacaaatttctctcctgacaatattaacagcagtggtgtaaaatcaaggtgcacagaaagaaagaaaactaagatgmaactcttattcaacctggctttctcctccattgactattccatcatccttttctccttactgtggttttatggactctgctgttctttccgcccattgcctctaaacccattcattgcagtctagttcttaatgctttattgttctgctattg

SEQ ID NO: 196995 - DNA, 616 bp, Homo sapiens
gtatgttgggatgagtcacagatctgtggtaatgaaagtgcttgaagattaatgaggctgactacagtaaaagttagccaggagctcaatgtctaagtcatctccttcattattgcttaagtaataccagagcaaagatgagaagaggaaaatcatttaggtaaatgtgactgatgagacagtagctgtcacattaggtcatgttagttagtgtgctgttctaaggactggaaaagtacaagagtagtgaacagtttgcatattcattttattagaccgtattagtttactatttcctgaacattagcaggcgttagctttggctctgtagaacccaatggacactgtggtgccatttggacaagattcaattatttattaaatttcacaaatttctctcctgacaatattaacagcagtggtgtaaaatcaaggtgcacagaaagaaagaaaactaagatgcaastcttattcaacctggctttctcctccattgactattccatcatccttttctccttactgtggttttatggactctgctgttctttccgcccattgcctctaaacccattcattgcagtctagttcttaatgctttattgttctgctattg

SEQ ID NO: 196996 - DNA, 518 bp, Homo sapiens
acttaaaacaaatatatgctaatatgtcatacatagatatgtatatgtatgtgtgtgtgacatatattacataaacacaaaacaaaataawactataggtgtggcttatagtaatgattcttgaactttggttaaaaaaaaaccctttttaaaaatctgatgaatgagatggaccttctgtgcagaaacacttttatttacacaaactttcacacacaggggattcacaaaatcatcgatgctgagaaaagaaataataagtatatgcatatgcatattatcacatattcagtgttcccagtggaagatataatcactagattaaacaccaagataaatgctgaaaatgtcttctccttttatttttctgttaattgcctctattcccagttgtatgacatggagtgttagtggtgaggtaggaagtagaagagggaattgtaaatctgttacactgtggagagagactttgattatataaaattttcaaaaagctgaatatgagacttatttcctat

SEQ ID NO: 196997 - DNA, 518 bp, Homo sapiens
acttaaaacaaatatatgctaatatgtcatacatagatatgtatatgtatgtgtgtgtgacatatattacataaacacaaaacaaaataatactataggtgtggcttatagtaatgattcttgaactttggttaaaaaaaaaccctttttaaaaatctgatgartgagatggaccttctgtgcagaaacacttttatttacacaaactttcacacacaggggattcacaaaatcatcgatgctgagaaaagaaataataagtatatgcatatgcatattatcacatattcagtgttcccagtggaagatataatcactagattaaacaccaagataaatgctgaaaatgtcttctccttttatttttctgttaattgcctctattcccagttgtatgacatggagtgttagtggtgaggtaggaagtagaagagggaattgtaaatctgttacactgtggagagagactttgattatataaaattttcaaaaagctgaatatgagacttatttcctat

SEQ ID NO: 196998 - DNA, 550 bp, Homo sapiens
aaattcctcaccacacactcagagttctaaaccattccctatggaagctgtatgatggctgcaatagaaaaataaattatctaacagctacrcattgctactcagtttaattcacatttaatcttttttgattttgaagtttttctggtagtcaaggcacacactactgtattaaacgaaattgaatgatgttttacagtgacatgctacacatgggacatagaatacattaggattgaggggaggagctatactttaacttaaagccataacaaagtcatttctatttctttcaagttcctctctcatctttcacaatagtgattcatatccttgatctgtagcaccagagtttctttccattgatccctaaaaatttctaaaatcacattaatttcaattactattatttagaaaactaaatgtataacattgtaacaggtgctactttgcaatattaaaccaacagatgtgacagacgccaatgttttcaaaccaatggtttccttgtgttttgtttcaagtgtaatgataaatgctgacaaatgct

SEQ ID NO: 196999 - DNA, 517 bp, Homo sapiens
agttactcaatatttctgttgttgtgccaaagatgtcaatcacttttcagactaaactccattccaagtcaaataatctccaccctctactaaaaagaaagccctataaaggccagggaacccttacttcccatcacccagagtcaagttgagtgtaccagaaatagacttctcacacaagggctggctgtcagtagagtatgcytgaaaaacaagatgggacctggtagagaatgattagcaaaaccaaatacattttttctttcaataattcaaattaaagagaaaaaatagacgagaagttagcatgatagcaagaagagcctatgatatagacgggaactagagaagttgtcatgtggaagctgaagtgatgaggaagtagaaaccatgaaaaccagatgcaggctgtggatagaggctgagaatttgagccatctcattagagtgtagctgaggcccatgacagtggagcagttgaatgtagagccatggtgtgcttttcctaggaccttgt

SEQ ID NO: 197000 - DNA, 517 bp, Homo sapiens
agttactcaatatttctgttgttgtgccaaagatgtcaatcacttttcagactaaactccattccaagtcaaataatctccaccctctactaaaaagaaagccctataaaggccagggaacccttacttcccatcacccagagtcaagttgagtgtaccagaaatagacttctcacacaagggctggctgtcagtagagtatgcctgaaaaacaagatgggacytggtagagaatgattagcaaaaccaaatacattttttctttcaataattcaaattaaagagaaaaaatagacgagaagttagcatgatagcaagaagagcctatgatatagacgggaactagagaagttgtcatgtggaagctgaagtgatgaggaagtagaaaccatgaaaaccagatgcaggctgtggatagaggctgagaatttgagccatctcattagagtgtagctgaggcccatgacagtggagcagttgaatgtagagccatggtgtgcttttcctaggaccttgt

SEQ ID NO: 197001 - DNA, 605 bp, Homo sapiens
  misc_feature (1)...(605): n = A,T,C or G
actgcacactccaggtgtcaaaagattcagttcttggtaagagccctcttcttggcttacagatggcagctttctcactatatcttcaaatagtggagaaagagagagctctggtctctcctcttcttataaggacactaatcccatcatgggggccccaccctcatgaccccatctaaacctaattaccccccaaagaaaggccccatctccaaatacctttactttgggggtgtgggggtggnnaggggtannnncttcaacacatraattttgggggacacaaacattctgtccataaccccaagcctttcctgctttctcacatttcccaatattttcttaaagataatccaagagactgggtcaggagttagtcactgggaaaagtacagtgccatcagatgtaggacagatgtcccctcactgtggtcagtgggagggggagtacctctcagttgctggcttcaagtcccaaccccaccacggacctcaaagcaggtcagcaattggtcatagagatagggtcacccatcttcctttctcagccctctggggttcctgttgataggataccaggtttgtggggagatgggggattcatg

SEQ ID NO: 197002 - DNA, 593 bp, Homo sapiens
tttaaatatagctctgtcactttataatatgctttactatctggtaagactagtcttgattctaccaactgttaattttcttcaaaaatatttttctagtaattcttgcttatttacttctagaggttatcatttatttcagaatcatctttttagttctcttccccaaacatccaagcaaacaaaaacaaataaaattttttaaaaatcatactcttgttggtatttgggaggcagtactacataaaatctatatactaacataaggggagtttgakatatttttgatgttgaatcttcataggcaagtgttctattggtgcttagttgtgttttcagtttttttccctcgtaggttttctgtgtttcttggcttgatcttatgttatctttcctgcttctgtcgctattctaaatgtatctttttcttcctctatgtcttctaactgcttgttgtttatatatatatttcagtatgttaattttataaccagccaacttaataaacgttcttattgtttgtaacttttttagttgattatcttgacttctccaagtaagcaatcatgtcaccttaaaatgatgaaaatttt

SEQ ID NO: 197003 - DNA, 593 bp, Homo sapiens
tttaaatatagctctgtcactttataatatgctttactatctggtaagactagtcttgattctaccaactgttaattttcttcaaaaatatttttctagtaattcttgcttatttacttctagaggttatcatttatttcagaatcatctttttagttctcttccccaaacatccaagcaaacaaaaacaaataaaattttttaaaaatcatactcttgttggtatttgggaggcagtactacataaaatctatatactaacataaggggagtttgatatatttttgatgttgaatcttcataggcaagtgttctattggtgcttagttgtgttttcagtttttttccctcgtaggttttctgtgtttcttggcttgatcttatgttatctttcctgcttctgtcgctattctaaatgtatctttttcttcctctatgtcttctaactgcttgttgtttatatatatatttcagtatgttaattttataaccagccawcttaataaacgttcttattgtttgtaacttttttagttgattatcttgacttctccaagtaagcaatcatgtcaccttaaaatgatgaaaatttt

SEQ ID NO: 197004 - DNA, 405 bp, Homo sapiens
gggctgtgtctgcggtgttccccactggttccccggcacatagcacagtgcctgacacagagcagacatgcaatctctgtggaagaaaggaataaagaaatgatggaagggctccctcttattctctcaatctctctgtctctctctcccygcctttttctaaaaaaaaaaaaagaaggaatggaaggaaggatgaacatgttgagctttttaataaataatacctttggtttttcacctgaccaaacaaatttgcccaccctgtgggaagtggcactgatttttctggtcaggaaaggaatatgaggtatgcctgggggatggatatagtcataagggcctccaccaggaggacggcacctttccatcacaaacaccatcccagcccctccttcgggcagatcc

SEQ ID NO: 197005 - DNA, 405 bp, Homo sapiens
gggctgtgtctgcggtgttccccactggttccccggcacatagcacagtgcctgacacagagcagacatgcaatctctgtggaagaaaggaataaagaaatgatggaagggctccctcttattctctcaatctctctgtctctctctccccgcctttttctaaaaaaaaaaaaagaaggaatggaaggaaggatgaacatgttgagctttttaataaataatacctttggtttttcacctgaccaaacaaatttgyccaccctgtgggaagtggcactgatttttctggtcaggaaaggaatatgaggtatgcctgggggatggatatagtcataagggcctccaccaggaggacggcacctttccatcacaaacaccatcccagcccctccttcgggcagatcc

SEQ ID NO: 197006 - DNA, 405 bp, Homo sapiens
gggctgtgtctgcggtgttccccactggttccccggcacatagcacagtgcctgacacagagcagacatgcaatctctgtggaagaaaggaataaagaaatgatggaagggctccctcttattctctcaatctctctgtctctctctccccgcctttttctaaaaaaaaaaaaagaaggaatggaaggaaggatgaacatgttgagctttttaataaataatacctttggtttttcacctgaccaaacaaatttgcccaccctrtgggaagtggcactgatttttctggtcaggaaaggaatatgaggtatgcctgggggatggatatagtcataagggcctccaccaggaggacggcacctttccatcacaaacaccatcccagcccctccttcgggcagatcc

SEQ ID NO: 197007 - DNA, 587 bp, Homo sapiens
acatttttatatttgaagtttagcgtatacatgatgaaatgtacaaaatgtagttatgctattcagtgagtcttgaacaatgcatagacttatgaaacccaaactcctatcaagatatagagcatcactcctactccagtaactgcccttgtgccccttcctacgtaatccctgatctgtcactccagaggcaatcactctcacttatttttagtatatattaattttacctattttagaatgttatattaaattggttcatagagtacaactcttgtataaggtaacttagcaattaattttgagagttatctatgttgcatgtattagtagtttgttccttttaattgccaaggaatgaacattatatraatacatagcagctgctttaactgtttttctgatgatggaattctgggctctttccagtttagaaattgtcttagttcctttagtgttgctataaagaaacacctgaggcagtgtgatttataaagaaaagaagtttatttggctcacagttcagcaggctgtacaagaagcatggcaccagcatctgctcaagctgcttctactcatggcagaag

SEQ ID NO: 197008 - DNA, 356 bp, Homo sapiens
tggaaccaaccttgtatcccagggataaagcctacttgattgtggtggataagcttgtgatgtgctgctggtttcagtctgccagtattttgttgaggaatttgcattgatgttcatcaaggatattggctcaaagttttctttctttgtcgtgtgtttgccaggttttgatatcagggggatgctgacctcataggatgagttaggaaggagtccctcctcctcaatttttaggaatagttttagtaggaatggtaccagcttttctttatatatctgcaaaattcagctgtgaatctatctagtcctaagcttctttttggttkgtagattatttattattgattcaatttcag

SEQ ID NO: 197009 - DNA, 617 bp, Homo sapiens
ttgaaacatgcacttattcaattttgccttgaaatgaataaagagccatctccttatatatgtacaataagagactgaagctacttgtacttatttctaaaacttaatttcacttgagaaggaaaataaagaatgaatcaactctttcaacaagaacacatctgcttttgtggtacttaytaaatgtataacctaccttttctataaatttgaatatttcactttttgcaacttcctgaaaaatagcaatctgatctatctatgctgactttaatgttgcctcttgacacttgatactttgtcaaaattcagctaatatgtataataaaaatacttttagacctggatagcgataaagggttacaaaactgcctagcataagagttgaaaccacctctcccatcctttcatttggcagatgtggatgatgacagctgagtgcagatatgcctcaaattcttctcaaggcagcacttcaggaggccccaactgatccatcagagttagcctgtgagataagatttactggccatccccgaagctgctaaaactctgctatcaagtgacctgtgaccttgggaaaatatattttttgtacttttatttttcttcaaaga

SEQ ID NO: 197010 - DNA, 617 bp, Homo sapiens
ttgaaacatgcacttattcaattttgccttgaaatgaataaagagccatctccttatatatgtacaataagagactgaagctacttgtacttatttctaaaacttaatttcacttgagaaggaaaataaagaatgaatcaactctttcaacaagaacacatctgcttttgtggtacttactaaatgtataacctaccttttctataaatttgaatatttcactttttgcaacttcctgaaaaatagcaatctgatctatctatgctgactttaatgttgcctcttgacacttgatactttgtcaaaattcagctaatatgtataataaaaatacttttagacctggatagcgataaagggttacaaaactgcctagcataasagttgaaaccacctctcccatcctttcatttggcagatgtggatgatgacagctgagtgcagatatgcctcaaattcttctcaaggcagcacttcaggaggccccaactgatccatcagagttagcctgtgagataagatttactggccatccccgaagctgctaaaactctgctatcaagtgacctgtgaccttgggaaaatatattttttgtacttttatttttcttcaaaga

SEQ ID NO: 197011 - DNA, 435 bp, Homo sapiens
tacacacttttaccacagtagtcatattgattcccctgtaggtcttctctgtgcccatcctacagacattgttgctggatcagccagcatgaagaatttagcatgaaaatgtaaaatctaatagctagcaagactcctagtctccctgggagataaactcagtcacattactgaagtctgctggaaatgtgacactaatgacaagcaggaactttatagctcccattttcctttgctgacattacaaatgtaaaacctctcatttccccagaagttcatctacttgatctatgctgctgagcctacatattytgtatctctttgacagcaggaaagattctggcgagaccagtgggcctgttcaccttgcacaggaataacttattccaggacatagaagccaccctaatctccccaccccttttccatccaaca

SEQ ID NO: 197012 - DNA, 576 bp, Homo sapiens
atacctgttagccatttgtacatcttctttgttttttcttagcctacacatcatgtgtgttcaagataccacccctatagtaggaatgaggatctgcagcaaaatgagcagagagtttagggaaagagcaaaggcagtttatagagtgaggtgacctttagatctcagtctcagacaacctagaggtgttacaaagcaaacagaagcaaatatgagcctccaaatacttttcattccctcttactctctcaatctttttggtgctactatcagagacaacaggcctgttgaggaaatgttaactgttaagcaggcatgaatttctgtgaagggctgattcattttgtcatgggatcttttatccatgaatatgtttatggttcctgcctgcttccattaaaatacttacatgctgtcctctttataggcaaagaggaggaacctgctataattttaattgttgtttttgtttttctcagagttctgatttttttgtttgtttgttttggaaaatgtgttgtggtatttaatactcaygtagctaatatttttaggtatctgagaaatttaaggaga

SEQ ID NO: 197013 - DNA, 485 bp, Homo sapiens
gagtttctggaagtcccaggaaggcctggaacattcattcagctttatatttctgtgagctttctactttctagatacttcataaatgcttattgaattattgggaaaaaagacatttagaatgatatcaacagctagtatcttggacaaaagatattttggaaactttattcatatggagtaaggagatacctatttctctaaaaytgtacaacataatgaaagactatgttttccatagtctgagatttccagagcaattccaagactgagatttccagagcaatctcagcttcttgactgtgtaggcttatgctctataggtgatcaatcaagggtgtcagtggaattaacacaaatttaaatatataaatccatcttttttttttttgcatacccgaaccttatcattgcaatagcaacagcagtaaatcagaacttattaattactattatttgcagttctttagtctgtttttaacaat

SEQ ID NO: 197014 - DNA, 485 bp, Homo sapiens
gagtttctggaagtcccaggaaggcctggaacattcattcagctttatatttctgtgagctttctactttctagatacttcataaatgcttattgaattattgggaaaaaagacatttagaatgatatcaacagctagtatcttggacaaaagatattttggaaactttattcatatggagtaaggagatacctatttctctaaaactgtacaacataatgaaagactatgttttccatagtctgagatttccagagcaattccaagactgagatttccagagcaatctcagcttcttgactgtgtaggcttatgctctataggtgatcaatcaagggtgtcagtggaattaacacaaatttaaatatataaatccatcttttttttttttgcataccygaaccttatcattgcaatagcaacagcagtaaatcagaacttattaattactattatttgcagttctttagtctgtttttaacaat

SEQ ID NO: 197015 - DNA, 485 bp, Homo sapiens
gagtttctggaagtcccaggaaggcctggaacattcattcagctttatatttctgtgagctttctactttctagatacttcataaatgcttattgaattattgggaaaaaagacatttagaatgatatcaacagctagtatcttggacaaaagatattttggaaactttattcatatggagtaaggagatacctatttctctaaaactgtacaacataatgaaagactatgttttccatagtctgagatttccagagcaattccaagactgagatttccagagcaatctcagcttcttgactgtgtaggcttatgctctataggtgatcaatcaagggtgtcagtggaattaacacaaatttaaatatataaatccatcttttttttttttgcatacccgaaccttatcatwgcaatagcaacagcagtaaatcagaacttattaattactattatttgcagttctttagtctgtttttaacaat

SEQ ID NO: 197016 - DNA, 509 bp, Homo sapiens
atatgaaatgttttgatacaggcatgtaatgcataataatcatgtcatggaaaaggtcctaggtctctatgatcagtggttagcaaatcaatccaggttttgtgcccttccctttagggtagcaagttcgcccaagtcccaggtgggtctgaagatcctatctgaaagccagggactggagtcaaaagccttataaatttaccggtattctattctgctgcaactaagctggcactcaaaccaaaatacaaagtcctttcagccctctatagttgttttcatcaactataatctcttttggtcaagtacccaaatctttagtcaatttttcaaattggtttgtttsgtttttattattgaattttgaaagttctgtattgttctgaatgtaagttctctatcagatatgtaatttttaaacatttttttccaaatctgtggcttgccttttcgttctgttaaaagtatatttcaaggagcagatgttcttaactctgatgaaacccagt

SEQ ID NO: 197017 - DNA, 509 bp, Homo sapiens
atatgaaatgttttgatacaggcatgtaatgcataataatcatgtcatggaaaaggtcctaggtctctatgatcagtggttagcaaatcaatccaggttttgtgcccttccctttagggtagcaagttcgcccaagtcccaggtgggtctgaagatcctatctgaaagccagggactggagtcaaaagccttataaatttaccggtattctattctgctgcaactaagctggcactcaaaccaaaatacaaagtcctttcagccctctatagttgttttcatcaactataatctcttttggtcaagtacccaaatctttagtcaatttttcaaattggtttgtttcgtttttattattgaattttgaaagttctrtattgttctgaatgtaagttctctatcagatatgtaatttttaaacatttttttccaaatctgtggcttgccttttcgttctgttaaaagtatatttcaaggagcagatgttcttaactctgatgaaacccagt

SEQ ID NO: 197018 - DNA, 440 bp, Homo sapiens
tgtggagaatgtcattggtatttttatactaattgcattgaatctatagactgctttgggtagtatggacattttaacaatattgattcttccaatccgtaaacatggaatattttttcttttttttttttttttggtgtcctcttcaatttccttcatcagtgtttgtagttgtgattacagagatctttcatttctttgaataagctaattcatacgtayttaattttatgagtggctattgtaaatgggatttttttttcatgttgttcactgttgacatatagaaatgctactgatttttgtatgttgattttgtatacctcaattttactgactctgtttaacagttctaatagttttcttgtggaatttttaggtttttcagaaaacaaggataatttgacttcatttccaacttggatgccatttatgtcttt

SEQ ID NO: 197019 - DNA, 562 bp, Homo sapiens
acattaattctcatagcacgtctaaattttctctatgaagcatgcytggatgcatgatccttaataaactctcttctgttacttttagcactagattgcatacttgttttgttttgttcactatttttgtgcgtttgactttattttttatatacccacagtgcctagcacagtactaggcacatagtaggtgttgttgcataattatgttttgcatagttttaaatatttttgaaataaataaattggtcttcagacataaacttatttaaatagaaaagacaaaggttatagtcctttaagagagtgaatgaactagtccctccatccgattcataattcagttgttaagccaccaagggctcaaatccctttagcttcctgtcacagagatcccagtaatgttttcttaaggatatgcaaattgcatattaaataatatgtggatttaataaatccacgtattattagttctcagattttgtccctattgccagtttcaggactttaggaaaacatcccattcaacattgagtttgggttgaaacaggttgtttaagaa

SEQ ID NO: 197020 - DNA, 587 bp, Homo sapiens
gcatgttgactgtaatggattcaattttaattgacatcattctacctctggcagttataaatggatcagaaaaactgatagtttttcacagattgtactaaatgctgctaggagcagttattgtttttaaaaggctctttttctaccaaaaggactttctagcacaagatatactggcaaaataatagtaggctttagtttaatcaacacaagactgtcagtatataagcagaatcttctatgctattcttacacataaatactcctagctttttaaagcagtgtgatttactgtctcatatacaaataacaagggcatctggagtgaggagtcagttgtccaccatgtaccaactttcactcagttcaccggaaagtgtatgagctttcaaactgctaaatatattctgtgactaacttattgaaaggcagtgctcccttccagaatctcagttccataagcaagtcaaatggggaggaaatgtcctatttaagctatttatatttatattttaaaggcatcaggcatcagtaattaaatatatacatatagttgaaggargtgactagatgcattatattatttg

SEQ ID NO: 197021 - DNA, 564 bp, Homo sapiens
ttttaaaattatgagtttgttgtcatttttttcttcaggcaacactctagtgctttccttgtttttttttttttttttttaaaaagtcccaaattctgcaacagagaataattccctttgcagaaaaaaacagatttgagctgggcgtgatggcttatgcctgtaatcccagcactttgggaggccaagacgggcagatcatgagggtcaggagttcgagaccagcctggccaacaggatgaaaccctgtctytactaaaaatacaaaaattagccaggtgtggtggtgggcacctgtaatcccagctactcgggacactgaggcaggagaatcacttgaacccaggaggtggagattgtagtgagccaacatcgcaccattgcactccagcctgggtgacagagtgagactccatctcaagaaaaaaaaaaaaaaaaaaaaacaggttcgatatataacacatattgtagaatacttgggggtgttgaaagtttcaaggggagtagtggaagtgggatagggaaagagcagtagaatccagagggaaggttgaaaataaattc

SEQ ID NO: 197022 - DNA, 498 bp, Homo sapiens
aaaacaatgaatcttggttatttatcccagacaatgaccccacttcattttagaggcctgtccaggatccaaagtagattcactggaagggtgagtataggagcaaaccccaaccctttcctgtcattttgaggcctctatcctccattttaaaatcaaatcacacacttggcccccttcagccatttaaaaatggttagtgtggctgccaaccttacaagactcaggggacaggcttgccagggagaaattagcaaacccctcagtgccctaaggatactgggaatgwtggctttgttttgaaccagttttctttcatggagagcctagccatcacatggggctggaagaggtgcaggggcaactgagggttcctggccagggccacaccatggtgttacctgaaggttcctggactaaccccagcctccagcagcctgatgggtgtcagcaacaggatctccaagcttcttctatcataaatttcctcctttccta

SEQ ID NO: 197023 - DNA, 607 bp, Homo sapiens
aagaaattgaacttcctcgggtcacactttcctcccatggctttactgcaagtaagaaatacccctacaaaattaggtctgagccctttcaagattctgtatggatggcctttcattacaaataatttcctattaaaccaggaaacctctgaattggttaagcgtgtaacctctctggctcactttccacaggaactaatacaactaccagaagsccaaccccaaggaataggaccaccattatttaacccagaagatttggtatttgtaaaagttctcccttctctctccttccataagcccaggctaggaaaggccctacactgttctcctttcaaccctctcagtgacaaaagttacaggaatcaaggaatcaactcctggatacatcacactcaagtcaaagcctggaaagctgagggagcaaaccctgatagcctaaaaaaagtcctggctatcaatgcaaaaaaaaaaatagagcttaagctgaaaatcataaaagataagtaaatgagtgagggctactcatcctactgagtgccacccccatgttaccagatactgtcaatcatgtttacttttcctcttgagattcaccatcagatat

SEQ ID NO: 197024 - DNA, 607 bp, Homo sapiens
aagaaattgaacttcctcgggtcacactttcctcccatggctttactgcaagtaagaaatacccctacaaaattaggtctgagccctttcaagattctgtatggatggcctttcattacaaataatttcctattaaaccaggaaacctctgaattggttaagcgtgtaacctctctggctcactttccacaggaactaatacaactaccagaagcccaaccccaaggaataggaccaccattatttaacccagaagatttggtatttgtaaaagttctcccttctctctccttccataagcccaggctaggaaaggccctacactgttctcytttcaaccctctcagtgacaaaagttacaggaatcaaggaatcaactcctggatacatcacactcaagtcaaagcctggaaagctgagggagcaaaccctgatagcctaaaaaaagtcctggctatcaatgcaaaaaaaaaaatagagcttaagctgaaaatcataaaagataagtaaatgagtgagggctactcatcctactgagtgccacccccatgttaccagatactgtcaatcatgtttacttttcctcttgagattcaccatcagatat

SEQ ID NO: 197025 - DNA, 631 bp, Homo sapiens
tacttgagatccttcttctctcagcccaagcattcttctattctgctaagtcaaacccagcaaacaaaatgattttatggaaagtctgaagcagtagaaacagggccctgacagcatagatacccctttccccccaaacaggtaggtttattatttttcccctaaaaaattataaagaacatcacagtactgagtgagaagtcatgttatttgtgctctgactctcatcctaattccacactttaacctgcctttgctttgtatagatgttrtgttattcgtggtttcttttacatcaaactacatattctcaattctgtagccattttttctttcatctaacttattcattcttgccatcttagtcattccccttatatcacattccggtgtgacagtattttactagcagaactcttaatgtagactgaccatcagaaaaatgatttctgggtttggaaactacatgtctgtaaaggcagtctaggaccacgttggccacattagcagtcaccgaacactgctggctcattgcaaacttgaagttaactaaactattccacacaacctgttcagaagctgggtctcctcccttttatactttgagagctaagacaaaaatactaaaatt

SEQ ID NO: 197026 - DNA, 631 bp, Homo sapiens
tacttgagatccttcttctctcagcccaagcattcttctattctgctaagtcaaacccagcaaacaaaatgattttatggaaagtctgaagcagtagaaacagggccctgacagcatagatacccctttccccccaaacaggtaggtttattatttttcccctaaaaaattataaagaacatcacagtactgagtgagaagtcatgttatttgtgctctgactctcatcctaattccacactttaacctgcctttgctttgtatagatgttatgttattcgtggtttcttttacatcaarctacatattctcaattctgtagccattttttctttcatctaacttattcattcttgccatcttagtcattccccttatatcacattccggtgtgacagtattttactagcagaactcttaatgtagactgaccatcagaaaaatgatttctgggtttggaaactacatgtctgtaaaggcagtctaggaccacgttggccacattagcagtcaccgaacactgctggctcattgcaaacttgaagttaactaaactattccacacaacctgttcagaagctgggtctcctcccttttatactttgagagctaagacaaaaatactaaaatt

SEQ ID NO: 197027 - DNA, 375 bp, Homo sapiens
ggaacttctctgagcaagagaaagaatccacatggtttactatttcttgggagtttcattaggttgtcagcattcagtcagtagtcccakttaggcatttttaagtactaaaacttttcaagaattgctttttcttattgaaaatatgaactgtataaggaagcaaaagatgattttcaacttttaactcattaaaatcttttcactttctattaatgaaataaacataataaaatggtatgacatttttatggcagtatttccaacttcatggtgtgaaatatgattaacaaaaatctcgacgaagaaaatgcaccaaatttgcaacttaaaaataacatgcaaataataaaacactaaacagaataatcacag

SEQ ID NO: 197028 - DNA, 624 bp, Homo sapiens
tcaccatcttatctaagtagtgtatcttactaaaattcacaactgacaaaaataaattaggatataagttaaatatctgaatattcactttctttttttgagacagagtctcactatgttgtccagggtggagcacagtggtgcattcatggcttactgaagcttcgacctcacaggttcaggcaattctcccacctcagcctcctaagtagctggggctacaggtatgccaccatgcctagctaattttttgtattatttgtagagacaaggtctttccatgttctccaggctggtcttgaactcctgggctcaagtaatcctcttgcctcagctccctaaagcggtaagaatacaggtgtgagccactgcgcccggccaacattcactttcaagtataagtaagcattctatgtgtaaattgggttgaaatttttcttgtgtgctttttatgctgaaatgtactctgtcagtttaagcataaaggtatttgttattgcaaaaatatcattaattcrtaatgaaagtgattaattttgtgtacagaaataatttttaagggcttttacatggttaatcagcacaagactgataattagctaggtaaaattttaaagcatacac

SEQ ID NO: 197029 - DNA, 541 bp, Homo sapiens
gttcatgttctctacttttgtccagtttgttagaaaatgtaacaaccaagcaaattgatggtttttaatttgcactccccctgccgcccctcttctcttactgttaagccttatcaagtkcctcagtttgggtgtcaaataaactcagtcacagttaactttggagcattattaaataatatttccatatgtagggagctcacacagaacctctggtcttggagtctcaccagtttactttattaaaatgtttacttgcactttttgagcaggatagggtttagcccatttgcaaagtgttttgcacttgctttggagtatcatttttattctgatggattaaaagcaatatatatgtatacaaatgtatatatatataagcattatatattataagcataatataatatataatatatattgtttttaatatataatatttagtacatcaattatttttactcctgggcattttgtcattattattgttatcatggactataagtcaacactgtgggagtcagatgtgtaaagaaagaaa

SEQ ID NO: 197030 - DNA, 541 bp, Homo sapiens
gttcatgttctctacttttgtccagtttgttagaaaatgtaacaaccaagcaaattgatggtttttaatttgcactccccctgccgcccctcttctcttactgttaagccttatcaagttcctcagtttgggtgtcaaataaactcagtcacagttaactttggagcattattaaataatatttccatatgtagggagctcacacagaacctctggtcytggagtctcaccagtttactttattaaaatgtttacttgcactttttgagcaggatagggtttagcccatttgcaaagtgttttgcacttgctttggagtatcatttttattctgatggattaaaagcaatatatatgtatacaaatgtatatatatataagcattatatattataagcataatataatatataatatatattgtttttaatatataatatttagtacatcaattatttttactcctgggcattttgtcattattattgttatcatggactataagtcaacactgtgggagtcagatgtgtaaagaaagaaa

SEQ ID NO: 197031 - DNA, 541 bp, Homo sapiens
gttcatgttctctacttttgtccagtttgttagaaaatgtaacaaccaagcaaattgatggtttttaatttgcactccccctgccgcccctcttctcttactgttaagccttatcaagttcctcagtttgggtgtcaaataaactcagtcacagttaactttggagcattattaaataatatttccatatgtagggagctcacacagaacctctggtcttggagtctcaccagtttactttattaaaatgtttacttgcactttttgagcaggatagggtttagcccatttgcaaagtgttttgcasttgctttggagtatcatttttattctgatggattaaaagcaatatatatgtatacaaatgtatatatatataagcattatatattataagcataatataatatataatatatattgtttttaatatataatatttagtacatcaattatttttactcctgggcattttgtcattattattgttatcatggactataagtcaacactgtgggagtcagatgtgtaaagaaagaaa

SEQ ID NO: 197032 - DNA, 327 bp, Homo sapiens
aagcttcgcgcccgcagtccttctgccccggatgcccatgccctggctccccgggccaccaggccccgcggccgggcccctccgtcgtggatgccgcgggactgcgttccccttgccctggacagcacggtgccccggcctccgcccgcagattccgcttccccagcggcgcggagctgtaacccckacccctgcctccccgaagcctccctggggccccttcaggcctccttactccatcttccagacccctggcgaccaccgcccctctcagtggctccagggcctccctcagaggtccccaaagatggacacacaaccccagcg

SEQ ID NO: 197033 - DNA, 393 bp, Homo sapiens
ggtacctccggactcgggcgggtgggagcctggcgggcaccccacgccgtccggtgggcccgcccttggactctcagcgcggccccagccccggccccggcctccctgacccaccctgctctcccactgcaggcctcttcggcacaggaattcggtcctacttcaccttcctccgcttcctgctgctactcaacctgctgagcctgctgctcaccgcaagcttcgtgctgctgcccctggtctggctccgcccccctgacccaggccccaccctgaacttgagtgagtgtgaggcccaccaggggaagtgctccggtgcccacctgcgccatgggggggctggcccagggcccasagcgtggcgacaacgctgggcgtggtcctgccgtgcag

SEQ ID NO: 197034 - DNA, 529 bp, Homo sapiens
agatctgagttgtcttgctggtaagctggggacgggccrcagttcccaggctgggatgagaagcccaaagccctctgtggagccaactctacttgcccccacccctgtcccagcactgaccctcttccctcccctctctgcagttcttcttgacattctcactagaagggtcaccatcactggaggtcctggggtcatctcctgccccaacgcaggctggccccacccccacatgccagctgctcccttctctcctgagcccctgccccccaggactgacccctgcagcccagcccttcccaaacttctgagctcctctgtccgtgggtgcagtggggcccctcggcggggcttcctccctggcctctgtgggatccagcccttctgcctcccagacgcctccccgccccacactctggcttgcaacacttctgttcccgaatgcgctggcctctctttcaccccgagacctctgcacctgcattctgtctggaaaacccccaaccgtcggcacgcatccctggtcacc

SEQ ID NO: 197035 - DNA, 513 bp, Homo sapiens
gccacctgagtagctgggattacaggtgtctgccatcacgcctggctaatttttgtatttttggtagagacagagtttcaccatcgtggccaggctggccttgaactactgaccttgtgatctacctgtctcggcctcccaaagtgctgggattataggtgtgagccaacgcgccctgcctgacttgggttttaaatgaattgataaaatgcctaatacaatgcatgtggaacattttatattccacctactttcatgaagtacytgaggtaatttgcaataaataatagaaagtatttcttctgactctagaaagacaatgtggagctgactgaagatggaaggatgaattaagttgctcgatatctctttctgtcctttggttttttaaatcaaacccagaaaataatttgtagccaactaatattcatatacttagtgactaagctgttaaaagtgtggattttacagaattaaatgttgactttttaatttagtaatagttttttcttt

SEQ ID NO: 197036 - DNA, 471 bp, Homo sapiens
ctatgggaggaaatgaaatttatattttatttattatactttcaaggacccgtaaggagttatcagaattctcagtgactatattttttgtcctaggtaagtgacaaacgatatggtttcaagactttgtatctgcaaaacayatcattccctgaggcaggtgtactcgctaatggcaccactcttaatttccattaggtaatgggaaagaaaagtaaggagtgagctacaactccattgcaaacaaacagtataacatcacagcacaattgctcaaccacataacctagcacactcaaaattagcaaaacaaagcagataaagcagacaaaatagctgtcacaacatctatttgctaaaggtgatacgttttaatctgaaaataattttatttctttacttaaacctctctattcctatttgacatgttattcaaatatattgtcttccatatgatgctttataaattca

SEQ ID NO: 197037 - DNA, 333 bp, Homo sapiens
aaaatcatatttttaaataaatcaaattcaacatgtagcaaaagaataatattaaaagacctatcccaaatatccaaaccagttcaacatttaaaacatcaatctaattgaccagattaatagatcaaatagagaaaaaatgataattatctttaaaactttagataaaaaattcagtttgtctcaaccattcaataacatcctttcaagatttaaagaataaaaaccctggcataataagaacagataaaacttctttaaattcrtatctattaaaatcttacagcaaatattaaaagcattcccataaaagtcagaaagaagattaagata

SEQ ID NO: 197038 - DNA, 560 bp, Homo sapiens
aagcaatgttaactgaaggaaagcatagagaagagcaagcttctcctaaatctaccaaaaaggtgatgagcttatgtttaggtcccacctctaaatttatcaagggctcttggtgggactcgagataaaagaaagagagcccctgaccctcctattcttcctcgaaagtcatgagtgtgagggctcctttgtccttttccagttcaggacattcgctcttgaagtggcctgttcttctgcatttgaagtgcctatcctgtccttcctccctgtcagttctagaattctttgactttgctccatcatattctttagagggcctgggaaaygagggcctaggtcctttagttggggacttgggtcctttaaacaggggtttggaccctctatcatttttggccccctgaaggctttgttaagaagcatatgggtttggagccacctgttggaaggtggatagcatgagttttgcttttttgtttctgcttctctttgtctctcttcacatataacttttgagctttttgagaagttcatttggaggacagttttcccaatcc

SEQ ID NO: 197039 - DNA, 376 bp, Homo sapiens
acagttctgcactgccggacttccaacaagtttcttcttccctagagtggcaggcagtgtacttctgcaacagacataccctctactcataagacttttaagttttttattcccatttgattcaatcttatgagtggtaactgctttatgcagttgctacctttattataccttacaagccttttttttaaagtttaccatattttacctggttaataattcttcatagtaaacttcctctgttcaagttactgatatagtttctgtgtcttttctggagcctgactgattcatggacccactagtttcatgarcattatgaactcagtaggcctactctgaacctcagacatatttctcccatactgtgtgttct

SEQ ID NO: 197040 - DNA, 372 bp, Homo sapiens
aaagggaaacccatcaggctagcaagggacctttcaaagcagaagmaattggagaactattttcagcatccttaaaaaaaatccaactgagaacatcatatccctcgaaaataagctccgtaagtgaagggaaaataaaatttttttcagagaagcaaacgctaagggaattaattagcattagaccagacttacaaggggtctttgagtgctaaacatggaaacaaaagaatggtacctgctaccataaaaacacccaacgaaaaaaaaaaaaaaaaaaactttaggccaatatgtttgatgaacacaaatgcagaaattttcaacagaaggctagcaaactgaatccagaagcaaatcaaagagctaatt

SEQ ID NO: 197041 - DNA, 372 bp, Homo sapiens
aaagggaaacccatcaggctagcaagggacctttcaaagcagaagaaattggagaactattttcagcatccttaaaaaaaatccaactgagaacatcatatccctcgaaaataagctccgtaagtgaagggaaaataaaatttttttcagagaagcaaacgctaagggaattaattagcattagaccagacttacaaggggtctttgagtgctaaacatggaaacaaaagaatggtacctgctaccataaaaacacmcaacgaaaaaaaaaaaaaaaaaaactttaggccaatatgtttgatgaacacaaatgcagaaattttcaacagaaggctagcaaactgaatccagaagcaaatcaaagagctaatt

SEQ ID NO: 197042 - DNA, 372 bp, Homo sapiens
aaagggaaacccatcaggctagcaagggacctttcaaagcagaagaaattggagaactattttcagcatccttaaaaaaaatccaactgagaacatcatatccctcgaaaataagctccgtaagtgaagggaaaataaaatttttttcagagaagcaaacgctaagggaattaattagcattagaccagacttacaaggggtctttgagtgctaaacatggaaacaaaagaatggtacctgctaccataaaaacacccaacraaaaaaaaaaaaaaaaaaactttaggccaatatgtttgatgaacacaaatgcagaaattttcaacagaaggctagcaaactgaatccagaagcaaatcaaagagctaatt

SEQ ID NO: 197043 - DNA, 547 bp, Homo sapiens
gaaagttagactgtagctttagcatgaactcactatcacttctcagggtgtctacgagagaagtattcgcaacaacagttcaacactatgacctcatagctatcaatttagtttgcatatagttgcccctggtggctcatatctgtgttacaaataggaataattcactattctttacttcttgaaaagctcatattgaagtacagcatttggcatgtgagtaaaaataacacaatctgctaaatgtcataataaaacaaatggttttgtaagaagtgctcaggtagcacccagggagaaaggtgtgtctctgcttcaaaggsccatcccactcgtcaaagcatgggcaactggagccaaagaaaggaagaaaaagcataatattagtttactatattagtatagttttaaaaatacctgttggatctgaaaagaaaattgagaggtcaatggaaagaggcagagcaatataacagaagaccttagcatttagagcaaaatctgaattgtatctgaggtcttggctctgttacttactggatatgtg

SEQ ID NO: 197044 - DNA, 438 bp, Homo sapiens
aaaactggatcaatcagttaagacttatagagtccctgctgtgtgctgttctagatgagacaggtacatattctgcccttctttgtgtaactttaatcaagagacacaatttstcaaatttcattttctccttctgcaacatgaaaattgtcagatttgatttaaaaaggattctaatatttcaaaagctgtgttccttttctaactctcacattagccagcacagagaaggcacacagagatactcctaacatgccaggtgccttaggtgggctgaaccctagacaccaaagagtaagtggcctcaggtaaatgtatttcctctctcaactacttttccttgtaatattggaataatagtagctccctcaaaggactggtgaaaattaaatgaataatgtaaaacacctgttttatcgtaatgtgctttgtgctctt

SEQ ID NO: 197045 - DNA, 492 bp, Homo sapiens
tcagtttgatcccctgcgaaatacacataatacctagaatcaggattgctgcagtaattatacaagataatgcaacaaatatgggaatggaaataggtgcaggaaaaatataaacytaaattctaaatgtggagtttcctagtttctccttttagttttaccgtacagatggaaataggtcaatgtaattccttacagctaaagttaactgagattaactaaaactactcagaagctaaagcacttggataacctgaagattaagagacacaaaagtttgatgaactcttagaaacagaaaaggaaaagaactaaataacaacttatgccaggaaactggttttactctttcatgcaaggtttgacatcttgtctgtctgtccatcattgcagttatgccctgaggaggaaggacatggacaggtacagaatgaggctatcatagcaaggcagaacagtatctcaacttaacactatgtatttgtaagccat

SEQ ID NO: 197046 - DNA, 492 bp, Homo sapiens
tcagtttgatcccctgcgaaatacacataatacctagaatcaggattgctgcagtaattatacaagataatgcaacaaatatgggaatggaaataggtgcaggaaaaatataaacttaaattctaaatgtggagtttcctagtttctccttttagttttaccgtacagatggaaataggtcaatgtaattccttacagctaaagttaactgagattaactaaaactactcagaagctaaagcacttggataacctgaagattaagagmcacaaaagtttgatgaactcttagaaacagaaaaggaaaagaactaaataacaacttatgccaggaaactggttttactctttcatgcaaggtttgacatcttgtctgtctgtccatcattgcagttatgccctgaggaggaaggacatggacaggtacagaatgaggctatcatagcaaggcagaacagtatctcaacttaacactatgtatttgtaagccat

SEQ ID NO: 197047 - DNA, 551 bp, Homo sapiens
gatcaccccccaactctctacgcttctcaccaagtgtaatttgaccgaggtttgtgaccagaatacagactttattttctatgctaaaatacagcaaccaacattcaatctccattgatcctctaatagtaatcataataatagtgatagtaataaataaccatgatggagctctatgtatcagttgctttcctaagctatacatgtatgatacatatcacctatgagatatgtgatatataatatatatatatacacttttgaagttaatactgttatatctatttkgtagacaagcaaactgaagggccaaagtttgagtaatttgataaaaatttgagtaatttaaatccccacttctaagtctaaaatcctccctgacaatttccaagaattcctagatgctgtacaatctcagagccacttcaggtactgagctcctgctttcttatttgatgtatctgatacctacatttgggatcttatatagactcaataaacagactcaatctttccttcctttgttagaacaaattaagaaatcaaacttg

SEQ ID NO: 197048 - DNA, 620 bp, Homo sapiens
attgtctgaggaaccagatggataattaaggctgaagaacagaataggggtattaagcatcccgtggacacatccccaaactctgtccttggaaaattggagaaggaaaaagtatccttttgttggctatgagtcattcctttggaaacctgaacaaggtaaatttaagtcacaagcctgagttttgagggcagaacctaatagagctcaagatttccaccaaacttaaatctctgctgactgacatcaacaaagatacaagccacctcttcagattgtgtaacaatgagaaaacaagtgggagctgtcaaagaaatggaatttgacttgcttttatggaagaaattaatcaacctgactgtatcttagaaaaagacaagtgaaaggttgagtctacctctaacatcttttaaacttcctccaaaaaatagcaagtgaatatagggcatttcaatttactcataatcaaatgaggctaaatgattgtaaatttattcatatcagtttctataccaatamtttcactttggtttttatgaagaaatgtcctttccccttttcgagataatttcttcgcctatatccttgagcctcaattctgttttctcatcttgccatta

SEQ ID NO: 197049 - DNA, 572 bp, Homo sapiens
tctctttcctgatattcagaactaatatccaactgcccatataggtcatcctggagatacttcagctcaatataggtagaaccaaaattaaacctatctttcctcttaggatctaagttgagtactggcattaccatctgacaaccagtcacctaagccaggtgtcatcctaggtttctctttctcctttgtactccattgatcataaagtttttccaagtcgacttcccaaaaaaggtgttccatcagtcatcgtgattgcttaactgggctgtggaactccttaacggatactcctggcttcattcttggcctgctccaatctatcttccacgccaatccatcttgcctgaggttgttctattgtgttaccaccctaattaaatctttatcatttattaagtttgtaatcatttcttttaaggttaagtctgtagcatgcttactttggccctctatgatatggctgctggttacctctccaatctcattatctgccttttcttcctcggcaatttggagcatgtaaagttttgaggacaygccattttattgcatggcttcatgccttt

SEQ ID NO: 197050 - DNA, 483 bp, Homo sapiens
gacttcctcttctgcttcctgatgctctttgtttcaggagaatgaaggctcagggctactagcagctgctgaactcatgcctcatgctgaaatcaagatcataaaccaagttagacatgttttcagtccctctcttctctcttagagttagagaaagagtaggccaatctaaatgctcagtgccaaatcctaggytttactgaggtttgatcatgtgccaaaacactgctaacaacagaacataccatgacgattaagacatggctctgcctttaaggagcacagagtccgatgtgcaggagaatcatttatgacatagcagaggacagaacagggcagaggcatacacagagtgattagtgtagcacagaaaaaggggtaaggaaagaagggcatggaattttttatagaaaaatcaatgctttgtaggaatcttgcagtacaagtaggatttgcccagaaaaaagggagtggaagcaggag

SEQ ID NO: 197051 - DNA, 601 bp, Homo sapiens
caaatcctaggctttactgaggtttgatcatgtgccaaaacactgctaacaacagaacataccatgacgattaagacatggctctgcctttaaggagcacagagtccgatgtgcaggagaatcatttatgacatagcagaggacagaacagggcagaggsatacacagagtgattagtgtagcacagaaaaaggggtaaggaaagaagggcatggaattttttatagaaaaatcaatgctttgtaggaatcttgcagtacaagtaggatttgcccagaaaaaagggagtggaagcaggagtaacattgaagacatttaacaggctgcacaacctaggcactgactgattaagtctctagtctggagcagggtcttgaaaccccactcccaccatgacaggtgtctgatttgttagactagcagggagggagcaaaaattcctgtagaaaaagacatagttgtgataattcatgtatttgtacaaaagcattttgatattttaacaaccagtgtatccatgctcgtgtgtgttcactaaatatctatcctgatttgggggagaaacttatagacagccaaaaccatctgcacaaaacacagg

SEQ ID NO: 197052 - DNA, 258 bp, Homo sapiens
gcattcttgctagaatcaagactgagaaggagttgtgggaattcctgatttgtagctggttggtgagaagtatataaggcctgagtcttctgactaacacatgaaatggggcagtcttgtgcgaccaaacccttaaatctgtggaatttgacactgactctaggtaatgtcaaatctgaattgaattgagttgaactggattgtattgaattaaattaactttatttgggttgaatggtygaacccccagtaggtgtc

SEQ ID NO: 197053 - DNA, 479 bp, Homo sapiens
taggtctagagtagtttcagatttgattattagaaattgaaatcctgtgcatttattttgtgtaatacaccagttacaatgccttgagacccctgctactaggttcctattagattcttccttaaagtttccctattgggggaacctacccccagtagtcacataggttcttttctatttttccctaagtgtcagctggtctgagaaataaagggacagagtataaaagagagaaattttaaagctgggtgtccgggggagacatcacatgttggcaggttccgtgatgctccctaagccataaaaccagcaagtttttaattagcaattttcaaaaggggagggagtgtacgaatagtgtgtgggtcacagagatcayatgcttcacaaggtaataaaatatcacaaggcaaatggaggcagggcaagatcacaggaccacaggaccggggcaaaattaaaattgctaatgaagtttc

SEQ ID NO: 197054 - DNA, 594 bp, Homo sapiens
ctggctttctttgtaaattttcctactatttactttgagtcctcatgtagctgctctaagcattctttccaggttttattgctgtttttcagcatcaatataacttgaatttaattggttttgaatttagttgaattaaattaagagaacttggtctatagattactgatttttcaaaaaatcattgaagtttgctgtaaaactagaatgtaaccaatttttgtggaaggtccaagtgagattctgaagaatttatcttctctaatatttgcttgtattcatctgcatattttctagaaatcaaaatttttatttgtgtgattcaaatactctgcaagtcacttaatctagtaaatwttaaagaacattatcaacccatgattcaattttcaaattcttcttgaatttcagcagagagattattttttcttgatacagcaattgaaccatttaaaactatactgaatatttttaccccaatataactttttatattaacttgtattttatgtgttttactccaaaacttttggttagaatttccttggtatattgtttttttataccaatactttcactgcaataatggaaacc

SEQ ID NO: 197055 - DNA, 517 bp, Homo sapiens
acagtgacaaataaacaaataccaagttatcctcagttggcattgagagatggagagattgacccctgaatttaggggctgggctggcracttgaagtttcattgttcttctgcagtcctgacattcccagagagcttgggctctctaggtggtcagggggtcctagacaagtcttggcaaacacacatgggcaactgctgtatgtccttggaactatacaaagccctttacttgctcattccattcttcaggacaactgtattagcttggtgttaatatatccccatgtaatatatgaaatctgggttttaggttaatcctttcccaaagccaggaagccaatttgtgatgaagccgcagtaaacagaggttttagggcagcttccaaagcactgctggagcccagcccacaaaggagagatgtaggaatcgtgagacgagtctctcaggcataagagactgagaaaactctcagaattccagacatctatgctagaagctcatctgcaaggtaac

SEQ ID NO: 197056 - DNA, 664 bp, Homo sapiens
agcacccgtggtagatcaaaggttagtcttaggaccacatgagtaaacaagctagttagacaaactccccacattcctttgtttctactctaatttatttaattaaagggacaaggctgccttcagccaagtactatatgtaaaaactcccaggccttcctaaagggtttgtgtatattctctgtagctaaaatttttcccaccatcatgactgaacccccacaatcacttatttgttggagctaaaaattaaaacaattgaacccctggtgatagagagtggaatgatggttagggatggtcaatgggtacacaatataattaggaagaatgaataagatctaatatttgataacacaacagagtgactgcagtcaacaataacttactgtacatttaaaaataactaaaagagtataataggattgcatgtaacacaaagaatggacaaattcttgaggtaatggatactctatttacccagatgtgattattgtgcattgtacrcctgtataaaaatatctcatgtaccccataaatatgtatacctactatacccaccaaaattaaaaataaatatataaaataaaatatatgctgtgagatactgcagtatttattttatgtgactttaacttactctctttgcttatccatgtgttaa

SEQ ID NO: 197057 - DNA, 408 bp, Homo sapiens
caaattaaaatgagctgctatatataaatgattaatttttttacatcagcctttatattttaagaagtgttgaattatagtctaattttagttgcttgaaattgacttcacaaagctttattttgaatttcacaaatatgtcaatattttgtagatactattttataaaatttaatctactattttacttataactatagcttttatgttttcattttatagacagtgattacctagatccctttaacaattcaaaactaatagactccatatcttgtttcrgtatacattatggacagattttaattgaacaaatgacttgcttttctgtctaccatggttttactcagtccgtatttctactaatttaaatgatcatattgacataaagtcaattatcttgaagtg

SEQ ID NO: 197058 - DNA, 557 bp, Homo sapiens
aatgtacacaaattagtagccctgcaatacaacaacagtgaccaagctgagaagcaaatcaagaactcaaccccttttacaatagctgcaaaaaataaaataaaataaaatacttgggaatatacttaactaaggagatcaaagacctctttgaggaaaactacaaaacattgctgaaataaatcatagatgccacaaacaaatggaaacacatcccatgctcatggatgtgttcaatcatgttgtgaaaatgaccagactgctaaaagcaatttacaaattcaatgcaattcccatcaaaataccaccatcattcttcayggaactagaaaaaaaatcctaaaatttatatggaaccaaaaaagaccccacaaagcaagactaacaaaaaaaaatctgaaggcatcacattacatgacttcaaactatactctaaggctatagacaccaaaagagcatgataatgatataaaaacatagatcattttgtgaaaccagtatcaccctaatgtcgaccaatggggcagaatagagaacccagaaataaagccaaatac

SEQ ID NO: 197059 - DNA, 564 bp, Homo sapiens
atctgaacacaatatgaaccattattttaatgctgttgacacagaaatcatgtacttaagacataaaatataatgatgggtcacaaaagagccatgatcctattatatttttacatttgaaaatgatatgcaccatgtacatttctataacaatgccacatttcaaagggcataggaaatatgtcatacaaggaataagacaaaaagaaatgtaatgtttccatggtaggtatgtagagaatgtgaaagagctaattatatagcctatagttagtttggcattaatcaaraagtgtgtttaacgtcatgtttagagattttacataatttgaaaaatgattttgaaggtgtttgaataaggttgtgtggaagccattacttgaaagaagacagaatagattgaggggataagaatgtttagagcttatagttgcttataagtatactaatatagttgaggaaaggagtactaagagagtatacttagaaaaatgtagtataaattaaacataaaattattttattactttatgaagttcattacatttatttcaaaacctaatg

SEQ ID NO: 197060 - DNA, 568 bp, Homo sapiens
cttaggtttctttaagtagcatacaataggaaagtcaactaaagatggctttaacaattccaacatttattttctcaaattataagaagcccaaaggcaagttatattcaggtttgcttaatttagtaagtcagtgctgttaataagggcccagcatttttccatcttctatgccatccacagtgccatgaagctgagtttagtattgtgccttcctttaccgccaagaaataactaggagctttaaggttcctgttctcacacataccatcaagagtatgaaacaggaattgagactatctttttaattttactaggacacccgcagaaggcctccctttaggacaggtggctcagaatcatgtcatatgctcatcctcggagtctctctccatcgcccaggctggagtgcagtggtacgatctcacctcmctgcaacctccgcctctcgggttcaagggattctcctgtctcagcctccagagtagctgagactgcaggtgcatgctacgatgccactgtgcctggctaatttttttttttatttttttagtagagacggggcttt

SEQ ID NO: 197061 - DNA, 491 bp, Homo sapiens
ggtccagggctttgttgttgctgttgttkttggtaggctatttattactgattctatttcagagcttattattggtcttttcagggattcaaattcttcctggtttagtcttgggagggtgtatgtgtctaggaacttatcctttattctatattttctagtttctgttcatagacatgttcttagtagacagtctctgatttcttttgtatttctgtagggactatggcaacattccctttgtcatttctatttgtgtttatttggatcttttttcttctgtattagtctagctagtagtttgtcttactaaatttttttcaaaaaaacaactcctagatttgctgatcttttaaatgttttccttacctcaatctccttcagcttagctttgatttttgttatttcttgccttctgctaggtttggagttagtttgctcttgcttctcgcattgttttacttgtgatgttatgttgtcaatttgaattc

SEQ ID NO: 197062 - DNA, 465 bp, Homo sapiens
gaattcagctgtgagtccatctggtccagggctttgttgttgctgttgttgttggtaggctatttattactgattctatttcagagcttattattggtcttttcagggattcaaattcttcctggtttagtcttgggmgggtgtatgtgtctaggaacttatcctttattctatattttctagtttctgttcatagacatgttcttagtagacagtctctgatttcttttgtatttctgtagggactatggcaacattccctttgtcatttctatttgtgtttatttggatcttttttcttctgtattagtctagctagtagtttgtcttactaaatttttttcaaaaaaacaactcctagatttgctgatcttttaaatgttttccttacctcaatctccttcagcttagctttgatttttgttatttcttgccttctgctaggtttggagttagtttgctctt

SEQ ID NO: 197063 - DNA, 465 bp, Homo sapiens
gaattcagctgtgagtccatctggtccagggctttgttgttgctgttgttgttggtaggctatttattactgattctatttcagagcttattattggtcttttcagggattcaaattcttcctggtttagtcttgggagggtgtatgtgtctaggaacttatcctttattctatattttctagtttctgttcatagacatgttcttagtagacagtctctgatttcttttgtatttctgtagggactatggcaacattccctttgtcatttctatttgtgtttatttggatcttttttcttctgtattagtctagctagtagtttgtcttactaaatttttttcaaaaaaacaactcctagatttgctgatcttttaaatgttttccttacctcaatctccttcagcttagctttgatttttgktatttcttgccttctgctaggtttggagttagtttgctctt

SEQ ID NO: 197064 - DNA, 550 bp, Homo sapiens
aaaaaattacttcatcacacttctggatgctaggtttggttttcaatggagttattagcagaattggtttcttctaaggcctctatctttggcttgtaggtggtcatttttgtgtttatatggcatatttcttctgcatgtgtctacatataaatttcctcttataatgacatcagcaatatttaattagggcacatcctaatgatctaattttaacttaattacccctttaaagactgtatctccaaatatagttatttgagatattagaaggttgagacaacaacatactgatttttggaatgaaataactcagcccataataggtggaatgtctcattaatttaaatatcactttattaaaattttaaggtatgtattactaccttgaatgcctcagtttgctagataactgctctgaatttaagatacattttcaattatgtttgtgggatttttcacctttatttttcctgaggtttyacacattgtcaagcaattttgtacttttacatgatatgatatgtatatctgcccagtggaatatgtt

SEQ ID NO: 197065 - DNA, 370 bp, Homo sapiens
ttgtaatctccaatattggtttctcatggtttaacaacatccaccttagtgtttttgtggtaagagtgagttattgcaagatctggttgtttaaaagtgtgtagcatcttgcttcatctttcccctcctcctgttgtataagatgtgcctgctcactttttgccatacaccatgattgtaattttcctgtagcctccccagccatgcttcctgtacagcctgcagaactgtgatccaattaaacctcttttctttataaattacccagtctcaggaatttcyttatagcagtgcaagaacagatgaatacactgtcataacaaattactacaaatattgtggcataaataatgctcatttatgacctcat

SEQ ID NO: 197066 - DNA, 519 bp, Homo sapiens
aatggggaaaatatctccagggcatttcagaacctgtcctggcagcccctcccatcacaggcccagaggcctagaaggaaaaaatggttttgtgggctgggcccagggccgccttgctgtgtgcaacctggggacttggtgccctgcatccaagctgctgtaggcatggctagaaggggtcaaggtacagcttgggcaatggtgtcagaggggtacaagccccaagccttggcarcttccacgtggtgttgagcctgcagttacacagaagtcaataattgaggtttaggaacctccgtctagattacagaggatgtatgaaaacaccagaatgtccaggcagaagtttgctgcaggggcaggccctcatgaagaacctctgctaggacagtacagaatggaaatgtggggctgaagcccccacacaaaggccccactggggcagtgcctagtggagctgtgagaatagggctcaaagcttgtaggaaaagctgcagacactcagtgctagcccatgaa

SEQ ID NO: 197067 - DNA, 519 bp, Homo sapiens
aatggggaaaatatctccagggcatttcagaacctgtcctggcagcccctcccatcacaggcccagaggcctagaaggaaaaaatggttttgtgggctgggcccagggccgccttgctgtgtgcaacctggggacttggtgccctgcatccaagctgctgtaggcatggctagaaggggtcaaggtacagcttgggcaatggtgtcagaggggtacaagccccaagccttggcagcttccacgtggtgttgagcctgcagttacacagaagtcaataattgaggtttaggaacctcygtctagattacagaggatgtatgaaaacaccagaatgtccaggcagaagtttgctgcaggggcaggccctcatgaagaacctctgctaggacagtacagaatggaaatgtggggctgaagcccccacacaaaggccccactggggcagtgcctagtggagctgtgagaatagggctcaaagcttgtaggaaaagctgcagacactcagtgctagcccatgaa

SEQ ID NO: 197068 - DNA, 519 bp, Homo sapiens
aatggggaaaatatctccagggcatttcagaacctgtcctggcagcccctcccatcacaggcccagaggcctagaaggaaaaaatggttttgtgggctgggcccagggccgccttgctgtgtgcaacctggggacttggtgccctgcatccaagctgctgtaggcatggctagaaggggtcaaggtacagcttgggcaatggtgtcagaggggtacaagccccaagccttggcagcttccacgtggtgttgagcctgcagttacacagaagtcaataattgaggtttaggaacctccgtctrgattacagaggatgtatgaaaacaccagaatgtccaggcagaagtttgctgcaggggcaggccctcatgaagaacctctgctaggacagtacagaatggaaatgtggggctgaagcccccacacaaaggccccactggggcagtgcctagtggagctgtgagaatagggctcaaagcttgtaggaaaagctgcagacactcagtgctagcccatgaa

SEQ ID NO: 197069 - DNA, 354 bp, Homo sapiens
gaggcatgattggttttgaaatataaggatatgagatttgggaggggccaggggcagaatgatactgtttggctctgtccctacccaaatctcatcttgaattgtagctcccacaattcccragtgtcatgggagggacccagtgggaggtaactgaatcaagggaatgggtctttcccatgctgttcttatgatagtgaacaagtctcatgagatctgatggctttataaagagaagttccccttcacaggttctctctttttgcctgccaccatccatgtaagacatgacttgctcctccttgccttctgctgggattgtgaggcctccccagccatgtggaactgtgaatc

SEQ ID NO: 197070 - DNA, 392 bp, Homo sapiens
cagagtcagacacacacacagggagaacagcacaggaacatggaggcagaggccagagctrtgcttccacaagtcaaggaaggccagagattccagcaaagcacgagcagatagattcctcctcacaactttcaggtgctgacacctttttttcagactactagccttcagaattgtgaaataataaatgaccattgtttaagcctctttgttaagcagccctagaaaatcaattcaaaaattataaagtaggtgatatggtttggctttctgtcctcacccaaatctcatcttgaattgtaatcctcatgtgtggagggagggacctagtaggaaacagttggatcatgggggccgtttccccgatgctgttcttgtgatagggagtgagt

SEQ ID NO: 197071 - DNA, 587 bp, Homo sapiens
tgcacagaacacttaaaagtagcctacagtttggcaaaattatcaacataaagtcagttttataataaagtgtcraaaatctcataattgttatatactgtgcactgtagagtacagtatcagttgtttacccttgtgaccatgtagctgactgggagctgtagctcactgctgctgcccagcatcacaaaagaatatcgtaccttacattgtaagcccaggaaaagatcaaaattcaaaattgtatgcatattcgaagtactgaatgtgagtgaccttcacaccatcataaaattaaaaattcctgtcaaaccatcttaagtcagtgaccgtgtgtagtttgattaaatgaaaacacttttcactggggccagtttatcacctaataggtctggatcttcattcaatcaacttagatggcctatgtatccacctttggtttatggtaacatgtgcttattactaaatgcccaaatattctctgtggagctaggaaaagcaactggaggtgtgtgcagctgcaactgacatatatgaatgtatttactctaccaggttgggaggtagggaaagcaaaagcctcatta

SEQ ID NO: 197072 - DNA, 587 bp, Homo sapiens
tgcacagaacacttaaaagtagcctacagtttggcaaaattatcaacataaagtcagttttataataaagtgtcgaaaatctcataattgttatatactgtgcactgtagagtacagtatcagttgtttacccttgtgaccatgtagctgactgggagctgtagctcactgctgctgcccagcatcacaaaagaatatcgtaccttacattgtaagcccaggaaaagatcaaaattcaaaattgtatgcatattcgaagtactgaatgtgagtgaccttcacaccatcataaaattaaaaattcctgtcaaaccatcttaagtcagtgaccgtgtgtagtttgattaaatgaaaacacttttcactggggccagtttatcacctaataggtctggatcttcattcaatcaacttagatggcctatgtatccacctttggtttatggtaacatgtgcttattactaaatgcccaaatattmtctgtggagctaggaaaagcaactggaggtgtgtgcagctgcaactgacatatatgaatgtatttactctaccaggttgggaggtagggaaagcaaaagcctcatta

SEQ ID NO: 197073 - DNA, 525 bp, Homo sapiens
gggacactttctgagttgatggaaatattctacctcttgataggggtgtgggttagacaggtgtacacatttatcaaaactcatagaattattcacttgagatacatacatttcactgtatgtgtattttacctccaaaaagtagtatttgaaattactgacagaagttattttctttgttcctataaaatatacaacagtagggaaaaggaaatagtaaactgctcttgattattttattcagaaggtgatatttcccatctaggagatcatcatcttgaacacactgagaactcacaaattctatttaaatgttttgaatcaagcactttactctcacttctttaggacagtaatatttaccaacccagagtcatttttcttagtgtcactgaaagcttcyatttttaacttttggtttctaagttccagggtccattagggacagattgaagaagcaaaaaaaggaataaagcaccagatgtaggaaagaaaataaaatgcactgacagtctattttttttt

SEQ ID NO: 197074 - DNA, 573 bp, Homo sapiens
ttaatttaaataaaatgtgtataaatattcccattcaagttttcatggtgaactctccattacattaggagtcattaaaaattccatggcttcaaagctgattttgctctaaggtgcagtaaccctgttcaaagtgaagacaaaaccattaagaacaggcaacccaggatgggcttcagaaagcttstttcagtttggctgaacactgcaaggactctgtgcagtatgagaagataatttatgataaaatgtagactaaaaggcatgctgttatgaggtaccagatggactctgtgttaactcttcagagagcagtacacacagcttggcaaagtgaaattgctaaagaagaagtaaaagagctacagaaaattgtgagtgctgtgttcctggaagaaagcgacaaagtgaatccggatgtcttagtaagaaagaaagagatgaataaggagagtcaaaggagcagacctttctggggcagtctgtcaggaaggtaaaaaggccatcatgagaagtgaagttacagaaaaaaacgagacaccatgtttgggaaaataagccccaaacaaccta

SEQ ID NO: 197075 - DNA, 532 bp, Homo sapiens
ccgtcacttaataactgactcagacaagaagttgatgctaagatatttagatgaatggtggttgggaaacaggattttcaccccatctaaattataaccaccagattacctactaattacaaaaggaaagataactacactatagagagatctggtagataccaccttaccaagtgttgttatagagcttccccaatattgaagaaaattgacattatatatcccctactgtgatgccacagaagggacacacarttatctatgtaggactcttgacaaaaaagtttacttggaacttaacatgagaaaataataagtcagatccagataactggccttcaaaaatattaatgtcttagagcaaaaaagaagagcaggaagcgggcaagaagggaaactgtcctagaaagagagtaaagaagaccaaagtgatcagacaactaaatttggtgagtgattatttttattattttctgaattttcttttaaaaatatagcgatgaagaatattattggatatttagaaatggaa

SEQ ID NO: 197076 - DNA, 504 bp, Homo sapiens
atactaaataattcactaaaaatatagagtatatagcatatactatatagtataccatgcagagtaagattatagattatataaattaatctataactaatataatagagcttttaagttaaatatatctagttatatatagcttaatagaatatatatttagttaaatatattccatattatatacaatgagattatgatatattttatatagattatataaagactccatagagatattatattgagatatatatattaaaagatttataaagtagaaatatatagagattttaagtatatatgagggtgtgtgtgtgtgtgtgtgtgtgtgtgtgtgtgtgtgtgtttgtattttaaagaaatatagtgacataccattgggctgttctttctacttcaaaaggagattctctcctactcaccttcatccaaatgaaggagcttaaagagatccactgagatargctgacatatgttcctaggtgtgtaattctctgggag

SEQ ID NO: 197077 - DNA, 339 bp, Homo sapiens
tttctaaatatttttataagtagttgcagacaagatacatatacaactgtagaagactaatttgtaaattaccacatgtacaactatragagactggtctgtaaattacagtatttccatacaagtgctattctgatgctacctataaaataatgtttttagagacaagttagtgacaatctcacacaataaggaaaaaggcaggagacaaaactatataaaaaatataagtcgactttttgtgggagaaaaaatatataggaaatgtatatttgtatatattcctgtgtataaacacatgcaggaaatatatatgtgaaaagagactatatatgtgaa

SEQ ID NO: 197078 - DNA, 339 bp, Homo sapiens
tttctaaatatttttataagtagttgcagacaagatacatatacaactgtagaagactaatttgtaaattaccacatgtacaactatgagagactgrtctgtaaattacagtatttccatacaagtgctattctgatgctacctataaaataatgtttttagagacaagttagtgacaatctcacacaataaggaaaaaggcaggagacaaaactatataaaaaatataagtcgactttttgtgggagaaaaaatatataggaaatgtatatttgtatatattcctgtgtataaacacatgcaggaaatatatatgtgaaaagagactatatatgtgaa

SEQ ID NO: 197079 - DNA, 557 bp, Homo sapiens
agatagttctgcaatctgttttttttaatcgattttgtccgttgtactttttgccatacaaaagttttatgtttttacatgctcaaacattttcaatyatccagctttcagtgtaagctccatcatgcaaagagcttggaagccatcactcccattctttcaagaaaaagcaatacaaattgaaaatcaacaactttttctggatctgttagagaactggagttgcagacaaaccattacccccaaatctggagagacaggcagtgaaaaatatcatagatcagaaacttgaatgtgcattaaaagaagatggaagaggaggagggaggaggagaggggaggagaaggagaggagaaggaggagaaataatagtggaggcaactatatttttattttttcccttttttttttttttttggaggcagggtctcattctgtcgcccaggctagaatccagtggagggatcataggttactgcagccttaaacttctgagctcaagtgatcctcccacctcagcctctgaagtagctggggctacagatgctcatcacca

SEQ ID NO: 197080 - DNA, 557 bp, Homo sapiens
agatagttctgcaatctgttttttttaatcgattttgtccgttgtactttttgccatacaaaagttttatgtttttacatgctcaaacattttcaatcatmcagctttcagtgtaagctccatcatgcaaagagcttggaagccatcactcccattctttcaagaaaaagcaatacaaattgaaaatcaacaactttttctggatctgttagagaactggagttgcagacaaaccattacccccaaatctggagagacaggcagtgaaaaatatcatagatcagaaacttgaatgtgcattaaaagaagatggaagaggaggagggaggaggagaggggaggagaaggagaggagaaggaggagaaataatagtggaggcaactatatttttattttttcccttttttttttttttttggaggcagggtctcattctgtcgcccaggctagaatccagtggagggatcataggttactgcagccttaaacttctgagctcaagtgatcctcccacctcagcctctgaagtagctggggctacagatgctcatcacca

SEQ ID NO: 197081 - DNA, 613 bp, Homo sapiens
ctgccacactgccaaaaatgtatgtggtaaaatatccatttagtcttttccggaagaacctggaaccatttaccagggtgcttgtgctttagggaaataaaaataactgaacatcttagggattgctagacactggctttgagctgacacaaattcttggagacacaaaacagcaaagtgattcaccattcagaaaggggatgtacgaaagccaggcgattcatgtcattttggctcagcccatctacagtgggtccctcaagccaccttgtagtcatgttcctagttctaaaatgaaaagttggaatggatacactcagcaatgtgggcttccacttgccaaggttaatctggctacatcaatattgaatgcccaacctgccaacagtagagacaaactgtgmagccctgatacaatggcattccaaagggtgaccagatagccatctgaaggcaagttgattacattagcaaatttctttcatgaaaagggcagccatttgttcataccaaaatagacatgtatgctggatctgattttgccttccctgcccaacagttttctgctggtaaagagagcttagtttccaatcaaataaggcctctacaggga

SEQ ID NO: 197082 - DNA, 388 bp, Homo sapiens
tataaaatgaaatacaaaaactactcaattcaaraaaggcaggaaaacagggacaaaggagcaacaacaaaaagcaatggtacaaatagaaaataaatattattgtacacttaaactcagctatatcaaattttacactaaatataagtagaccaaacgcaccaattaaaaggtaaaaattattagactgggtcaaaagcaagaccaagatatttgcctgtctacaagaaatgctttttaaattcaaagatgtacatagattaaaagtaaaagggtgaacaagggtattcccacaaaaacgctaatcataagaaatcaagagtggttatattaatgtcagacaaagaaagtcgttttttgtttttgaaatgaagtctcacattgttgc

SEQ ID NO: 197083 - DNA, 645 bp, Homo sapiens
aattccacagcaataaaaggggtaggcaggttagcaagaggacataatttgtaccatttctgaatggaaatttaaacactttttctctcggtaattgttagaaataccaaattttaaaaaatcattaaatacaaagaagaattgaatgacacttttaagtaatgtgacctaattggcattcatagaatatcttttcccaacaatagttcaaatacgtatgtaacattcaccaagataggtcgatcatcttctggaccataaaagcagtttcaataaataaaaagactaaactcacacagaacaggttctctaggtatatataattaagtgaaaaatcaatgtttatatcttcatggaatagtgccaaatactttgaaaattaacaaccttcttctaaatgacccaggggtcaaagaagaattcatagttagaggatataaataaagtggtccttaaagggaaacccttaaatatttccatttaaagtaaaaaaggtctaaaatcaattatctaarctttaatcctaaaaagcttagaaaggagcaaattaagaaaataaaaattaaggaaataataataataatggaaaattaatgaggtttattatttagaaaaatcattaaaactgataaacgtctaattaga

SEQ ID NO: 197084 - DNA, 425 bp, Homo sapiens
ggaggggatttattaggggaactggctcacatagttatggaggctgagaagtcccacaatagaccatctacaagctggagaaccagggaggctggtagactgcttcagttcaagactaccctgtcttagacttggcctcagaaccagggaagctgaatggtgtatctcccagtccaaggcccaagccgggagaacctggggaaccactggtacaagtcttggagtccaaaggctcaatacttgctaaatgaataaatggacggactctactacctaatctcctagagttaggagattaggggaacggggaattctgatgccaagggcagaagaggggtgtcccaactccagagtagagaatttgcctttcctctgcctttttgttctattatrtggtgcctgcgcatattagatgaggacagatc

SEQ ID NO: 197085 - DNA, 492 bp, Homo sapiens
taaaattccagattcaaaattcatatcctaagtcagttccaggtccaggtcagaattccagatctgaggtccaaatccaagtttagaagtccagatctaagatccaaaatacagctctaggttcccagtcttaatctaagacccaggtccagttcaaatccacattataaatccaagttcgttcaacatctgagaccagatcaaagtcagggtctaagtccaggtccaaggctcaggcccacagtcttggttgaggatcaagttttagcaccaagttttaagcaagatcatgttcaggtcctccaggtctgagctcaaasatcccaaggtcaaatgtcaatgcccaagattcaagtcccaaatccaggttcatgaccaagaatgagatctaaaatcaagtcccagctcatggaaaaattcaaatctaagttgagatcttatgttcagtccaagatctaaatccatgtaaatagtctaggccaaggcctaagg

SEQ ID NO: 197086 - DNA, 549 bp, Homo sapiens
ggctggtaaaggtgcaagatggagctcgtgctcactgtggcttccagggcaacagcacttakgcaggtgaggtctggatgctggggaaatctaaaggagtcctggagagggaggccttccctggacctggacgaggtcaaccatggtgctagctgcttctgggagtgttggcctgcaggtgacctgtgagacagaggctccaccagagagccctcaacaggaatgagagagctgtttggggtggaaaggacttggctgtgcagcttcttaggcactgagttgttcagcttcagcttggacccctctccctccgcagcaatggattgctggctgccagctgggatgcacatcccagtaaatggagctgatttacttaaaacaatggtcaaagtactaagcactttggtgcctgcaggccaggagggacccccttaaaggaaggtcccccacctatgttcttcccacggacccacttcaagaatctctaagtcggcaggggaggtggttgaggcccacgtagcctacagagaaactgaggcccagggaggt

SEQ ID NO: 197087 - DNA, 558 bp, Homo sapiens
gtaacgagatgagcatggcccttggagacagtgggagagagataataagagtaaaaaatgaaacaaagtgattattgattgtgatacatgctctaatgggaataaacatggtggtaccgtatacaataagtctactctgcagaggaggacttctataaggagatggcattggagttgagaccagartgatgagacaaagctcatcatgtggagatgggcagaaatacattaccataaaaagtaaaaggaagtgcagagggcccacaatgagaagagcttggtatgttcaaggaaatggagcaggtagcaaaagaggagtccaggagactgggcaggatccagatcacttagtgtattagtccattttcatgctgctgataaagacatacccaagacagggtcatttataaaaaaaacagatttaattgactcacagttccacatggctgggaaggcctcacaatcatggtggaaggcaagcaggaccaagtcacatcttacatggcggcagagaagagagagaacttgtgcagggaaactccttttcataaaaccatc

SEQ ID NO: 197088 - DNA, 474 bp, Homo sapiens
ctccatgtataacaggccatagactcatcatctgtggagccactcctgttgcccagaataagaattcatggctgccaaaagtgcctgtggttagagcagaaagattgcgagttggtgggggaagagagctaatccaaaaattaaagaaaagggtattcaaacatgagataatctctttatcatgcctttcckataagttgattaaatacgggaaatcacagtactgaaaataataatctaaaattctaactactaaactttgagctacgatatatgtgtcactataaagtaatagagaatttatctcagtccaaaattaataacaaagaatttcaaaatcagttttgagctttgccttctatgtatgtgaaagaacaagatccagactccctccagcatcaaacaagtagaaagccagatccactatgtgacctaaatgtgtccagatgctagaaagtatctgataggggcaca

SEQ ID NO: 197089 - DNA, 597 bp, Homo sapiens
tctagaagcttcacactccaacactgttaatgcgcacatcctcaaggaactctaaatgtttccaggttagcttaaatgccatggagtgacacctgccccaggtacactcatatatgcatcctgggtctccctatcaacccctatcctcaaattttcagttcatgtttgctccatgatatcaactctgatatgctgaggtttttttttttttatctgtagttgttcaggtttgctgtttcactctcattactctgggctcagtcctctcctcaggtgtcccacttcagagcttgctatgtaataggagacatgcaaataggaccctcccttttctgatgaaaagcagcccagccctgaccctgcagccgtgggagagaagccccagccctgggattctcaggtgtttctattgggtcaacagcaataaacaaattaccatggaatttgggctgagctgggtytttcttgctgctattttaaaaggtaattcatggagaactaaggatattgagtgtgaggggacatgagtgacagaacagtggctatgtgtggcagtttctgaccaggatgtctctgtgtttgcaggtgtgcagtgtg

SEQ ID NO: 197090 - DNA, 554 bp, Homo sapiens
aatgagggcataagcttctttggtcaaaatggggtgaggatgtggaattgatcctgtgctgtgtaaactgtcacagagtcaccttcttyaccggtagtgttagaagagcctgtaaaagttgtcggaatccaactggagtcccttgtgttcaaaccctgacaaatggagctggggaaggccatttatggaagattctcatgcacatacccctgagaacaagacctagctttataacactccaaaaaaccacaaattgaacaaaggcaaccacaacaataaaagaattacttatatccctaagaacaacagctagctttataacactcagaatagccacaactgtgcacaaaggcaaccacaacaacaaaataattacttatatccctaacaacaagagctagttttataacactcagaaaagccacaaccttgcacaaaggcaaccacaacaataaaagaattatttctgtgaaaatatctgcacagcaactgcctgtccaaccttacactgatgtcaaccttgttattgatgcttctagcctgggatcattctc

SEQ ID NO: 197091 - DNA, 554 bp, Homo sapiens
aatgagggcataagcttctttggtcaaaatggggtgaggatgtggaattgatcctgtgctgtgtaaactgtcacagagtcaccttcttcaccggtagtgttagaagagcctgtaaaagttgtcggaatccaactggagtcccttgtgttcaaaccctgacaaatggagctggggaaggccatttatggaagmttctcatgcacatacccctgagaacaagacctagctttataacactccaaaaaaccacaaattgaacaaaggcaaccacaacaataaaagaattacttatatccctaagaacaacagctagctttataacactcagaatagccacaactgtgcacaaaggcaaccacaacaacaaaataattacttatatccctaacaacaagagctagttttataacactcagaaaagccacaaccttgcacaaaggcaaccacaacaataaaagaattatttctgtgaaaatatctgcacagcaactgcctgtccaaccttacactgatgtcaaccttgttattgatgcttctagcctgggatcattctc

SEQ ID NO: 197092 - DNA, 554 bp, Homo sapiens
aatgagggcataagcttctttggtcaaaatggggtgaggatgtggaattgatcctgtgctgtgtaaactgtcacagagtcaccttcttcaccggtagtgttagaagagcctgtaaaagttgtcggaatccaactggagtcccttgtgttcaaaccctgacaaatggagctggggaaggccatttatggaagattctcatgcacatacccctgagaacaagacctagctttataacactccaaaaaaccacaaattgaacaaaggcaaccacaacaataaaagaattacttatatccctaagaacaacagctagctttataacactcagaatagccacaactgtgcacaaaggcaaccacaacaacaaaataattacttatatccctaacaacaagagctagttttataacactcagaaaagccacaaccttgcacaaagrcaaccacaacaataaaagaattatttctgtgaaaatatctgcacagcaactgcctgtccaaccttacactgatgtcaaccttgttattgatgcttctagcctgggatcattctc

SEQ ID NO: 197093 - DNA, 554 bp, Homo sapiens
aatgagggcataagcttctttggtcaaaatggggtgaggatgtggaattgatcctgtgctgtgtaaactgtcacagagtcaccttcttcaccggtagtgttagaagagcctgtaaaagttgtcggaatccaactggagtcccttgtgttcaaaccctgacaaatggagctggggaaggccatttatggaagattctcatgcacatacccctgagaacaagacctagctttataacactccaaaaaaccacaaattgaacaaaggcaaccacaacaataaaagaattacttatatccctaagaacaacagctagctttataacactcagaatagccacaactgtgcacaaaggcaaccacaacaacaaaataattacttatatccctaacaacaagagctagttttataacactcagaaaagccacaaccttgcacaaaggcaaccacaacaataaaakaattatttctgtgaaaatatctgcacagcaactgcctgtccaaccttacactgatgtcaaccttgttattgatgcttctagcctgggatcattctc

SEQ ID NO: 197094 - DNA, 579 bp, Homo sapiens
aaccatacacttttccagaaaacacaggaacaaaaaggcactcaggagcacggctgccggtgtcagaaggggatggcggtaaagggaaaccaggaaatgtgttcatctgggaggagaccctgcacagcccaccgatgacatcattccgacccgacccctgcctgaggacaaagacccgctaacgtgaccctctgttcagggagagtggagagacacaaaccgtccggccataccactgatagtacaggttttgtgacttcagaccttgcatctttctgggaagcctcagcacatgcgcacacaggattctctcaaatctaaggatgaactgcattccagtaaaactttaagtaaargtgcccttggccaggcgcgttggctcacgcgtgcaatctcagcactttgggaggccgaggcaggtggatcacctgaggtcgggagttcaagaccagcctgatcaacatggagaaaccccgtctctactataaaaaaaaaaaattagccaggcttggtggtgcatccctgtaatcccagctactcggcaggccgaggcaggagaattgcttgaatccggaaggc

SEQ ID NO: 197095 - DNA, 579 bp, Homo sapiens
aaccatacacttttccagaaaacacaggaacaaaaaggcactcaggagcacggctgccggtgtcagaaggggatggcggtaaagggaaaccaggaaatgtgttcatctgggaggagaccctgcacagcccaccgatgacatcattccgacccgacccctgcctgaggacaaagacccgctaacgtgaccctctgttcagggagagtggagagacacaaaccgtccggccataccactgatagtacaggttttgtgacttcagaccttgcatctttctgggaagcctcagcacatgcgcacacaggattctctcaaatctaaggatgaactgcattccagtaaaactttaagtaaaggtgcccttggccaggcgcgttggctcacgcgtgcaatcycagcactttgggaggccgaggcaggtggatcacctgaggtcgggagttcaagaccagcctgatcaacatggagaaaccccgtctctactataaaaaaaaaaaattagccaggcttggtggtgcatccctgtaatcccagctactcggcaggccgaggcaggagaattgcttgaatccggaaggc

SEQ ID NO: 197096 - DNA, 469 bp, Homo sapiens
tctggatgctggagggttgctttctggcttgacaaactcagtttgtttccatagttacaaaacacttgtgctcttcccgacccacaatccatcaggaggggtacgctggctgcctggtaaccacgagatcatttcctgaattcgcagacctctttaacattatccaaacattagaaaggtggttgaccacacctgttttgtgcactgcctgacaatctcattttgatttaagtattttgtaggaagcaaagtaaagactatttgcactataaattacaaatatttatgtctaatcccccaataaatgggaatttcaagggaaaaggcgggaactcgaaagagtgagcgcagytgctgcagtggcccaaggagtttgctcttgcccaggctgactccatgagtccagctccctccttggagaaaggaagctgtcgggggagctgaatgccacggtagtcaagggccaggc

SEQ ID NO: 197097 - DNA, 469 bp, Homo sapiens
tctggatgctggagggttgctttctggcttgacaaactcagtttgtttccatagttacaaaacacttgtgctcttcccgacccacaatccatcaggaggggtacgctggctgcctggtaaccacgagatcatttcctgaattcgcagacctctttaacattatccaaacattagaaaggtggttgaccacacctgttttgtgcactgcctgacaatctcattttgatttaagtattttgtaggaagcaaagtaaagactatttgcactataaattacaaatatttatgtctaatcccccaataaatgggaatttcaagggaaaaggcgggaactcgaaagagtgagcgcagtygctgcagtggcccaaggagtttgctcttgcccaggctgactccatgagtccagctccctccttggagaaaggaagctgtcgggggagctgaatgccacggtagtcaagggccaggc

SEQ ID NO: 197098 - DNA, 560 bp, Homo sapiens
gatctatttcacaagggcattgatctccctcatgagagttctgccctcrtgacctattcacctctcagtagccccccatttcctaatgccatcaccttggtggttaggatttcaacatatgaattttggggaaacacaaacaagtaatgcagacacatatctgcattactcagggaaccatagaccatagcattccatccctggcccaccaaaattcacactcttctcacatgcacaatacattcaccctaatagcctccaaagtcttaactcattccagcatcaactgaaacctctgaagtccagagtctcatttaaacatcatctaatccagatataggtaggactcaaggtacaactcatttacaggcaagttgctctgcagctgtgaacccacgaaagcaaacatgttatgtgcttccaaaacacaacagtgggacaggcacaggatagacattctcatcccaaaagggagaaatagaaaagaagggctaatatgttccaagcaagttcaaaaccttaaggctcagaaacaatcttctttgactcaagcgtctgcc

SEQ ID NO: 197099 - DNA, 560 bp, Homo sapiens
gatctatttcacaagggcattgatctccctcatgagagttctgccctcatgacctattcacctctcagtagccccccatttcctaatgccatcaccttggtggttaggatttcaacatatgaattttggggaaacacaaacaagtaatgcagacacatatctgcattactcagggaaccatagaccatagcattccatccctggcccaccaaaattcacactcttctcacatgcacaatacattcaccctaatagcctccaaagtcttaactcattccagcatcaactgaaamctctgaagtccagagtctcatttaaacatcatctaatccagatataggtaggactcaaggtacaactcatttacaggcaagttgctctgcagctgtgaacccacgaaagcaaacatgttatgtgcttccaaaacacaacagtgggacaggcacaggatagacattctcatcccaaaagggagaaatagaaaagaagggctaatatgttccaagcaagttcaaaaccttaaggctcagaaacaatcttctttgactcaagcgtctgcc

SEQ ID NO: 197100 - DNA, 581 bp, Homo sapiens
ttccagtggaaatggtggaattgctacctgatgacaactcagtgcctcactagcaatctcacgcagctaacacgatccactcctatcacacgatccactcctatcacatacattttcatctggctgcagaaattccatctagttaataaagttttctgatgcgataggaaaaaccagtaacataaccacaaatgtaggccggagcccccaaaccccgatgcttcctgtacccttcagtgcactrtgctcgtccccattactccaacagttatggacttaccgattatgtgccataatacataacatgcgtgtgtctgttggcatgatactgctcagaggaaccctggcctctcaaacaactcaacaggttatatgctacagtctttcaacaagtatttatcatcagcttactgtgttccgggtacaaagagtaagtcaattcctgccctcagttcattgtgtagtgctacatatcgatgaatattgtgatgctctcaaacttggagtttatgatgtgaggaagataagagcagcatgtagaagatccacaactttcattcatcatgcactgacatcctgaa

SEQ ID NO: 197101 - DNA, 589 bp, Homo sapiens
gcttgtgtgcctgttttccagagatgggagctgtaaaytgtgaaagtgtagggctggcagctgccacggtgctgcaccctgcagaagatctgctttcagcaggagaggctgaggcccacgggaggaggcagaaatggtagctggtcccaagctccttagctataaccatttttctgcccttcccatggcttcagtcttcagcgtttccttggattctttgaccaaaaacaaccagtctatctccctgtttctctttgcctctctttccttaaggcagtccaagttggaatattttcacctgcagctgaattaacatggatgccttccttatccttaacaaggtttgtcttgaatggaaaataaatggggatcacatttggagccagtggtccctcgctagcttttcatgtgagccacacttagaagccgtgctagggccgcaggcgtgctggacattcgtgttgttccagtattcaccgctgtgtgctggcaggatcctacctggaggttctggggactgcttccccatcccgcagagtttagcgttgcccgcaggctcataggtgtcaagaaccaggtgagagatagc

SEQ ID NO: 197102 - DNA, 589 bp, Homo sapiens
gcttgtgtgcctgttttccagagatgggagctgtaaactgtgaaagtstagggctggcagctgccacggtgctgcaccctgcagaagatctgctttcagcaggagaggctgaggcccacgggaggaggcagaaatggtagctggtcccaagctccttagctataaccatttttctgcccttcccatggcttcagtcttcagcgtttccttggattctttgaccaaaaacaaccagtctatctccctgtttctctttgcctctctttccttaaggcagtccaagttggaatattttcacctgcagctgaattaacatggatgccttccttatccttaacaaggtttgtcttgaatggaaaataaatggggatcacatttggagccagtggtccctcgctagcttttcatgtgagccacacttagaagccgtgctagggccgcaggcgtgctggacattcgtgttgttccagtattcaccgctgtgtgctggcaggatcctacctggaggttctggggactgcttccccatcccgcagagtttagcgttgcccgcaggctcataggtgtcaagaaccaggtgagagatagc

SEQ ID NO: 197103 - DNA, 589 bp, Homo sapiens
gcttgtgtgcctgttttccagagatgggagctgtaaactgtgaaagtgtagggctggcagctgccacggtgctgcaccctgcagaagatctgctttcagcaggagaggctgaggcccacgggaggaggcagaaatggtagctggtcccaagctccttagctataaccatttttctgcccttcccatggcttcagtcttcagcgtttccttggattctttgaccaaaaacaaccagtctatctccctgtttctctttgcctctctttccttaaggcagtccaagttggaatattttcacctgcagctgaattaacatggatgccttccttatccttaacaaggtttgtcttgaatggaaaataaatggggatcacatttggagccagtggtccctcgctagcttttcatgtgagccacacttagaagcygtgctagggccgcaggcgtgctggacattcgtgttgttccagtattcaccgctgtgtgctggcaggatcctacctggaggttctggggactgcttccccatcccgcagagtttagcgttgcccgcaggctcataggtgtcaagaaccaggtgagagatagc

SEQ ID NO: 197104 - DNA, 594 bp, Homo sapiens
  misc_feature (1)...(594): n = A,T,C or G
agtgagtttaaaacatatcaactaaatcataaataaatcgtactatggttttaaatatggcaaaaatcgtgaacacagtgctcaaatgcctgaagtttgaggaaaatctgtgaggggtgggtgcttcgggcctctggtaggtcttagctagcctggggctcttcctgccctcctgtgggcctctgttttagccagacagcccactgatgactgccacatcctgagcattcctgcctttgggtttgttcttgagaatacccaccctattccacgtttctgatttccactcatcctcatggccccatttgagatgaacatcatctgtaaggcctccccagtgcctggctccaggcctctcttcttcctccaaactttgtcgtgctcaagaaagtgcctattgtgtgtatttggcagtcrtttcttgccacgtgatatctaataacttccatggatctgtcctgtttctgcaactggaagaagatgagcggaacctcttttaggtggggacagtgtcttagtcatctcaatagccccttgaaggcatgatacggtaccttggcnnnnnnnnnnnnnnnnnnnnnnnnnnnnnnnnnn

SEQ ID NO: 197105 - DNA, 594 bp, Homo sapiens
  misc_feature (1)...(594): n = A,T,C or G
agtgagtttaaaacatatcaactaaatcataaataaatcgtactatggttttaaatatggcaaaaatcgtgaacacagtgctcaaatgcctgaagtttgaggaaaatctgtgaggggtgggtgcttcgggcctctggtaggtcttagctagcctggggctcttcctgccctcctgtgggcctctgttttagccagacagcccactgatgactgccacatcctgagcattcctgcctttgggtttgttcttgagaatacccaccctattccacgtttctgatttccactcatcctcatggccccatttgagatgaacatcatctgtaaggcctccccagtgcctggctccaggcctctcttcttcctccaaactttgtcgtgctcaagaaagtgcctattgtgtgtatttggcagtcatttcttgccacgtgatatctaataacttccatggatctgtcctgtttctgcaactggaagaagatgagcrgaacctcttttaggtggggacagtgtcttagtcatctcaatagccccttgaaggcatgatacggtaccttggcnnnnnnnnnnnnnnnnnnnnnnnnnnnnnnnnnn

SEQ ID NO: 197106 - DNA, 494 bp, Homo sapiens
tggagtgcagtggcatgatctcagctcaactcactgcaacctctgcctcccggattcaagcgattctcctgcctcaacctcccaagtagctgggattactggcgcccaccactactccctgctaattttttgtatttttagtggaaatggggtttcaccatgttgaccaggcaggaagttctttatagcagtgtgaaaacagactaatataccgtgtaaaagacatcatgtgatacttggaagggactagggtagggagaggttcctgggacctcaataaacagttatgtagtcagcctctctccatggaggggcaccggcagcyagagacaacagaaaaatcaacaccgtgatcacattctcatttttgccattggctaaacccaactagaagccagagatcatggggtctctccttgttgtgatttatataaggagaaagtaggacggagaaggtgagaacatacctgggaggtgcgtgaacaccaagaccc

SEQ ID NO: 197107 - DNA, 579 bp, Homo sapiens
gtgagagtgggcaaatgacatgaacaggcatttctcaaaagaagatgtacaaatggacaaaaaacgtttttaaaatgttcaacatcacgaatcactagggaaatgctagttagaaccacagtgagatactaccttgccccagccagaatggacaytattgaaaagtcaaaaaacaatagatggcatggatgtggtgaaaatggaacacttatacactgctggtgggaatgtaaattagtacaacctctatggaaaacagtatggaggtttctcaaagaaccattcaatccagaaatcccactacagggtaagtactcaaagggaaaaaaaaatcattatatcaaaaagacactagcatctttatgtttattgcagcacaattcacaattgcaaaaatatggaatcagcctaagtgcccatcaacctgtaagtaaataaaatgtggtataaattccatagaatactactcagctataaaaaaaaggcaaaataatgtcttctgcagtaacttggacggaactagagactattattctgagtgaaataactcaggaatgaaaaaccaaatactgtatgttc

SEQ ID NO: 197108 - DNA, 579 bp, Homo sapiens
gtgagagtgggcaaatgacatgaacaggcatttctcaaaagaagatgtacaaatggacaaaaaacgtttttaaaatgttcaacatcacgaatcactagggaaatgctagttagaaccacagtgagatactaccttgccccagccagaatggacactattgaaaagtcaaaaaacaatagatggcatggatgtggtgaaaatggaacacttatacactgctggtgggaatgtaaattagtacaacctctatggaaaacagtatggaggtttctcaaagaaccattcaatccagaaatcccactacagggtaagtactcaaagggaaaaaaaaatcattatatcaaaaagacactagcatctttatgtttattgcagcacaattcacaattgcaaaaatatggaatcagcctaagtgcccatcaacctgtaagtaaataaaatgtggtataaattccatagaatactactcagctataaaaaaaaggcaaaataatgtcttctgcagtmacttggacggaactagagactattattctgagtgaaataactcaggaatgaaaaaccaaatactgtatgttc

SEQ ID NO: 197109 - DNA, 509 bp, Homo sapiens
accctcaaaagttgcgtgacaaaagcatcaccttttgactgcagaaggcctgtttctttagtgcgtttagataagcctagtatcaggtgtgtaccattaccaaatacttgaggtgttaaggattaccatcttagcgttcatcctaccatttttatattcttaaggacaattccacccttttacacactgtgaccaagatttccaccttgcaagaaggaaagagtcaaaccttcaaagtttttcagtgtttaatttatcccaggctacctaaaatggatsaaaacatgaacaggcctacttgggtgagtggtgaaaactgaacctgccctggactgcctcatttgcagcctgctgtgttcaggttagggggcatctgggcagtgctggctggctggtagggcacacggcaatgtgtcttgccctgtatgtggagatggtctcattgtgcttcagtgcctgaccaccaagcaatactctgagaacttgggaatgagggacaaggggaattc

SEQ ID NO: 197110 - DNA, 563 bp, Homo sapiens
aacaccacattgctgcagtccagtcccctgcccttctcggctccaaattcaagtctccccctggtgtagctggttgatatcatctacatcacaaccagagatgtagctgcaagggagttyggaagtgtcattcttagcttcccagactctagaataatagggactctagaggaccagaggttgaaataaaggctaagggatcccagccatgctatcttccacactgagagagagggagatacggtttggaaatttctccctttcaaatctcatgtcataatttgatttctgctattggaggtggggcctagtgggaagtgtttgggtcatgggggcagatgctacatgtacatcttagtgtcatcctcagagaaatgaatgagttctcactctattagatcacatgagagctggttgtttaacagagcatgacacctccccccgcctcctgtgccctctctcgccatgtgacatgctggctccctttgccttctgccaagagtaaaagcttcccaaggtcctcaccagaggccaagcagatgcctgcagcctgcagaaccatg

SEQ ID NO: 197111 - DNA, 541 bp, Homo sapiens
ttttactttcaaaacttgttaccycttgaaacgtcacttagaggactcatataatgtattctgtgcataaaacttagtactatttattttatttgtacaatgattttctgttagaagcacactggccccaagaacactcacttatgccagggcagctgtaagcaagacggatgatgctgcggccacccacctcctgtgtgcccaccttgttctgggctccacttgccagcacttcctgctattgcttttagctaggtgtccatgaattccttcaaactgatagcaccatctgatgactgtgataccaccgtctgatgattgtgataccaccgtctggtgattgtgaagcattaattctcacaggagaatcatattttcccattttcttgccttcttgattgatttttcttgggattaagagaaatataaattttctgagaaatgctgggaaggaatccctgtgtggaaatactggtagaagaaaatgggccttccataaaatagccctttatcactgcagtgatggctagccccaccttga

SEQ ID NO: 197112 - DNA, 617 bp, Homo sapiens
gcatgcatggctatagggaacttttcacatattttttggttaaaaaatttgtgtacacttattaattaaacaaatatgactctcattggctaagtataataaaattattgctgagccaaattctaactacataatttaagattattattgcaaatagctaagtgaaaaattccattctctatattttagcatagtttctatgtgctatttcaagcactttacatatattattatagtttatcttcaaaacaaccctatagaataggtacgattattattctcatttcatagatgagaaaaaagagtgacaggaatcttgtgaaatctaaacaaattacagtggtaaaaatagagccctaaaaattgttcacataaactttcttggataacatttttaaagtctcaataattcaggtatamatttatttgaatcttctagcactgtaactttttaaatttttatttttttattaattttattattttatttttaattgacaaataactgtatatatttattgggtacaatgtgaaattttgatatgtttacattgtgaaatgattaaaccaagtatgtgaagtgatggctttgttaattaccctgattcaatttccag

SEQ ID NO: 197113 - DNA, 617 bp, Homo sapiens
gcatgcatggctatagggaacttttcacatattttttggttaaaaaatttgtgtacacttattaattaaacaaatatgactctcattggctaagtataataaaattattgctgagccaaattctaactacataatttaagattattattgcaaatagctaagtgaaaaattccattctctatattttagcatagtttctatgtgctatttcaagcactttacatatattattatagtttatcttcaaaacaaccctatagaataggtacgattattattctcatttcatagatgagaaaaaagagtgacaggaatcttgtgaaatctaaacaaattacagtggtaaaaatagagccctaaaaattgttcacataaactttcttggataacatttttaaagtctcaataattcaggtatacatttatttgaatcttctagcactgtaactttttaaatttttatttttttattaattttattattttatttttaattgacaaataactgtatatatttattgggtacaatgtgaarttttgatatgtttacattgtgaaatgattaaaccaagtatgtgaagtgatggctttgttaattaccctgattcaatttccag

SEQ ID NO: 197114 - DNA, 542 bp, Homo sapiens
ctattagtgcactactcatggctctgcaataaaagctcatcatggtgagattgcaagtggtctagaaaactgaaaacctggcacagactggtttcaagactcccattaatgtcacccagggttgcctgatcagaccgcagcagcaagcaactctgtaaactgaaagagtcagcagcagtgaggcaaccctgagagccccactcaacaggctgtaggttccacgagccaatgtgcaacacaagttccttttgtcaggagtcacaaatctatgtgaactgtgttatggggtaaatcgtgccctgccccccgaaattcctatgttgaaagttttaaccgccagtacatcagaatgtgactatatttggagaggatatctttaaagagrgcagtaagtcaaaatgaggtcattaggctcatgatgaggctatctctaatcagcaaaactatcaatcaccaagacatatatagctttattgagccttaacccaatatgactgtgtctttataggaagaggaaactttgactcagacacaacacagag

SEQ ID NO: 197115 - DNA, 630 bp, Homo sapiens
cacaatgtctggcagacagtgaattctcactaaatctttgctattaactatcgttttgaacttcaattggctaatcatacttatcaaaataccttctgggaagtgcaagtctttagtcaatattgcacgtgtgtttaccaagggcctactcagcaatatcgcagtcataaatactcattatgttgctgataaagtctatcttagccatgttctctagaaacagagcccaaggcaaagcagatgtgctaacactttattgggggagtacaatccaggaatgcagkcatgaaagcaaatgtgagggagatagaagggagtgtgttgttctggatacagcttcatgataagttgactgcccttttgcacaagatctctctggtggacgtttatgaaagtatggtccttttagggtaaaggagagaataaaacttatctaccagcactcacactattcaaaatttgccccacaaccattaacacttataggttctatatacacgggtgaccatcagattccctagtatcctgctaacttctcagcagcagggaagccacaggaccagaaaaagaggtgttcattgaggagagtaagttaatgatttaggaacatttctatgaaaaacacaagga

SEQ ID NO: 197116 - DNA, 548 bp, Homo sapiens
aacaagatattattgcagtgaaaaggtcccttacaagcaacctccccctgagtatttcccyttgtaaacaatgctgcctacaatttctacttctagtcccatctttttaaaggcattgaaaacattagttttagggcagctataacagagtggaccagagaacacattaaaccatccattagcacctccatacgaataagtttatctattagctcttgggacctcgagaggcctggagaaaatctagtaagttttggtggatcaggggatttaaaaaaaaaaatgctccctgggttgtcactttagggaactgtaaagtactctgaagctcagggcagtggaggggtgaagaaaaggaatgcaaccctgagcagtagagggcagtgataggaaacccaggctctgacagttgaggcttgccaccaagagagtggagggctgatccctagtaaaggggaaggctctcctccaccccttcccttggtcagccaagcttctacttccagatcaacatagatttttcttctctgttataagtattttatttt

SEQ ID NO: 197117 - DNA, 548 bp, Homo sapiens
aacaagatattattgcagtgaaaaggtcccttacaagcaacctccccctgagtatttccccttgtaaacaatgctgcctacaatttctacttctagtcccatctttttaaaggcattgaaaacattagttttagggcagctataacagagtggaccagagaacacattaaaccatccattarcacctccatacgaataagtttatctattagctcttgggacctcgagaggcctggagaaaatctagtaagttttggtggatcaggggatttaaaaaaaaaaatgctccctgggttgtcactttagggaactgtaaagtactctgaagctcagggcagtggaggggtgaagaaaaggaatgcaaccctgagcagtagagggcagtgataggaaacccaggctctgacagttgaggcttgccaccaagagagtggagggctgatccctagtaaaggggaaggctctcctccaccccttcccttggtcagccaagcttctacttccagatcaacatagatttttcttctctgttataagtattttatttt

SEQ ID NO: 197118 - DNA, 590 bp, Homo sapiens
ttaaacctatacatataacattttagcatatgaggacccatgtgtattttcatctttgtgtaaaaatgattgctttataatttgtttaaaaattggcattcctttagcaaggaaagactacttaccataatcaatatcagcaattacatccaacttttctgactctgtaacaatctacaacttagtacttaccaggttacatttctcttataatgtaacatttgaaagtgatatgaattgaagatgacagttttactcaacatcagaataattcatgacaggagccagcatgccttgattaaatgggcataataagactggggcttaaaacagctgcctctcctgattcttatgtactgtacagtacagcactgtaccattctgyctcagttttactccagcaatcatcattcaattacctcaacagactgatgcaaaatatatatctttattgtgactattattaagatcattgagacagggtctcactctcacagcttattgcactcttgacctctggggctacatatctttattatgattatgattattatcattgagacagagtctcactctcacaacttactgcg

SEQ ID NO: 197119 - DNA, 551 bp, Homo sapiens
ggtctcactctcacagcttattgcactcttgacctctggggctacatatctttattatgattatgatyattatcattgagacagagtctcactctcacaacttactgcgcccttgacctctggggctcaagtggtcctcctacctcagcctccggagtagctgggaccacaagaatgcaccacaatgcctagctaattttttaaaaattttttgtggagacaggacctccctatgttgtccaggctggtctcaaactcttgggctcaagtggtccgcctgcctcagactcctggagtgctgggattacagacatgagccactatgcctggcctgaaaaatatatattttattataaagttcatcatatgaactgttttaattagcaacaaataatgtttaagtctaaataaagaattaagaataataaagtctctataactgtgccatcatttgaatatgtaagtgcagcagaatctcttgtaagagcaggtatgccacagtgcaggataaaaaaagtgacgttcttatgttgccatatgtttacatggac

SEQ ID NO: 197120 - DNA, 548 bp, Homo sapiens
gttctaaagtttaaaatttttaagtttgtacttgttttctatttgtttactagagtatgacagatgctttaaatttagcaattttgacagcatctaataaatgtgagttatagagattaataatattcatgagtactatctgaagttaaacataaactattcctaataatagtaataatagctaacatttactgaatacttactagatgtcagaccctatttcaagtattttaattggattagcctgcctaatcttcacaacaatcctatgacgttggtgatacagataagaaacacagacaaaacagttgcccaagatcatayggctaatatgtacagatgcaggatttcaacccaatgagtaatccacagcttgcaattattaaccaagaatctaaatagggtttattaactaacctatgtgctctattgtgaaataaaactaaatgggaggaaaagaatgctgggcagggaaacagcttttgtttttcaaataatacacgttacaacagacaaattaaatacagaaattgtttgtaatgccacaa

SEQ ID NO: 197121 - DNA, 562 bp, Homo sapiens
ctgtcttccacaatggttgaaccaatttacactcccactaacaagggtgcacagcttttatcattagagaagggttgaagataaactggtgaggggtacatagcatggcctcaggaaaaactgtgtagcaagtgggaattttcgtgggtccctctagtttctctttcatccttcttacacctgagtagccctactcttttcaaaggtgaaagtaggcagatatgagaagttcgggtgttttttcaccaacctgtaagaaagtggcagcagcttgctattctggctttcattgacaggtaacaaagggtggaacatgtggaaaaggatattgaagtttaraagttcaaaagctgattcatggtgacatggaggtggggatacaggagtggcacgtgcaaactagctgaaaggaatcactttctcttttttcacgtctgattcatccgggaggtgtccctggggactccttgttggagacatattccttctctcaggctgaagtatcatctaggtctcccaactatgctccttgagcatctctaactggcctgttccctacgat

SEQ ID NO: 197122 - DNA, 579 bp, Homo sapiens
tgtcttccacaatggttgaaccaatttacactcccactaacaagggtgcacagcttttatcattagagaagggttgaagataaactggtgaggggtacatagcatggcctcaggaaaaactgtgtagcaagtgggaattttcgtgggtccctctagtttctctttcatccttcttacacctgagtagccctactcttttcaaaggtgaaagtaggcagatatgagaagttcgggtgttttttcaccaacctgtaagaaagtggcagcagcttgctattctggctttcattgacaggtaacaaagggtggaacatgtggaaaaggatattgaagtttaaaagttcaraagctgattcatggtgacatggaggtggggatacaggagtggcacgtgcaaactagctgaaaggaatcactttctcttttttcacgtctgattcatccgggaggtgtccctggggactccttgttggagacatattccttctctcaggctgaagtatcatctaggtctcccaactatgctccttgagcatctctaactggcctgttccctacgataagcaagaggtcacaggc

SEQ ID NO: 197123 - DNA, 579 bp, Homo sapiens
tgtcttccacaatggttgaaccaatttacactcccactaacaagggtgcacagcttttatcattagagaagggttgaagataaactggtgaggggtacatagcatggcctcaggaaaaactgtgtagcaagtgggaattttcgtgggtccctctagtttctctttcatccttcttacacctgagtagccctactcttttcaaaggtgaaagtaggcagatatgagaagttcgggtgttttttcaccaacctgtaagaaagtggcagcagcttgctattctggctttcattgacaggtaacaaagggtggaacatgtggaaaaggatattgaagtttaaaagttcaaaagctgattcakggtgacatggaggtggggatacaggagtggcacgtgcaaactagctgaaaggaatcactttctcttttttcacgtctgattcatccgggaggtgtccctggggactccttgttggagacatattccttctctcaggctgaagtatcatctaggtctcccaactatgctccttgagcatctctaactggcctgttccctacgataagcaagaggtcacaggc

SEQ ID NO: 197124 - DNA, 305 bp, Homo sapiens
gttaggaagttaaattgtattagtacattcttgcactgttataaagaaatatctgaggaggggtgacttataaagaaaagagrtttaattggctgcagactgtactagaagcatgatgcatctgcttagcttctggggagacctcaggaaactggtggaaggcgaaggggaagcaggcacatcttacatggcaggagcaggagaaaaagagagagatggggagaggtgctacactcttttaaataaccacatctcacaagagctcacttaataacagcacccagagggatggtgttgaaccattc

SEQ ID NO: 197125 - DNA, 368 bp, Homo sapiens
tctaggaaaaaaataacaaccacacagacaagacaattttaaaccaaggctgcttctgatttaagtcatttcctttctgctagcctgtcaaaattcaactgcatcatatcaagttggtctgaaaagcagattggtgcatgatgtactttatgaactcctttgactttggcagactctagaaaagattaaatgtgttagaaatctgagaggctaggagaatggagaaatggagtttattttcatggaaagtcagttgtgtactttaggttgctaggaatattttccctatgaaaagataatytgactgaggccgaagattaggaaacaaaaaattaaaccactggggatcaggcagagaaatagaattt

SEQ ID NO: 197126 - DNA, 566 bp, Homo sapiens
gtaatttggctcttaacttgagtaagctggagagccttggcagggttctgagtagagagacttactctgacttatattttaacacaactgacttttgagaacagattttagtagggcaaggatagatacagggacaatgtgattattcctgagacaaccagtaccattgattcacaatctgtgttcttgttaattacatccactgttctaaactccatgtagaacagttaaaaacttagtttctttcattaaaaaaaggttatctcattataaaagtagccagatatgttctcagtaatataattggaaaccatgcaaaaaaaaaaaaagagccattcattataccacttccagagagaaccatattttcatttttacatagcatttcaattttttttttactatgcatgcatttccaaattgtcatcccctttcccaataattctttagctatttgattgcagataatcatattttctcccttaagtatttcattctataggtcagggtttcttattctgggatcaaygaatacatttcaaggttctaggaacctgttataaaag

SEQ ID NO: 197127 - DNA, 593 bp, Homo sapiens
gagctaaatctaaggtaagtatagagcagcggttctcaaattagagtgtgcattgcaatcacctgcagggcttcttaaaacacacgtggcagggtctacaatgaagaaaagctgcagcattcatcagatatattaaatacacacattttaagtgttgggtacaagtttcaagaagcagttatttgttaaggaaggaggcaaatctccagcaggtaagtaaacaaagaaaagcgaattctctctgaattttattaatcacagactatggtgtaaagcaagatgcacagtaaactgcagaagctgtggattttggttagaagacttaatcttgaattcagacattgacatttactagctgtgtaatcctggaaaagctattgctgtctgggaactcagcttccttttttgaaacatgaggatattatagatcttacaagtcrttgtgaaattaagatatgttacttgcctggcatacagaagccacttttctatggcataacttttcccagggttcaataccgttaccttttcttgttttctcctcttttatgtatgaattagtgtttttgaaaatattctgaatttgaattttg

SEQ ID NO: 197128 - DNA, 605 bp, Homo sapiens
ctctgaatatttaaaggttaacttataatttaaatattaaaatttgaactattttaaaggaaaatatttccaaaatattttcctgtgatctttaacataggatatcaagcataattaaagtttttttttcttactcaggataaccattgtgagtgttcttaaaattataatcataacaataattctacaagacaggcattttaaaaattatccattgaaaaacccaggatggtgcagtggctcacacctgtaatcccagcactttgggaggccaaggaggtcaggagttcaagaccagcctggccaatatggtgaaaccctgtctttactaagaatacaaaaattagctgggcacagtggcacgcgcctgtaattcwagcttcttgagaggctgagacagaagaatctcttgaaccctggaggcagaggttgcagtgagccgagatcgcggcactgcattccagcctgggtgacagagtgagacttggtctcaaaaaaataagaaaaaagaaaataaaagaaagaaaaaacccacagaacactaaattgaagttctaagagtaccaagtagtaataaataataaaaatattaccagttcataatt

SEQ ID NO: 197129 - DNA, 347 bp, Homo sapiens
tgttgcccaggctggagtgcaatggtatgatctcagctcactgcaacctctgcctcccgggttcaagcaattctcctacctcagtctccatctcctgacctcgtgatctgcccacctcggcctcccaaagtgctgggattacaggygtgagccaccgcgcccggccgaacccatggttttaatactacactgcgctctttcacagtgctattctgtacgagtagatgaagagaaccgtagtccacttctgacagcagaacacttgtattgttttcttttttagtgtctttctctttggaaagattcaaacctacagaaaattttcaagatgaggatgatgagcactg

SEQ ID NO: 197130 - DNA, 620 bp, Homo sapiens
aggtccttattattttacactggccattaaggcactcttcatcacatcagcctrttttaactctctgcagagcagttaccgctcgttgacattttcatgtcgctttgtgttgcttttgtctgtgagttttctgagaacaggaaccttgtgcagcttatttacagctgtagcatcagacccaaaacagggcctggaagataatagtagtaaatattttttcaagaaattagtgaatttaatatatgtgaagatgacatcctgttatctgacttaaaatcttctagatcttttctaacttttgaagtaataagaaccatcttctaaaatataattaacagtaagtgaacacatggtaaccatcaaatcacactcatccaccagtcttttcccacattgcccaaattgactcttgtgcccctcagtcctttgtgtatgtttatgccactcctgtgactgaaatcctctcctgaagtgttccctagcccccacacattatctatgaaagtattatcatccatgaaaattactacctatctttaagaccaaatcctaagactacctttcttttgacacactctctgtaaaatgagtatgcgcaaccacaatatttgtctccttaa

SEQ ID NO: 197131 - DNA, 620 bp, Homo sapiens
aggtccttattattttacactggccattaaggcactcttcatcacatcagcctgttttaactctctgcagagcagttaccgctcgttgacattttcatgtcgctttgtgttgcttttgtctgtgagttttctgagaacaggaaccttgtgcagcttatttacagctgtagcatcagacccaaaacagggcctggaagataatagtagtaaatattttttcaagaaattagtgaatttaatatatgtgaagatgacatcctgttatctgacttaaaatcttctagatcttttctaacttttgaagtaataagaaccatcttctaaaatataattaacagtaagtgaacacatggtaaccatcaaatcacactcatccaccagtcttttcccacattgcccaaattgactcttgtgcccctcagtcctttgtgtatgtttatgccactcctgtgactgaaatcctctcctgaagtgttccctagcccccacacattatctatgaaagyattatcatccatgaaaattactacctatctttaagaccaaatcctaagactacctttcttttgacacactctctgtaaaatgagtatgcgcaaccacaatatttgtctccttaa

SEQ ID NO: 197132 - DNA, 563 bp, Homo sapiens
gttagttcagaaaagcaaagttaaatgctagaattttttttccttaaaaaaaaggcactatgttttgaaataataaaaaaaaatctgatttcttaagttgagcaaaagtgcatgctgaagtggttacactctactcatgaaagcaatctagtcagagtggcattaagatgtaggtttataagctaaccatagcttaatacttaggtaaaatacctacaccaaccattgagcttgtttatttatttttcaactccttttatactatgcttaactatccttaaattgtacttagtaatatcttatagaccaggagagcctctccagttctaggtgttgcaattcrtttgtaatatacctatttagacattcatggttagtaatttctctaacagaaatgatggcttgaaacaattctcttgcaggtgtgatcctgagcacattcacacaagcaaatcactcctacatccagcagctaggaaagagagccaatttctggtaaatggatatgatagccaattaaaggaaactaactggtagcaagcttagatgacaaaacaagagcc

SEQ ID NO: 197133 - DNA, 607 bp, Homo sapiens
actacaatgttttccagaattgtttttacttggacttactcagtttagaaatctcccaggtccctgtaaaagcattttcacatcatgaggaataatttgtatgggattacatcagaccattccattatcttctctcgagcactccctcggagatgcatttccccctctttttgacggtgtgttaagagcagatggattttagggttgtaagaatgcagcactgtagtggtaaaaaacaagaaagcagcagtggtaayagctcctttgtggtagtttcctccacagagactcttccagaaaaaacctgaactcatccctgtaatgttcccacttatatgactgtaccatatgatcagtccaaactgactttggtaacttagaattggtttgctcttgcagaccatattttgttggataaagcaaattcatatcaccaaatatacttcccctataactgaataaccaatagattcttgctgtccccaaacagcataaattgtcacatatttatgtatgtttggcctgagatttggttgccctctactaagtgacaacacatttacagaaggaacaataaagatgaaattctatgtatgctgagttttcg

SEQ ID NO: 197134 - DNA, 575 bp, Homo sapiens
tttcctatatccacaggtttttccccttctggcatgtttttctatttttctgaacccagaagttaccactggcagaatttcagtctcagaactttgtcgactattaaagacgtagcattgtggcttttgaataagtcaaaataagtttaaaatacatttaaattgttcatgaaagcagtgtttcgctttgttctcagatattccctaaattcttgaattgtttttttcttgttgaagttcctaaggaaaagcttgtacttgttttgtttctttaggaaatgcctccagaattttatttacctttgagatttcttggtaaaatgaaggrttgttgtggcctctttagtcttagcaaattaaatatcacacagagagcatggtaaggggtcatcaaataacgggtagacacagatgataagcatcatgtcagaggagacacatttttttgccactagaaataagcctttgtttgatgcagagcttcggatcacttcgttggcgtagtaggaaagaatgacattcactagggataaattcgttttatttttctgaaattaatttattaaatgaattca

SEQ ID NO: 197135 - DNA, 565 bp, Homo sapiens
tgaattcacgttcatgagccagttgggaaggcatatcaggaaatcaaaaatgctaccacataaactgtctagtgtttgtttattttgaatttatatagcctcttttctctggagatttgaagatactgtgcagaaaattttaaatctgttaaacaatagacaataagttataaaatgtgaatccctgcctggataggttataatctctgaggcmttttaatatacccagatataagcactggcagttaaaaaggaaaaaaaaaatacttaaaatatgagattctcaccgggctggatatcaagaatgagagatacattgtaaacaccttcattctttcagacttgggtctgttttttcccatttattctgacacgtaacatcaaatagataacttgtcgtaaattgctgaatagtctctcacattttaggggaattgagagtcaaagctactcagggcaatcattgaaaagaaattttccccaggactggtggtcagtcttggagataacttaagaagataaagacccacccagaaacgcaagagttaacattgtagctctttgt

SEQ ID NO: 197136 - DNA, 556 bp, Homo sapiens
ttttaagaaaattccaaataaaaaatacttatgttataaaaatacattatcactgtagatttagaaatcactgctgagctaaaaagaagcaaataaaatcatattcacaaatagccaccgttacatgcatctagactttctaaacttttctttagaaatggttttgtttttaaaaaaataagagttggatcatactctgtgtgtgtgtgtgtgtattttacacctttaacaaaacatgcatatcctggatgttttttttagacagtctcgctctgtcaccaggctggagtgcagtggtgygatcttggctcactgcaatctccgcctcctgggttcaaaggattcttctgcctcagccttcctaatagctaggattacaggtgtgtgccaccacacccagctaatttttgtatttttagtagagacagggtttcatcatgttggccaggatggtctcgatctcctgacctcgtgatctgctgccttggcctcccaaagtgctgggattacaggtgtgagccaccgcacccagctgatatcctggattttatatgta

SEQ ID NO: 197137 - DNA, 556 bp, Homo sapiens
ttttaagaaaattccaaataaaaaatacttatgttataaaaatacattatcactgtagatttagaaatcactgctgagctaaaaagaagcaaataaaatcatattcacaaatagccaccgttacatgcatctagactttctaaacttttctttagaaatggttttgtttttaaaaaaataagagttggatcatactctgtgtgtgtgtgtgtgtattttacacctttaacaaaacatgcatatcctggatgttttttttagacagtctcgctctgtcaccaggctggagtgcagtggtgcgatcttggctcactgcaatctccgcctcctgggttcaaaggattctyctgcctcagccttcctaatagctaggattacaggtgtgtgccaccacacccagctaatttttgtatttttagtagagacagggtttcatcatgttggccaggatggtctcgatctcctgacctcgtgatctgctgccttggcctcccaaagtgctgggattacaggtgtgagccaccgcacccagctgatatcctggattttatatgta

SEQ ID NO: 197138 - DNA, 513 bp, Homo sapiens
catcaagaaatgcatcgtcaactaccaagataccttaattcttgcctttttagtcaggtgtcagcagcttgcataaaatacttgcattttacttctctgttaaagatataaattcccttcttgggtaccaagcagtgtgtagaatttgcataagaaatgtgctcactggtatgaagtttctgctatgcaagatgtgtagtgctagagaactacggtgcaatttactaccaccatttaacaatgtggtattgcacactttaaactgtgttaagagggtagatctcatggtaactgttctgatcaaaaaacaaaagaacacaaaakaatacaaggaaacttttggaggtgatagatatgtttagttcttgattgtggtagtgatatcttgggtataggcatatgtctgaactcatcgtgatgtgtctatcaaatgtgtgcaatttttatgtattgattttgccttaataaagctaaaaaggtgaatgcagagcatgatggggactttagcatcag

SEQ ID NO: 197139 - DNA, 594 bp, Homo sapiens
aaaaacaaaaatccattttacaaagtaacaggaaaactggagatgcaaactgtaaaaaccgtgrtaggaaaagagacacacattagataaagatttcctttacactaggtttacaagtagtaacttggaaaactacaagttcttaacatgccctatcagtactagttccagtagttgattcagaatgataagatcttttgatatgcttgccaaagcaggtagttttaatctactgcaacactttccctacctgattgctaaatataaaatactaagtcaaatattataaggtaactctcgaacttttcagcttggagaggtggtatttaaaaagatcaagtgacacttcccatcatatctgcgtgaggatgtttaaaggccacttatattgctaaaaaaatggatttacatgtcgtaaatagttttaatttactaaatgtatttatagcctaccttttggcctaaaaggatttaagagtggtaatctctacttgtgtcactttggtttctcaggtgcaaaatcacggataaacaatatctatcaataacaaagatcgtacatttaaaatgtctgtaaagtgctttctaaaatat

SEQ ID NO: 197140 - DNA, 594 bp, Homo sapiens
aaaaacaaaaatccattttacaaagtaacaggaaaactggagatgcaaactgtaaaaaccgtgataggaaaagagacacacattagataaagatttcctttacactaggtttacaagtagtaacttggaaaactacaagttcttaacatgccctatcagtactagttccagtagttgattcagaatgataagatcttttgatatgcttgccaaagcaggtakttttaatctactgcaacactttccctacctgattgctaaatataaaatactaagtcaaatattataaggtaactctcgaacttttcagcttggagaggtggtatttaaaaagatcaagtgacacttcccatcatatctgcgtgaggatgtttaaaggccacttatattgctaaaaaaatggatttacatgtcgtaaatagttttaatttactaaatgtatttatagcctaccttttggcctaaaaggatttaagagtggtaatctctacttgtgtcactttggtttctcaggtgcaaaatcacggataaacaatatctatcaataacaaagatcgtacatttaaaatgtctgtaaagtgctttctaaaatat

SEQ ID NO: 197141 - DNA, 536 bp, Homo sapiens
acagaaatcttgaaagtgccaaatatctgttcaactaactcaggcttcagaaaacggaggcgtgtgactcttttttgaaccttccttcaaagctaaggccttcagccacgggcttctctttcacatcacttggggccactggtgatcagacaactgtgaagctacctcaaaagctctgtagcctctgcaggcacagccwtgccagggacagtcacctgtgtcacttgtagtattctcttcattggtaattacagaataaaaatcactggagtcttaacacatcaggaacatgccaggaagaagtatctcaagatgattttcaagtggctggtttaatctttagctatatctttagagaaagcaggtgggtggggttgaggggaaggggagtagaagggtggagggtctatcgtgacacccagtcacactttctaccaccaagggaccaaaggagttcaccacctttggccctcatctgaagccctacctaaatgaaatgcataccatcatttgcctctttctgacattcagcaaca

SEQ ID NO: 197142 - DNA, 392 bp, Homo sapiens
aatggtttgtatgcacacctacatgaagataaagatggcaaaatattcttaaaataycctgcgtggggaaaaataaaaccgtgagtggctgaagaacacacaatagcattcagaacagagacctgaccacactattaattaattaggggaaaggtggctgaaagaaatcggaagagactgcctgggtctatttcaggcatttttctcgttagagctccgaaattcatcagagtgggttttatcacacacaacaagggaagcctgcatttctcttgggctaatcatgccccatcatactaagaggtcacaaagcagcagggccatcccatgagaaggcgatctcatcctcacctgagaaggaaaaagaaattcatcaagaaccctactatagc

SEQ ID NO: 197143 - DNA, 392 bp, Homo sapiens
aatggtttgtatgcacacctacatgaagataaagatggcaaaatattcttaaaataccctgcgtggggaaaaataaaaccgtgagtggctgaagaacacacaatagcattcagaacagagacctgaccacactattaattaattaggggaaaggtggctgaaagaaatcggaagagactgcctgggtctatttcaggcatttttctcrttagagctccgaaattcatcagagtgggttttatcacacacaacaagggaagcctgcatttctcttgggctaatcatgccccatcatactaagaggtcacaaagcagcagggccatcccatgagaaggcgatctcatcctcacctgagaaggaaaaagaaattcatcaagaaccctactatagc

SEQ ID NO: 197144 - DNA, 487 bp, Homo sapiens
gtgaatgatgaatttgaggaattgggtcttgcaaatcacttaattctactggtggatcaagacrctttattatatgtataatgctgttatgctaatagccctcctttttttttttttttttcactgtggtttcttagcccactgtgattttctttctgagatcctatagaatttgagagaaaaatccctgaataaaatatctagctaattattaaatatcaaactcatctaaagtattgagttagaggggaaagggtagcacgcctataactgaccagccaggttaatattagtttcctggtgtcgactccttacctgatcacagagtcctgtcatcagggctgatttgagttgtactatgcactaatttgtgtaagggagaactgggctgtgaagaattctattttgtttatagtgtctattctgatagtgattttatcgtccattttataggctgagtgttccagttgattccctctccccacgc

SEQ ID NO: 197145 - DNA, 662 bp, Homo sapiens
ggttggtgattttatattctttgagttttatgtggaacccaaaggaataattaaattgtgtgattattgcccactgtcatttttatttaaaaaaatgaaatggagtgaattttcctgccaaagatgcatgctggggcccttatctccwcgttccatgcagctctgtcattgctgcgcagtgtccagtggtgcctatgcatctcaaagccaacaggtcattttgggctagcagacctcctaggacacctctgtgactgcggaagtgattccatttgtcctcagtcatactcagatcaatagcccgtacattgcagtcaccaccatgccccttgaggctcctgtggcacccatcagatgaatagaaatatttgggacaattgccattttagttcatgacccaggtaaatacctgtgtgttcagccagcaatggcattttaaactgttgactgctgaggctttgggtaaaagacgattatatttcctgggaatattgtgtgatttctacatactttgttatatgaaatgctccgtgtagaaggaatgatatagatgtaaaaattctctagtattcctacatatagaaagcatgaaaacccgtctttgagcctcattgaaatctcacaatggacgttttatagttttaatactctttgatagtgta

SEQ ID NO: 197146 - DNA, 628 bp, Homo sapiens
gggaaaaataatataaagagctacagaaagaagacagccatctacaagccaaaaaagaagggcccagaacagattcttcgcctgcagccgtcagaaggaaactacccttctgtcagccttgatttctgacttctatcctctggaactgtgggacgatcaatttctgttgtttgtcaccctgtttgtggtactttactatggaagcyctagcaaactaacacaactgttttcctcaaatgtcaaatccttaatataaattatgcggtgccatttttaggattaaaaatcacatggtaagttccagaaagaaggcaggcaatatattttatcatgggggggtatactatttgaagtattttatctcatttccttgaatcttgcttctttctccagtcagccaagtagctatactcttcactcatggcgttagaaaactgttggcaaggaagggaaaacagggcactgagggggtgtcagttaataaattgtgaggttcgaaagcctaatgccccctaggaaactggaatgattcccgcccatagaaaacaggatcagaagagaccttcctacatataaaataagctaagggcagatgtaaacccctttgagtgcaaaataaggtagttaa

SEQ ID NO: 197147 - DNA, 628 bp, Homo sapiens
gggaaaaataatataaagagctacagaaagaagacagccatctacaagccaaaaaagaagggcccagaacagattcttcgcctgcagccgtcagaaggaaactacccttctgtcagccttgatttctgacttctatcctctggaactgtgggacgatcaatttctgttgtttgtcaccctgtttgtggtactttactatggaagctctagcaaactaacacaactgttttcctcaaatgtcaaatccttaatataaattatgcggtgccatttttaggattaaaaatcacatggtaagttccagaaagaaggcaggcaatatattttatcatgggggggtatactatttgaagtattttatctcatttccttgaatcttgcttctttctccagtcagccaagtagctatactcttcactcatggygttagaaaactgttggcaaggaagggaaaacagggcactgagggggtgtcagttaataaattgtgaggttcgaaagcctaatgccccctaggaaactggaatgattcccgcccatagaaaacaggatcagaagagaccttcctacatataaaataagctaagggcagatgtaaacccctttgagtgcaaaataaggtagttaa

SEQ ID NO: 197148 - DNA, 511 bp, Homo sapiens
tctgggaagctgaacgaaagcagaagaaaataaaatcttgctaagccctgtgcacaatctcttttgtttttatcaggaatgaataaatagaaaaacgggaaygttattttccagtaattttttaaatggatctcagtggcgaaaagtacgttaagttagcaaacgtgcctcacatactgtggatgcctgtaagactcttacattcgtctgcctagatgtatttcaggtgaatgtttttctttgcatttgctaaattttctgtagtgaatttatcactttttgtaatgaagaaaaaaatacacatcacagaagtttgctgttgtcatttcctcccctcatgtaatccttatctctaccccctgtagaagccaataaaagataatctgtgtttgttgaatgaatgaagaaacccagtctaccgtgggtttaccatgtgccaaatgcagagctacaaaaggaaaaatgaaaaagaaaagacctagagaatctcaagtccagtggcaaagatgac

SEQ ID NO: 197149 - DNA, 631 bp, Homo sapiens
gcttcagggagaacaggtgccttgactgtgtgttgtttgtttatctgtgtgtttagctctccatctctaatgagggaggtggcagaatcctagaaaaaaaggaactaaatgcattagtaattcttgccatctgagagggcatccatttcyagtggacctgtgggaatataaacaggctcttaaaaatcctgtcagcttattgctagcatgatctgctgattttcctccctcctctataggttaaattatcaccttcttttgtttgagagcaggttttttgttttgttttgtgttttgagacagagactcattctgttgcccaggctggagtgcagtagcgtgatcttagctcacttctaactccgcttctcgggttcaagcgattctcctgcctcagcctcccaagtagctgggattacaggtgcccgccatcacacccagctaatttttgtatttttttagtagagacggggtttcaccatgttggccaggttggtctggaactcctgacctcaggtgatctgcccacttcaacctcccaaaatgctgggataacaggcatgaaccaccgcgcccggccagagaacaggtcttattaagggctggcttgtaaaggattttgtaggtttag

SEQ ID NO: 197150 - DNA, 425 bp, Homo sapiens
agatctttttttatcaccattatttcctaatattggaagagatgtgtttgtgaayggcttattcattccccaaatatatattcaatgcttagaatgtgcctgccatgctctgggcccgtgtacagggatacaatgaatacaacaaacttcctgccttcatggaacttactttctagaggggagagtcatatcacaaacaaaatgcatgacaacactaagaacatgtcagatggggacaagtgccatagaaaataagcagaataaaggagaaaaggagtggcccagggatggaggtgacatgatttggctgtgtccccacccaaacctcacctcaaattgtaataatccccacatgtcaagagcagggctaggtggagataattgaatcacaggggcagtttgccccatactgttttcatggtact

SEQ ID NO: 197151 - DNA, 425 bp, Homo sapiens
agatctttttttatcaccattatttcctaatattggaagagatgtgtttgtgaacggcttattcattccccaaatatatattcaatgcttagaatgtgcctgccatgctctgggcccgtgtacagggatacaatgaatacaacaaacttcctgccttcatggaacttactttctagaggggagagtcatatcacaaacaaaatgcatgacaacactaagaacatgtcagatggggacaagtgccatagaaaataagcagaataaaggagaaaaggagtggcccagggatgraggtgacatgatttggctgtgtccccacccaaacctcacctcaaattgtaataatccccacatgtcaagagcagggctaggtggagataattgaatcacaggggcagtttgccccatactgttttcatggtact

SEQ ID NO: 197152 - DNA, 425 bp, Homo sapiens
agatctttttttatcaccattatttcctaatattggaagagatgtgtttgtgaacggcttattcattccccaaatatatattcaatgcttagaatgtgcctgccatgctctgggcccgtgtacagggatacaatgaatacaacaaacttcctgccttcatggaacttactttctagaggggagagtcatatcacaaacaaaatgcatgacaacactaagaacatgtcagatggggacaagtgccatagaaaataagcagaataaaggagaaaaggagtggcccagggatggakgtgacatgatttggctgtgtccccacccaaacctcacctcaaattgtaataatccccacatgtcaagagcagggctaggtggagataattgaatcacaggggcagtttgccccatactgttttcatggtact

SEQ ID NO: 197153 - DNA, 542 bp, Homo sapiens
caattatgtctactatagctccatgtttatgtaaaacagtgactgtgtactgatgtttagtcacaataaaagtagcccatacaaagtaaaaaagagttggatttcaaaggacaaacacaatttaagactttttccctttgacattgatttctttcggtacrtcagccaatacataaaaacatgtccaccttatcaaggccaaaggttaactaccaagagcttcattgattccacaaatatttattgttcatcagtcctatgactgacactactagggggtagggccacagtaggaataacaaatggtcacaatgtagttagggaaagagaaatgaaaacaaaactggaagccggtatatacaccaggccaagacaatataaggaggttatcaaaagcctctggcatgggaagatacaaaaacttcaaaagaaggtgacaattggagccagttttgaagaatccatgagggttcaccaagccaaaaggagggcaagggcatgaacttacaagtaactgccacattattgagggaagtttggtc

SEQ ID NO: 197154 - DNA, 542 bp, Homo sapiens
caattatgtctactatagctccatgtttatgtaaaacagtgactgtgtactgatgtttagtcacaataaaagtagcccatacaaagtaaaaaagagttggatttcaaaggacaaacacaatttaagactttttccctttgacattgatttctttcggtacgtcagccaatacataaaaacatgtccaccttatcaaggccaaaggttaactaccaagagcttcattgattccacaaatatttattgttcatcagtcctatgactgacactactagggggtagggccacagtaggaataacaaatggtcacaatgtagttagggaaagagaaatgaaaacaaaactggaagccggtatatacaccagrccaagacaatataaggaggttatcaaaagcctctggcatgggaagatacaaaaacttcaaaagaaggtgacaattggagccagttttgaagaatccatgagggttcaccaagccaaaaggagggcaagggcatgaacttacaagtaactgccacattattgagggaagtttggtc

SEQ ID NO: 197155 - DNA, 542 bp, Homo sapiens
caattatgtctactatagctccatgtttatgtaaaacagtgactgtgtactgatgtttagtcacaataaaagtagcccatacaaagtaaaaaagagttggatttcaaaggacaaacacaatttaagactttttccctttgacattgatttctttcggtacgtcagccaatacataaaaacatgtccaccttatcaaggccaaaggttaactaccaagagcttcattgattccacaaatatttattgttcatcagtcctatgactgacactactagggggtagggccacagtaggaataacaaatggtcacaatgtagttagggaaagagaaatgaaaacaaaactggaagccggtatatacaccaggccaagacaatataaggaggttatcaaaagcctctggcatgggaagatacaaaaacttcaaaagaaggtgacaattggagccagttttgaagaatccatgagggttcaccaagccaaaaggagggcaagggcatgaacttacaagtaactrccacattattgagggaagtttggtc

SEQ ID NO: 197156 - DNA, 627 bp, Homo sapiens
agtgcacagttagatgcatttttagatatgtttaaactatgtaaccaccacccagatcaatatataaaatattttcatcattccagagttaccctcatgttccttcctagtcattagccttccacacagataactactattttgatttctgtcaccatagatgagttttctgttctgctttgaactttgtataaatggaattatatagtatatactcttttgcgtctgatttctttttctgattataatgttcttattcacatatgctgttgtatatattaatagttctatttttccctgtttttctttcttttgctttgaagcatcccattgtatgaatatgttttgatccattctcctcttggtggacatttgggccatttccattatttgactattataaataaaagctactaygaatatgtttgtacatatctttcagtggaaaagccacaaatttctcttggttatataattaagagtggatttgttgggttatcaggtcatttgactctataaaatgctgccgaattgttttcccaagtggttgaacaaaattactttctcttcagcaatgtaagaaaattccagtttctccatacccttgccaacactacatattaccag

SEQ ID NO: 197157 - DNA, 430 bp, Homo sapiens
tagatcatgctttctcatccttagttcatattttgctgtgagtataatgtaatttgtttatctgttttgctgttaatggatactttgtgctttaatatccagtgctgytttggaatctgtatgtgattcctggtaatcatgcataaaactttgtctagggaatatattgtaagagccattaaggttattcctgtatattctgctgctgtttcctgtcaagtttcctgttaggattgcacttcactgcccatttaacttagatgtggccatgttggattaatgaaatgtgagctaagtgatgtgtgacctttctgggcagaagctttgtgaggcaatatgtgcaatgctcttttctctcttctacagtaactggaagtgttctgcctagcagctgcttcatcagcatgggtccacaagtaaggctgacaaa

SEQ ID NO: 197158 - DNA, 313 bp, Homo sapiens
caaaacagccaaccttcagatttccttgctcaccttttttgtcattctgtaacttttcctgtgcccttaaatagaacactgtgtagggaaacctatgcmcgtcatgctttacttcctttagactcctagtctgttcacctgtggctactctcccatcttaaaaatgacctgagtggtccctttccccctcatccctgccctctaccccacacatctcgttttctggtgcaacagcaagttcagcgtctccaggacttggctctgctctcactccttcaacccttaaaagaaaaagctgaatttgagctgtatg

SEQ ID NO: 197159 - DNA, 535 bp, Homo sapiens
ctggatgttgtgaactgtaagtatgggaaggttagtttcttacggtgaaaactttaaccaataggacacagttgacaggagcaatccaggcaaataaatagcaggcctcagaagaaaatctctatggcttctatgaaacatgcatccaaaaagcatgtggggtggtaaatctctatgagaatttaaggtcatatcaccattgtttcctttctgcactaataggatgttcagtgttctgacatttttgtatagcctgtctggagtcatcctgcatgattgagtataaacacctgtgtcttttcttgacctactgagaagcagtggccagcatgttaaactatctccttgtacagttatctccggtatcaccaaggkattggttccaggaccccccaaggataccaaaatccatggatgctcaagtctttcagtcagcctttgaggacccatgaatatgaggggccaacttcttctcctttttcccccctcactcttggtgcccagagattgaatttcccaagtaaagtactattga

SEQ ID NO: 197160 - DNA, 478 bp, Homo sapiens
atttagggtgcccaaggtgggcaggtttcacarctcactccacctttggttcacctggctctcagccttgccctttgggaacggcaggccagccaaaaccagcaaaccatgttccacaacatcttccccttaggaggaaaggccagctaccagttgagtcagttactagtccattggacagccttataactgtgtgaagccaggaactgttcatgagcagagctggaacagagtttcagtcagtaagaaggggcatgacccccaggattgggcaaggaaaaaagttggctgctatctttatggttccactgcactgaccaagtgtccacatcttaaatgtataatgtccatccctcatgtaagagtagtttctggcccaagacgagactgtcatttcaattggagaagtgtgctgaagtagaccaggtggaaaggccagcagtgctgatggctcagcagttgggaccacctgtttttg

SEQ ID NO: 197161 - DNA, 580 bp, Homo sapiens
ttacccccttgatatactataggttctttgagagtggggttagtcttgttattttatactttaattcatagcaaagcattctgcatatatagtagtgtagttttgttgaagtaggttgaattgaaatgaatggaaatggctgaaaggattgcttagagcagcatgagctgcactaaagttggatcctatgaatatgtggtgtgacaggtgggtagagctctgtggttcactgcagctgtgccctgggccccaacaaaggaatagagaaagcagaaagtgatctagcaagcaacatagaagatctgggctgcaatgggattgtgttggggctaaccatgttgtccaaaaggtgtgaggaaaccagccattgttgttggtggactaacaatgmgatacagttactggtgcaggtttgtggagcacttactggtgatgagaaaggagaacatgtgcaacagagaagatttcattgtagaggacaacattgtgtttcagtttgttgttaaattgaccaaaatagaggtaacatacgtaaataacagaaatagcaagtcaaccttttgaatttttaattatgtta

SEQ ID NO: 197162 - DNA, 497 bp, Homo sapiens
tttgaaactgtatattttaaagaaagagattactttagggcaaatcatgataaattaagaccttataatttttcacatattaaagtatgtcgagataattgacaatgtattctgagatatcagtcgaatctcggatcatttgtttcagaagtgttcacactgaaaagaaagagaaaatctgtgtcactaaatattctggaatagaaatggaccaggtagaatttcaccaatttttggaaaggtaaatacttaatatcctaaatgcaaatgctttttccatttaaatacctgaatgattatttataacagataacatactatatatatggtatatatgatatatagtgcgtactatatatatactcaactacatactatatatagtatatatatatatacatactatatacttatatatacttaaatacatactatatagagtatayatatagtacgtactatgtaagtatatatatacttaatatatatagtatgta

SEQ ID NO: 197163 - DNA, 521 bp, Homo sapiens
gttaataaagaataataccaatgctatatagtttataccagaacatagaagaggagagaaaacttcccaactcattttaygagccagcattatcccaatattaaacccagctaaagctctatcaagaatagaaaactacagatcaatattcctcatggacatagatacaaaaagcttcagcaaaatattaccaaattagatccagcaacataaaaaaggaatgaaacatcatacgaccaagtgagattcattataacaatgcaagattgttcaatatttgaaaatcaattaatgtaacataccatacttaccatagactaaataggaaaatcatgtaatgatctcaatagatgcagaaaaattatccaacaaaattctaaatgcattcgtaataaaaatttacagcaaaccaggaatagaatgaaacttttttacccatttttttctttccggagactcactcagtaacccagtgcagtggcacaatctccactcactgcaacctctgcctcccaggttca

SEQ ID NO: 197164 - DNA, 521 bp, Homo sapiens
gttaataaagaataataccaatgctatatagtttataccagaacatagaagaggagagaaaacttcccaactcattttatgagccagcattatcccaatattaaacccagctaaagctctatcaagaatagaaaactacagatcaatattcctcatggacatagatacaaaaagcttcagcaaaatattaccaaattagatccagcaayataaaaaaggaatgaaacatcatacgaccaagtgagattcattataacaatgcaagattgttcaatatttgaaaatcaattaatgtaacataccatacttaccatagactaaataggaaaatcatgtaatgatctcaatagatgcagaaaaattatccaacaaaattctaaatgcattcgtaataaaaatttacagcaaaccaggaatagaatgaaacttttttacccatttttttctttccggagactcactcagtaacccagtgcagtggcacaatctccactcactgcaacctctgcctcccaggttca

SEQ ID NO: 197165 - DNA, 541 bp, Homo sapiens
gaccataatgaaatgtgttgtaaagagtgagtaattctgtctgtgtcatatccacaaaatacaaggactgcctaaacacaccaattttgttacagttcctttttagatcattataagatatctaaaacctgatttggttaccatcagtttattttcctcatggtttgctttgtaacttgtatgcaggaagataaataatgagagctgtttcaaaaaacacaagagcttagaaggattgtaactgcagttattgattgaagtggaaaaataaatataaaatatatcatcttgctatttctagagcaggaaggaaaaaaataatatcaaatgagggagaaagcaaacctctttctccctcatagggagcatargatgacactaaaaaaatcaacattctcagaaaatgagagacagaaaaaaaaaaaaagaacacttaagtaaaacctgaaggaagactagtagtcagacttttggatgtgtcaggattactcataattataatgcctatatcggtatgtagccagaaaaagtgaaatacgct

SEQ ID NO: 197166 - DNA, 621 bp, Homo sapiens
ttttgctgtgtgtactttgagactttttcctgtggttcacatgtatttatacttgttatgtattgctgaataattgacccttttttcattataaaatatatatatgttttgcttttatatcaatttttgttttacaatctattttttaaaatattgataacagctcttagttactgtttgtatagtatatctcatttttgtctttttactgtcaacctattatgtctttgaatcttgtggacaaaatatcattggatcatttttataaaatccattcttccaatgtcttccttttcattggagttttacttaattacttaattgacttttaatgtaattactggtaagatagaatttgtacattatttatttttamcatgtcttttgcttctttgttcttctattcttccattactgttttttcttcggttacatatacatattttcaaagtgtactatttattacatttattgtttatacacacacacacatatatatatttttctaaagattatagtagaaattacaattaacttaaagcaatctagttcacgttaatgtcaactaaagtcaatattatacaaaaatttgctataaaagagctttgttctatgtactcc

SEQ ID NO: 197167 - DNA, 621 bp, Homo sapiens
ttttgctgtgtgtactttgagactttttcctgtggttcacatgtatttatacttgttatgtattgctgaataattgacccttttttcattataaaatatatatatgttttgcttttatatcaatttttgttttacaatctattttttaaaatattgataacagctcttagttactgtttgtatagtatatctcatttttgtctttttactgtcaacctattatgtctttgaatcttgtggacaaaatatcattggatcatttttataaaatccattcttccaatgtcttccttttcattggagttttacttaattacttaattgacttttaatgtaattactggtaagatagaatttgtacattatttatttttaccatgtcttttgcttctttgttcttctattcttccattactgttttttcttcggttacatatacatattttcaaagtgtactatttattacatttattgtttatacacacacacacayatatatatttttctaaagattatagtagaaattacaattaacttaaagcaatctagttcacgttaatgtcaactaaagtcaatattatacaaaaatttgctataaaagagctttgttctatgtactcc

SEQ ID NO: 197168 - DNA, 436 bp, Homo sapiens
attttaaaaaataacagttgctagtttttctttaaaaatgatacctttatgttcccatttgaccatttgaatttaatttagcgacagatccacactgtataacagattgcttggaagtgatgaatgatatactttctcacatttgtattgtagttgaatgcaaaaaaactcaatggaacaatttctgctatttaaatttttttcttattrtttaaatttcctttagcaaaataaaggtcattacttttttaacccaaagaaaataacataaaatattttaggggcctattgtttaatattttaaaaattgacttatttttcaaacgttgtaatctaatagctatgtttgcaattgatgcttttaacatactcttgggttaccatggattgtttatgaaatagagccactatggactgtttaaactttaattaacag

SEQ ID NO: 197169 - DNA, 498 bp, Homo sapiens
acggaattcatatatatatgatgctttgtaaacttgtggccatctcacaacacaaaaaaacctgactgcaatattgtagttctgtaaagaactgcttaatgctagcaactgagaggctagtggagcaatgacgaaagaaaatttaattttatatcctgaataaactctagctctatcacttgacagcttcgacttttacatataatacttctgcaaaattattaagtccatatccaacttagtggagacacattttgagtttgaaataaaatttaagcaattctttttttgattgggtccatgttttcktctggttttgccaagttgaaactctgcttcttagaaaataaatgaaagtctctatgaaaaaaagattttccttttatttgtccatttatctgtctatttatttattttacaatactgagtattataaaaccatagactcatgagataagtagaaatatagtgagtggttaagagcctcagcattggaga

SEQ ID NO: 197170 - DNA, 577 bp, Homo sapiens
agtccatatccaacttagtggagacacattttgagtttgaaataaaatttaagcaattctttttttgattgggtccatgttttcgtctggttttgccaagttgaaactctgcttcttagaaaataaatgaaagtctctatgaaaaaaagattttccttttatttgtccatttatctgtctatttatttattttacaatactgagtattataaaaccatagactcatgagataagtagaaatatagtgagtggttaagagcctcagcattggagacagagagtcttgaattcaagttccagctctgccacttacagcccttgaggccttgcaaagaactggatatgaagctggattacagaaaccaggtatgatttcactattaagaaaaatatttcaagaaaaggtatcaccaaactagaaagggtaggaaaaataagtcccccaatatagagaaragacagcaggttactcattactgctttgcgtaagttcatgcttgaagggctaaaccaagttggtccaacccatggcctgcaggccgcgtgcggcccaggctggctttgaatatgacccaac

SEQ ID NO: 197171 - DNA, 330 bp, Homo sapiens
acttgatttttccagaataattgtatactttttatttacttccaatagttgatgttatttgattgtattccaatttacaccattccactgaaaatatactattatttctaatttttccattacaatgaacatctttgcttttcacagttatgcatttttgaaggggaagcataaatccccagaaatggaatwactgagatatctttaaagtacatataacagttttgacacatcctgagacacactgtaaattttcagcttcatcagtaaaatatatattcctcatattttaatttgacatttcttgattactatgaattaataatttct

SEQ ID NO: 197172 - DNA, 607 bp, Homo sapiens
tcttacaactaattagtgacagagcagaactggagatatttattttctaatggtcagcccacttttctgagtttactaggctaaatttgtcatatattgtggcctctatccaattttgtatcttaaattattgctataataaatatcaatacttttcaaattttacatcaaacaatatttctttcatcctttagatttaaaaagtttatttctatttttaagtttattcatagtttcaataattcaagatgagaaccaaatattaaatagctttcgtgtctttaaatgtgaattaacgtccagtttatcttgttctctwtcttctcccaacaaatgattacagaaatcatctgatatctatcattatctcttttttaaaatcattttaaatgggtcaattttatttatgatttgtgtgtttaaatttttattattacatctcttacagcaaaatttatagggtttccaagatctttcaggatcatccaaaatgcatataatctaattctgctttttatattcgcactttatcattgctccatactcatgcttcaaatcaatcttttaattttcatgtttatgattgcttatcatattatccaatatg

SEQ ID NO: 197173 - DNA, 626 bp, Homo sapiens
gtttgttgatgaatgaggtcgcatggaaaaactttctgcctcttggttatgttggtggaaacttttctaagctttaactagctgactttttggttagctagagattatttacttttaataacaacacgctaagtttctgaaatcagatatagcagagcagtctccagagagctgtggtccaaaggcagtggctgcatccatgtacagttctcatcagattttctgaaaagatgctttatctgttaaggttaagttaaccttggcttactgccrttcctctgttccttccacatctctgtgtcttgtgggcatgccagtttgcattcaaatctgctgtatcagttttaaatccagttctcagtccttagggtattacataagaataagttaactaaagaatccaagaagttttacgtatgatgctgaactaactggatctgacttccttggggaaaatgaatagccaggcagatcacattatagatgagcattaatgacagctggaacacctccctcccttctaagcaggcaaggaacctcccatgtgccaatcactgtgctggcactggggataccaagatgtgttccttgttccttcaaggagcacatgtaaaaacatcatagtg

SEQ ID NO: 197174 - DNA, 326 bp, Homo sapiens
gtaatttatttgcttagcaaactgtgattggtcctaggtcatagtggagttggagttcaaactcctcgggataataacagtaattgtttttaattcaggttttactcattctttatttctataggtttctttgttttttagcctaaatataaaactttacatatattaatgttcarttaaatgtaattgatttgagactattcttcagtttttgaatccttgtgaatcaggatttcaatcagggaagcaggatgactgtgagtgtcctgtaataaggaatttgctataggatttggacctgtacaatttcagtaggagctgggaag

SEQ ID NO: 197175 - DNA, 568 bp, Homo sapiens
tagatttttttttttttaaaaaaaagcatcattatactgcattatttctgtacaaatccagtttagttttacataagcccataaaagtgctttgccacacggatcaaatcttctcgtccaaaagccattttctattagcagcccaaaagcatttgtgggctcttcattgtcaagattaggctggatatggttgctttgatattttcaaagctggaaagggatctctaacctcagagtggctcttagctccagatggagagcctgctcatgggagtgtcaactacaggcaattttgtgaaaatacagctggaaagggagcttaaaactgtatacacttaccttatacacacagcaatgtttcttcaaaccacccatcttttcacgctgacacagctccttctcccacaaccctaggacatccctcaagccagaaccaaagttaagtccaaatgcaatgaacagctgttctcctcagcacacctaatgtgrgtatcaacttcatacctagcaggagtcaacatttgatgaactgcggcaatggtcatgaaaataacactatattcacaat

SEQ ID NO: 197176 - DNA, 543 bp, Homo sapiens
gagtgctcctggagatcaccttctatggtgttgtaggctgctgagatgattggtggtgactaagcggtggtgtaggcatttattgatttcataaattgtagcagaatattccctgaccatcataaactctactcttctagcagacaggcaagtctttaatttcctttgttaacgcctttttactttgaattctagagtaatttctgttttccagaccaaactaactgatactggcgtgaacaccatcctctgagaaagtcatattacaggtagattaacaagatgagggaatgttgactgaagaagtaaatgatatcaagtattttgcttaycacgtagtctgagttctagagatttgttgaaaaggtttcagaagttggaaagggttaggagatggagttagattttcttatggcattgagaatcaagcttgccatatagtctgagttctagcgatttgttgaaaaggtttcagaagttggaaagtgtttggagatggagttagattgtcttatggcattgagaatctaagtactaaaggat

SEQ ID NO: 197177 - DNA, 500 bp, Homo sapiens
tgaagcctagtacccaacagttaacttttaggctcctttccctccttctaaaatttaattcaggttccaaattggctgattatgaaaaaaaattttaaatggtcaatttttaaggcatgataaatctaagtactggcagccagctagcggatgtaasaaacctcatggctcatgcacctagaaggtcacgaaaagtgagcagaatgtagaggaggggtcagcccattaaaggcaagaaagttttgttattgggaaattcaaagttaagcagggaaggggaccggggtataactttatagtggggatagtgaaacgtaggcgacgtctgggaagattgtaaccccaaagaactccaccagtgacgaactaggggagggacttacatgctatgagataaattacacactgtaactggcccaggtgtgcctgcctaccagacaccggatcttgcaagaccgccattaaagtctcacttgtgctgttcttcatgtctccaagtc

SEQ ID NO: 197178 - DNA, 590 bp, Homo sapiens
aaatagctaaattagactgatgtgtatgatgtctcagctcatttgggctaccataacaaaatatcatagactaggtaacttataaataacagaaattgctcacagttctgaaggctgagaagtccaagataaggcatcagcacattcaatatctgatgagtatcttctgctttataaatgttactttcttgctgtgttgtcctatggaaggcgaaaagggtttcctagagcctcttttataagtgaactaatcctgctcatgaggagagagctctcaagaccttattaattacctctcagaggaccccctgctkagtaccattgcattggagaataaaattaagcataggcactttggagggacaggaacatttaagccataacatatggatttaactacatggccctagtttgcaaaaatataataataacaattaaaattatttgctggcttcagactatatccagaaaagaggaaaccaaccaacaaggaaaaataaccaacattacagcagagtaatgatagtagataatatgtaatgagtgcttacaatatatcagacatagttctaagtatctaataaatacta

SEQ ID NO: 197179 - DNA, 514 bp, Homo sapiens
aggcctatacctacatatatacaaatataatgaaagtatttaggtacaaaatgttcctcagctgccaaacaactgttgggaatatattgctaatttgtgagaagcccctaaaccacagactgaaacacaaagaaaaggcagaaattagatgctggacaatactgggaaatgacactttgttaaacaagaatatattccattcatgccatttgaaaggaaatatttgacaagtctatttatttgtcttttagtcaaataaggacaacactgcacaaattctgactgcaattcaccttgaatatctctgatttataaaccttcagagcatttgaatgcagtgatttttgttttcagaatataagtgaagggagtgtacattaaattcactggagtatgaatgctgtwaagcatgagagcaaacacttaggattacgggttgcaatgttctaaggcttaatgctgtcttccttcctgagagatgtgtacaagtttttcattaacttattttatgcgt

SEQ ID NO: 197180 - DNA, 481 bp, Homo sapiens
atacatctagttttaattgaagtatagttcatttgaagcatagtctcaataatttgaacttgaacatttaactacaagcatagtcagtttcagaattcattctttgtagacagtctataaatacaaatatatctccctctgtctggcgcggtggatcatgcctgtaatcccagcactttgggaggctgaggcgggtggatcacttgaggtcaggagtttgagaccagcctggccaacatgttgaaactccatatctactaaaaatacagaaattagctgagcacagtggtgcgtgcctgtaatcccagctacttgggaggctgaggcacgagaattgcttgaaccaaggaggcagaggtttcagtgagctgagatcacaccactgcactccagcctgggcracagagtgagattttgtctcaaaaaaatgtgtacatatatatatatatatatatatatatatatatatatatatccctca

SEQ ID NO: 197181 - DNA, 431 bp, Homo sapiens
acatgattgctttgaaatgattatccttggctacacaaatcaataagagtgacacaagtctgaggttagacaggcagttgctgggcagatgtcctcccagcattttttttaacgttgtaatggcctttgtgcaaggttgtggtttctgcaatgttttttgtgatggttttgttatcaggcatacaagcttgggaaccctttttatamccttacctagctctatttgtcagaagagtttttgtttgtttgttaagacaaatgacttcatgattattctgataatgttcacactaaaaaatccagtaacaatgtcatctatttctgtttcaatggtagtagagcaagacatttatctctttcataagtacatccggggcaggttaatttacagcaaggaagtcttctttatacaactattctcatactcagac

SEQ ID NO: 197182 - DNA, 588 bp, Homo sapiens
aatgtcatacaatttaagctgctgtctctaatgtttactgaaaaattatgtcacagaaaacttatctgtatattcatttaataattctataacatcctactgtaaggatgtgccaacagatattcaactactttttacattattctattacaaatgatgtaataaatatctttgtatgtrtattttcatgtacatgtgctattatactctttgaagctgaacagtatattttatgttttgatagtatttaacaaataactatttacatgtaccaatttatattttactctaaagtttatgggtagagggttttctaattttccacttcattttctcctattttgctaagcaaaatggcttcaaaggtttatagggagttgcatgttgagaaagaattggactctgttaacatatgacagagagagctggggtcagaatatgcccttatgacctgggagaaagtctggagcatggtttgtgatctccaagccaaaaaattggaaggagcacatcttgggaagagctgagctctcaggaactcatgaaccatctagagcaaacatcatgcaggtgtgttggtaccagatg

SEQ ID NO: 197183 - DNA, 601 bp, Homo sapiens
attaaccatcacagttacctttcatggcaaaaggggactttgtagatgtgattaagaatcttcagatagacagattatcctgtattacataagtggacctaatgtattcataagggctttataaaattgagacagcaggattaagaccagagaagaaatgttaaaagaaaagtagaggtcagagtgattcagtgtcagaagaattcaaacctctgttgtctttagagatggaggaaagagactgtgagtcattggatgcatgaaaccccctgaaattgaaaaggacaaggaattggattctcttcttgaatttctagaaggaacacaatcctgccaacccattttgaactacagaccataataactttaagataataaattggtgtcattttaagctactacagctttggtaatttgttacagcagcagaagcagcaacactcaacagatagagcccctggcttaaagcaggggcttatggcagattctrgaaaagtttctaggttaaaactgcctcagaggctgcctccaggaatataatttccttacacactagagaataattcacggtccaagaagttaagctctgggatacttttgc

SEQ ID NO: 197184 - DNA, 573 bp, Homo sapiens
actacaacctccacctcccaagcttaagcaatcctcccaccccaggctcctgagtagctgggaccacaggcccgggccacaacgccctggtaaattttctgtttttagtagagacaggsttttgctatttttgccaggctggtctcaaactcctggactcaagagatccacctaccttggctttccaaagtgctgggatttcaggcaggagccactgcacctggccctgggatgtccttctctttttttttttttttttttctttcttcacttctttcttcctttcttcctttcttccttccttccttccctccttccttctttctttccttccttccttccctttcttcctttctctccctctttctttctttccctctctctttctctctctctctctccctctttttttttctttcttttttatttttttgacagagtgtctctgtcacctaggctgcaatgcagtggagcagtcttggcccactgcaacctccacttcccaggttcaagtgattctcctgcctcagcctctggagtagtagagattacaggcatgcaccaccacgccca

SEQ ID NO: 197185 - DNA, 537 bp, Homo sapiens
aagtattttgcaggtcatactagagttcctagggaaaaagtaaaggatggtagacccaaagaccaaaggttcataattgagtccaagctttggcctcaattctggttctggcaaagcacctaatttccatttaaggagttatttgtccaaaattattaatatattattttattctttaaatttttagattcagggattgattttcagtgttggcattcaaattatctcaggaagtatatgatctaagtgtttcccacagtctttgatattcctgacatgtttttacactgacatagtagttaagttccattcctgggtcatmgcatgcacagaacttactgatctttgtatttatgaaaggaaactgcacactagagacatactacagaagtgactaaccggtgacactataactatctaaaattatggtaaagatatgggatatattttcaataaaatgcattagataattcagaagtcaagagatagaatgctgtttctagtttggagtaggcatcttggagcagtcagtggcat

SEQ ID NO: 197186 - DNA, 578 bp, Homo sapiens
atgtggtttcctccggttccattaacacagaatactttttctgcaaaaatggaaaatttccttagtgtccatttcatcatttgaaccataaaaaggaatgtcttcttgatggcgaattaagattctcttccagataaattttcggagtcttgatcagaattctttacaggaactttatgagccttctacacaaacaacgtcaggtttcccagacatgataccccacacagagaaagctcctttgctcaccccaaaatataccttcgtttgcatttgttttagaaatgatggctgtagatccagagtctcatgaagatgagatcgactgactkgattgtactaccgttgtgggaaaggtgaataatctctgttgacatagccagaggcgtgttctctaacccactctggcattcagtatagagacatctctgtgacagtttttttgcaggcatgcagtcagatctgtgttcacctgagccacttaataatagcgatcttctcaaaaagattttactctgtgaaatcaaagacctttaggtcagtagtgtctttgtggtattctttctaatctcttgtga

SEQ ID NO: 197187 - DNA, 578 bp, Homo sapiens
atgtggtttcctccggttccattaacacagaatactttttctgcaaaaatggaaaatttccttagtgtccatttcatcatttgaaccataaaaaggaatgtcttcttgatggcgaattaagattctcttccagataaattttcggagtcttgatcagaattctttacaggaactttatgagccttctacacaaacaacgtcaggtttcccagacatgataccccacacagagaaagctcctttgctcaccccaaaatataccttcgtttgcatttgttttagaaatgatggctgtagatccagagtctcatgaagatgagatcgactgacttgattgtactaccgttgtgggaaaggtgaataatctctgttgacatagccagaggcgtgttctctaacccactctggcattcagtatagagacatctctgtgacagtttttttgcaggcatgcagtcagatctgtgttcacctgagccacttaataatagcgatcttctcaaaaagattttactctgtgaaatcaaasacctttaggtcagtagtgtctttgtggtattctttctaatctcttgtga

SEQ ID NO: 197188 - DNA, 363 bp, Homo sapiens
aaatggcacatgactcatgaccccacatcagaaatactcattctttactagtgaggttattagatatgacccatatttcttctagaccttggccatcagtatttaatgtcagggaggtaatgcagagtatcccataaagtttatgactttgaataagcttatgggtataaatcttgcaggaatctgccctaagctgctcaaggcagtgggcactagttwtactttgggattggcctttacattcatacgggtcaaataaatcctttagctaagattatttctaaagctctttcactccccactggacccatgtggccataatctgctctcaaaacttttcttcaattggagtaatgcaatgct

SEQ ID NO: 197189 - DNA, 531 bp, Homo sapiens
tttcactgactcacatttttgcatggctggggaggcctcaggaaacctacaatcatggcagaagcggaagcaggcaccttcttcacaaggcagctggagagagtataagcawgtgaaggaggaactgtcaaacacttataaaaccatcagatcacatgagaactcactatcgtaagaacagcatgggggaaactgcccccataatccaatcacctcccactaggtccctccctggactcacgaggaatcacaaggattacaattccagatgagatttgggtgaagacacagccaaactatagcaggccgtgtcaatttactaaaataagacaacaaaatttgctacattggttgactcttcctttcatgagagattcctataaatcataaatgttctaaatggaatttaggatggtgaattttttccacaagcttttcaatttactttatccatatccatcagaggaatcactatctatgaaagatatagagccttatgaaatgcatgtctcaaataatgagacttgaaat

SEQ ID NO: 197190 - DNA, 604 bp, Homo sapiens
tgccagactatttactaggttttaaaaatggtctgaatataaaagactttttctaagcccttacatactgcttttttgagacagtctactctgttgcccaggctacagtgcagtggcatgatctcagctcactgcaacctctgcctcccaggctcaagcaattctcacacctcagcctcccgagtagctgggactacagttatgtgccaccatacctggctaatttttgtatttttagtagagatgggactttgccatgttggccagggtggtctcaaattcctggcctcaagtgatctactggcctcagattcccagggtgctgggaatacaggcgtgagccaccacgccctgccctatattcttaactggacatgtgagttgcttttctccaaaaattacccaaaagtctattagcaaataaatattactattaacattttagtatactacatatattctcagctttttctgtgyagatacagatttagaatattattgctcatgtttttgtaaacttattcaacaacatattttggaaatctttctgggttgttaaaataggtcaacattgttttcatgcttttatactaacccattatat

SEQ ID NO: 197191 - DNA, 617 bp, Homo sapiens
gccagcagtggtcttactcgaaactcatctaarcgtaaggtgaggagaatcggcctgatgagtgggcggcaggtagtgcaggacactgcagtcttgtccacggcccgggccccgcgcatcaccgcgtctccgagagcgcgctccgagcccagcccctcctgggaggttcttagccctcatgtgccaccgcggtccagggacccacctcctctctgtctcctggcgggttttctatttgtcacaatagcgaccattcctgagctcccgctagaaccaggcctggtgagtgagtacttagcttagggaaggcaccaagccctgtgcggtgtgatttttagccctgttcggcggaagaggaaaaggaaacgagctcagagaggctgagaaagtcgcccaggaacacacagctgggaagacattgaaatccacatcccattggcttctgagctcttccccagcaggggagcgcccgtttttcattctcagtctctagcacagagcctcgcacgtgggtgctcaggaaggatttgttgaaggaacggcagatttttccttgtttgtcaaagggggtgctcatagctgaggggtgtgaggattaaatgagatggtgtgtgtaa

SEQ ID NO: 197192 - DNA, 617 bp, Homo sapiens
gccagcagtggtcttactcgaaactcatctaagcgtaaggtgaggagaatcggcctgatgagtgggcggcaggtagtgcaggacactgcagtcttgtccacggcccgggccccgcgcatcaccgcgtctccgagagcgcgctccgagcccagcccctcctgggaggttcttagccctcaygtgccaccgcggtccagggacccacctcctctctgtctcctggcgggttttctatttgtcacaatagcgaccattcctgagctcccgctagaaccaggcctggtgagtgagtacttagcttagggaaggcaccaagccctgtgcggtgtgatttttagccctgttcggcggaagaggaaaaggaaacgagctcagagaggctgagaaagtcgcccaggaacacacagctgggaagacattgaaatccacatcccattggcttctgagctcttccccagcaggggagcgcccgtttttcattctcagtctctagcacagagcctcgcacgtgggtgctcaggaaggatttgttgaaggaacggcagatttttccttgtttgtcaaagggggtgctcatagctgaggggtgtgaggattaaatgagatggtgtgtgtaa

SEQ ID NO: 197193 - DNA, 617 bp, Homo sapiens
gccagcagtggtcttactcgaaactcatctaagcgtaaggtgaggagaatcggcctgatgagtgggcggcaggtagtgcaggacactgcagtcttgtccacggcccgggccccgcgcatcaccgcgtctccgagagcgcgctccgagcccagcccctcctgggaggttcttagccctcatgtgccaccgcggtccagggacccacctcctctctgtctcctggcgggttttctatttgtcacaatagcgaccattcctgagctcccgctagaaccaggcctggtgagtgagtacttagcttagggaaggcaccaagccctgtgcggtgtgatttttagccctgttcggcggaagaggaaaaggaaacgagctcagagaggctgagaaagtcgcccaggaacacacagctgggaagacattgaaatccacatcccwttggcttctgagctcttccccagcaggggagcgcccgtttttcattctcagtctctagcacagagcctcgcacgtgggtgctcaggaaggatttgttgaaggaacggcagatttttccttgtttgtcaaagggggtgctcatagctgaggggtgtgaggattaaatgagatggtgtgtgtaa

SEQ ID NO: 197194 - DNA, 564 bp, Homo sapiens
ctggcggttggtccaatgctcttctgtcttgaagtctcttaatttttaaattaggggcaacttgttttcattttacactgggctccaaaaattatttargcggtcttgactgttctcatccgcttatagaaaggaggagggtttctggcaatggtgggagtggagagctggttctggaggctgttgaagccccaggaggtacacagtggttttcacctctctttagagtggaagatgctccacacacattatcccgctttgggttccagtcatcagcttccaggcaataggatcgaaatgcatcagcatcctcctgcaaatacaaacatccctcaacatctaaacactcactacccccaaatgggaatcgaatagattcagatcatctgcttttgttttttgcaacaatgaactcgtgttgcattcattgttttataacttcttttttttcacttaacaatatgttgtaaacatatcttcatgcctgaaaatattaatctacaatctaatattcagcatctgtttcagggatatactgccttgtaacaaaccacccaagaaacc

SEQ ID NO: 197195 - DNA, 601 bp, Homo sapiens
tcagtggttatttcaaaccagtaataggaagtgcttggtttagagggattctggggagatcctgccccacgacacagggctgatgaccttgggggcctcttctagcaagctttgattgacagaaccagctytggtggaatgcggtggtggccacactgtcctcttgttaacattaatgactgaattattctctacgttggtgttctgggctgctcttcagactaagctcgtgacttattcttcccagatctccatcatgctgtcattttcctgagtcctctcaaccagcgttcccagaacagtagggagaaggtgctgtggactagacagctgcccaggcacctgctccctctttagggtccccagctcacccctctctcctcctgagcaaaaccccttcaccctgcttctagcccaaaaggagaaagcagagagagacaggcatctcctactctacagaaatgttatcagcggccaggtgctgccccaggagctgagggctgtccttgctaagctcatcaaacttagctctcttctctgccatgtctccagtcttcccctcttgcctcaggtgccatccgcgccaagaaaaagttagggc

SEQ ID NO: 197196 - DNA, 601 bp, Homo sapiens
tcagtggttatttcaaaccagtaataggaagtgcttggtttagagggattctggggagatcctgccccacgacacagggctgatgaccttgggggcctcttctagcaagctttgattgacagaaccagctctggtggaatgcggtggtggccacactgtcctcttgttaacattaatgactgaattattctctacgttggtgttctgggctgctcttcagactaagctcgtgacttattcttcccagatctccatcatgctgtcattttcctgagtcctctcaaccagcgttcccagaacagtagggagaaggtgctgtggwctagacagctgcccaggcacctgctccctctttagggtccccagctcacccctctctcctcctgagcaaaaccccttcaccctgcttctagcccaaaaggagaaagcagagagagacaggcatctcctactctacagaaatgttatcagcggccaggtgctgccccaggagctgagggctgtccttgctaagctcatcaaacttagctctcttctctgccatgtctccagtcttcccctcttgcctcaggtgccatccgcgccaagaaaaagttagggc

SEQ ID NO: 197197 - DNA, 592 bp, Homo sapiens
gtctcaatgttgccaaggggaacaagaaagacacgtctccatccccaggccagtggtgttggaggggaagcaggaaccaccctctgagagggtggaaagggaagctggactggggagtctcccagtcggagggtgaggagaccgaggagctggggatgcttctggggattacaggttccgtgccactgaatctcagctccaacgctcrctcatcgctcatcgggtgaccttgagcaaggcacttacagtccccatgcctcactttactcctctgtaaagtggaaatggcaacagccattagtacccacttcacagggctcttaagaggagtgttaggatgtgttcatcttgtagaacaatgcctggaacacaaggagcatcacataaatatttgcaaaatgaagaatggagatccagggggcaccatggaaaggtttcaggagttggggagggctgagagatggggatggagaaggaatgaaggtaaagggattgaagcaggggacaggaggtggcctgggagtctgggctgcttgtgctcactcccagaacctgcgatggagggcctgagagtagtcctggaaacagaagg

SEQ ID NO: 197198 - DNA, 578 bp, Homo sapiens
acgtctccatccccaggccagtggtgttggaggggaagcaggaaccaccctctgagagggtggaaagggaagctggactggggagtctcccagtcggagggtgaggagaccgaggagctggggatgcttctggggattacaggttccgtgccactgaatctcagctccaacgctcactcatcgctcatcgggtgaccttgagcaaggcacttacagtccccatgcctcactttaytcctctgtaaagtggaaatggcaacagccattagtacccacttcacagggctcttaagaggagtgttaggatgtgttcatcttgtagaacaatgcctggaacacaaggagcatcacataaatatttgcaaaatgaagaatggagatccagggggcaccatggaaaggtttcaggagttggggagggctgagagatggggatggagaaggaatgaaggtaaagggattgaagcaggggacaggaggtggcctgggagtctgggctgcttgtgctcactcccagaacctgcgatggagggcctgagagtagtcctggaaacagaaggggtgcacaaaactcctcc

SEQ ID NO: 197199 - DNA, 523 bp, Homo sapiens
aagagtgaagagagtccctctgctgctcctccacagacagagccagcttctcctagggatcagtcaggccccctgccctctcaggccctgcaacatctggaggtctcaggcttcccagccctggggacagttgggagggtgttgagcctttcaggcagtgggccctgagcagacgaatgagcaaggcctctgattcatcctaaagacacaaggcctggactgaggaaggatacaactgcaaagagctgttgcagaaccctcagcctagccgagtgtcatggtggtgtatgttccctgaacacacaccaacaggcgaacagctttgctgcaggwgctgggtgaatggagctgtggtgaatcctcagcacattctagaacatgggctgcctacactccatggggcaggcaccacacttgccttggtcactgtcatatccttgatgcgtagcaggggctaggcacacagtaggtgctcaatgaatattgcctgaatgatgcagatttagcgctcacatgcttactc

SEQ ID NO: 197200 - DNA, 550 bp, Homo sapiens
gaactctttgcctagctctatatcctgaatattttcttctagaagttttatagctttacactcatgtttaagtctgtgatcattttaagccactctttgtgaaacgtgtgagatttgagtcaaggatmatctttttggcctgtagtctccagagctctggcaccatttgtggaaaagtctagtcttcctctgttgaattggttgtgcattcttgtcacaaattagttggaaatatttgtatgaatgtatttctagattctctattctgttccattaatttatttttctatccctccactagtactacacagtcttgattactgtagctatgtattaagtcttgaaattgggtagactgattctctctttatttttcaaaaaatgttttagctattctagttcctttgccttttcatattaactttagaataatcttgtctatatctacaaaaaaatcttactagtattttgaaaggaattgcactgaactttcatatcaatttgtggaaaattgacctctctattatttcaagtcttctaatccatgaac

SEQ ID NO: 197201 - DNA, 449 bp, Homo sapiens
taaatgtctttcaggctctattcatctttttatttcagtctatttcrttgttcagattaggaaatttccattgttttaaattttggatcactgattatctcctatattccctcctttttttgttattgagtttatccactgaactttttcatttcaactattatatttttcggttctaaagtttccactggattcttctttatatctcctatttatttgctgaggctttctattttttgtttcaagcatgtttataattgcttgttgaagcatttttatcatggcttctttaatatctttgccaaataactctaacatgtgtgtcatcttgatgttggcatctactgattgtcttttatcattctgttgataaatatttctggttcttggtatgatgagtgattttttaaattgaaacctggacatttttgtattatattatgagacta

SEQ ID NO: 197202 - DNA, 449 bp, Homo sapiens
taaatgtctttcaggctctattcatctttttatttcagtctatttcgttgttcagattaggaaatttccattgtttwaaattttggatcactgattatctcctatattccctcctttttttgttattgagtttatccactgaactttttcatttcaactattatatttttcggttctaaagtttccactggattcttctttatatctcctatttatttgctgaggctttctattttttgtttcaagcatgtttataattgcttgttgaagcatttttatcatggcttctttaatatctttgccaaataactctaacatgtgtgtcatcttgatgttggcatctactgattgtcttttatcattctgttgataaatatttctggttcttggtatgatgagtgattttttaaattgaaacctggacatttttgtattatattatgagacta

SEQ ID NO: 197203 - DNA, 572 bp, Homo sapiens
tttcactctgatgttttaaccttgcttatagattttcattttgagctatataaatcttctactaaggtccttttagttgagtttcaggttccttttatttattctaaaacatttttatttctgggtaagcagggtawtttttccttatagtaaattttagatcacattgttattatgaaaatacatttcaaggatcattgtaacctaatttaaaaattaagttattaacaaaaactagcattagcatcaaattaagaaaaaaaatacatagcaacaacaacatattgagagttttttctcttttattctccttttctgggagtctattgctacataacaaattatagtcatgcaccttttggtcaacaacagactgcatatacaatggtggttccattagaatataatatcatatttttactgtaccttttctatgtttagatatgtttagctacacatatattaccattgtgttaccattgcctacggtatacagtaaagtagcatgctacacaggtttgaagcctagcagcaataggctacatcatataggttaggtgtgtagtaggcta

SEQ ID NO: 197204 - DNA, 572 bp, Homo sapiens
tttcactctgatgttttaaccttgcttatagattttcattttgagctatataaatcttctactaaggtccttttagttgagtttcaggttccttttatttattctaaaacatttttatttctgggtaagcagggtattttttccttatagtaaattttagatcacattgttattatgaaaatacatttcaaggatcattgtaacctaatttaaaaattaagttattaacaaaaactagcattagcatcaaattaagaaaaaaaatacatagcaacaacaacatattgagagttttttctcttttattctccktttctgggagtctattgctacataacaaattatagtcatgcaccttttggtcaacaacagactgcatatacaatggtggttccattagaatataatatcatatttttactgtaccttttctatgtttagatatgtttagctacacatatattaccattgtgttaccattgcctacggtatacagtaaagtagcatgctacacaggtttgaagcctagcagcaataggctacatcatataggttaggtgtgtagtaggcta

SEQ ID NO: 197205 - DNA, 407 bp, Homo sapiens
ataactatgacatattttctctcctgtggagatatagagcctatattttaagaaagaaattctttgaatggagctttcttcccattgaaagaacaaattattgcttgatgatgtcaaagagtctctgatcatcagggtttttctagggttcctcattaaaaagcttatgaaaatttttcagtaacatttattcattcagtcattcmtttgctcatcaccttggcatgccctaaagaatctttgaattttctttatgtttttacaccgtgaattaagatacacagttatggacatagttatgatagctatccttctttgcattttctctagagaaatactgcacattgatatttatctttctttgccacatagagtatcctttgtagtatgtgaatacatctggatat

SEQ ID NO: 197206 - DNA, 574 bp, Homo sapiens
taccaatttatatttaattttttttgaaaagtagatttccaatgctttatccttttataatccgactttggagcttattagtttattataattattagagttgtttagagatcatgagtttatcttcacaccaagtttgggacttgagaaaatacaaattgcactgttggtcatgtttagatttttttcttttgctgatttccccttgttttgttttgtgtttgcttgcaattatgggttgaggatttaaagaaaacaaaatgtacactaactttgaagattttattcatttttaaataaatgaattctgtgtttagaaaagaaatgtaatccctttcaatcacatctctcttttgagtcaattccacccttattgctggtgtcaggagaaaaccttggaagacaaaacacataattacctagytagccttgtcacataactcagctctgctttacctacagaacctcaaggtaaagcctttgtttttgttaccatggcctaattcaagctaagaagaaaactgacttttagaagcagcagggaaaggattaagttgccaggttaggtaacata

SEQ ID NO: 197207 - DNA, 603 bp, Homo sapiens
aattgcaaacatttgttctttcatccaactgtattgcaaacagcacacattgtrtaattaaatttggtttcttaaatcttccaggcaccttccaacaatatttactgacaaataatttaatttgccacctttttgattcctattttttagctatttttgaatcaaaaatttcattgccttatttttaaacatttgctaattaataagaaacttcaaaagaaacataaagttcagttggttaaagtgcattattctgaacattgtttctaaaaagtgcagagatttgacatcatgtcatagaaattcactgataaatgtcttgttgatcatggcatcttcatactattatttgctaatatttcaggaaataaagtgttgtatactaaaggcaaagctctctaaacaggtagtggttataagtacacatttcaaattgtctttaataatttaaatttttattggctagcttcttggaagatctgattaacttatattttttttctcattttcactgcacctatcttattagtattatttttaatgtaagatttttactatggatccatttagtaatggctagtcttaaaaccaaaaatctattta

SEQ ID NO: 197208 - DNA, 473 bp, Homo sapiens
gaacccagaagcaaatgcaacaaaagacaaaaataactagatgggacctaattaaactaaaaagcttctgcacagcaaaagaaataatcagcagagtaaacagacaacccatggcatgagagaaaatcttcacaaactatgcatctgacaaaggactaatatccaaaatctacaagaaactcaaacaaatcagcaagaaaaaggccaataatctcattaaaaagtgggcaaaggacttgaatagacagttatcaaaagaagatacacaaatggccaacaaacatgaaaagatgctcaacatcactaattgtcagggaaacgcagatcaaaaccacaatgagataccaccttactcctgcaagaatagctmatattaaataattttttaaaacatagaagttggcatggatgtggtgaaaagggagcagttttacactgttgatgggaatgtaaactagtacaaccactatgga

SEQ ID NO: 197209 - DNA, 586 bp, Homo sapiens
ttgcctttccagtttcattcattactgtgtttttgggcacgtcataccccaagtcacactggcatacacatttctctccgaaccctcttgtcattatgtgttttagtgtgtactattttttctgtctggaataaatatttttatttttctcttaaaattttgtttatccttgtgatgattaatactgtcaacttgattggattgaaggatacagagtattgatcctgagtgtgtctgtgaaggtgttgccaaaggagattaacatttgtatyagtgggctgggaaaggcagacccactcttaatctgtgtgggcacaatctaatcagctgtcagcatgactagagtaaaagcaggcagaataatgcgaaaagagagactggcctagcctcccaacccacatctttctccctcaaacattgagagagctaggtataatgtggttagtatcctaacatgtgttatattttattcagccagcatccattccacatcctcccactcccaatttccatttaaaaaattacccatcccattttatatcatcattgcgggatagtgtatctaggtgtttgccaccctagaata

SEQ ID NO: 197210 - DNA, 586 bp, Homo sapiens
ttgcctttccagtttcattcattactgtgtttttgggcacgtcataccccaagtcacactggcatacacatttctctccgaaccctcttgtcattatgtgttttagtgtgtactattttttctgtctggaataaatatttttatttttctcttaaaattttgtttatccttgtgatgattaatactgtcaacttgattggattgaaggatacagagtattgatcctgagtgtgtctgtgaaggtgttgccaaaggagattaacatttgtattagtgggctgggaaaggcagacccactcttaatctgtgtgggcacaatctaatcagctgtcagcatgactagagtaaaagcaggcagaakaatgcgaaaagagagactggcctagcctcccaacccacatctttctccctcaaacattgagagagctaggtataatgtggttagtatcctaacatgtgttatattttattcagccagcatccattccacatcctcccactcccaatttccatttaaaaaattacccatcccattttatatcatcattgcgggatagtgtatctaggtgtttgccaccctagaata

SEQ ID NO: 197211 - DNA, 605 bp, Homo sapiens
ataaatgtgtttgtcttttcttcctatctaagcatttctgttctcrttttgatgtctactcttttcaaggatgaggtcattgttcggcattttttccttgttataactataaacatcattgcatccacatcatttcatttagtggagaacatgtaaagttattctcctaatgtaaaaaattctcatattcttggttttattttatcccagtttcttttttttaatttgttaaaaggaatgtggaaaaggaggtctcagtgcatagagcttttttctccagttcagattatctctttgggaataaacaggctctcagaagttgaattatgaggtctgaaaatatcatgattttaaaaattcttgtaaatttaacaaaaacgttttgctaatttcctttccccttctgccatgattgagaatatactttttattacacctttttttttttttttccggagagtttaaagacaaagaactaaaaggggcttttgcattattaggtatattatggctctattttttataggtttaatataggtgtaggtggtaacgtgatagataaattacggaagtaggctgcaattgttttgattgtaatcaaataa

SEQ ID NO: 197212 - DNA, 605 bp, Homo sapiens
ataaatgtgtttgtcttttcttcctatctaagcatttctgttctcattttgatgtctactcttttcaaggatgaggtcattgttcrgcattttttccttgttataactataaacatcattgcatccacatcatttcatttagtggagaacatgtaaagttattctcctaatgtaaaaaattctcatattcttggttttattttatcccagtttcttttttttaatttgttaaaaggaatgtggaaaaggaggtctcagtgcatagagcttttttctccagttcagattatctctttgggaataaacaggctctcagaagttgaattatgaggtctgaaaatatcatgattttaaaaattcttgtaaatttaacaaaaacgttttgctaatttcctttccccttctgccatgattgagaatatactttttattacacctttttttttttttttccggagagtttaaagacaaagaactaaaaggggcttttgcattattaggtatattatggctctattttttataggtttaatataggtgtaggtggtaacgtgatagataaattacggaagtaggctgcaattgttttgattgtaatcaaataa

SEQ ID NO: 197213 - DNA, 422 bp, Homo sapiens
cccccttcatgctctctctctcctactgtcatgtgaaaatgtgcttgcttcccctttgcccttctgccatgattgtaagttttctgagtctttcccagccatgtcttctgcatggcctgtggaactgtgggtcaattaaacytcttttctttataaattacccagtctcaggtagttctttataacaatgtgagagtggactaacatagttgcccaagttggtcttgaacttctgggcccaagtcatcctcctggcagagccttccaaagtgctgggatatgtgagccactgcccctggccccaatttcatcttactacaaaattttaacaatagagcatttttggaaaataattatgtgattgataatacttattacagaaaatcttggtgtgaacctttgtgatacaatgtttcaaagat

SEQ ID NO: 197214 - DNA, 422 bp, Homo sapiens
cccccttcatgctctctctctcctactgtcatgtgaaaatgtgcttgcttcccctttgcccttctgccatgattgtaagttttctgagtctttcccagccatgtcttctgcatggcctgtggaactgtgggtcaattaaacctcttttctttataaattacccagtctcaggtagttctttataacaatgtgagagtggactaacatagttgcccaagttggtcttgaacttctgggcccaagtcatcctcctggcagagccttccaaagtgctgggatatgtgagccactgcccctggccccaatttcatcttactacaaaattttaacaatagagcatttttggaaaataattatgtgattgataatacttattacagaaaatcttggtgtgracctttgtgatacaatgtttcaaagat

SEQ ID NO: 197215 - DNA, 525 bp, Homo sapiens
cggttttaagtctctcaaggcctttggatgcctagaaagtgggtcatctttcagaatatctgcgtcactgtggagatgttagtaaatcaaagaccagctggatttgtccttaaatgtagcaaaatatgtacttgcttggaagtactcttaatcctttcattcactggacagggaagactggtttcacagtcctgactcccttcattcgttatcaacacctcgtattttttttttggtagatgatatatatgaggcagtaaacttgtggtctggaaaagcagagatcatattaccactctgttttaacttctaaaagtttgaaattaagacttataccaggtatttttatggagtggattggagtatagaagcaattattttaactatttgctaaaaaaaaattgcctaaaatattcagtwattaaaggaaaagcattgttctggattggattcttcagataattctgcttttggcaacaagtaacagaaaaccaacttaaataggtttggacaataaggacattc

SEQ ID NO: 197216 - DNA, 503 bp, Homo sapiens
catggctgtgcttatgagagatcatgaactatgggatccagtggcttccaagtcattttaattttaatatggaaatttccaaacatactcaaaaatacaaaaatagttgaatgaatctctatgcatatccctcagctccaacagttaccaactcctgatcaatcttagtttttctatactctgcctagtttccctatccactgagtaggaatcaatccagccatcatagcatttcatcttgtaatattttcctctaaagtaggaacacataggtatctctggaactatgtgtgcactatcttcaggacactgctgaaggaggagcaagaactattcctgtggttcttaaaattcaatacaagtaatcacacctttgatccacctgtrgggactgatccctcttgtgggagcaaagatggggccatggtatataaaatataaatataaaactaatatcaatgtcattgtcctaagaaaaataaccacgattccttaatatcaag

SEQ ID NO: 197217 - DNA, 406 bp, Homo sapiens
aattcacattttcctggtcagaaatccaccactactcttaaagtaagtggctggtcccaagctagaaatggaaccaaaaggagtagccagggctttcccaagggacatgagaaaaaagtaargtgaactttttctttcttccatcaccagaaggtcaaactttctggctatagaaggtatccaagggtcacaaatgaacttctcatttttagaacctatttctcccatagtaaaaagtttcccacttgtacagaaagaggagagttggcaacacaggaaagtaatctcaaactgtatcacataacacagtgcagagaaaatgctttaaaaatgcctcaaaaatgcctcaagaagctactgagattttataaaaattaatttcttataaagcaaagctagaaaccat

SEQ ID NO: 197218 - DNA, 466 bp, Homo sapiens
aaatttattaatgtgcacgggggagaatcacagagtaattatccaaaaatcccaatggagcctagatacctatatagcctttgttcagagtggaaggggtagatggggaatatagtcaacactattttttaaatttaaatttttattggggtacatgtgcaggatgtgcaggtttgttacataggtaaatgtgtgccatggaggtttgctgcaccyatcaacccctcaccgaggtatgaagcccagcatgcattagctatttttcctaatgctctcccttcccccaccccacccactgacaggatccagtgtgtgttgttcccctctgtgtgtccatatgttctcattgtttagctctcacttataagtatttggttttctgttcctgcgttagtttgctaaggataatggcttccagctccatctatgtccctgcaaaggacataatcttgttcctttttatggc

SEQ ID NO: 197219 - DNA, 466 bp, Homo sapiens
aaatttattaatgtgcacgggggagaatcacagagtaattatccaaaaatcccaatggagcctagatacctatatagcctttgttcagagtggaaggggtagatggggaatatagtcaacactattttttaaatttaaatttttattggggtacatgtgcaggatgtgcaggtttgttacataggtaaatgtgtgccatggaggtttgctgcacctatcaacccctcaccgaggtatgaagcccagcatgcattagctatttttcctaatgctctcccttcccccaccccacccactgacaggmtccagtgtgtgttgttcccctctgtgtgtccatatgttctcattgtttagctctcacttataagtatttggttttctgttcctgcgttagtttgctaaggataatggcttccagctccatctatgtccctgcaaaggacataatcttgttcctttttatggc

SEQ ID NO: 197220 - DNA, 521 bp, Homo sapiens
gtttttcttgtgctgacacatgctgtcttgcctgctgccakgtaagacgtgcctgcttcacctgctgccatgtttgtaagtttcctgaggcttcccaggcatatggaactgtgagtcaaaactttttcctttatacattgcccagtcttgggtatttctttatagcagtgtgaaaatggactgttacactaagttaatttaaaaacattatataaaactacaggaagaagaggaaaaatggattttaagtgttcctttgttaattctgagagtatctcaccctaaaccctttgcaaaaattacacacatagattttccactaattgcattacaaattccataggaaagaatgcattttaagcatcatctttgcattgccacatacatttagcaaaatgacttacatacggtaggaactcaaaatttaatttaagaagtttttttttgacttatctctgagcgaaaataatggattgctaaatgaaaaccaaacaaattaggagtcatcatatccagaattc

SEQ ID NO: 197221 - DNA, 521 bp, Homo sapiens
gtttttcttgtgctgacacatgctgtcttgcctgctgccatgtaagacgtgcctgcttcacctgctgccatgtttgtaagtttcctgaggcttcccaggcatatggaactgtgagtcaaaactttttcctttatacattgcccagtcttgggtatttctttatagcagtgtgaaaatggactgttacactaagttaatttaaaaacattatataaaactacaggaagaagaggaaaaatggattttaagtgttcctttgttaattctgagagtatctcaccctaaaccctttgcaaaaattacacacatagattttccactaattgcattacaaattccataggaaagaatgcattttaagcatcatctttgcattgccacatacatttagcaaaatgacttacatacggtaggaactcaaaatttaatttaagaagtttttttttgacttatctctgagygaaaataatggattgctaaatgaaaaccaaacaaattaggagtcatcatatccagaattc

SEQ ID NO: 197222 - DNA, 575 bp, Homo sapiens
ttctgttattggtcgttctaacctcagatgcgtcctagcctctgtgttccagagcttccaatcccacagagaggtaaaaagaaccttaaaaatgtcattatgtcaagtagcaataaytttttcgaagaatttttaacgtactattttatttgattaaatatgagctaaaaacagtgattaaatgtaactgataacttctttccctttttgtataatcaggtgattattatttcaatcagtaatacctaggttgttcagcttcatgaaccatctccatgggtgtggcatatttctgcaaagtaacttcagcaaataaatctgcctatttggaaaatggttgtatttctaacaccgtctagtgatcagatcacgctgattttctacattaatataataatttatatgtatgtctatttcagagaagtcaggattatatcttcttagataagtatctcccttggagacttttttgcttttgctattagaaaagaacacatttatacatagtctgcatggtagtaccattcaggtcttttccatgtaccttagatcagtaattctcaacactgttcatt

SEQ ID NO: 197223 - DNA, 555 bp, Homo sapiens
tatgtcccttcccagtcaatctccattccctgcaaatgaagtaaccacttattttttccacctacaattaattttgcctgttctagaacttcagttaaatgtaattatgcagtatgcactacttgcactggcttatttcactcagtgtaatgcctctgagattcaacctcattgttctgtgtatcatattttccccttttcaatggtaagtatactctacagtagggatagaccacgactgtgtttgtttattccctcttgtcctgataatggttatttccagtttggggtattatgaataaatttaataaacattcatgtataactctttttgtggacatacgttttcacttatatgtctagaaatggaatggatgagttcataggtaagaatatgttcaatgtgataagaamttttcatacttttctccaaagagattgtaccatgttatattttcaccagaaatgtatgagtgttcttctggctacatattagtatccttgctaatatttggtactgttagtatattacattttagtcattctagtgtatgt

SEQ ID NO: 197224 - DNA, 574 bp, Homo sapiens
cagcaaggaaattggttaagtttgaaggtttccaggagtggtttgggaaaaaaacagcaacgacaaaaaaagaatcaaaacatgatttggtttagactgtgcttaaatacaatattatttcaaatccacgtaataatgagtcaaatgatctcctgaaattcagaataggaggtgggtgggaagagtcraggggaccctgtaggtcccctagggtgctgaatcacgcaggacattgagagggagtgtccccacagaaaacatgaaacataagccatatatttcaggaattagttttttgaggaagaaattctgtttgtctctggggataaacagcagaaacttactcaatggtgaataacatcaggaagacatctgctttggagcagctgtggccttgttatctctgatctttcattctgcctggtgtgtctcctccctgtgcttttcctttctgggtcttcccccgtcatcttgggctactagttcacagtgttctatcttttaattatgtttaaattgagagacagacaagatatagataaaatgagtgactacttagtgatagaagagactc

SEQ ID NO: 197225 - DNA, 466 bp, Homo sapiens
aaatttattaatgtgcacgggggagaatcacagagtaattatccaaawatcccaatggagcctagatacctatatagcctttgttcagagtggaaggggtagatggggaatatagtcaacactattttttaaatttaaatttttattggggtacatgtgcaggatgtgcaggtttgttacataggtaaatgtgtgccatggaggtttgctgcacctatcaacccctcaccgaggtatgaagcccagcatgcattagctatttttcctaatgctctcccttcccccaccccacccactgacaggatccagtgtgtgttgttcccctctgtgtgtccatatgttctcattgtttagctctcacttataagtatttggttttctgttcctgcgttagtttgctaaggataatggcttccagctccatctatgtccctgcaaaggacataatcttgttcctttttatggc

SEQ ID NO: 197226 - DNA, 448 bp, Homo sapiens
tgtttctgtcaaggaatcagcattcatctagctwttcccctgtagaccacatgttgtttttccctggatgcttttaagactttttatccaagtttgattgctcagtacctacctctgggcaaaaaagcctccagaaaccagaaacttatctagttttattcccctctgtcaggtgtagactctactccagcttctacctacttgagatattctatactgactccaggctgttgttattttgttctttcaaatattttgtccagagctataatgttttctgcagaattgaccagatagcagctactctctgtgaccaggagccttgatcttccagacttgctgatgggctcacaaagctcctgcccgtggccctcagttggcagtggcctctctgccttgaagttgccatgagtgtgtaaaacctacaggctcaaccttcctcattagt

SEQ ID NO: 197227 - DNA, 578 bp, Homo sapiens
tttctcagcaccagcctggagcctggtagctgcactgggtggctggacccagaagagcaataataatcattcagttcagctcccagaaagccacgtccctagggaaagggagagcataccacatcaagggatcaccctataggacaaaagaatctgaacagcggccttgagttccagctttttccactgaaactgtctacccaaatgagaaggaatcagaaaagtaattctggtaatatgacaaaacaaggttctataacaccccacaaaaccacactagctccctagcaatggattcaaaccaagaaaaacatgtctgaactgccacatgaagaattcrgaaggttgattattaaggctactcaaggagataccagagaaaagtgaaaaccaacgtaaagaaatttaaaaaacaatacaagacatggatgaacaattttccagagaaacagacatcataaagaaaaaacaatcacaacttctggaaatcaaagacacacttagaaaaatataaagtgcacacttagaaaaatataaagtcaacaatagaacaagtagaagaaagaatttcagagctt

SEQ ID NO: 197228 - DNA, 578 bp, Homo sapiens
tttctcagcaccagcctggagcctggtagctgcactgggtggctggacccagaagagcaataataatcattcagttcagctcccagaaagccacgtccctagggaaagggagagcataccacatcaagggatcaccctataggacaaaagaatctgaacagcggccttgagttccagctttttccactgaaactgtctacccaaatgagaaggaatcagaaaagtaattctggtaatatgacaaaacaaggttctataacaccccacaaaaccacactagctccctagcaatggattcaaaccaagaaaaacatgtctgaactgccacatgaagaattcagaaggttgattattaaggctactcaaggagataccagagaaaagtgaaaaccaacgtaaagaaatttaaaaaacaatacaagacatggatgaacaattttccagagaaacagacatcataaagaaaaaacaatcacaacttctggaaatcaaagacacacttagaaaaatataaagtgcacrcttagaaaaatataaagtcaacaatagaacaagtagaagaaagaatttcagagctt

SEQ ID NO: 197229 - DNA, 555 bp, Homo sapiens
gagtgaggtggcctgaatgacacctcttagaggactgtgaagtacaggcacagcccgactgcagggagggatgcacccatcatttacccatgggagcatctgtagraccatctctctcccacttcttctcccctcccccaccgcatctggccagatggactgtcctacagcaatcgtttccatctgtcaccctcttccctctcctttcataccagtcactatcttgggtaacaaatttatacaggacagtggtacagaaatacatctttgctctgagaatacagcaaatattaacttaaattattataactgaacaaataataaaacctgaattttaatatcttcatttgatgtctgaattatttgtctaaattttagtatcacaatagcctagatgtaaaataaaatacaaatattttcctccactaataagagacatatacagaaaagcaaacatcaaaaggtacagaagacatgaagattctgtttttctcctccctttggagaaaaagttgacaatatttattctcaaagttcacctttgactggagggaa

SEQ ID NO: 197230 - DNA, 525 bp, Homo sapiens
aatctcataatgaaatttatataggctttcagtgtctgtggatttgagaaaatgtatcttttctttttgctcctttgctccatgtccaggcctttatgcttcctgacaacctactgcttatggagtgggctgctgacctgctcctatgagctgaggacaagggtaactgtgggattgggctggagtttyttctgtactgatttcatccttaagacaccagcagtttgatgcatgagtatttctgtcttataaaaacaacaatggcaacataatttactgagctcctatcatgtgctagcattgttctaaattcttcaaatgcgtaatccgatttaattaatcttaataggcggaggcaaggggaaaaggggttaacgtctttcagaaggacatctaatatattttccggcaaattttttctattggcagaggcaaactgtgattctaagtatgacacagagtcctgagatgcaatgaagacaatctccatcaattctgtaagttcaaaaacccatgtataattta

SEQ ID NO: 197231 - DNA, 525 bp, Homo sapiens
aatctcataatgaaatttatataggctttcagtgtctgtggatttgagaaaatgtatcttttctttttgctcctttgctccatgtccaggcctttatgcttcctgacaacctactgcttatggagtgggctgctgacctgctcctatgagctgaggacaagggtaactgtgggattgggctggagttttttctgtactgatttcatccttaagacaccagcagtttgatgcatgagtatttctgtcttataaaaacaacaatggcaacataatttactgagctcctatcatgtgctagcattgttctaaattcttcaaatgcgtaatcygatttaattaatcttaataggcggaggcaaggggaaaaggggttaacgtctttcagaaggacatctaatatattttccggcaaattttttctattggcagaggcaaactgtgattctaagtatgacacagagtcctgagatgcaatgaagacaatctccatcaattctgtaagttcaaaaacccatgtataattta

SEQ ID NO: 197232 - DNA, 445 bp, Homo sapiens
aatacagtgacctattcatgagagaggctgacctgctattttaatagacttttaactgaatgcagtaagaagaagacagtagttctatagctactgtattagtcagagttctccagagaaatagaagcaataggacgtgtatacatagagagaaagagatttaatttcaggtattgacaacagttcatgygagaaaaacttgggggtttaaattaatcccttatagatacgcctgatattgctgttaccaaaaagaaacaacaacaacaacaaaatgcaaacaaagactgctctaggaaaagtagattaccttgagcaagggagataatagtttctctacattttttgctagccagattgtaatttccctgttttgtttggttctgagcacattttgagaggtcttgatgaagcacagagcttttagaaaaatatagcaagaaat

SEQ ID NO: 197233 - DNA, 446 bp, Homo sapiens
taatacagtgacctattcatgagagaggctgacctgctattttaatagacttttaactgaatgcagtaagaagaagacagtagttctatagctactgtattagtcagagttctccagagaaatagaagcaataggacgtgtatacatagagagaaagagatttaatttcaggtattgacaacagttcatgtgagaaaaacttgggggtttaaattaatcccttatagatacgcctgatattgctgttaccaaaaagaaacaacaacaacaacaaaatgcaaacaaagactgctctaggaaaagtagattaycttgagcaagggagataatagtttctctacattttttgctagccagattgtaatttccctgttttgtttggttctgagcacattttgagaggtcttgatgaagcacagagcttttagaaaaatatagcaagaaat

SEQ ID NO: 197234 - DNA, 582 bp, Homo sapiens
actacatatgccccagcactttgggaggccgaggtgggcggatcacctgaggtcaggagttcgagaccagcctgaccaacatgaagaaaccccgtctctactaaaaatacaaaattagccgggcatgatggcgtatgcctgtaatcccagctactcgggaggctgaggtaggagaatcccttgaacctgggaggcagaggttgcggtgagccaagatcatgccattgcactccagcctaggcaacaagaacaaaactccatctcgaaaacaaasaaacaaacaaacaaacaaacaaaaaactacatatgtccattctccatgccagatatcctgattgaatttacctgcctaggttcaaggcattcatatttattaaacctgataaattcattcattcaacagtcatttagtagacttgttgagaacttattatgagtcaaggttctcggcatatagcagtgaataaaacaaaaacagtaatcttatcctttatggagtttacatctaataagggaggcacacattaaataagataaataagtatagcatattaggaagtaataaatgctaaggagaaaaat

SEQ ID NO: 197235 - DNA, 582 bp, Homo sapiens
actacatatgccccagcactttgggaggccgaggtgggcggatcacctgaggtcaggagttcgagaccagcctgaccaacatgaagaaaccccgtctctactaaaaatacaaaattagccgggcatgatggcgtatgcctgtaatcccagctactcgggaggctgaggtaggagaatcccttgaacctgggaggcagaggttgcggtgagccaagatcatgccattgcactccagcctaggcaacaagaacaaaactccatctcgaaaacaaacaaacaaacaaacaaacaaacaaaaaactacatatgtccattctccatgccagatatcctgattgaatttacctgcctaggttcaaggcattcatatttattaaacctgataaattcattcattcaacagkcatttagtagacttgttgagaacttattatgagtcaaggttctcggcatatagcagtgaataaaacaaaaacagtaatcttatcctttatggagtttacatctaataagggaggcacacattaaataagataaataagtatagcatattaggaagtaataaatgctaaggagaaaaat

SEQ ID NO: 197236 - DNA, 540 bp, Homo sapiens
  misc_feature (1)...(540): n = A,T,C or G
nnnnnnnnnnnnnnnnnnnnnnnnnntcccccatgtctgtttctgtttcttcttctttcataaagacttgtcattgaatttaagactcactgaatttgaatccctcaactccagctctttccttgtgctactgctctggttccaaagggcggagaactgccaagaaaataaaaacattttcaggtgtcaatgttagattgttagtggggagagttaataattgcatgtattaagtgtcatacaaagagaaaaagggaaaacacatacatagaagtatagggtctgggttgccttctctacagctgacactaatctgtgctgggcttgtatgaggcacagtaggtcctcagagacatggaaagtggcttctgtgccgaggcggcttcccctctagttccaagaccaacatatgtaaaacaacctgaaatactatcagtctgtacataattaaktgctgtgttgtgtcgcagagcctgagtgctggagaatttaaagaaaagattgtattgaggccagtaactgtcagaaaatataaggctt

SEQ ID NO: 197237 - DNA, 458 bp, Homo sapiens
cttacagtgttggtgagaatgtaaattagcacagccatgtatgaaaaacatatggaagttcctcaaaaaattaaaaatagagctaccatatgatctggcaatcccacttgtggttatttgtcaaatggaaatgaaatcagtatattgaagagacatctgcactcccttgttcattgcagtattattctaaacagccgtgatatggaatcaacctaagtgtccatcagtgaatgaatagacaaagaaaatgtggtatatatacacaatggaatactattcagcctttaataagaagaaaattctgtcatttgcacagcatggatgaatctagaggacattatggtgagtgaaataagccagacacaaaaagatacatactacatgatctcacttatakatggaatcctaaaacgggagatgttggtcaaagggtacaaactttcagtaataagatgaga

SEQ ID NO: 197238 - DNA, 364 bp, Homo sapiens
agctggaatcaactttaaaaacaaggctttaaaaagctgacataaaactctaggaccagtagctagcaaaaatgtgattagaacagctgtctgggacattccaccaaaataccctcaccccagaggagaggcctaactcatttttggaaattgcaaaggtggatgaaacaggcctcaaragcaagagaaattttctgtttttctctctctctctctgcccctcctcctttctctctctctctgagtattattttaaaaatggatgtcatttttgtcttattcataacttatctatgtttgttttactataaatgtcttaaattacttgccatcaagttggggttatgttctaagaagattgaga

SEQ ID NO: 197239 - DNA, 526 bp, Homo sapiens
attatcagtctagaggaacctaaggagatatgaggactaaagataatgtggtttcctgaatgtaattctggaacagaaaagggacataaagtaaaaactaaggaaagctgagtaaagtacaaactttaggtaattatagygtaacaatatttattagttgtgacaaatacaccacactaaactgagatactagtaatagcagaaaatggtgtgggttatggaaactgctgtctttgcaacttttctttaaatctaaagctattttaaaataaaaactttactgaataagaaaaagattataaattataaccagaaaaactttaggaacaaatgagagagtaaacacactgaagactttgtggatgatgagggactctaaattttttagtagaaaattaaaaaaatgctaataattcagttccagaaactggaaaaagcctaacaaaagttaagattttttaaaaagggaaaatatttatttaaaaaaatagaaattaaattgtggcaaaacaggagacaaatcatg

SEQ ID NO: 197240 - DNA, 603 bp, Homo sapiens
taatttgtatgtgccctcatatttgatctatcagcaaatcttgctgctcctaccccaaaatttatctcacatctctctacttcttgtctcctccatggtccagttctagtccaagccacagttatctcttcccttcatgagaacagctttgttattgaactcttggctccmaccttgagtctttttcctctattctcatgaaagccaaactcttcttttgaaagcacaaatatgattaaataacttttctatcaccttaacattcttcaataacttcccattgcactttaaaataaaatctaaactcttccccatgtgccccacttgacatacactaatcctgcctatcaggcttttctcatctgagacaccttctctccctcgctcattatgctccagtcgcaggatttttcaaaaaaattattatccaatttttcaagctcattcctacctcagggccttgaggttgccctccttaccatttaatagaattcataattttctactttttagataatgtaatatctatatttcctgcaagactgaaagttccaataaggcaagaatgatatgttttgtttcctactctgcagttctgcattt

SEQ ID NO: 197241 - DNA, 603 bp, Homo sapiens
taatttgtatgtgccctcatatttgatctatcagcaaatcttgctgctcctaccccaaaatttatctcacatctctctacttcttgtctcctccatggtccagttctagtccaagccacagttatctcttcccttcatgagaacagctttgttattgaactcttggctccaaccttgagtctttttcctctattctcatgaaagccaaactcttcttttgaaagcacaaatatgattaaataacttttctatcaccttaacattcttcaataacttcccattgcactttaaaataaaatctaaactcttccccatgtgccccacttgacatacactaatcctgcctatcaggcttttctcatctgagacaccytctctccctcgctcattatgctccagtcgcaggatttttcaaaaaaattattatccaatttttcaagctcattcctacctcagggccttgaggttgccctccttaccatttaatagaattcataattttctactttttagataatgtaatatctatatttcctgcaagactgaaagttccaataaggcaagaatgatatgttttgtttcctactctgcagttctgcattt

SEQ ID NO: 197242 - DNA, 412 bp, Homo sapiens
ctatttcaacaactgagcagaagtcattcctcctattctccctgtgatttcctcttctttttaaacacattcattccatctgttgccttcccatggggtctcctttactcctctcccaagttcttcctccatcatttgatgtccttttacctaattcttcccttargctctctacccttaattatattatgtaatatctaactgtcttgcttggggatccagatgtgactggattacataaatacagagatagccacttctgatttacatgtatggcatacatgcatccctatgactttgattaaatttcatgtttcattttaatggatttgaataaatcactttaacgaatgttgtattcatttaccttaatttgattagaccattgcatatgagagaaatctgttctgaa

SEQ ID NO: 197243 - DNA, 458 bp, Homo sapiens
gtccctacaccgagagtttctgcttcagttggtcttggttggggggggtgggggcaaaaaatgtgcatttttaacaagttcccagatgttgctggcactgcaagttcaagggccacactttgagaaccatattgcaggaaaagactagcatggggagcaggatgatttaattatatgtattatatatacatatgaataagcactgmctcaaaactcctgaatgggtcatctatgggactctgtatcaaatctctctgtgttcttatggggctcacagacactattttactgtcactcaatgacatctaacaaacctatttctctcactgtgagacacgaatgagattacacatgtgaaaaattcttcatgaacactttggagttagctaaacaagataaactaaggcccagagagaataaatgatccatccaaagttaaatggtgggtaaacaaaaaa

SEQ ID NO: 197244 - DNA, 458 bp, Homo sapiens
gtccctacaccgagagtttctgcttcagttggtcttggttggggggggtgggggcaaaaaatgtgcatttttaacaagttcccagatgttgctggcactgcaagttcaagggccacactttgagaaccatattgcaggaaaagactagcatggggagcaggatgatttaattatatgtattatatatacatatgaataagcactgcctcaaaactcctgaatgggtcatctatgggactctgtatcaaatctctctgtgttcttatggggctcacagacactattttactgtcactcaatgacatctaacaaacctatttctctcactgtgagacacgaatgagattacacatgtgaaaaattcttcatgaacactttggagttagctaaacaagataaactraggcccagagagaataaatgatccatccaaagttaaatggtgggtaaacaaaaaa

SEQ ID NO: 197245 - DNA, 328 bp, Homo sapiens
acaatcctgttttcaaacatgttaaaatgtaatagattttctcatttcatatttaatgtttctttttaggattaaagtaatttaaggtatccattcaagcctccttaagaacacttttccaaaattatactaccactgttattttgaattamcccagcaagaaatgtgctagcaagaaaagccagctttgatggatatttccaaggacttctttgcaggagtttacctagtcattttattttgttatctggaaggaaataactgaatttagttttaatttttttaattgtgaaatatgtcacctatgaggaatagtttattgtgatag

SEQ ID NO: 197246 - DNA, 647 bp, Homo sapiens
agttttaatttttttaattgtgaaatatgtcacctatgaggaatagtttattgtgatagcattttggtgkgtcagcttgactaggatgaattacaatccctagaattacatttctagtcgctttcctgttggggtgggctacaagggatcatctcccaggagagttggaggactgaagtgaggcactgacagtttgaggcataaacacccctactgtctattagtcaaccaaacactaatctaggctctgctgtgaaaggactctgtagatgtgatcatagtcctgagtcatttggttttaaattaatcaaaaaagagattatcttgggtaggcataacttaatcagttgggattttttaaaaacagggcctaggccttccctgaactcggagatttcaaatggcagctggacttgcaacttttctccctccaaagccctctctcatctttcttcctgactgaaacctatggacaagaagctctctcttgttccctgggattctggtttgctcatgattttccctttctccttgcttgcccaacagactttgattagcccctgctattgcattagccaatttcttggaatatgtatttgtatatacacagacatatatatatacacacacacacacacatatatata

SEQ ID NO: 197247 - DNA, 647 bp, Homo sapiens
agttttaatttttttaattgtgaaatatgtcacctatgaggaatagtttattgtgatagcattttggtgggtcagcttgactaggatgaattacaatccctagaattacatttctagtcgctttcctgttggggtgggctacaagggatcatctcccaggagagttggaggactgaagtgaggcactgacagtttgaggcataaacacccctactgtctattagtcaaccaaacactaatctaggctctgctgtgaaaggactctgtagatgtgatcatagtcctgagtcatttggttttaaattaatcaaaaaagagattatcttgggtaggcataacttaatcagttgggattttttaaaaacagggcctaggccttccctgaactcggagatttcaaatggcagctggacttgcaacttttctccctccaaagccctctctcatctttcttcctgactgaaacctatggacaagaagctctctcttgttccctgggattctggtttgctcatgattttccctttctccttgcttgcccaacagactttgattagcccctgctattgcattagccaatttcttggaatatgtatttgtatatacacagacatatatatatayacacacacacacacatatatata

SEQ ID NO: 197248 - DNA, 452 bp, Homo sapiens
tataaatgtttaaatggtcaatcagatagcagaaatgtacctaaagtttttattgtcttcccaggattatgggtttgaaaaamaaaattttggtcataacagtcaccacacccacccacccccacatatatatttaattcgaattattttatctcttctgttataaatcatggaatgcagagcttttaataatgaaagacccaggctctccatgagtccacaattaacattggacttaaagcctcttaaataccaattttgtttatccaatttaggtgcatagaactgtttattgcatgggttgtcatgagtaatttgacttgaaccatgtgagttaattccaattgcatatctaaacaatttcagtattggctgatttagcacaaaaatccggcaaagaattttcttaatattcaattaatttttgtgctgtttgggttagtagttttata

SEQ ID NO: 197249 - DNA, 584 bp, Homo sapiens
tatatttccatttttgtgtgttatctgtgatttctttcagcattgttttgtagatcttcttgtagcggtctttcacctccttggttaagtatattcttaggtattttattttattttgcagctatagtaaaaaagattgatttcttgatttgattctcaacttggtagttgctggtgtatagcagtgctactgatttatatacatagatactgtaacctgaggctttactgaattcatttatcaaatctaggagtcttctggaggagcttttaggtttttctaggtatacaatcatatcattggcaaacagaaatagtttgacttcctcttctrcaatttgaattccttttatttctttgtcttccccgattgctctggctaggacttccagtgctgtgatgaatagaaatggtgaaaatgggcatccttgtcttggtccagttcttgggggaatgcttccaacttttcctcattcagtatgatgttggctgtaggtttgtcatatatggcttttattattttgaggtatgtttcttctatacctagtttgttgagggttgttatcataaaggcatgctagatt

SEQ ID NO: 197250 - DNA, 341 bp, Homo sapiens
ttaagggaatcatgtttattgatttgcatatgttgaaccatccctgaatctctaggatgaaacccacttggtcatggttaattatctttttgatgtgctattatattaggttttgctaatattttgttgagaatttttgcatctatgttagtcaaggatattgatctgtagtggagttttttttggtttttgktttttttttgttgttgttgttacatgctttcctggctttgatatcagagcaatacaagttttatagaatgagttagggaggatcctctctttctcaatcttttggcatagtttcagtaggagcagtggcaattcttctttgaatgtct

SEQ ID NO: 197251 - DNA, 388 bp, Homo sapiens
atgggttatggggaacaacagtttgtattaggtcccttaattgagcctgagaaactgaggctccactagctttaagaagctgtttgaacacttttatatactgtttctgttgagctgataactgttgtcccatgwtgaaaccctagcttgaaaattccctcgaacttggaaatcccgagtgggcaccagtgacttatggactgcgcagtctcttctccttcatttttgaggattctgtcatgatttattgcagtgttcctcacacagggcaccagctgccgggtccatcccacagaccctggctgagtgatggatgaaaggagtactcagacacaagcatccagtgaaagagtgggctaggggactgccagcactaggggccaaagag

SEQ ID NO: 197252 - DNA, 545 bp, Homo sapiens
ggggaacaacagtttgtattaggtcccttaattgagcctgagaaactgaggctccactagctttaagaagctgtttgaacacttttatatactgtttctgttgagctgataactgttgtcccatgatgaaaccctagcttgaaaattccctcraacttggaaatcccgagtgggcaccagtgacttatggactgcgcagtctcttctccttcatttttgaggattctgtcatgatttattgcagtgttcctcacacagggcaccagctgccgggtccatcccacagaccctggctgagtgatggatgaaaggagtactcagacacaagcatccagtgaaagagtgggctaggggactgccagcactaggggccaaagagagttagcagtcccaatgagctggggccacttttatttattcagtactggtataatgtcaaagacctggagccaacacaatctgtgggtaattaacattgtcatcccccccttgcaggtagcagtcttatgcacggatgaccaaaggttggtctctggatgacatca

SEQ ID NO: 197253 - DNA, 571 bp, Homo sapiens
tgagggagtaagcaggaatggggttcagctaagccccatgaaaggcaagagattttcctttctgccagggaggcccaggagaggcagcagagccggggaggactggcaggtccaaggtgttcttgaggtccaaaggaattgtgacgctctggatgagagcggaaggaaatagcagtgactggaaagaactttcttaaatcaaaaaaagaaaaaccagacttcagttcagtagtggttggtcagagagagcaagatggtttacttgtgattttttatagatctccaaaaatttactctgaattatatctcaagcccctaaactttaggaagtatttttctattactttaatagccatgtttttaatattaaacatggacacatgtgttttatgtttctataggaaaaggataatttamtaggtctttttctattcctgcttctccctgtacctacagttgaagagtttgactgtatggttgacttatcacaagcagataccaggatgccaagtagggttctgaggaagaacccattaactttgatctgactgtccttgcccaaaataagctt

SEQ ID NO: 197254 - DNA, 518 bp, Homo sapiens
ttgactggtagcattcccgtcttgggttcttgatgcagagaaagcttggatcaaagtgaaataaacatcttcctacagataggaccatttcagaaatgcagtgccaggcatttgaagatttcaataattttaaaagataatgagtctgtggaaaatggaaaattattagctgttaggtataaattaagaaattataatgtcacaaaagatgagttttcagaagtggaatttcctaaaatcrtgaaatttattcctcatcagtcctctctctttttcctaccctgtcctatagcaccaagtcaccagaacttagaatgtggaaaaagaagactgtctttggggcagagtcggtcttgttcacctttctcctatatggaacagtggtgattcatgccttcctctgctgtcacactgtcagcatccactaatcatagccccatgatcacaggacttgtgcacataaacagtttccaggaggtacagaacagcccagggacccctcaggcgtaaacactagt

SEQ ID NO: 197255 - DNA, 385 bp, Homo sapiens
tttcatagtttacatttagcatccaaagaaacatatttgttcatctacaactctctcgaaaatagcttcctaggttttctctaccactgacggaagaacagtcactcttctcagacaggctctcctcgggtggaaagtgaggtgcaaagtgagagccaagtaaaggcgctcctgctccggaagcctggtcagccgtgggccagggttgtccatgaggcgagatagacacgtcccagcacccatttcctggaaacagaccttactgcctgggccctcgccacagctttgactttaggaaaacatgatytgatcctagaaatcattcatttgggaaaacagctacaacaaaaacttagcttggaaccaccagatcttctttgaatgc

SEQ ID NO: 197256 - DNA, 529 bp, Homo sapiens
  misc_feature (1)...(529): n = A,T,C or G
tctttttntgttcttcctttttgttccctctccgtcctccttttaaaaacctcagccaccttggtcttagttgaagttgagctcagtttatactggattgtctcccttactgcagctgtctgaatacaatcygtcttgccctctttaacaagtgttcagtcctgattctctttaaaaattactgaccctggtcatcccagcccccaccatgcatttaagaaaatttgcacccaagcccacatgtgtcactagcttaaatactgagaaagaaaagaaacttcatctgaggaatgtgagccccctttaattatcaggactaattacatcagtcacctctcattcctccttgaactaaataattactgcttgaagccacttgctaggtgggctctggactaactgatgtccagtagccataaaatgccatatgctggacactatgtcctctaccctatagttcaacaatgaatagccaatcactgaccaatgttaccgctataaaccagtgagaattctaggcaaacaactt

SEQ ID NO: 197257 - DNA, 616 bp, Homo sapiens
tttacataattggagtcctactttgatagttttgtatcttgtttccagcatggayttcttaatgtatgatgaaagctctctgcctagattcattttccatataattgaactatttgattcccacagagtcccctggaaatgaattagccactggggataatgaatagaggacaagagaacatgccaatgaactgcatcaggtcaaccttgaagtttgcctcaaggcccacataacccacacggtgatattcagctaaccagaacagccctgcgcacagatcagagagtattgtggtggaaaatagaagggctcctttactcccaagtctacccatcagcctagaaaccagtagaatcattatcactgctggttttgctcagccaatacgcttcccatggtatgaaatcaactttatgacttctggatgtgatgatccacaagccacctctgaaattaacagctaagctgatgatcctgcaaaactttatctgctttggttgcttttagttccttttttctagttgatcttgaaacctatatagctaaaagtcatgagctaaacaatatataactaaattcccactgcctgacttatagatagaatctataagttac

SEQ ID NO: 197258 - DNA, 602 bp, Homo sapiens
tagctgcacacataggattgatgaggacattagctcaggcatgttcttccaaagttgtggaaatgataaaacaatgtaaaaataaaatgggaaaaattgacagaaaaagaggaaatttcaccttccgatagytgcacttcctcaaacagacatcagaacagatcaaagacaatgaacacaaattttggctttaaagtttctaattgaacacaaatttgaaatgatccaccaagtatcagttaaaatcaatgaacagagcctaattcatagacataccctagtgaatgtttgaatttctagaataaagaaaacaagtattcaacaaagatgtaaaagtcatgctggcttcggattgtcttctgctaagaacagaaagcagtggagagcaatcccccttaggtgtgatggtggagaaagcatttcttcctgcagagggttagcacgactgtgggtgtggggccagccaaggtaggaggcaactcccaggaccttggggcatcacacacttcaagaaccctgagcacagaaccagctgcaaacctgtcaggctggtagaggaaggggttcctgcagtggcccctgaagccacagtactggggcca

SEQ ID NO: 197259 - DNA, 536 bp, Homo sapiens
tttttctaataacgtttttcagttacaagaattatctatttcaattcagtctcctaaacagggacaaaagagtgaagcacaagatatgtttttaagaaaatacctcctctcattttattctgaaagttctacctagtccattaatacagaggtgttaacatagtgatcaggaatagatacaagagtctacgagggtgtaagaaattggggctaattttagatgcggttaaagtattgatttatgagtgcaggtgcttgcggcctggaccactagcaccggggacgcagccctggagctgagaagcagcagctggccgctgcagcattcagggtacacctggtagggctacaggcccttggcrtggcagaggaggagaggaatcaagacctccgtgattctggggctgtgcagaggagtctcccctccctgcaaggggaagtttggagaaaatcagttacatttttgacgtgatgcattttgaaatcgctgttggacatcggagtggagaggtcaggaaagcagtgtgtgcaagagc

SEQ ID NO: 197260 - DNA, 607 bp, Homo sapiens
atgtgcttggattacaatgtttttgttttcataataaaacttgtaattgtggggtattagataacaccatgctgtattcttaaatggtctttcagagtatcatttcatttgtgtctrtatgataatcagatgtcaatggcagatgtcaatggtttccatttgtacaggattcaacacaacttatggcagtaaaataagcccttctaaaatttcggtgaattatcagagaggttcatcccggggcccagctcaaatgcaagtgtctccatttgttgaattaggaagtctatacaacaccacaccaacccatggcacttccactgtctggaatgcactttctagatatggaacttctctcccatcccccagaaatatctattcacaaatgttctagcctactgcacttaaccaccagactagctgctggtttcttccttgcgttgtatttattcacagttctccaatctatgtttattcattcgcttatttacatttgtgtatctgtagcctgtttcacaatgcattgcccttcacaaccacttggtatcatgtatttgtccttgttgctagaggcaggctcatactggctttgataattgatcatgta

SEQ ID NO: 197261 - DNA, 352 bp, Homo sapiens
aaaaaaaaaaaaactggtttcctaagatacattttcatttcactaagagtaaactaaaaatatgttgatgtgtttgtgcacatttatttgttcatgtggacatgtgtgttttcctagtaaggacctagtacaaaatcatttttaactaagagttcaaatgagcaaaagtttttaaagagggactaaaacaagcacgaaaaaaakcaaattttgtctctatggaagaaataatcttcatcaaaagaaaacgcctgccagcttgaaaactatcctgccaaattaatatcctgtctttctcagtgactcccagggagtgctatgcaggaataggagcccttcttgtagtttatac

SEQ ID NO: 197262 - DNA, 628 bp, Homo sapiens
aataacagcaatggcatgacgtataggtggaaataatttgaaatactctgttaaaaaaatacactatagtcccagcacggtggcttatgcctataatcccagcactttgggatgccgaggcaagtggatcacctgaggtcaggagttcgagaccagcctgaccaacatggtgtaaccctgtctctactaaaaatacaaaaattagccagatttggtggcacacacctctaatcccagctacctaggaggctgaggcaagagaatcacttgaacctgggaggcggaagctgcagtaagctgagattgctccactgcactccagcctgggcgacaaagcaagactccgtcttaaaaaaaaaaaaatacactataartgatgtggtatgatgttatttgaatacagatttagattagagaaaatttaatttgcaaattccagacaaactactattttctaaagaagtataattcatatattaacagagcagaaaaaaatggaataatataaaattctcagtaaaaaccaagaaggcaataaaaaaggagagggcaaagaaaacatcaacaaaaactcttaccaacactataaatgaatttaactatgtcagtaatcagctttagtatgaac

SEQ ID NO: 197263 - DNA, 520 bp, Homo sapiens
tttgtttggtgaggtcatgttttcctgaatggtcttgatgctgatggatgttcatcagtgtctgagcactgaagaattaggtatttattgtagcattcacaatctgtgcttgttgctactcatccttaagaaggttttccaaatattcaaagggaactgagtattgtgatctaaaactttggtcactgcagccatatctgcattacaaggcaccccaagcccagtaacactgtaacttctgccaacttgtaaaggtactcccttggtggtcttagataacatctgggagggttccctggattaccaggcagagactcttattctcttctattactttttctcaaacaaacaaaggctctatctccatgctgagctgtttggagctggagcacgggtaacacaagcacccttgtggtcacaaccactgagactgggccrcgtcagacatgaagccagtatagtactgggtcccacccaaggtctgttgtgaccactgcctggctactgctgatgttcatcc

SEQ ID NO: 197264 - DNA, 580 bp, Homo sapiens
tgctctcatcttcaagtggtcaagagctggtccctggggcactgattctctggcttccaggctgcatatgattgcacagagtatgtgatgaaagtgtaccttgctaatcagtcagagatgtcctagggcagaaagacggaggtgcctaatgcctgtctgatgcaaggtcttgctatgtcatgcctgaattaggccattcatgactgacatggctgaaataagaggtgaagttcaaaggatttcaagtggtcactgaaaatgtataattggtttattatagtatctagccttgcattaattaaaataagcacatattactcttagaattagaaagtacacacacacatatttatatacatatacttgtttggttttgcagaatatctcagtatttttaygacatttacttcttttgattcacgttgaaagtgtaactaacaagtgagccacaatgggcatctttcctcctcaactattcaatcaccaaagccaatcaattccacctcttaagcagtgattggaacttcccctgctgtcacatctgttgactcttctttagttggggccttcataagtgcac

SEQ ID NO: 197265 - DNA, 546 bp, Homo sapiens
ctcattttgctttatttctgtcatctccttattatatctcctggcttttcttttttcttcttcyttgtttctgcctcctcacaccacctacactggtttctctccctgggtcctgtgtggggtagaggctgctctggcttccagatggccagtagatcaacaaaaagctattagtcccctagcagaggaagaagtcaagctgttgagatgcttggggagcatctcaaggccaggcagaaaatgaagtggtcaggaaggaagtggaggtggtgtttaatggaacaaaaataaaataggtgagaaaaaatgaaatggaaaaacagagatttacgacacaagagaatttagttggaatgagattgtcatcagatcagctggggggagagaatggaaaaacaagcttgttaaagtgaattctttctcataaccatgagctttttatattcagcttgcctgcttggcttctcaacacagttttgttctttgataaccattttgtttgatccttcccttctcaccatacttcgctatttacccagccctgtc

SEQ ID NO: 197266 - DNA, 422 bp, Homo sapiens
gaattcaacacacatcacacacaactccccmcttccacagcattggatgattttagctactggtgagaatctcatcataaaaaccatttctttccatgtctctcctttccatcaccaactccaccatccccacagcccaccctttggaaacattctttacacccaccccgtgcatttaaacctggtattaagagggtacaacccagctggaaatttccaaaggtaatttcactgagtcctcctgcatgcttcatttcaatacaaaggggcagcagcctgtaaaccaaagggacacagcaaagtttactgcacacctcgctgacctgggatgttgcaggtgactctcagcaagtccctctgttatactttacctcagtttcctcgacggcacaatgccaaaggatctttgcagttggtcctgg

SEQ ID NO: 197267 - DNA, 422 bp, Homo sapiens
gaattcaacacacatcacacacaactccccccttccacagcattggatgattttagctactggtgagaatctcatcataaaaaccatttctttccatktctctcctttccatcaccaactccaccatccccacagcccaccctttggaaacattctttacacccaccccgtgcatttaaacctggtattaagagggtacaacccagctggaaatttccaaaggtaatttcactgagtcctcctgcatgcttcatttcaatacaaaggggcagcagcctgtaaaccaaagggacacagcaaagtttactgcacacctcgctgacctgggatgttgcaggtgactctcagcaagtccctctgttatactttacctcagtttcctcgacggcacaatgccaaaggatctttgcagttggtcctgg

SEQ ID NO: 197268 - DNA, 338 bp, Homo sapiens
agaattccctgagatggtaggactggaatgatgcatctacaagccaaccattgccgactactgctggcaaactcccgggaggtaggaaggggcaaggaagtatttccctaaaagtttcagaggtccatggccctgtcactaccttaatttcaaacttacagcctctagaactgtgtaaaaamtaaacgtctgttgtttaagtcactaggtttgtggcactttgttgtggaagctctaggaaactaacacatgatgttacaaagagtagaagttatcctagaaaaagatgatgggccagtgaagaaagattaggagcaagacagagaaactggtgaggc

SEQ ID NO: 197269 - DNA, 573 bp, Homo sapiens
tataatgtgagaaggatgagattttggggtccagggggtgtaatgatatagtttggatatatctcttgcccaaatctcatgttaaattgtgatccccagtgttggacatggggtctggtgggaggagtttgggtcatagggaaggatctcttatagtttggtgcagtcctcaccaaagtgagagagttttcacaagrtccagttatttaaaagtgtgtggcacctccctgcaaacccctgctcctgctctgccatgtgagatgcctgctcttgcttcatcttctgccataagtcaaagctccctgaagcctcccaagaaccaaagcagatacctgtgccatgcttgcacaacttgcaaaaccataacccaattaaacttctgttctttgtaaattacacagtctcaggtatttgtttatagcaatacaagaacagcctaacacacatagtaaatattacatgagagtcaagactggaactcttgctgcttagctcctaatatcagatctctttgcatataatcaatatgaatttgtgaataaattatatatttggcttcaagacacagcaact

SEQ ID NO: 197270 - DNA, 573 bp, Homo sapiens
tataatgtgagaaggatgagattttggggtccagggggtgtaatgatatagtttggatatatctcttgcccaaatctcatgttaaattgtgatccccagtgttggacatggggtctggtgggaggagtttgggtcatagggaaggatctcttatagtttggtgcagtcctcaccaaagtgagagagttttcacaaggtccrgttatttaaaagtgtgtggcacctccctgcaaacccctgctcctgctctgccatgtgagatgcctgctcttgcttcatcttctgccataagtcaaagctccctgaagcctcccaagaaccaaagcagatacctgtgccatgcttgcacaacttgcaaaaccataacccaattaaacttctgttctttgtaaattacacagtctcaggtatttgtttatagcaatacaagaacagcctaacacacatagtaaatattacatgagagtcaagactggaactcttgctgcttagctcctaatatcagatctctttgcatataatcaatatgaatttgtgaataaattatatatttggcttcaagacacagcaact

SEQ ID NO: 197271 - DNA, 573 bp, Homo sapiens
tataatgtgagaaggatgagattttggggtccagggggtgtaatgatatagtttggatatatctcttgcccaaatctcatgttaaattgtgatccccagtgttggacatggggtctggtgggaggagtttgggtcatagggaaggatctcttatagtttggtgcagtcctcaccaaagtgagagagttttcacaaggtccagttatttaaaagtgtgtggcacctccctgcaaacccctgctcctgctctgccatgtgagatgcctgctcttgcttcatcttctgccataagtcaaagctccctgaagcctcccaagaaccaragcagatacctgtgccatgcttgcacaacttgcaaaaccataacccaattaaacttctgttctttgtaaattacacagtctcaggtatttgtttatagcaatacaagaacagcctaacacacatagtaaatattacatgagagtcaagactggaactcttgctgcttagctcctaatatcagatctctttgcatataatcaatatgaatttgtgaataaattatatatttggcttcaagacacagcaact

SEQ ID NO: 197272 - DNA, 590 bp, Homo sapiens
gaccggatttgtatattgaagagcctggagatttctaaggcccagtgtccccttctgtgaaatagaggtaatactcacacctcaaggggctgttgtaatacattttcgctaagcgcttgctttggagaagtaaaaactgatgaaacagctctcatttttctcttacaatatgtcctgatgactttctttatgaccagaagggatacttaaagtaaggttcaaataaaccatttccacaggctagccaacatcccaagaagtcatgccacagggtgtggcaaagaaaccagtgtgtggcattcactggaagaatatttttagaggaaccaagctctgaagaatagtaggtagcgggtatctttgcaggcaaggtggcatttaaataaacattctcaaacacktcctttatgcaatatcattaatcacagagtacactaatccttaattatttcctgttttcatttgccctgtaacagggaattatcttcaactactttacggcaggaatcccaagttttggggcagtagaacctaaggtgcacactagggctatgaggcatatacttgggtgccaggatgtttttgagatc

SEQ ID NO: 197273 - DNA, 580 bp, Homo sapiens
caggcataagccaccatgcctggcccagaaatatcttaaaatgaaagcctctatgtggtgttttcagtaaccctatttttctacactgagtargtttactattgttacctgctgcatgactgaccaattttgagaacggaacaattaatccaaaatcctacttgctccaattgacccctgacaactggttttagtttcacggaaagagagggggaagatgtttgttaagctctatggagttggctaatgtctaaagacaatcctctcaaaaaggtgtgaagatgttttatcacagctgtggagatgaaggggagatttattatggttactaatgctatttctgtcaacgtctctggaattctaattagattattaaaactttgcaaatcattacattacatctcgactacacacctcactgcgacaagggtacttttgaaattagaggatcttgatgtcataggtaatgatgcagtgcagataatacagttgcagggaaattcttccaataaaaaccagttggaaaagacagaacccatttatcttactttctctcccggttttatgcctgaggataaga

SEQ ID NO: 197274 - DNA, 507 bp, Homo sapiens
tccctctatccctgttacatgtgcctttacaacttgactttgccctcctctatggaaagtgtacaccaattattccattctttgaaattgggcttgtccatatgtcttgctttagtgaatggagaattagtgaacatgatgcagacacaagctcataaaacactcagattctttggaatcytaagatcaaatgaagaattccaagttagcctattaaaggatgagcgactacaaggagtagacataggtagtcctagctaacgttcttctagactcactggcctgccatcaccagacaggtgagtgagtccatttgagaccatccagcctcagtggaaccatctgcagtccacagagatgggctgaactagccatacccacaactgaccagccaacctactgacccataaaacgatctgttttaactaactggaatcatttggtacacagcaaaatttagccattagtttccatgagttgtatgcaaaggtaaaaaatgagaaacag

SEQ ID NO: 197275 - DNA, 490 bp, Homo sapiens
ctgggaagtgtagtggggagttttagggggaagtggggatgattaatgggtaccaaaaaatagaaaaaatgaataagacctactatttgatagcacaacaggatgactatagtcaataataacttaattgcatatattaaaataacttaaagaatgtaattggaatatttataacctaaggaataaatgctttaggggatggataccccattctccatgatgtgcttatttcacattaactgcctgtatcaaaacatcttatccaccccatacatatatacacctactatgtacctaaaattaaaaaaaaataatattcttaagaaaaatttttaaaagacttaagtgtaagacctaaaacaataaaaatactaaaagaaaatctaggaaacaccaactctgaacatargcactggcaaagctttcatgaacaagactccaaaagcaattgcaagacaaacaaaaacagacaagtggaaactaattaaac

SEQ ID NO: 197276 - DNA, 318 bp, Homo sapiens
tgctaatcagtaaaccgatttacaccttaaggaaccaggaaaaggagaggaaactgaacacagaatcaccataatgagggaaataaattaggaaatagaaaaataatttaaaagaaacaaaggttggttctttgagaagatcaaaaagggaacaaactttagctaaattgactaaaaatgaaagagaggacycaaattactaaaaatcataatttaaaagtgaggatattactattgattttatacaaacagaaagaaagataacaaaatactatgaacaactgtatgccaacaaattggataacttagatgatacta

SEQ ID NO: 197277 - DNA, 400 bp, Homo sapiens
ctactaaagctaaggaaaaaccyactgtaaagaagtgggcataagctttccctgaaactcaaacaggacagggaacgttttatgtccccacaaactagaataaaaaactttatagtacataggtacatcaggtcagatcttcaaagggatattacctttgtagtcaggcttaactagtccaactttaaagattcctctggactttctcaaattttaaaagcatccgactgattccaattactttatttgctggaaaaaaaatccaaaacttaagaataaaacaacttccagcaaccaaccaacaacttaaagtccaaaataagttctcagtttaaaaaataaaatgaaactacttttcatgcaaagaagcagaaaaatatcacccaggggaaaaatctgt

SEQ ID NO: 197278 - DNA, 400 bp, Homo sapiens
ctactaaagctaaggaaaaacccactgtaaagaagtgggcataagctttccctgaaactcaaacaggacagggaacgttttatgtccccacaaactagaataaaaaactttatartacataggtacatcaggtcagatcttcaaagggatattacctttgtagtcaggcttaactagtccaactttaaagattcctctggactttctcaaattttaaaagcatccgactgattccaattactttatttgctggaaaaaaaatccaaaacttaagaataaaacaacttccagcaaccaaccaacaacttaaagtccaaaataagttctcagtttaaaaaataaaatgaaactacttttcatgcaaagaagcagaaaaatatcacccaggggaaaaatctgt

SEQ ID NO: 197279 - DNA, 220 bp, Homo sapiens
caggcttaactagtccaactttaaagattyctctggactttctcaaattttaaaagcatccgactgattccaattactttatttgctggaaaaaaaatccaaaacttaagaataaaacaacttccagcaaccaaccaacaacttaaagtccaaaataagttctcagtttaaaaaataaaatgaaactacttttcatgcaaagaagcagaaaaatatcacc

SEQ ID NO: 197280 - DNA, 481 bp, Homo sapiens
ttagttaccatggcccctactaaaatccaacctcatttccctttccagtattgtgatcagagtttgtcctacctctatcattttgcagctagagattaagaattgagttaaatgacacacagtatattatatagagttaaatacagtattgaatgaatgcacataaatgtatacatacatatacatatgtatgttattaaaattgaaacaaatctgttgctcagattttacaaaatcaacagccaaacattatcaggaaagttgattaattcttaagttcactgaagaaataaggttgwcttgatttatagaaagcaaattgttgacttaggttttttgctgaagagtcatttagcactaggaaaattgcttaatattttaatggaagagaaatgttagaatatcctttcatttttcaaaatccaatttaaatattgtgacagaatacattatacccatgataagatataatactatttct

SEQ ID NO: 197281 - DNA, 481 bp, Homo sapiens
ttagttaccatggcccctactaaaatccaacctcatttccctttccagtattgtgatcagagtttgtcctacctctatcattttgcagctagagattaagaattgagttaaatgacacacagtatattatatagagttaaatacagtattgaatgaatgcacataaatgtatacatacatatacatatgtatgttattaaaattgaaacaaatctgttgctcagattttacaaaatcaacagccaaacattatcaggaaagttgattaattcttaagttcactgaagaaataaggttgtcttgatttatagaaagcaaattgttgacttaggttttttgctraagagtcatttagcactaggaaaattgcttaatattttaatggaagagaaatgttagaatatcctttcatttttcaaaatccaatttaaatattgtgacagaatacattatacccatgataagatataatactatttct

SEQ ID NO: 197282 - DNA, 532 bp, Homo sapiens
tctctcactttgtatattgcctgttcactgtgatgatagtttcttttactgtgcagaagctctttagtttaattagatcccatttgtcaatttttgcttttgttgcaattgctttttgcatttttgtcatgaaatctttgcctgtgcctatgtcctgaatggtattgcctaggttttcttctagggtttttataattttaggktttttttttttttttttttttttttgagacggagtctcgctctgtcgtccaggctggagtgcagtggcttcaatccatcttgagttaagtttttaataaggtataaggaaagggtccaggttcaattttctgcatatggctagccagttctcccagcacaggtttcctttttatatttaactatggcatgcattttcagttaatttttgtgtaaagtgtgctgaggcttggtttaaggttgatttttattgcttttattttttacatatggatgttcagttgcttcaatattatttcctgaaaaggttattcttcctccattgagttgt

SEQ ID NO: 197283 - DNA, 554 bp, Homo sapiens
ttacatatattgcatatgtaatatttcatattctctataataagaaaccaaataatcaaattagtccctgaagcttttcacaattttttctagactttttaatagaaatccccttttatttttactcagcaagtattttctgaatgcctctaacatacaaagttttaggtagggaaatagaaaattaaaaggatcataacccaaggaacttaaagtatagagcagcaccgttcaatagggctttctgtgataatgaaatgttctatatccacaccatccaataaagttgccacctgtgcatattcagcactagagatgtggctcatgtgattgaggaaatagatttttaactttactaaaatttaaatagccacatgtggatacttgttgttgtattagatatctcaggtctagaaggtgagagaaactgcataatgtttatttttgtcacttaaaatttttcaaagtttgtcagtgtttcttttatgccacrcaattgtatgtctctctttctctgtctttgtctctgtttctctctccctccctctctgtct

SEQ ID NO: 197284 - DNA, 579 bp, Homo sapiens
ttttctgaaattaggacattagaagtatatggaaatttaaatttgtttttgtatcaatttgctttttaaaataaatacatttacatgatacaaaattttaaaagcataaaatgaaattttccctcctgcccctgttcacccagtattcctctgtggagataaccaatgttatcagtttattagtttctttcggagatattttatataagcaaatagtcttgtgggtgtgcatttgtatgttttacatactgttaaataccttccttttctcacataatatacattaggaattattctatawtggtactgaaaacctcttctcattttaaatacagcatttcaacacttcatgctctctatctctcttacctgcttaaaagaaaaaccagaactaactaccattttttatttgtttattgtctctgacccccaactagaatgttaattacatgagagtaaatattttcaactgtttttttcactgcactcattattaacgcccagtacagtgcctggcatataataattacacaataaatatttgaatttattcaataaatgaatatgttagacttgata

SEQ ID NO: 197285 - DNA, 587 bp, Homo sapiens
tggattcctgtttttcttcttgaattaaagctcatggagttaatttttatgctatttccgagtggctgaggtatgctaaaagcctctaatccaccaccctggagaaaacaaaaaaagaaagagcttaattaagacacaaaagtgcaaattccagaattaaagattaagaacattaaccatgtcaaaatgataaacacctatagagcagatgctttcataaacaaggtaaaatccacagagtgggagaagatacatgcaatgcatgtaatgagtatgaaacttgtaagaaacaaaacagaatcatttgtgtcaagctgacaaatggagctggagaagtccatgaagaatggtgctcactcatgttgcctgataacaagaagtattagaaaagactgcaaaaaccacaattttgcacaaaaaccagtgcaaccttacacaaaaaaatactctgtgatgacatctgcccagcaacttcctgtccarccttggactgacaacatccttgttattgatccttgtagccagaaataactatctcaaaacaacctatgtactcttcctcatttttcctttaaaaaccctttacc

SEQ ID NO: 197286 - DNA, 550 bp, Homo sapiens
tctttttcagacaaacaaatgctgagagaatttgccactagcaagccaccactacaagaattgctaaaaggaactccaaatcttgaaacaaaacttcaaaattccaccaaaatagaacctccttaaagcacaaatctcacagggcctataaaacaataacacaatggaaaaaaaagggatttaggaagcaactaccatgcagaatagtacctcacatttcaatrctaacattgaatataaatggcctaaatcctccacttaaaagatacagaatcacagaatggacaaaaatccaccaatcaattatctgctgtctccataacactcacctaacacataatgactcccataaacttagggtaaaggggtggaaaaaggtattccacgcaaatggaaatcaaaagtgagcaggaataactatttttatatcagacaaaacagactttaaagcagcaacagaaaaaaaaagacaaagaggaacattatataatgataaaaggattagtccaacaggaaaatatcacaatcctaaatacaaatgcacctaaca

SEQ ID NO: 197287 - DNA, 550 bp, Homo sapiens
tctttttcagacaaacaaatgctgagagaatttgccactagcaagccaccactacaagaattgctaaaaggaactccaaatcttgaaacaaaacttcaaaattccaccaaaatagaacctccttaaagcacaaatctcacagggcctataaaacaataacacaatggaaaaaaaagggatttaggaagcaactaccatgcagaatagtacctcacatttcaatactaacattgaatataaatggcctaaatcctccacttaaaagatacagaatcacagaatggayaaaaatccaccaatcaattatctgctgtctccataacactcacctaacacataatgactcccataaacttagggtaaaggggtggaaaaaggtattccacgcaaatggaaatcaaaagtgagcaggaataactatttttatatcagacaaaacagactttaaagcagcaacagaaaaaaaaagacaaagaggaacattatataatgataaaaggattagtccaacaggaaaatatcacaatcctaaatacaaatgcacctaaca

SEQ ID NO: 197288 - DNA, 595 bp, Homo sapiens
aagcttttgataaactgtattttaaggttaagctgctctgtgtgctaacatakaagtgttaacacaggcagagtctcatctctgctgatatgaaatgttcctttactacatatgctgctgggccactcagggactcagaactcttgctcattcttgcagagataggcttacatttggatggtggttcacagattaggacctaaaaccgagaggagcgctctagaactttacctcattctagaggagattgacttggctgggtgaaaggctgagtgaaatagacaatttctatttttaaggttggataactcagatcttaagaaatctagccacacacagagacacaaacacacacacatacatatatatgtgtgtgtgtatgtgtatgttttatttattactaacttttattttcacataaataaattttattatgactaaagggtaaggtcatattctgcaggtagacagtgatatctcctttaaaagattgtactttcccagtcattcactgtgaaaagagacagatactagaagaagaaataaggaagtcaaattcaagacagagttaaggtgaaaacaccatcttttctct

SEQ ID NO: 197289 - DNA, 570 bp, Homo sapiens
caggtatggggtgatgttaataacttttctttgacatatataaggtggtgcaaaatctctttctgttgcttggattgttctgagtgtagcaattaaaggaggttragttgggtattatgtactatggaattatgtgagcaaagaagatatatattccactagcctccaccccttttatagagcattcacactgtggcttctctgcaatagaaattacccagttcccgactgagcaatatgctctgacgcttttattttagaagtctgaaggtggagtaatgatttttatttacagaaagacctaggcaaaggtatgagaagtgaatacaaatgtgtttaattgttttaatttactgtcttgatccatttggggctgctataacaaaataccaaaaactgggtagcttataaaagacagaaatttatttctcacagttctggaggcttggtagtccaagattgaggtgctagtacagttagtatctgcagacagcccattttccagttcatagatgatgccttctgactgttcctcccatggtggaaggggaaaggcagctctcttgggct

SEQ ID NO: 197290 - DNA, 549 bp, Homo sapiens
tattattaataatttctccaggcatttcccatcttaatgaagaattaacacaggagttcaccttaacatttggaacatcttgccaaatagtacaatctggagtctctatttttgttcagtcaaaaagcttgacagctagctgtggcaggttattaatctttgtgttgacttcaagtataatatcagagtggtgacttgtctgggaggtttgtcagaatgaattgttttctgagatagcagatggtttggaaatcatctgccatgacagactgaacagactagagtttcaattctctgttcctggggtggtgatgagaaggacacacacaggaaatcaactctcctggtttaactgaaaacggctatgcactggacggtcagagcacaaactagtaacaactatgaaagataaayaagaggcaggtgggaagttcctaattaactcccatctacttcaagttaatttccctgactctacattattgcacatatgaggaaactcaatttatgcatatcaagacttgattttataattttgcttttgaaaaa

SEQ ID NO: 197291 - DNA, 427 bp, Homo sapiens
taagaacactgtaatattggggatattagttcttcttctgtagaatgggttgtaattttttcttatttgtcagttgtcttttaacattattattttttttgccatgcagaatatttctactttgatgtagtaacatcaaccagtcttttcttttatagaacctggattttaaataatactttaattggccttggctgtcctaaggttataatagatttttcccagatttttcttctrtaatagatttttcttagatgcttatcatttcttttttattttttaaataatttttgcatttaaatctttatgaattggggaatgtttttatgcatgttagcaatttatacaaatatgtgttgtttcatgtcctaattttatttaataaaaagtaattttcctactgattttaaaaagcagcctttaatat

SEQ ID NO: 197292 - DNA, 447 bp, Homo sapiens
cttgcaggtcgggatggtggtgcttttggatacttccagtaaagatggcagccccgagtggtttttgtccttaacagagtcctccattttcttacccctctgagattagaattacatttgttttctaaagcttaatcctaaagattgacctgctttttgcagtaattatatggctcagatttctgtcttagaaacttcctccagtgattgcgtttcctgatcagctcagttcctgtgtccatactcagcacctgtgtggacccagtcagatggaacttgggggacaaattttggatgtccagtactggtgttttttttttttttaascatcctggaaggttaggaatgtccaatgagtgattagagttagtgaggattgtttctctagaagtaatttatggtatcaggttatcccctgagttttttcttactcaccgtatgtctggt

SEQ ID NO: 197293 - DNA, 529 bp, Homo sapiens
gaattcttgttctcagaccatgtgactgaatagaagtttagtcacaggattccagtttaacatatgcagttactatagcaattgaggtttccttagtaacagttgcaaaaataatccrgccccaattaataatacattttaaagctctttctactccatgctgaacaatccagttttttttggccaagaaccagataattcaggtggtgtcatttgcactgatatagatatcatttgcatgcggtgaattgggttggaaaagaatgaaaagggagccggttgtttcaagtattataggaatccaatctgaaaagtcggctggcaagcgaatgcaaatctagcttccagagcttgggagttaatggtaaaccctgtcctggattcctagtgtgccctagaggactttctgcatttgaagaagggagaaggcagaagattggacttgctaacaaaaaagatgaacccgggagggtggggccgtggcacacaggatttctctctaagtggtgcctggtgtgttcttgatggc

SEQ ID NO: 197294 - DNA, 523 bp, Homo sapiens
agtttagtcacaggattccagtttaacatatgcagttactatagcaattgaggtttccttagtaacagttgcaaaaataatccggccccaattaataatacattttaaagctctttctactccatgctgaacaayccagttttttttggccaagaaccagataattcaggtggtgtcatttgcactgatatagatatcatttgcatgcggtgaattgggttggaaaagaatgaaaagggagccggttgtttcaagtattataggaatccaatctgaaaagtcggctggcaagcgaatgcaaatctagcttccagagcttgggagttaatggtaaaccctgtcctggattcctagtgtgccctagaggactttctgcatttgaagaagggagaaggcagaagattggacttgctaacaaaaaagatgaacccgggagggtggggccgtggcacacaggatttctctctaagtggtgcctggtgtgttcttgatggcgtgagaaggtctgtgggtttgtgaattc

SEQ ID NO: 197295 - DNA, 523 bp, Homo sapiens
agtttagtcacaggattccagtttaacatatgcagttactatagcaattgaggtttccttagtaacagttgcaaaaataatccggccccaattaataatacattttaaagctctttctactccatgctgaacaatccagttttttttggccaagaaccagataattcaggtggtgtcatttgcactgatatagatatcatttgcatgcggtgaattgggttggaaargaatgaaaagggagccggttgtttcaagtattataggaatccaatctgaaaagtcggctggcaagcgaatgcaaatctagcttccagagcttgggagttaatggtaaaccctgtcctggattcctagtgtgccctagaggactttctgcatttgaagaagggagaaggcagaagattggacttgctaacaaaaaagatgaacccgggagggtggggccgtggcacacaggatttctctctaagtggtgcctggtgtgttcttgatggcgtgagaaggtctgtgggtttgtgaattc

SEQ ID NO: 197296 - DNA, 523 bp, Homo sapiens
agtttagtcacaggattccagtttaacatatgcagttactatagcaattgaggtttccttagtaacagttgcaaaaataatccggccccaattaataatacattttaaagctctttctactccatgctgaacaatccagttttttttggccaagaaccagataattcaggtggtgtcatttgcactgatatagatatcatttgcatgcggtgaattgggttggaaaagaatgaaaagggagccggttgtttcaagtattataggaatccaatctgaaaagtcgrctggcaagcgaatgcaaatctagcttccagagcttgggagttaatggtaaaccctgtcctggattcctagtgtgccctagaggactttctgcatttgaagaagggagaaggcagaagattggacttgctaacaaaaaagatgaacccgggagggtggggccgtggcacacaggatttctctctaagtggtgcctggtgtgttcttgatggcgtgagaaggtctgtgggtttgtgaattc

SEQ ID NO: 197297 - DNA, 523 bp, Homo sapiens
agtttagtcacaggattccagtttaacatatgcagttactatagcaattgaggtttccttagtaacagttgcaaaaataatccggccccaattaataatacattttaaagctctttctactccatgctgaacaatccagttttttttggccaagaaccagataattcaggtggtgtcatttgcactgatatagatatcatttgcatgcggtgaattgggttggaaaagaatgaaaagggagccggttgtttcaagtattataggaatccaatctgaaaagtcggctggcaagcgaatgcaaatctagyttccagagcttgggagttaatggtaaaccctgtcctggattcctagtgtgccctagaggactttctgcatttgaagaagggagaaggcagaagattggacttgctaacaaaaaagatgaacccgggagggtggggccgtggcacacaggatttctctctaagtggtgcctggtgtgttcttgatggcgtgagaaggtctgtgggtttgtgaattc

SEQ ID NO: 197298 - DNA, 247 bp, Homo sapiens
agataactcactaaaaacataaagagaaaaatacaagtttaaaataattaaccagaagaagacgactctacagtttttaaattgctgataagattttaatttgctccaagttgaaaataattatattgcttgtgttttaaggcacataatgagcaattatatcacacatgatagtttcarcagtaaaatattatccattaacagctggaactcataaaagcatagcacaatgtgaagattgaatttg

SEQ ID NO: 197299 - DNA, 255 bp, Homo sapiens
aatgcttgagaagtagatatttaatcataacatttcaaaatctactggataacctagaattgaaaaatagcctataggttgaaaaactcctgtagtgaagaaagaaaataactaatatacagtgacaatataaatattataagtatttattttattatcaccctgaaatttgataatacaaamatgtaatatctacacatcatccatatatcaggtcgtaaaaaatcaatacattcttcaaaaatttagcataac

SEQ ID NO: 197300 - DNA, 255 bp, Homo sapiens
aatgcttgagaagtagatatttaatcataacatttcaaaatctactggataacctagaattgaaaaatagcctataggttgaaaaactcctgtagtgaagaaagaaaataactaatatacagtgacaatataaatattataagtatttattttattatcaccctgaaatttgataatacaaaaatgtaatatctacayatcatccatatatcaggtcgtaaaaaatcaatacattcttcaaaaatttagcataac

SEQ ID NO: 197301 - DNA, 454 bp, Homo sapiens
atcttactatttcaatgatccagtaaagacattctatgcctgtacaccacatattttcttcgattgtggatttattttagatagaattktaggtctggctttcactttagcctggtccctacctcaagcataaggtaaagattttccatgggttcttttctggtactactacctgccagtgtggggtcatgtcctagtctatcttgagggaatccccctgttcattattgtcagagtgagactgttaagtcttgatttccctggacaacttcactgcatgacttttaatatgattttttaatataccctttactggacaataaattatatagttatctgagtaagagatatggtcaggaagaggcattgcctcattcaccttttctctttggtgaactcgcatatgttctcctcacccgccagtcacctctaaaccgtattgttccaagacaac

SEQ ID NO: 197302 - DNA, 524 bp, Homo sapiens
tctcaggtcaagatgctcccaaattcagtgttgatgagagcccatttcatggttcatagatggtgccttctttctatgtcctcacacagtggaaggcacacaagaactccattgagcttcttttataaaggcacyaatccgattcataagagctcagcccccaagacctggtcacctcccaagtgttctgctctccctgatctgtatcatatacagactctcttggattccttaccaattgcttgagagatcatagtgggtttgtggagaaaaagttttcaagatgatggatctttcccaacttttgcagctgtcagcggtctcccaatctgaccagccccactttgtctttaggaatttattgattattccagctttacttgtcatagtggtgtctatttgcatctgtcctatgtaagtgcatctgtcctctttctccttgcaggtgcttgttttccctcacattttgactcagttcttggcaacctcgttgctataaaaataaagtcatgactttgaagtta

SEQ ID NO: 197303 - DNA, 524 bp, Homo sapiens
tctcaggtcaagatgctcccaaattcagtgttgatgagagcccatttcatggttcatagatggtgccttctttctatgtcctcacacagtggaaggcacacaagaactccattgagcttcttttataaaggcactaatccgattcataagrgctcagcccccaagacctggtcacctcccaagtgttctgctctccctgatctgtatcatatacagactctcttggattccttaccaattgcttgagagatcatagtgggtttgtggagaaaaagttttcaagatgatggatctttcccaacttttgcagctgtcagcggtctcccaatctgaccagccccactttgtctttaggaatttattgattattccagctttacttgtcatagtggtgtctatttgcatctgtcctatgtaagtgcatctgtcctctttctccttgcaggtgcttgttttccctcacattttgactcagttcttggcaacctcgttgctataaaaataaagtcatgactttgaagtta

SEQ ID NO: 197304 - DNA, 578 bp, Homo sapiens
gctgggattataggcatgtgccaacatgcttggctccaactatgatttctttcagcagtgttttgtaattttcatcgtagaggtcttttgattcctttgctaggtatattcctaagtttttttttttttttttttttttttttgcagctattgtaaaaggggttgagttcttgatgtgattctctgcttggtagctgctgatgtatagaagagctactgatttgtgtacattaatcttgtatctggaaacttggctgaattcttttatcagttctagaagctttctagaggagtccatagggttttcaaggtgaaagatcttatcgtcggcaaccagtgatagtttgacttcctttttaccgatttggatttcctctgtttccttcttttgtctgattgttctggcaagcacttccagtactatgttgaagaggactggtgagagtaggctcctcatcttgttctagttctcagagagaatgctttcaccttttccccaytcagtattatgttggctgtgggtttgtcatagacgggttttattacattaaggtatgtcccttgtatgcctattttgc

SEQ ID NO: 197305 - DNA, 561 bp, Homo sapiens
ttttttctttgtctttattggattgggttaaatcaaagaccttgtcttcgaattctgaatttctttcttctacttgttcaattctattgctgagactttccagagaatttcacatttctaaaaatgcgtccaaagtttcctgattttttattattattattattwtttatttaagctatttccttgactgtttctccctttgcttattgtatcattttttggattttcttgcattgggcttcacctttctctggcccctccctgattagcttaataactaacctgaattctttttcagataaatcagtgattccttctttgtttggatccattggtgatgaactggtgtgattatttgggggttgttgaagagtcttgttttgtcagattaccagggttggtctcctggttccttctcatttaggtagactctgtcagaggaaagttctagggctgaagactgttgttcagactcttttgtcgcacggagtgttcccttgatgtagtactctcccacttttcctatgggcatggcttcctgtgagccaaagtgcattgatt

SEQ ID NO: 197306 - DNA, 561 bp, Homo sapiens
ttttttctttgtctttattggattgggttaaatcaaagaccttgtcttcgaattctgaatttctttcttctacttgttcaattctattgctgagactttccagagaatttcacatttctaaaaatgcgtccaaagtttcctgattttttattattattattattatttatttaagctatttccttgactgtttctccctttrcttattgtatcattttttggattttcttgcattgggcttcacctttctctggcccctccctgattagcttaataactaacctgaattctttttcagataaatcagtgattccttctttgtttggatccattggtgatgaactggtgtgattatttgggggttgttgaagagtcttgttttgtcagattaccagggttggtctcctggttccttctcatttaggtagactctgtcagaggaaagttctagggctgaagactgttgttcagactcttttgtcgcacggagtgttcccttgatgtagtactctcccacttttcctatgggcatggcttcctgtgagccaaagtgcattgatt

SEQ ID NO: 197307 - DNA, 561 bp, Homo sapiens
ttttttctttgtctttattggattgggttaaatcaaagaccttgtcttcgaattctgaatttctttcttctacttgttcaattctattgctgagactttccagagaatttcacatttctaaaaatgcgtccaaagtttcctgattttttattattattattattatttatttaagctatttccttgactgtttctccctttgcttattgtatcattttttggattttcttgcattgggcttcacctttctctggcccctccctgattagcttaataactaacctgaattctttttcagataaatcagtgattycttctttgtttggatccattggtgatgaactggtgtgattatttgggggttgttgaagagtcttgttttgtcagattaccagggttggtctcctggttccttctcatttaggtagactctgtcagaggaaagttctagggctgaagactgttgttcagactcttttgtcgcacggagtgttcccttgatgtagtactctcccacttttcctatgggcatggcttcctgtgagccaaagtgcattgatt

SEQ ID NO: 197308 - DNA, 269 bp, Homo sapiens
aatgaccccttccaccacatgaggacatagcaagaaggtaccatcttaaagcagagagcaagccctcaccaagacactgaatctgcagatgccttgatcttagacttcccagcctctgaaactgcaaaaaawaaataaataaataaacttctgttgtttataaattacccaatctaaggtattttgttttagcggctcaaaggaactaagacaaaggtcatggagaccatagggtgagtctcaagacttcccccagctctacttggctg

SEQ ID NO: 197309 - DNA, 490 bp, Homo sapiens
agaaagtgtcttaagtgtttggtgctgtggacaggcaacacaggcagaaactggtggctagggaatcagagaagttttcaggagggagcatttgacttgggcttgaactgagcatcatagggcaatatagaaacaagtttatggataattaactgaattggtggcagtttataacttgaatcttccttcagatgattgaagttagtagcccagctatgaaagtctaggttacagatgtctcagccacagcttgcatatatatggatgaggttcatacatatgcagacttgggctcctgccaagatatgagagttttggtcagtctctgtctcaattctaatgtctctgcctacatacytcagtccagagttgtcatgcaaagaacagaaccctggaacaatcacacaaggatttggtactaggcttagccattttctagccatggggacaaaagaaaattactgaacctctctgagtcccagtttatttg

SEQ ID NO: 197310 - DNA, 547 bp, Homo sapiens
gaacctctctgagtcccagtttatttgtctataaaatagggatagtgatactggggttacaaggaaattgtgagaattaaaatagttcaggagaggttaagttgtcctggggccacctttgtcattgcagtgaccacactctgtagtgagggcacccttgagagcagacagcagagctgctatgtgattcatctctagaatccatgattcttggaacacttcctgagagctattaggcattcaagaaatgttaatggtagatcatagtataatggtagatcatagtattgtgatagatcatagtattgtattattgttcagcaaacatctgttttccctcctttcawtggaagtggtgtacttccccaccccactgacattgggcttagccatgtgacttgcttcagctaatggaatgtgagtgactcagtgaatgccacatccaagcagaggcgttaaatattcctgcatggcctctggtgatcctgtcctccagcatgagatgaacatgcttcagatagctgctgctactctcctggatcctctt

SEQ ID NO: 197311 - DNA, 519 bp, Homo sapiens
agaaccctggaacaatcacacaaggatttggtactaggcttagccattttctagccatggggacaaaagaaaattactgaacctctctgagtcccagtttatttgtctataaaatagggatagtgatactggggttacaaggaaattgtgagaattaaaatagttcaggagaggttaagttgtcctggggccacctttgtcattgcagtgaccacactctgtagtgagggcacccttgagagcagacagcagagctgctatgtgattcatctctagaatccatgattcttggaacacttcctgagagctattaggcattcaagaaatgttaatggtagatcatagtataatggtagatcatagtattgtgatagatcatagtattgtattattgttcagcaaacatctgttttccctcctttcattggaagtggtgtacytccccaccccactgacattgggcttagccatgtgacttgcttcagctaatggaatgtgagtgactcagtgaatgccaca

SEQ ID NO: 197312 - DNA, 547 bp, Homo sapiens
gaacctctctgagtcccagtttatttgtctataaaatagggatagtgatactggggttacaaggaaattgtgagaattaaaatagttcaggagaggttaagttgtcctggggccacctttgtcattgcagtgaccacactctgtagtgagggcacccttgagagcagacagcagagctgctatgtgattcatctctagaatccatgattcttggaacacttcctgagagctattaggcattcaagaaatgttaatggtagatcatagtataatggtagatcatagtattgtgatagatcatagtattgtattattgttcagcaaacatctgttttccctcctttcattggaagtggtgtacttccccaccccactgacattgggcttagccatgtgacttgcttcagctaatggaatgtgrgtgactcagtgaatgccacatccaagcagaggcgttaaatattcctgcatggcctctggtgatcctgtcctccagcatgagatgaacatgcttcagatagctgctgctactctcctggatcctctt

SEQ ID NO: 197313 - DNA, 615 bp, Homo sapiens
tgccacatccaagcagaggcgttaaatattcctgcatggcctctggtgatcctgtcctccagcatgagatgaacatgcttcagatagctgctgctactctcctggatcctcttctgagagccaagtgaagcaaataggaacccaattcaccacccagatccaggcccatctgaatctagccagcccagaagagccctgtagaaccacagctgacctatggaaatgagaagtaaatgtttgttgttgttagcattgagatttggggattactttttatgtgrcatcatcacaacaaagcctgactaatatattgtataaagttaattgagtactaacaacatgccaggtattgttctaagtcctttatataaagaatcccatctaatccttacagcactgcataaggaggtatcataagtatctccattcagctgattagaattgaggcatctggtcaatccccttcatgttattcctcctcacttcctgcatccgaatgaaccaagcctcctgtgttcattagaaccacagaccaagcctgctggagaaagacagggctgtgaagatgggaatgaattggcaaacagctttggaatgacaatgttaaggccaggc

SEQ ID NO: 197314 - DNA, 444 bp, Homo sapiens
acccttccttagcctcaggacttaaggctatgggagcatgagccacataaccatgagaggcagggggttcagtgagaagaataagctcaagagtctcacctgtgggtcagaatctcagctgtgccacacatactgtgtgatcttgagcaaatcaccaaacctctctattcctcatttttgtcacctgtaaagtgggactattacttgtacctacatcctggatttgttgggacagtaaatgagttagtgttcccaaggtgcttaacacagagcctttgcatgcagcaagcacccagtcaatgcccatgaccatggccccctgctcatgctgctctttkgttccccctgaggtcttttggggacagagagtgtgaaaatgccctctacccacacaaggaaacaggactcagggacagaggacctgtgccctgaccaaggcaatgc

SEQ ID NO: 197315 - DNA, 379 bp, Homo sapiens
gaagcaggcgtatcatgaggtcaagagatcaagacaccctggccaacayggtgaaaccccgtctatactaaaatacaaaaatactagctgagtgtggtggtgcatgcctgtaggcccagctacttgggaggctgaggcaggagaattgcttgaacctgggagacggaggttgcagtgagccaagatcgcaccactgcactccagcctgggtgacagagtgagactttgtctctgccaaaaaaaaaaaaaaaagaatgggttaatgcctgagaactctttggcacagtgcccagcacaaattcagcagtcactcagtgttggctatcatctttggtgatgttggtcccaaacccagacctctgctcttgtcctcggctca

SEQ ID NO: 197316 - DNA, 572 bp, Homo sapiens
ccaaagttcagaatctcatcaaatcaggtattggggtggggacttcttgagaatgactagtcacatgcagctcctagagtacagttcctctctctcygagagcctgtgaaactagagagacacagtatctgcttccatacgcctagcattaaatggtataacaggcatgggttagctctatatctgtctcctttttctctagatgtttgatgagacaagtattttaattttgtattccactaatttattcattcaacaaatacttattaggtactgactatagactctttatttattttgcattcccattttgccaacaaggaatctgagaatcagaggcaaaatattacagcttggcccactgaattattttttcttctctgaaaggacctctaggattctccatcaatgaggactttctagtcacagctgcagtgaggtttgagtttagctgattagaccatcaaccacaaagactatacattcaaatacttttatgtggcagaatatctaagaataattcaagctaataaaagatctagagaataattagatatattcattgttaataa

SEQ ID NO: 197317 - DNA, 554 bp, Homo sapiens
tagagaataattagatatattcattgttaataagagccatttaatattgtagcaaaggcaagatcagggcaggatcaaggcagataattttcaaacatgcctaatgatagtgtagaccaatggtgtttttcaattgtggctatatacattctaacacattcaattttttttaaaaagtgaagcttaggtcctattccttagaaattcagatttaactaatttggagtgggccccagacatcaatattttaactttcaagtgrttctaggaaagacaggtttaggggctgtggagagacacagaatggcaagtacttagaacattcacacatcccccacctcccaagctcctaatagaaatcatttattagccagtcccctcaatgtcattggttggaatgcaattgtgtagtctttctcatcccaggactccaggcagcccctacccatgaagccaagttgacatatgaaggcatatgtgttagccctgacaagccacactgggcatgctttcccaaacctacaaattatcaagggtgtagaaaaatagagccc

SEQ ID NO: 197318 - DNA, 470 bp, Homo sapiens
ggagacatgtatcccctggtctcatacctggaatatcaaaatggtacttcattaacagtgtcaaagcaaaagtctgatggctctgactgctcttgtgagtaggggtactcatattccctttaagcccttcccccaaattggcctagaggtccagggggttccacatgggctcaacattctctgattaactctcccctcatatcaacaacttcctcctatcaagcttgacatcttgtcctatttcttcctattctaggtgtaggcaagtctagtttgctcttcagctactctatccctctcctgcatattgactcttgaattcttgatccctagtagcttctcacagtctgtraaatggagcatggaaccactacatagaaacaggaaggttctgccctgtactctcagctcttaagggcacagtcacaagaagaccatttttaaattctcattgtgtaacacccttacac

SEQ ID NO: 197319 - DNA, 558 bp, Homo sapiens
tctatgccgatgtcaataatataaacaagtgttcttccttacagtagaaaaccaacaatacatttagaaagattacagaatttttttaaaaaacatgatttgacaaccacagtaataactgattcagggaagggctactaataaatgctaaaaccaatggatgcaagtttgagaaataataggatatcttcatagtctcaaagtatttctccaaaggaaatacatattaattataaagagtaaaatggtggacagcaccgtaaccccatgaacaaagttaacattgctagtaatgggactaattaatagcacctgcccctcatgccttgagctacaggagctcagcatggcatcagtgatattcctgcccaacatgcataacagaatctratcatggaaaagcaccaaaaaaccgaagttgaaggacaattataccaagtaactggccaggtaatcttcacaaaggtctgtgtcaagaaagacaaagcagcagaaactttcaaattgcaggggacagctaaatgcaacacatggtcttggattgttttgttataaagg

SEQ ID NO: 197320 - DNA, 566 bp, Homo sapiens
tgagaaaacaggtgttgaacctgggtttgctgaacttatttcaccagagaccccatccattaacatctgcatcacaaagcacaattgggtaaacagtgatccagctgaagtcyttccatttacagacacagacagaaaatgaggcccagaaaggttaattgactcactcaaggtcatgcgaccatctcctgaatcgtagagctgtgtgcttttcactgcccctaatgttgcctaatggttcacttagctatccattcacaggaggtcagaaactgaacacaggcctcagattccagtatcattttgactaaattatatgtaaaaattgatgtaccgaataggatttgctttcaatctcactaatccagaaatagtcattcattcaacaaatatttattaagtacgatgtgccaggagctgcacattttgcagttggctgcacagaagactgacaataaaattagccttagagagatcaaaattgattgaactatccttgataaaactgcttcaaagcagggacttgcaagaaattgcatattcacatttcatttgcttccattaat

SEQ ID NO: 197321 - DNA, 566 bp, Homo sapiens
tgagaaaacaggtgttgaacctgggtttgctgaacttatttcaccagagaccccatccattaacatctgcatcacaaagcacaattgggtaaacagtgatccagctgaagtctttccatttacagacacagacagaaaatgaggcccagaaaggttaattgactcactcaaggtcatgcgaccatctcctgaatcgtagagctgtgtgcttttcactgcccctaatgttgcctaatggttcacttagctatccattcacaggaggtcagaaactgaacacrggcctcagattccagtatcattttgactaaattatatgtaaaaattgatgtaccgaataggatttgctttcaatctcactaatccagaaatagtcattcattcaacaaatatttattaagtacgatgtgccaggagctgcacattttgcagttggctgcacagaagactgacaataaaattagccttagagagatcaaaattgattgaactatccttgataaaactgcttcaaagcagggacttgcaagaaattgcatattcacatttcatttgcttccattaat

SEQ ID NO: 197322 - DNA, 566 bp, Homo sapiens
tgagaaaacaggtgttgaacctgggtttgctgaacttatttcaccagagaccccatccattaacatctgcatcacaaagcacaattgggtaaacagtgatccagctgaagtctttccatttacagacacagacagaaaatgaggcccagaaaggttaattgactcactcaaggtcatgcgaccatctcctgaatcgtagagctgtgtgcttttcactgcccctaatgttgcctaatggttcacttagctatccattcacaggaggtcagaaactgaacacaggcctcagattccagtatcattttgactaaattatatrtaaaaattgatgtaccgaataggatttgctttcaatctcactaatccagaaatagtcattcattcaacaaatatttattaagtacgatgtgccaggagctgcacattttgcagttggctgcacagaagactgacaataaaattagccttagagagatcaaaattgattgaactatccttgataaaactgcttcaaagcagggacttgcaagaaattgcatattcacatttcatttgcttccattaat

SEQ ID NO: 197323 - DNA, 620 bp, Homo sapiens
aattgactcactcaaggtcatgcgaccatctcctgaatcgtagagctgtgtgcttttcactgcccctaatgttgcctaatggttcacttagctatccattcacaggaggtcagaaactgaacacaggcctcagattccagtatcattttgactaaattatatgtaaaaattgatgtaccgaataggatttgctttcaatctcactaatccagaaatagtcattcattcaacaaatatttattaagtacgatgtgccaggagctgcacattttgcagttggctgcacagaagactgacaataaaattagccttagagagatcaaaattgattgaactrtccttgataaaactgcttcaaagcagggacttgcaagaaattgcatattcacatttcatttgcttccattaatagtgctcatatttagatctgatggtaatactatgctctcaactggtgtgggtctggaataaaacactccccttgactgtgcacactgcagagaggaaaaacaaaatgattggagtcagctgggcttttctattgagcacctggacctacagattttccaatttcaagttcattcacatttcatctctggcttctacattttagttaaaaa

SEQ ID NO: 197324 - DNA, 438 bp, Homo sapiens
gtaatactatgctctcaactggtgtgggtctggaataaaacactccccttgactgtgcacactgcagagaggaaaaacaaaatgattggagtcagytgggcttttctattgagcacctggacctacagattttccaatttcaagttcattcacatttcatctctggcttctacattttagttaaaaagcatttctctatttgctattgtccactaaggaaaatgcctatttaaaaatggatttcttttttaaagcatcttgattcacacatttcaaagcccttcagaaaacaggatttctcaaaagccatgtgattctaaaacatgctacagatttcagatggagaaagattcaagatattattctacatgatcttttcaatgaactgatcgcatctgtctaggaataaggagagttgtcttacgttacttcaaaaaa

SEQ ID NO: 197325 - DNA, 462 bp, Homo sapiens
tgctctcaactggtgtgggtctggaataaaacactccccttgactgtgcacactgcagagaggaaaaacaaaatgattggagtcagctgggcttttctattgagcacctsgacctacagattttccaatttcaagttcattcacatttcatctctggcttctacattttagttaaaaagcatttctctatttgctattgtccactaaggaaaatgcctatttaaaaatggatttcttttttaaagcatcttgattcacacatttcaaagcccttcagaaaacaggatttctcaaaagccatgtgattctaaaacatgctacagatttcagatggagaaagattcaagatattattctacatgatcttttcaatgaactgatcgcatctgtctaggaataaggagagttgtcttacgttacttcaaaaaagattccaaatgaaaaaaaaaatctgggcttgag

SEQ ID NO: 197326 - DNA, 448 bp, Homo sapiens
tgctctcaactggtgtgggtctggaataaaacactccccttgactgtgcacactgcagagaggaaaaacaaaatgattggagtcagctgggcttttctattgagcacctggacctacagattttccaatttcaagttcattcacatttcatctctggcttctacattttagttaaaaagcatttctctatttgctattgtccactaaggaaaatgcctatttaaaaatrgatttcttttttaaagcatcttgattcacacatttcaaagcccttcagaaaacaggatttctcaaaagccatgtgattctaaaacatgctacagatttcagatggagaaagattcaagatattattctacatgatcttttcaatgaactgatcgcatctgtctaggaataaggagagttgtcttacgttacttcaaaaaagattccaaatgaaaaaaaa

SEQ ID NO: 197327 - DNA, 438 bp, Homo sapiens
gtaatactatgctctcaactggtgtgggtctggaataaaacactccccttgactgtgcacactgcagagaggaaaaacaaaatgattggagtcagctgggcttttctattgagcacctggacctacagattttccaatttcaagttcattcacatttcatctctggcttctacattttagttaaaaagcatttctctatttgctattgtccactaaggaaaatgcctatttaaaaatggrtttcttttttaaagcatcttgattcacacatttcaaagcccttcagaaaacaggatttctcaaaagccatgtgattctaaaacatgctacagatttcagatggagaaagattcaagatattattctacatgatcttttcaatgaactgatcgcatctgtctaggaataaggagagttgtcttacgttacttcaaaaaa

SEQ ID NO: 197328 - DNA, 438 bp, Homo sapiens
gtaatactatgctctcaactggtgtgggtctggaataaaacactccccttgactgtgcacactgcagagaggaaaaacaaaatgattggagtcagctgggcttttctattgagcacctggacctacagattttccaatttcaagttcattcacatttcatctctggcttctacattttagttaaaaagcatttctctatttgctattgtccactaaggaaaatgcctatttaaaaatggatttcttttttaaagcatcttgattcacacatttcaaagcccttcagaaaacaggatttctcaaaagccakgtgattctaaaacatgctacagatttcagatggagaaagattcaagatattattctacatgatcttttcaatgaactgatcgcatctgtctaggaataaggagagttgtcttacgttacttcaaaaaa

SEQ ID NO: 197329 - DNA, 240 bp, Homo sapiens
gaaaatgcctatttaaaaatggatttcttttttaaagcatcttgattcacacatttcaaagcccttcagaaaacaggatttctcaaaagccatgtgattctaaaacatgctacagatttcagatggagaaagattcaagatattattctacatgawcttttcaatgaactgatcgcatctgtctaggaataaggagagttgtcttacgttacttcaaaaaagattccaaatgaaaaaaaa

SEQ ID NO: 197330 - DNA, 240 bp, Homo sapiens
gaaaatgcctatttaaaaatggatttcttttttaaagcatcttgattcacacatttcaaagcccttcagaaaacaggatttctcaaaagccatgtgattctaaaacatgctacagatttcagatggagaaagattcaagatattattctacatgatcttttcaatgaactgatcgcatctgtctaggaataaggagagttgtctyacgttacttcaaaaaagattccaaatgaaaaaaaa

SEQ ID NO: 197331 - DNA, 437 bp, Homo sapiens
tgctctcaactggtgtgggtctggaataaaacactccccttgactgtgcacactgcagagaggaaaaacaaaatgattggagtcagctgggcttttctattgagcacctggacctacagattttccaatttcaagttcattcacatttcatctctggcttctacattttagttaaaaagcatttctctatttgctattgtccactaaggaaaatgcctatttaaaaatggatttcttttttaaagcatcttgattcacacatttcaaagcccttcagaaaacaggatttctcaaaagccatgtgattctaaaacatgctacagatttcagatggagaaagattcaagatattattctacatgatcttttcaatgaactgatcgcatctgtctaggaataaggagagttgtcttaygttacttcaaaaaagattccaa

SEQ ID NO: 197332 - DNA, 656 bp, Homo sapiens
tttttttttgtgcctagaggcagatattttgccccatggctatttacggtatgaaactgtatttaaatgagtgtacatatataaaagctgccattctggctgtaaactattgcaggttatcaagattaamaaataaacaaataaaaatatttcagtttttctatgaaatgtctttactcgagtccaaatgtagagatataaaatgcttgaaattcataaaaccaagtgtttcacatatttcagttgtgatggcctttgtcctacttttgttagtgaagcaggcagactgcattttttccctctcatacatcttcaaatggtagacagaaaaatttgataaaacttctagggcattatctgatgaaacacattaaacactaaaggagaaatacaacttcattgtttataaaagacgtataagaaggaaacctgcatacatatatctatcagttttgtattttcaagaaatatttgccttaaaatgaacttcattagaatatgtgttctcccacagagccaaggaaagtaagttagacacaggatctggaagtctacctgtgtgatgtaattgcattgaaaacattccacaaataatgcagaaatgtatcattgtgacccaaaatattctctaaattttctcaaagcaatgtggccac

SEQ ID NO: 197333 - DNA, 399 bp, Homo sapiens
aaatgagaaaagagaaatggcttttgacaacacttccctactaatagtagggaagaagacataggtacagattcaagttgatttgaaattatgaaagtgaggtaattgacctgcagtggttgctgctcagtgaaatcagcatagtgattacctgagctaggttagagatttgatgggtaagaaagaacacctgagggtaatcctggaggggaaaaaaataaagtgtttgctggagagaatgagttggattgctggacttcaatgtgtgtgggttgartttgtgacttaaaaatgaaaccagtctattgcttgtgtggcttttccaaaatactgttattccattacctatctcttaccccaagagtagtcacattcttatttctggttattttaattcct

SEQ ID NO: 197334 - DNA, 489 bp, Homo sapiens
ctttttaaatctaaaaattttaatgtaaagaaataatatgcttgcatttaaaaatcaagtatacatttttaatacctctttttatggttaattccttttgttgtgattactaccggttttatgagggagaagtccttgacatgtagaccaaaaggtaattaaggaccttttcattcatgatatcataaaactttgttgcttagaaaaaagcaaaagaaaaaactccattaatttattatgttcttatggagaagaaataccaaaattgtggcagatttcattgtctgtttaataccttaaaatgacaaggctttttcccccatgacattggttgatggctgtgccagtccttgaagtgagttaagtagtgtgatgcattttgaagagaaaaaaattaatttgaaaaagtattaactcaaaagttaaaatacttcattgactggagatgamagtttttcttcatattctatatttaatattctggaatat

SEQ ID NO: 197335 - DNA, 594 bp, Homo sapiens
gaataagtttatttcaaactatgataagggacatcagttgaagatatgacatattatttaacttatggtgagrgaaacacctaagtattttcctgagcatctggataattttaaatatacataattcatctacttaggtaggtgccaggttttttcaaggagtaattaattagtacgaacaagggtgagggggcagggaacaccatactctggtacttaatgtctgaaattatcagggaatttaacacattttcccataggtttatttcttgtgtaagaagtcagataaattatttccatttcaagtatttattattcagattatttaaagcaaagctttcacaaagccttttgtcagctttcctgtaatcctcaaataatttttcctggctggacgctttggcttactcctgtaatcctggcactttgggaggcagaagcaggaggatcacttgagcccaagagttctaggctgcagtgagctgtgatcacaccactgcactccaacctgagtgacggatcaagttcttgtctcaaaaataaaagtaataacaataataataaattttcctctaaatacaatggtgaatgagg

SEQ ID NO: 197336 - DNA, 594 bp, Homo sapiens
gaataagtttatttcaaactatgataagggacatcagttgaagatatgacatattatttaacttatggtgagagaaacacctaagtattttcctgagcatctggataattttaaatayacataattcatctacttaggtaggtgccaggttttttcaaggagtaattaattagtacgaacaagggtgagggggcagggaacaccatactctggtacttaatgtctgaaattatcagggaatttaacacattttcccataggtttatttcttgtgtaagaagtcagataaattatttccatttcaagtatttattattcagattatttaaagcaaagctttcacaaagccttttgtcagctttcctgtaatcctcaaataatttttcctggctggacgctttggcttactcctgtaatcctggcactttgggaggcagaagcaggaggatcacttgagcccaagagttctaggctgcagtgagctgtgatcacaccactgcactccaacctgagtgacggatcaagttcttgtctcaaaaataaaagtaataacaataataataaattttcctctaaatacaatggtgaatgagg

SEQ ID NO: 197337 - DNA, 530 bp, Homo sapiens
atttcaagtatttattattcagattatttaaagcaaagctttcacaaagccttttgtcagctttcctgtaatcctcaaataatttttcctggctggacgctttggcttactcctgtaatcctggcactttgggaggcagaagcaggaggatcacttgagcccaagagttctaggctgcagtgagctgtgatcacaccactgcactccaacctgagtgacggatcaagttcttgtctcaaaaataaaagtaataacaataataataaattttcctctaaatacaatggtgaatgaggtagaaatgttgagttcataagagaactgttgaatagtgaaggaaactgacttaattttaatgacaggaagaatactgttacacactagcaaaaatraacttttatgctgatgtagcagtacagaatatgcttccaacccagggacgctggagccaggcttgctagctaagcgaccttggacaagttacttaaccattttattcctcagcacactcatctcaaacgaggataata

SEQ ID NO: 197338 - DNA, 530 bp, Homo sapiens
atttcaagtatttattattcagattatttaaagcaaagctttcacaaagccttttgtcagctttcctgtaatcctcaaataatttttcctggctggacgctttggcttactcctgtaatcctggcactttgggaggcagaagcaggaggatcacttgagcccaagagttctaggctgcagtgagctgtgatcacaccactgcactccaacctgagtgacggatcaagttcttgtctcaaaaataaaagtaataacaataataataaattttcctctaaatacaatggtgaatgaggtagaaatgttgagttcataagagaactgttgaatagtgaaggaaactgacttaattttaatgacaggaagaatactgttacacactagcaaaaatgaactttyatgctgatgtagcagtacagaatatgcttccaacccagggacgctggagccaggcttgctagctaagcgaccttggacaagttacttaaccattttattcctcagcacactcatctcaaacgaggataata

SEQ ID NO: 197339 - DNA, 616 bp, Homo sapiens
taaatatgactccccacccccacttgaatctagggacattgtagttttctactgcagactttgtttctggtttatactgggaatatattgtttatcattttcagtgaaagcatccactggttaaatttccttttaaaaataataatggatctttacaatttctttgagctgctcagtgtgtataatgtgttgaattttctgttagtggttgggaggtagaaatagatactttatctctattttagccatttccataattatatatctcaatarccttgtcaatgcatcattagtcctatgactgaattaatgattacttttagtagtcacttagtttcttactggtgatgatgattctacttttgtgaatcatcttggatgattctctaaaatcttagaaagctaattttgttaatgctatgcatataacacatcaatacattttctctattaaaaaaattaaagcgttataggtagatcagaatttaccattactaactcctcagtcctccttatttccctgttaccagtttggtatatttatatattaggttgatccatatgaaattgccaatattatttctgaactgatgaaaagcagcaatttcttatgatt

SEQ ID NO: 197340 - DNA, 544 bp, Homo sapiens
cactgtgttatatcattgtcagtaaaatgtcagtatagtaagcaaatcaacattatctccttcagaattctttgttgataactacactagtatttattttatagggtaatacaggtttttgtgaatttaggaatcaaaatgaaagattgtaattaatactatccaaaatagaagactagtayggttaatttctgtagttttttaaaattagttgcttgctcatggtatgtgactgaaaaacacagagtatataaagccaattaaaaatggagttatatatgcataaaacatgtttcttttcttctttgtactttatattctgtataaaagtagctgctatcattagattttgttttttagaatgcttaatgttttggacctaaggaaattgaataagatccctttcaagatagtaatgtatttcttttaacccatccaacaattaccgaattcccattttacagatgagtacgacttacataagttaagattggacaattagtgcactatcagacacctagttattcctgtttttaaaaattat

SEQ ID NO: 197341 - DNA, 517 bp, Homo sapiens
ggatattttcaaactttatggttttagaaccttaacactctttaaaattactggggacgccatagtttttgttcatgaggattttaactatsgactattcagcattttagaaattaaaactaggaacattttgtaacacaagactacagaagcacaacctgtacaatgtcaatgtaatattatgatacaacatgtagcttctataaacaccactgtataattgtgaataaattaaagtgaaaaaaggcaaattaaatcttagtattatttaaacttgttttaactttacagacccactggggttccctagtccacattttggtagctgcagtcctagcattagtttaaccctatacttaagacttggcctttctgggatcactactgaattctaccccctgttcaccagtgtctttgtactctgactggttgtgcttcacttgtctttgagccttttgcaagctctggtaattgtgcagcttacacattcccagtagatgtactttcccctggttgt

SEQ ID NO: 197342 - DNA, 385 bp, Homo sapiens
cactctaaggtggatattttcaaactttatggttttagaaccttaacactctttaaaattactggggacgccatagtttttgttcatgaggattttaactatcgactattcagcattttagaaattaaaactaggaacattttgtaacacaagactacagaagcacaacctgtacaatgtcaatgtaatattatgatacaacatgtagcttctataaacaccactgtataattgtkaataaattaaagtgaaaaaaggcaaattaaatcttagtattatttaaacttgttttaactttacagacccactggggttccctagtccacattttggtagctgcagtcctagcattagtttaaccctatacttaagacttggcctttct

SEQ ID NO: 197343 - DNA, 519 bp, Homo sapiens
gtggatattttcaaactttatggttttagaaccttaacactctttaaaattactggggacgccatagtttttgttcatgaggattttaactatcgactattcagcattttagaaattaaaactaggaacattttgtaacacaagactacagaagcacaacctgtacaatgtcaatgtaatattatgatacaacatgtagcttctataaacaccactgtataattgtgaataaattaaagtgaaaaaaggcaaattaaatcttagtattatttaaacttgttttaactttacagacccactggggttccctagtccacattttggtagctgcagtcctagcattagtttaaccctatacttaagacttggcctttctgggatcactactgaattctaccccctgttcaccagtgtctttgtactctgactggttgtgcttcacttgtctttgagccttttgcaagctctggtaattgtgcagcttacamattcccagtagatgtactttcccctggttgt

SEQ ID NO: 197344 - DNA, 483 bp, Homo sapiens
tctccctccctgggcaggattctggaaaatgtttctaggcagaatatcataggactccctgagtgtttccttcctctcagagaccactgtctcctttactatgtgttgtccaatatctgaaaacagttgtttcayacactttgtccaattttctactatcttatgggaaaacagcctggtcccatatactccattatcgttgaagcatgtatccgtattagattataaaacatatctgtaacaactttggacatggtaccatggatggaatcctggatgacatcttatttgaaaaaacttttaaaactaaggctaaactggttcaacggaagaaaaaaatgatagtacaaccccagtacctaagttaaaaggaaatttcaaagacggagaaattgttgaagtgttgaagtactagaagtcaagaaacacaaacactaatgtttccattagatttgagaataagaaggtcttgacaagcctggc

SEQ ID NO: 197345 - DNA, 483 bp, Homo sapiens
tctccctccctgggcaggattctggaaaatgtttctaggcagaatatcataggactccctgagtgtttccttcctctcagagaccactgtctcctttactatgtgttgtccaatatctgaaaacagttgtttcatacactttgtccaattttctactatcttatgggaaaacagcctggtcccatatactccattatcgttgaagcatgtatccgtattagattataaaacatatctgtaacaactttggacatggtaccatggatggaatcctggatgacatcttatttgaaaaaacttttaaaactaaggctaaactggttcaacrgaagaaaaaaatgatagtacaaccccagtacctaagttaaaaggaaatttcaaagacggagaaattgttgaagtgttgaagtactagaagtcaagaaacacaaacactaatgtttccattagatttgagaataagaaggtcttgacaagcctggc

SEQ ID NO: 197346 - DNA, 483 bp, Homo sapiens
tctccctccctgggcaggattctggaaaatgtttctaggcagaatatcataggactccctgagtgtttccttcctctcagagaccactgtctcctttactatgtgttgtccaatatctgaaaacagttgtttcatacactttgtccaattttctactatcttatgggaaaacagcctggtcccatatactccattatcgttgaagcatgtatccgtattagattataaaacatatctgtaacaactttggacatggtaccatggatggaatcctggatgacatcttatttgaaaaaacttttaaaactaaggctaaactggttcaacggaagaaaaaaatgatagtacaaccccagtacctaagttaaaaggaaatttcaaagayggagaaattgttgaagtgttgaagtactagaagtcaagaaacacaaacactaatgtttccattagatttgagaataagaaggtcttgacaagcctggc

SEQ ID NO: 197347 - DNA, 503 bp, Homo sapiens
ctccatctcaaaaaaaaaaaaaaaggccttgtaatgarcaaccaactcttgtcttactctacgtccacatctgagggaatcacttttaatcttttcaggtcttttttcttgtggttaatgctatagctctaaataatcaactggtttactgctttatcaatgctagattttgttgactttctgctatgaataaataaattctgatttaggtcttaaaatacacctccttccttctcccaatatagttgtattactatgtttagttcaattaataaggtgttggttatgactcagtaaatgttcactgcagatctaaacagtatactatgagtttcttttgtctttcatggagtttttaataacaagaaagtaatagtgactctccattcgttctttgtttttgcctactatagaactatcatataagattattttttaaagtactgtttttttctgggagaagtcctaccctctttctagacattcccttctcctgctctgat

SEQ ID NO: 197348 - DNA, 580 bp, Homo sapiens
tatttgaacatgggagccggaggttgcagtgagctgagatcacaccactgcactccagcccaggcaacagagcaagactccatctcaaaaaaaaaaaaaaaggccttgtaatgaacaaccaactcttgtcttactctacstccacatctgagggaatcacttttaatcttttcaggtcttttttcttgtggttaatgctatagctctaaataatcaactggtttactgctttatcaatgctagattttgttgactttctgctatgaataaataaattctgatttaggtcttaaaatacacctccttccttctcccaatatagttgtattactatgtttagttcaattaataaggtgttggttatgactcagtaaatgttcactgcagatctaaacagtatactatgagtttcttttgtctttcatggagtttttaataacaagaaagtaatagtgactctccattcgttctttgtttttgcctactatagaactatcatataagattattttttaaagtactgtttttttctgggagaagtcctaccctctttctagacattcccttctcctgctctgat

SEQ ID NO: 197349 - DNA, 580 bp, Homo sapiens
tatttgaacatgggagccggaggttgcagtgagctgagatcacaccactgcactccagcccaggcaacagagcaagactccatctcaaaaaaaaaaaaaaaggccttgtaatgaacaaccaactcttgtcttactctacgtccacatctgagggaatcacttttaatcttttcaggtcttttttcttgtggtyaatgctatagctctaaataatcaactggtttactgctttatcaatgctagattttgttgactttctgctatgaataaataaattctgatttaggtcttaaaatacacctccttccttctcccaatatagttgtattactatgtttagttcaattaataaggtgttggttatgactcagtaaatgttcactgcagatctaaacagtatactatgagtttcttttgtctttcatggagtttttaataacaagaaagtaatagtgactctccattcgttctttgtttttgcctactatagaactatcatataagattattttttaaagtactgtttttttctgggagaagtcctaccctctttctagacattcccttctcctgctctgat

SEQ ID NO: 197350 - DNA, 580 bp, Homo sapiens
tatttgaacatgggagccggaggttgcagtgagctgagatcacaccactgcactccagcccaggcaacagagcaagactccatctcaaaaaaaaaaaaaaaggccttgtaatgaacaaccaactcttgtcttactctacgtccacatctgagggaatcacttttaatcttttcaggtcttttttcttgtggttaatgctatagctctaaataatcaactggtttrctgctttatcaatgctagattttgttgactttctgctatgaataaataaattctgatttaggtcttaaaatacacctccttccttctcccaatatagttgtattactatgtttagttcaattaataaggtgttggttatgactcagtaaatgttcactgcagatctaaacagtatactatgagtttcttttgtctttcatggagtttttaataacaagaaagtaatagtgactctccattcgttctttgtttttgcctactatagaactatcatataagattattttttaaagtactgtttttttctgggagaagtcctaccctctttctagacattcccttctcctgctctgat

SEQ ID NO: 197351 - DNA, 503 bp, Homo sapiens
ctccatctcaaaaaaaaaaaaaaaggccttgtaatgaacaaccaactcttgtcttactctacgtccacatctgagggaatcacttttaatcttttcaggtcttttttcttgtggttaatgctatagctctaaataatcaactggtttactgctttatcaatgctagattttgttgactttctgctrtgaataaataaattctgatttaggtcttaaaatacacctccttccttctcccaatatagttgtattactatgtttagttcaattaataaggtgttggttatgactcagtaaatgttcactgcagatctaaacagtatactatgagtttcttttgtctttcatggagtttttaataacaagaaagtaatagtgactctccattcgttctttgtttttgcctactatagaactatcatataagattattttttaaagtactgtttttttctgggagaagtcctaccctctttctagacattcccttctcctgctctgat

SEQ ID NO: 197352 - DNA, 503 bp, Homo sapiens
ctccatctcaaaaaaaaaaaaaaaggccttgtaatgaacaaccaactcttgtcttactctacgtccacatctgagggaatcacttttaatcttttcaggtcttttttcttgtggttaatgctatagctctaaataatcaactggtttactgctttatcaatgctagattttgttgactttctgctatgaataaataaattctgatttaggtcttaaaatacacctccttccttctcccaatatagttgtattactatgtttagttcaattaataaggtgttggttatgactcagtaaatgttcactgcagatctaaacagtatactatgagtttcttttgtctttcatggagtttttaataacaagaaagtaatagtgactctccattcgtwctttgtttttgcctactatagaactatcatataagattattttttaaagtactgtttttttctgggagaagtcctaccctctttctagacattcccttctcctgctctgat

SEQ ID NO: 197353 - DNA, 638 bp, Homo sapiens
agtatactatgagtttcttttgtctttcatggagtttttaataacaagaaagtaatagtgactctccattcgttctttgtttttgcctactatagaactatcatataagattattttttaaagtactgtttttttctgggagaagtcctaccctctttctagacattcccttctcctgctctgatatgtgccagtggcttctgggtgtgttgttctcatccttaaacttccctggcctgatgtcctttgtcrgatctgttgatttatagatcccaagtcttccttttctttgtaatacatcctcattctgttccgcatatctctaagtaactttattagaaggagaatgaaggagctgaattttgagtcttcctgtgtctacaacgtattctgtcttcacacatagttgcttgtgtagctaggttgagaattgtactttgaaaagtattttcctgtagaattggaagattatactcttctagcatctggagttgggaagttttgtgccattctgatgggtgttcctttgaatttaactcttttattttcttctctggtagcttttaggctttcttgtacctcatgatctgaatttttattctgtaccctcattacttgctgtttcattataatgtggg

SEQ ID NO: 197354 - DNA, 573 bp, Homo sapiens
aaaggttggaggtgtcttgagtgcactgtgtgtgaggcctgtgggaaggcaactgacccaggaagaytcctgctgtgtgatgattgtgacataagttatcacacctactgcctagaccctccattgcagacagttcccaaaggaggctggaagtgcaaatggttctctagggtttgtttgccttgttagtctttcaagttcagagctttctcataccactttagtttttaaaaattagccatacctatttaattgaataatacacatattctatgatagataccactaatcagaaaaattttcacatacacattaaatcatttgccccattatgttcgtatgtagcttcctgaattacagtaactgaataactaagaaaataaaattgagacttttcggggggatttggatttcaggtgtgtttggtgcagacactgtggagcaacatctgcaggtctaagatgtgaatggcagaacaattacacacagtgcgctccttgtgcaagtttatcttcctgtccagtctgctattgaaactatagagaagaagatcttattctgcaatgaagacaa

SEQ ID NO: 197355 - DNA, 573 bp, Homo sapiens
aaaggttggaggtgtcttgagtgcactgtgtgtgaggcctgtgggaaggcaactgacccaggaagactcctgctgtgtgatgattgtgacataagttatcacacctactgcctagaccctccattgcagacagttcccaaaggagrctggaagtgcaaatggttctctagggtttgtttgccttgttagtctttcaagttcagagctttctcataccactttagtttttaaaaattagccatacctatttaattgaataatacacatattctatgatagataccactaatcagaaaaattttcacatacacattaaatcatttgccccattatgttcgtatgtagcttcctgaattacagtaactgaataactaagaaaataaaattgagacttttcggggggatttggatttcaggtgtgtttggtgcagacactgtggagcaacatctgcaggtctaagatgtgaatggcagaacaattacacacagtgcgctccttgtgcaagtttatcttcctgtccagtctgctattgaaactatagagaagaagatcttattctgcaatgaagacaa

SEQ ID NO: 197356 - DNA, 638 bp, Homo sapiens
acattcccttgacatgggtattttggaacagtaatcagtcaaatttaaaatgaaagtttaaatttgtattcttgggattttgtaattttagacccacccaagacttatacccaggatggtgtgtgtttgactgaatcagggawgactcagttacagagcctcacagttacagttccaagaagaaaactgtcaaaaccaaaactgaaattgaagattataaatcagaaatagcgtggccgtccttcagacacctccagacatccaatcagaacattcaagggatggtgatatggatgatagtcgaggtaatactaatttattttccgtgaaatatgtgtgcaagaattacagcatataaagtaacttttgaaatatgtgtatgatttaccaaagggtaaatcacactgacttagataaccccgatgtgacccttgccatctccaaatgagtgatcttcttagaccttgccttttcgggttctcttcctttcacacattttagaacagacctaccttacagaaatctcaaggagcaccatatctttgaagatcacaggtggggaaatacagagggcttgactttagtttgctagatgacgacacaaaccttctcagatactgtgagcttggataatacca

SEQ ID NO: 197357 - DNA, 638 bp, Homo sapiens
acattcccttgacatgggtattttggaacagtaatcagtcaaatttaaaatgaaagtttaaatttgtattcttgggattttgtaattttagacccacccaagacttatacccaggatggtgtgtgtttgactgaatcagggatgactcagttacagagcctcacagttacagttccaagaagaaaactgtcaaaaccaaaactgaaattgaagattataaatcagaaatagcgtggccgtccttcagacacctccagacatccaatcagaacattcaagggatggtgatatggatgatagtcgaggtaatactaatttattttccgtgaaatatgtgtgcaagaattacagcatataaagtaacttttgaaatatgtgtatgrtttaccaaagggtaaatcacactgacttagataaccccgatgtgacccttgccatctccaaatgagtgatcttcttagaccttgccttttcgggttctcttcctttcacacattttagaacagacctaccttacagaaatctcaaggagcaccatatctttgaagatcacaggtggggaaatacagagggcttgactttagtttgctagatgacgacacaaaccttctcagatactgtgagcttggataatacca

SEQ ID NO: 197358 - DNA, 412 bp, Homo sapiens
caactggtggtcccagatccaccatcacagtgtatggatgtgtttggaggtgtgggaataggactgctctgaggctctagaaggccagcaggtggggcagactgaatggagggaggggactggcattcagtaactactggagcgtgggaagagtgaggtagactgtccatctggtgaaggtggctgcttccttgaggtttgttactttctgtaatgttaattccctcaacttttaaaatttgatttttagacaagttatacattcaaatgatttaaaattggaaaataataaaaaggtaaacagtgaagtctctccctttcccctgccttcatgcccccagtttrcatctccagaaacctcagaggtttctcgtgtaactttccagatgtgttttatgcatgtacaaggaaa

SEQ ID NO: 197359 - DNA, 519 bp, Homo sapiens
tgcgggacataggtatcctaagacctgagtcacaggcaggtgccacacagactgaatcctgcwtagagacatgctttcttccacctacgtggcgtttacacttttttgaattagaaactcattttaaaaattcagagatttctgagaaaccatttgtatcttaaaactctgggctttcattcccattagccacagttgctgccccgtttaatgatgttgccttcctcaggtacccatctggtttcatttgcagaagccatttgagataatgagacttccatccaaggtctaacattatggactagagaaattttggcttaaattattattttttatctaataatagtctttggtgatattttgtaatttccaaaatgctttatcacatattacttcaccatcccccagacgttctgtgaggtgagtaggtggtacctattttgcaggtgaggatgctgaatgcagattactttatgttagggctcaagaggagtcatagggcatgttgatgaggccagt

SEQ ID NO: 197360 - DNA, 342 bp, Homo sapiens
acatacacatttgtacatgttgatgtttttatattgtcttcatggtaccaaattgaattaaaataatgagcacttgtaaattaaacaaataagcccaaatgccttttaagtttatgtaactttagtccaaatcactttggtcactaggcctaagtcaaattaaataatggctattcatttaaaaaaaatctakataataaccaaataagatataatgttaaaacattaattattaaatataaattcaagctgatatgcttttggctttttatttcacagaaacaaaagatatttgggtttgttagtaaacttatcctgttccatattcataaattgttatat

SEQ ID NO: 197361 - DNA, 598 bp, Homo sapiens
acatgtggcattcttattaggataaatggagtaatgatttgactagtaaatgtttttttttttcattctgtaaataaaaagacacaaagtaaattttcacaagcatatctgtatagcttcattccaccagagactatattcaagcacagaagaaaaggagagaattttttctcttttctgtgataatgggagcaatatttatgaataattgctcatgaattaagatagttaaaactgcccccaaagactcttatattaacttttatactagcatttctcttctactcgcatcactctcttttttcactcataaatttagagctatataccagtttttatgaaatatcattatcagaaatttatcttcccccaaattttcaacaaagggcaaaaataataacaatatcaaatttttattttactattgaagttacctttcatggggtaagacaaagatcatggatggaagtctaacatcaaagagagmaaacttttagtaaaagaaaattaaaaggccagattttcaagaaattgtagcattaagggtacagataaggtaacctagattttaggcacaatactgtagcatttatgcaca

SEQ ID NO: 197362 - DNA, 598 bp, Homo sapiens
acatgtggcattcttattaggataaatggagtaatgatttgactagtaaatgtttttttttttcattctgtaaataaaaagacacaaagtaaattttcacaagcatatctgtatagcttcattccaccagagactatattcaagcacagaagaaaaggagagaattttttctcttttctgtgataatgggagcaatatttatgaataattgctcatgaattaagatagttaaaactgcccccaaagactcttatattaacttttatactagcatttctcttctactcgcatcactctcttttttcactcataaatttagagctatataccagtttttatgaaatatcattatcagaaatttatcttcccccaaattttcaacaaagggcaaaaataataacaatatcaaatttttattttactattgaagttacctttcatggggtaagacaaagatcatggatggaagtctaacatcaaagagagaaaacttttagtaaaagaaaattaaaaggccagattttcaagaaatkgtagcattaagggtacagataaggtaacctagattttaggcacaatactgtagcatttatgcaca

SEQ ID NO: 197363 - DNA, 605 bp, Homo sapiens
tagatagatcaaataagtattcaaaaacctttcaataaataaaagtccagaaccaggagacttcattggcaaattctaccagatatttaaagacagtttaacactagtatctctcaaattcctcagaaaaaaaaaattgaagagagaaggaaccacttcctaactcattctgtgaggaaagacatcacaagaaaattacagatcaatattccttataagtgtagtacaaaaatcctcaacaaaatactagcaaactgaatgtaggcacatataaaaggcttttatatcataaccaggtggagtttatttcaggaatgcaagratggttcaacataagaaaatccagccatgcaatgctctacattaatagaacaatttaaagaaatgcagaatcacctcagctaacccagaagagcatttgacaaaattcaaaacacattcccaataaaaacactcagaaaactaagaattgaagggaaattcctcaacataattaagcccataactaatatcatactcaaagataaaattttctaaattgttattaaaattacattatgacagtaaagtcattataattgtattagtttgctatggatgcaata

SEQ ID NO: 197364 - DNA, 518 bp, Homo sapiens
gtgttattccgtttagcacaccaatttgttatctaagttctgcaatatttttatcaatcttayaaaaactgcaaaggagagattagaaaaataattaatttcaccttcaaattatctaaaatgatagagactagaaattccacttttatggtgtcctagaacaatctaataaaaatggtcatagttactagtctgtataacaataaaccaaaagagtgtgtgtaaacttgtgtatattgaaaaattcagtgaaggcaactgagatgagttttcagcaaaacaatattgaaatcaaattataaatcaagaaattgttttgtacagtgtaatacatcctattaaagtgggatgataaaactgctgagagaaaacatggagaagcagaatatacctgtgtttcaccagtgctggcctccaagaaagttgcacaaagaaagattttagtactttcagcagctctctgtaaattggagatggttacataaagctattataattgtatacaactagacattaat

SEQ ID NO: 197365 - DNA, 518 bp, Homo sapiens
gtgttattccgtttagcacaccaatttgttatctaagttctgcaatatttttatcaatcttacaaaaactgcaaaggagagattagaaaaataattaatttcaccttcaaattatctaaaatgatagagactagaaattccacttttatggtgtcctagaacaatctaataaaaatggtcatagttactagtctgtataacaataaaccaaaagagtgtgtgtaaacttgtgtatattgaaaaattcagtgaaggcaactgagatgarttttcagcaaaacaatattgaaatcaaattataaatcaagaaattgttttgtacagtgtaatacatcctattaaagtgggatgataaaactgctgagagaaaacatggagaagcagaatatacctgtgtttcaccagtgctggcctccaagaaagttgcacaaagaaagattttagtactttcagcagctctctgtaaattggagatggttacataaagctattataattgtatacaactagacattaat

SEQ ID NO: 197366 - DNA, 521 bp, Homo sapiens
cttgtaccaaaccaagcaaaattcacattgcctgtcattcaattaaaaagaccaagtatccaaagaaccaggaaaatatgactggcccatcattggagaaaaatcaaccaattgtaactgacccagaataggaacagatattaaaattagtagacaggacatgaaagcagtcactataattattccttatatgttcaaaagctagaggaaggattgaacatattaagtacatgggacaaaaagacatggagacatggggggttatacatatatagagagagatatatatacacacacayatatatttacacacacaggggaatttatatatcatgtgaaactatcaaatacataagatatataatagagtcttatatattatatactatatatctgttataaagttcaatattatatatgtcatattacatatgaaatatgagttttatattatatatattcccccatatatatacacacatatataggcacacacatatacatatatatgtgtgtgtgtg

SEQ ID NO: 197367 - DNA, 516 bp, Homo sapiens
gagcaatgtgtttaaaataatgaaataaaaaactcaacttaaattttacacaaggaaaaaatatatttcaaaagtaaagacaaatacgaacttttccagacataaaaaagttaaaaaaaattatcaccagaattcacactatgagaaatgctaatraaattcaagcagaagaaaagtggcactggataaatatctgaatcaacacaaaagaaaaaagaacactgaaaatcgaagctatgtggataaatatattttttcttactgtttaaccaaatagtattgttaaaacaaagaaataacaatgtagcatgggggttataatatttgtagaaataaaaatgcttatccacatagctttgattttcagtgttctttgttcttttgtgttggtgaatacataacaatagcataaaggactgaagtggaaaaaattacaatatgtaagtaagattcccatactatatatgaagtggcacaatagcacttgaaaatagactgtgataagttaaagattta

SEQ ID NO: 197368 - DNA, 567 bp, Homo sapiens
gtgatatatacatgtattgaaacaaccttatacctcacaagtagatgcagttattatgtcagttaaaaataaaactaaaaaaawtttttaaaagaatgtgccttaaaaaatattttgttcttttcattaaataataatcttagtaacactgacagtgagaatctataaatttagcaatttccaaagcaatcattttaattggatttagaagggatattatagtggataaaaccctcagaatattttatgtagtagtgccatggtttattaaacagaattcatttaaagtacacatgcaacacatcccgatagtttcttacaaaccttgaaataagcaattattgagaagagttgagagggtgattttctgagtttaacgaagaaggccttacatctagaagcttgcagtcttcttgaagatagagattctgagttggttttggctcagtgtcacccttgcctgaaatagtatgtggaaagccacaataatgggaatgagcatagtgtatctgggggaggagtagacaggtcagtccagctgaatgccgtgtatgtatgtttgtgttt

SEQ ID NO: 197369 - DNA, 496 bp, Homo sapiens
acatcccgatagtttcttacaaaccttgaaataagcaattattgagaagagttgagagggtgattttctgagtttaacgaagaaggccttacatctagaagcttgcagtcttcttgaagatagagattctgagttggttttggctcagtgtcacccttgcctgaaatagtatgtggaaagccacaataatgggaatgagcatagtgtatctgggggaggagtagacaggtcagtccagctgaatgccgtgtatgtatgtttgtgtttgtgtgtttatacaccaagtgtaaaataaaataaagtacaagtcataaaattggacatgttayggatagttttgtattgtcataaacacatttacactcaataaatgtggaacgaataaatcaaaggacaaaaagctttgaatacctaatggaacctgagggtgttcatcctgaaggtaactagaagatataagttatttctctctttgtggccagaaaggctagaattc

SEQ ID NO: 197370 - DNA, 616 bp, Homo sapiens
aatttttggagacaaaactgttttttactcttctagaaaattatttccattgtcttttacagtcccttgaacataaaaactactcaataaatattttttaatttaaaattttgaatagtgtaggactggtgatctgtgtcaactgtagcaccttyctttcaattctcagcacctagtaagattgtaactagtcagcttcattgacagaaacagcctaaagcaaagtatatttcacagttattaggttggtgcaaacataactgcggtttttgcattgttgaaatttgctgtttgatattgaaatacagtcttaaataagtgttgttatgttatacatcattttaatgtgcatttcttgctttatgttgttttgctaatgacttacttgctgtttattttagatttatcttagactatggaaatgatgttagacaaaacacaaattcgggcgattttcttatttgagttcaaaatgggtcataaagcagtggagataactcacaacatcaacaatgcatttgacccaggaactgctaatgaacatacagtgcagtggtggttcaagaagttttgcaaaggaggtgagagtgttgaagatgtgaagcatagtggccag

SEQ ID NO: 197371 - DNA, 616 bp, Homo sapiens
aatttttggagacaaaactgttttttactcttctagaaaattatttccattgtcttttacagtcccttgaacataaaaactactcaataaatattttttaatttaaaattttgaatagtgtaggactggtgatctgtgtcaactgtagcaccttcctttcaattctcagcrcctagtaagattgtaactagtcagcttcattgacagaaacagcctaaagcaaagtatatttcacagttattaggttggtgcaaacataactgcggtttttgcattgttgaaatttgctgtttgatattgaaatacagtcttaaataagtgttgttatgttatacatcattttaatgtgcatttcttgctttatgttgttttgctaatgacttacttgctgtttattttagatttatcttagactatggaaatgatgttagacaaaacacaaattcgggcgattttcttatttgagttcaaaatgggtcataaagcagtggagataactcacaacatcaacaatgcatttgacccaggaactgctaatgaacatacagtgcagtggtggttcaagaagttttgcaaaggaggtgagagtgttgaagatgtgaagcatagtggccag

SEQ ID NO: 197372 - DNA, 588 bp, Homo sapiens
gggctaggggaggcttagcattaggagaaatacctaatgtaaatgacaggttgatgggtgcagcaaaccaccatggcacatgtatacttatgtaataaaactgcaggttctgcacatgtaccccagaacttaaagtattattttaaaaattaatttaaaaaagaaaattaaaactgcaataagttattgctatatactcattatgatcattaaaacaaagcagactgataatatcaattgttggtaatgatggggagtccctggtactttcatacactaagggattctaaaatgatataacygctttgaaaaacttgttggcagtttctcctgtgaaaattgtcagaatcaacgtggagtcactaatgttgaaaaaaaaaaccctgacaaatagagccagggaacaccatgaagagagggttctcctgctcatatgcttgataataaaaagtatcacaaaagaatctgtgaaaatcataatcttgcaaaaagaccatcacatccttatacaaaaaaatacttctgcaaggacatctgcccagcaactggctgtcaaccctcagactggtgtcacccttttaattgatc

SEQ ID NO: 197373 - DNA, 596 bp, Homo sapiens
aaagcttgaaacaataagccaattcaaagagataaaaaggagaagcaactggcagatgaaaagaaacaactgactccagtggcttttttcaatagccatgaaaatcattcttttttgctttacggattttagtacccactatcaatatttgcctattgtcaactggggagagattaaaagtaagttgggtctaaatgctcttgaatttgcatggtgatgttttgtctctgaatgttatctattctgctagctgattattgatactaaattgccccatagagcaggttgcggctgtttttagccttctttctattgcagaartcaatgtgacttccctgctgaaaaaatggaaagaagaaaaacaaataaggaacaagaaagctcttgctagttgtagcattataaaagatagttatgtatccagaatacatctacacagattaaccattttacccattagataattattttattcaaataaaagtattattaagtatatactatataatattaagtattaagtattttatccaaataaagtattattaaatattattttataccaaaaaagtagaaagaaaagaagtagtactata

SEQ ID NO: 197374 - DNA, 475 bp, Homo sapiens
ggagaaaccgcccccatgattcaattacccccatccagtccctcccacaacatttggaattacaattcaagatgagatttgggtgggcacacagccaaaccttatcaaacattgtatccttgtgagactaccgtgttccccaacaatctaatggccaaaattttagcctctgtccatgttcttgcctaatcaaatgttatactggagctgcaatagtgattcttaaatatacatgttttccctacatttattagtctctcatttttttggaatatctctgytgactcaagatttttttttgtttattcaaatgttttgtgatcctttaccatcattgttatttattctctatttttggtattcaaattttttccagagtagaccagcagtggctccttgaatgtgatttctgagtccttttaacatgactccctccattagtctctgagtacttccttgtttctaacgccacaaa

SEQ ID NO: 197375 - DNA, 475 bp, Homo sapiens
ggagaaaccgcccccatgattcaattacccccatccagtccctcccacaacatttggaattacaattcaagatgagatttgggtgggcacacagccaaaccttatcaaacattgtatccttgtgagactaccgtgttccccaacaatctaatggccaaaattttagcctctgtccatgttcttgcctaatcaaatgttatactggagctgcaatagtgattcttaaatatacatgttttccctacatttattagtctctcatttttttggaatatctctgctgactcaagatttttttttgtttattcaaatgttttgtgatcctttaccatcaytgttatttattctctatttttggtattcaaattttttccagagtagaccagcagtggctccttgaatgtgatttctgagtccttttaacatgactccctccattagtctctgagtacttccttgtttctaacgccacaaa

SEQ ID NO: 197376 - DNA, 475 bp, Homo sapiens
ggagaaaccgcccccatgattcaattacccccatccagtccctcccacaacatttggaattacaattcaagatgagatttgggtgggcacacagccaaaccttatcaaacattgtatccttgtgagactaccgtgttccccaacaatctaatggccaaaattttagcctctgtccatgttcttgcctaatcaaatgttatactggagctgcaatagtgattcttaaatatacatgttttccctacatttattagtctctcatttttttggaatatctctgctgactcaagatttttttttgtttattcaaatgttttgtgatcctttaccatcattgttatttattctctatttttgrtattcaaattttttccagagtagaccagcagtggctccttgaatgtgatttctgagtccttttaacatgactccctccattagtctctgagtacttccttgtttctaacgccacaaa

SEQ ID NO: 197377 - DNA, 537 bp, Homo sapiens
tgtttgatactgggatgttatcacttccaggacactactcctttattaaaggagaaagacaaaaataaaggaatctagtacccaccttaaagaattagaaaatatatagtaatgatattacaaatatttcaagactaggaataataaaatttaaaaattcttgtagcaagggagatcaaaagcaaaaccaatagtcaaacaatacaactggaagaaatatttgcaattcaaatgacaaaacccaatatctacaattccaaatatatktatattctaaaaaaaaaagacaaaacacccaaaggaaaaatttataaagggttaaactgaagttaacaattgagcaaattcagtcaactagcaaacacgtgaaaatgcccaaatttgctagtcatgataggaatgcaaatgcccagtcacatttaactgaacaatttaactgaacaacctttgaaaatggacagctccctgacttaagtggatatgggagaaaggatgcccacacatttgggagaaaagtgaattatcacatacgtttca

SEQ ID NO: 197378 - DNA, 537 bp, Homo sapiens
tgtttgatactgggatgttatcacttccaggacactactcctttattaaaggagaaagacaaaaataaaggaatctagtacccaccttaaagaattagaaaatatatagtaatgatattacaaatatttcaagactaggaataataaaatttaaaaattcttgtagcaagggagatcaaaagcaaaaccaatagtcaaacaatacaactggaagaaatatttgcaattcaaatgacaaaacccaatatctacaattccaaatatatttatattctaaaaaaaaaagacaaaacacccaaaggaaaaatttataaagggttaaactgaagttaacaattgagcaaattcagtcaactagcaaacacgtgaaaatgcccmaatttgctagtcatgataggaatgcaaatgcccagtcacatttaactgaacaatttaactgaacaacctttgaaaatggacagctccctgacttaagtggatatgggagaaaggatgcccacacatttgggagaaaagtgaattatcacatacgtttca

SEQ ID NO: 197379 - DNA, 537 bp, Homo sapiens
tgtttgatactgggatgttatcacttccaggacactactcctttattaaaggagaaagacaaaaataaaggaatctagtacccaccttaaagaattagaaaatatatagtaatgatattacaaatatttcaagactaggaataataaaatttaaaaattcttgtagcaagggagatcaaaagcaaaaccaatagtcaaacaatacaactggaagaaatatttgcaattcaaatgacaaaacccaatatctacaattccaaatatatttatattctaaaaaaaaaagacaaaacacccaaaggaaaaatttataaagggttaaactgaagttaacaattgagcaaattcagtcaactagcaaacacgtgaaaatgcccaaatttgctagtcatgataggaatgcaaatgcccagtcacatttaactgaacaatttwactgaacaacctttgaaaatggacagctccctgacttaagtggatatgggagaaaggatgcccacacatttgggagaaaagtgaattatcacatacgtttca

SEQ ID NO: 197380 - DNA, 562 bp, Homo sapiens
gttcttgtctcacacccaggaagaatgaggtacaggtacaacgtggagggtaggcaaggtgaagagaagctttattgagcaatagaacagctcagaggagaccaacagtgcgtatcctttctgtagcgaggatgtcccaacaagtgttcagctctcagcagagaggagaccctggggtgggtagctcccctctgcagctggtcatcctgtcatctttttgagtctggctgagtccaaggtttttatgggcatcagaggagaggaattacatgctatcagtccatggacagccatgggcaggcccagaaaaagtactataagttcctactccmgtccacagggctggaatcctggcccctagacttcaggctagaccacctgggacccacccttttccagccagggcctatctgcctcctggcactgttcatggtgccaggctgttcatgcggaggggtacctgcagaccagcaccaagctgccctcagcactccgtcagcttccctcccatgctcattggtgcccaaagtcctgaaggggctgaggtgccaggggtttggcc

SEQ ID NO: 197381 - DNA, 471 bp, Homo sapiens
cattttattaattttctatgttctatcactaatgtttctcacatgctctaccaaatccaacatctaccaayattgtttttcaaatactaaaatgcatctgataaccttgttagtcacagtttttgttctttaaaatgccacctgtccttctcttccaatctttattaagttataaagaaagttttaaaaaacagatatctggtaaattgaagagtccgtatttggagaatttaagaacatttaaaggcattccctactcagtcaaaacagataaaagatcactgatcttctaagacttaatatttgcatcaccttgagattcattgcctagtgctgctcaatatggaattctaaaaatataaaaaatatttattttagtaaagcattgggtgttacaaaactgtttttaaaaaatgaaattgcaaagtaatttttccatgctaacacattaagttaaactaggatacttaa

SEQ ID NO: 197382 - DNA, 462 bp, Homo sapiens
aagatagtttgctcaaagtaggatccaaattatgtccatactcaaatgaaaatattatccaagctgggagaatgtgtggttccaaagactgactacaaaataaattatgagcttaaatggattaaaatcatattaaatatgtagaaacttcaaaactccacaaatcaaaagtatgtcatgtacggatagaaattttttcttcactgatgagatagaaaaagratttgtctggcacaatgtatgaccctttgtctattcaaaaatgatcacagctaatgcaaaacatttaacagaaagataaatttaatgttaacaagcacatttgataattgtcccaggaaagattataggtaactggatggaagtatttttcaagtaatctaggatagtcaacattttaaatgcaccacagagacatttatctcagcaattcagcaaagcagcatcaactcttgagtcaga

SEQ ID NO: 197383 - DNA, 556 bp, Homo sapiens
cccagaggacacaatattgaccaaagccatcaggtgtgcactgttgggaagagcaccaacactactaaggagttccgtggtggctatcctctgtgggccagggctgatgttaggaggagtactcacatagtttggctcattaacagcaatggggatgatggccacagctcacccaagcaatgtaggcctagtgaagctcttcacttgtttctttccctcttgctgtctctctcctcttattgctgcactcaagttgcctagtttccccatctaggtcaaatttggcaattggcagtacttgtatcatggtgctattctgagtgtggctaattcagttacagggatatctggcaactctatgtcctataatgtcctgggtcttctgtgtttyatgagctgatgccctagttagaaactggcagaggcaattttcaacctcttttcagaagggataatctcagggatgggccttgattctggctgcctacttatatgaagattttaaacctggtcatctctgttttcagccttaatgtccagccagcttgtgacttca

SEQ ID NO: 197384 - DNA, 570 bp, Homo sapiens
gatctctcattctaaacaattaccttgtatctatgagaggatcaaattttaaaaagacacatgactagtgtcatggctagccttagaacttctcttgacaatggctgggtgtggtgactcacgcctgtaatcccagcacttaggargccaaggcaggtggatcacctgaggtcaggagttcaagaccagcctggccaacatggtgaaaccccatctctactaaaaatacaaaaattagccgggagtggtggcacacgcctgtaatcccagctacttgggaggctgaggcaggagaattgcttgagcctgggaggcagaggttgcagtgagccaagatcgtgtcactgcactccagcctggctgacagagagagactctatctcaaaaaaaaaaaaaaaaaaaaaaattctcttgagaaaattaaagagaaaaaaatctgacctaaaacaaagttaaaatcctttgtacactaaaactacctactttggactcctgacggatttacaataaggtgcactccatcctgtagtctagtggttagaattccacaagttcaccaccatgacctag

SEQ ID NO: 197385 - DNA, 269 bp, Homo sapiens
ttgaaatatgagatagttttcacttccctcaatctaagccmatttgcacgctgcctttttggcctgttactaataatatctatccatatctcctaatcactgtacagattatatcctatttttacatacccttggtcataccagtagaatttgttgtggagaaagactgtcttcatttgaatttcttaaaagcagaactgagacaatgatttaagtacagttgtttatttggaaaatgacccaataaaaatagtaagaaagtgagtagt

SEQ ID NO: 197386 - DNA, 545 bp, Homo sapiens
tctcacttacaagtgggagctaagctatgggtatgcaaaggcatacagagtagtttaatagacactggagactcagaagcaggaggattggaggtaggtgagggacaaaaagtcacctatggtgtcaaggtacactatttgggtgacaggtacactgaaagcccagacttcaccactatacaactcatccatgtaattaaaaaacactgtacatttaaagctactgaaattgttttaaaaaagatgattgatcatgattatgtgggattcatcccrgtgatgcaagaatggctcaacatatgcaaatcaataaatgtggtacatcatattaacaaaatcaagaacaaaaaccatatcatcatttcaatagatgttcaaaaagcattcaataaaagttatcataacttcatgataaaaactcttaacaaactgagtatagaaggaacatacctcaaaacaataaaggccatatatgacaatcccacaaataacatcatagtaaacagagaaaaaataaaagcctttagtctaagatctggactaag

SEQ ID NO: 197387 - DNA, 452 bp, Homo sapiens
caatttgtccttgaggtcatgagtagctattgtattccctaagcttatgggtctcgtggcacatttttgaaagaacgatggtgttaactcagctgaactagccaaattccaagcaagctaattrcattccttcgaacttaaattccatgatttttcacaaactccaatgagataggctctttcagtacttgattatttttttatttgacattttagaaaacagacacactacatgtgcgaagtagcaaatgaaagttagtatcctggtcagataattgatgtaacgttgttttaattctgcttcaattccacaaataatgagtttatttttttattttactttctctcaaaaagtggattcattttttgtctggaaatgttagataaactctttaaaatggtaaggagaaaattttacagatactattctaattaaaatgcaaatactagtg

SEQ ID NO: 197388 - DNA, 452 bp, Homo sapiens
caatttgtccttgaggtcatgagtagctattgtattccctaagcttatgggtctcgtggcacatttttgaaagaacgatggtgttaactcagctgaactagccaaattccaagcaagctaattacattccttckaacttaaattccatgatttttcacaaactccaatgagataggctctttcagtacttgattatttttttatttgacattttagaaaacagacacactacatgtgcgaagtagcaaatgaaagttagtatcctggtcagataattgatgtaacgttgttttaattctgcttcaattccacaaataatgagtttatttttttattttactttctctcaaaaagtggattcattttttgtctggaaatgttagataaactctttaaaatggtaaggagaaaattttacagatactattctaattaaaatgcaaatactagtg

SEQ ID NO: 197389 - DNA, 464 bp, Homo sapiens
tcatcttactcctgatgttagtgggggatgcattcagttttttataatcaagtatgatgtcaagagtagagtttccctagacagcttttatgaggttgaagaaattctcttatatttctagcttggggagaattttttttaatcaggaataaatattggattaggtaaatgctttttctgagtctattgagataattatttatattaattatataattatattaattatatggcttgactgtattttgytaatatgatgcagtgcattgatttttagaagttaattatatggttatgtggttgtgttattattggatgatcggattctttttgctaagtttttttttttttttttacttttttgcatgtatgtttatgagggattttcgtctgtagtttacttttttaaatacatcttagtcaggctttggtatcagagtaatgctagcctcatagaaagagtt

SEQ ID NO: 197390 - DNA, 547 bp, Homo sapiens
ttcctttcaacatttgtggaatcattcatgtctcttattctcaacaatggcaatttaagtctccttactttttctcccaatcaatttggctagagatttagtcattttattaatatctcaaaaaaccagattctgtttttatttcccgttctctaattcgttgacttccactctgatttttattacttccattcttcttctactttgggcttcatttttaatttatttccccactttctgaaggtggaagttgaagtcattgatttgagatatttctacatttataatatatatttttagtgctaagtgtatttattttagttgcaacttacacattttgatatgatgatatgtgttttcttatctactgttttaaaaataaakttttttagacagggtctcactctgttgctcagactggagtgcaatgtcatgatcatagctcatggcagcctcaacctcctgggctcaagcagtcttccagcctcagcctcccaaaaagctggaactacaggcacatgccaccatgccaggctaatattaaaaa

SEQ ID NO: 197391 - DNA, 547 bp, Homo sapiens
ttcctttcaacatttgtggaatcattcatgtctcttattctcaacaatggcaatttaagtctccttactttttctcccaatcaatttggctagagatttagtcattttattaatatctcaaaaaaccagattctgtttttatttcccgttctctaattcgttgacttccactctgatttttattacttccattcttcttctactttgggcttcatttttaatttatttccccactttctgaaggtggaagttgaagtcattgatttgagatatttctacatttataatatatatttttagtgctaagtgtatttattttagttgcaacttacacattttgatatgatgatatgtgttttcttatctactgttttaaaaataaagttttttagacagggtctcactctgttgctcagactggagtgcaatgtcatgatcatagctcatggcagcctcaacctcctgggctcaagcagtcttccagcctcagcctcccaaaaagctggaactacrggcacatgccaccatgccaggctaatattaaaaa

SEQ ID NO: 197392 - DNA, 548 bp, Homo sapiens
attatttttatggttttagcttcccttactttctagatgctgcagctgtgtccttattgtattttacagccagaaaaaaaaaatcacccctcagcagttcctataatttcaaatttataactatggccagggtaattcacccataagccaactagaaataaaaatagaggagatagacccatctgttggagtgatttcttaactgcagaaaacattttcctttctttaaaagcaaagctgtaaaatctgtataaattccaattcgtaaaccatgaaactctaatttttccacttctctagtcactttgagtaaatgattttgcatatgtgggatgtcaaaaatcaacaaaatgttccaagggagtgtgagagattgattttgactatacaaaaatcttttaagtgatagcaagaagatatttcaggtaaattagaaccaaaaagaattctatgttgcttggaccaaaactctgtatcttcagttagtgtttttttatgccttataagcacatttcaacattttatttygttgttttaaattaactatg

SEQ ID NO: 197393 - DNA, 618 bp, Homo sapiens
attcaactgcgtgaaaactctctcatgtgctatttcatatgcttacaaaccctgcgccttattggtttgtatcttcagtgccatacttagactcctaggactaaggtgcttaccaaatgtcccttgaaggctgaataaatgtataaatgttgaaaagagtcaaccaaaatgtgtatgaatagttaatgagagaattaacacgacaaaaaagaaggagcaggagattaaaaaaataaaataaatcctacctacattagaatctcatgtatatctatcattatctgaagttggagaatctccaaagttctcaaataaattgtttttttctggtgaattctaaatggaaaatgcaattagtaattasattttcaatagtatattattctctcttcatcatcttttttaaaatacataattttagcttttgttttagattcagagatatacattcaggtttgttacatgggtatgttggtgatgctgaggtttgggggacaaattatcccatcgcccagatagtgagcacagtatctaatagacagtttttctacccctgctgccctcccttcctcctacctctggtagtccccggtgtctgttgttcccaagtttatgtcc

SEQ ID NO: 197394 - DNA, 555 bp, Homo sapiens
cagggtagaacattcagagttagagataaamgtcacataatgcttagtactctaaaaccagtgattcgtaatagcgaattaaggctttcatttttaagagtggcctattagtgcacaaatccctcagtaaaatgatgcattatacaacaaaccattaatatcttaggggggattcacttatcagattattttccaacattagagttggctgagatggaatagtatacataactggtgaattttgaaaagagcctaagagagaaggtcaaccagaagtctcatgttgtatgcatgtccttaccctcttgcattattctatatgctgaaaacaggtattttgttcatattggggtttcctgcaatatcccccttcttccataaaatatcgaaaatcctttagtgctaacaatcagaaatggacatgacttacatgattttggtctcatgtagaaagatttttgaacttcttgttttaggtaggggttgactttattttgagcaattaacactttgttataattatttatttacttatttctttccctacccaactgt

SEQ ID NO: 197395 - DNA, 602 bp, Homo sapiens
ataattccaactatatgagattctggaaaaggcagaactatgtaggcagtaaaagaatcagtggttgccaggggttagaggggagggagggatgaataaatgaggcacagaggacagtgaaactactctgtatgatactataatgccgggtacatgtcattacacatttgtccaaactcagagaatgcacaacactaggagtgaatcctaatgtaaactacrggctttgggcaacaatgatgtatcaatgtaggttcactgactataacaaatgtcccactctggtgctggatgttaatagtgggaggggctatatgtgtgtcggggcagcaggtaaagggaaaatctctgtaccttcctctcaattttgctatgcatacaaaattgtcctaaaaaagaaagtccatttgagaaaaataaaacaaacagaattccctatgaattagaaaatcttactttaaaatcaatattttgcctgaagtactgtatcttcatagatatgttagcaggaagttggaagctctgtttcaaggaatgctaggtagatcttgttctcaaccagacctgccctcagaccattataataattgtattgtgatatt

SEQ ID NO: 197396 - DNA, 505 bp, Homo sapiens
caggaagttggaagctctgtttcaaggaatgctaggtagatcttgttctcaaccagacctgccctcagaccattataataattgtattgtgatatttcttcatgtgtcttgaagataaaatgcatagctctaggagaatggtgtgtttgagtgctgtctaggagaaaggtgtgtttgagaaaggtgtgtttacagctataaattttcctctgagcactactttctcaccrtcctgtaacttttgttatattgtgtttttgtttttatttatatcaaagtattgagtttaatttttcaatgaaaacgagcgtgagttcatttttattctatctacaaattgtataagaaaggagtcacagctataaagaagtacagaaataaactcatatatttgtgataaactgactttcaacaaggctactaagacaattcaaagaggaagggatactctttcaatggtgttaggatgaatggatagctacatagagaacaaggaatttagacc

SEQ ID NO: 197397 - DNA, 505 bp, Homo sapiens
caggaagttggaagctctgtttcaaggaatgctaggtagatcttgttctcaaccagacctgccctcagaccattataataattgtattgtgatatttcttcatgtgtcttgaagataaaatgcatagctctaggagaatggtgtgtttgagtgctgtctaggagaaaggtgtgtttgagaaaggtgtgtttacagctataaattttcctctgagcactactttctcaccatcctgtaacttttgttatattgtgtttttgtttttatttatatcaaagtattgagtttaatttttcaatgaaaacgagcrtgagttcatttttattctatctacaaattgtataagaaaggagtcacagctataaagaagtacagaaataaactcatatatttgtgataaactgactttcaacaaggctactaagacaattcaaagaggaagggatactctttcaatggtgttaggatgaatggatagctacatagagaacaaggaatttagacc

SEQ ID NO: 197398 - DNA, 519 bp, Homo sapiens
aactccagccattgcacctggcatggaacatttgataatatgacataggaagcaaatgtggagcaaggattttaaacctttccttcttccctcctcaccttattcactcccagatgtcagtaggacagcattcttatgctactgtggcacaatgttttgcagtgtatacataatggaaaagcataccttcagtattgcatggattcatgtaataataaaaatcaaaatagctagttgatactttagggtgaatatagttaacaagcatttattgtatattttcaaaaagctagaagagaggattttgaatgtttccaatacacacacacacaaaatctttgaggtgatgaatatgctaaatatcctcactggatcctcatggattgtatatatgtatggaaatatcactctgtatcctataaatatgtacagwtattacatgtcaactaaaaataaaatgaaatgatacaaaaaagtacgcagaaaaaagaaataggtagttaaggagggttttcattt

SEQ ID NO: 197399 - DNA, 608 bp, Homo sapiens
ttgaagaaaaagcctgaaggactgaaagacaggctgaaaggtggtcttaaggacaaaggaagagaatgaaccaatggttggaaatagtaggacacagatgaggtatggatagatggatgtcagttaagctcagaaatcggttatgatactgagtaattcattgagggtcattcagtcaacaaatgcttattgakaatttaatataatagttactattgattgagctcatgctttgtatcatgtactttactgagcactttattgatttaatccccacaatgatcttattatcccctctttacaaaaagaaaacagaggcatggagatctcaaatagacatttttccagatctcagcttgaaagccagggttgaagcatagggcttctaactgtagagcacattctcctagttactgcattgtaccacgtgctagactttgagctgtagtggtgaacatggcagacatagcctttatcctcagagagacagagtccattctttgtattcttctgtacagctagagcatagcactaggctggggatagatgttctaacaaggagagcagtcatctcacagctctataattttttttttgcagaattgcaa

SEQ ID NO: 197400 - DNA, 466 bp, Homo sapiens
caaacccagcagaagaaaggacataaccaagatcagagcagaactaaatgaaattgaaacaaaaaaaaatacaaaagataaatgaaacaaaaagctggttctttgaagagataaataaaattgatagatcattagcaagattaaccaagaaaagcagagagaaaattacagttgacaccactgaaatacaaaagatcattcaaggctactgtgagcacctttatgcacataaactaggaaacctagaaaaggtggataaattcctagaaaaatacaaccctcctagcttaaatcargaagaattagacatcctgaacagaccaataacaagcagtgagattgaaatggtaattgaaaaagctaccaagaaacaaaagctcaggaccagacggattcacagcagaattctaccagacattcaaagaagaattggtaccaatccttttgacactattccacaaggcag

SEQ ID NO: 197401 - DNA, 466 bp, Homo sapiens
caaacccagcagaagaaaggacataaccaagatcagagcagaactaaatgaaattgaaacaaaaaaaaatacaaaagataaatgaaacaaaaagctggttctttgaagagataaataaaattgatagatcattagcaagattaaccaagaaaagcagagagaaaattacagttgacaccactgaaatacaaaagatcattcaaggctactgtgagcacctttatgcacataaactaggaaacctagaaaaggtggataaattcctagaaaaatacaaccctcctagcttaaatcaagaagaattagacatcctgaacagaccaataacaagcagtgagattgaaatggtaattgaaaaagytaccaagaaacaaaagctcaggaccagacggattcacagcagaattctaccagacattcaaagaagaattggtaccaatccttttgacactattccacaaggcag

SEQ ID NO: 197402 - DNA, 606 bp, Homo sapiens
acttccaagcaggaatcacatgtacccttaaccccaagttttatattttcgccagtgattttttttaaacttatagtcaacatgcttgaaattctgaaagttctttaaaaaacaaaaacaaatcccaaactcttgtaagagtagaaaaaacagcttgacaaagtaaaataatcaattgcaagttggtgaacctttaaagagcattaattcaattggataaactgcagttaaataacttttatcaagcaaactgggttagrtggttaaaagcaagaaaaaaaagtcctaaaaacatacagtgggtagcagtttatgtgtcaagaaaaactgagagaatttttgaagctctgatgtctagcagatagcacttaaatcatttttctccaaagttcagtcatagtacttcaaagagttatagccataatacaaatttttagactaagaagtggtgtttgaagttattttataggattttgctgtaagggctccaattgatttgtagtaagataaaagaagaaaactttattttcgaagctttgtcagaaaaagcttacctcccattggttgttctgccaatatgcctgcagggcatgatgatgtagacac

SEQ ID NO: 197403 - DNA, 451 bp, Homo sapiens
atgaatgaataaatgaaatagggtaaagagttatgctgtccagaaattctctacacatactcatacagcatgtggctattagctgtgccaaaacatgatactttcaacaataatcatgatgatactcatttcaagcattgagtgcctgtcatgttctaggaaccacgcyaagagctgtatgtagagatctcatctaatccttgtcagatcccattgaattaagcccttttatcatcctctgcatctgaagaaactgaggcagagtgaagttaagtagttaattcaaagatcactcagctgataagtagagaaaccaatatttaaatctaactggctcttatgctctttctacaggtcttctttcatcaaaacttaccttttacaatgatcctccgttagaaaaggacattagaattccttttctttcttggttcctggtttatttgggtaa

SEQ ID NO: 197404 - DNA, 649 bp, Homo sapiens
aaatgatgccagatgaaaatttctatctaaacaaaagaatgatgagcatcaaaaaatggtaactatgtgggtaaatacaaatagtttcattacttaaatctccttcaaacagaatcaactctttaaagcaaaaataaaacaatctattgtgtgatgaatagcatattgctatggtttcaatatttgtactctccaaaactcttgttgaaatttaattgccattgtaatagtattatgaggtgggacagttaagaggtgattagaccatgaggactccaccctcacagatggattaatgttgttatcttgggagtgagttcactataaaagggcacatttaggcccctttttgctctttcgctcttttgccttttgacatgtgatgatcaataagaaagcccttaccatgtgatgctggcaccttgatattggacttcccrgcctccagaactgtgagccattacatttctattcattgtaaattacctaggctcaggtattctgttatagtggcagaaacagactaagacacataaatagaaataaaatgtgtaataacaatagcaaaaaccccaattacctttgcaccaacctaataacctgtccaggattgagtctttcatacttaatggtaactgaccagtctatc

SEQ ID NO: 197405 - DNA, 661 bp, Homo sapiens
gtaggatttttgtggacttttattccattgacctattttgcatcaataccaggctatccccatactgtaattttacatgtgttgttatcctgcagttcaagttctccaactttgttcttctttttcaagattgtcttgaccaggagacaacaaactgtgggtggcttatgaccagacagctgaagtgataaataaagctttttgaaatgaaagggaatacagccattcccttttatttacatattatctgagtgctctctgactacaatggccaaattaggtagctgtgacagggacagtctggccaaaaaaacctgagataattaccatctggctcttacagaaaaagtttgctgacctgtggtcttgctgattcttgatcstttacatttccatataaattttaaaattagtttaaaattagtttttccttttctttctttctttctttctttctttctttctttttttttttttatttctgagacagagcttgctctgtcaccaggctggaggcagtggcactatctcagctcactgcaacctctgcctcccggattcaagtgattctcctgcctcagcctcccgagtagatgggactacaggtgcatgccaccacgccaggctaattttttttttgtacttttataaggcaatttgg

SEQ ID NO: 197406 - DNA, 557 bp, Homo sapiens
tttttgttgcagccatttggatagatgtgtagtaatatcttattatggttttaatttgcagttctcaaatggcaataatatttaacatcttttcatttgctgttttccatcgacatatcttcttcgacatatagtgacatatatgtgcacatcttttgttcatatattttgtccacttgcttcagcaacatagttgaaaaagctatcttcctccactaaattgctttgggacctctgtcaaacatcagttgggcatattggtttgggttatttatttctggtttctctattctgtattaattaatctccwggtctagccctctgcctaaatatcacacagacttgattactgtagctatataataagtcttgaaatcatgtaggctgatttctcccactttactctttattttcaattttgttttaccaattctggttcctttatcttttcatatatgttttaaaataatctttctcacatttagaaaaaatcttaggttaaacctgttatcaactgcggaggaccaacacctttactatgttgaattttccaatcc

SEQ ID NO: 197407 - DNA, 543 bp, Homo sapiens
gtgtctggttccagttgttgcctaggaacccaggcaatcccagagggcaaaggatagccctctccttacccaaaaccttcatactaaaatgtaataattccctccttgcaataataaactgttattccaaacttatttattcattcactcataaaaatattattgaggacccaataatattcttaggcaccagatatatatctcaataatacctctaggcaccagagatatagccatgaaaagagagacaaggtttckttcttcagataacttgcacatggtgagggagacagatatgtaatgtaatttcagcaattaataagggctacgaagaaatgcaaaacacggcaaggtaatgatggcagcaggagtactattttacttatttttaagttttattttatttttagtggacacataataattggacatatttatgggacacagtgtgatgtttgaatatatttatacatagtgtaatgatcaaatcagggtaattatcatatccatcacctcaaacacttacaatttctttgtgaaaag

SEQ ID NO: 197408 - DNA, 572 bp, Homo sapiens
atcttgggagtttgtatgtttccaggaatttatccattttctctagattttctaatttgtgcatatatcttcattgtatttgtttgtgtaatggaaacccaactattcttgtcaaattgttcaaaatcttcattacactgtatagacactatttaatcaaggatatgtaatttataggcttaaacacctcactgactaactttatactttcaaatgggaagagttattcactgcaaatggcaattattataaactttcaattctcagaagtgttttgaaaattaaygttaacaaaacagtgtcaatgaatgacaaaaccaagatgttacaatattgtataaatataaatagagaaaattgcataagaaataaaattcaacaatatttttttctgatagaattaattgcaaaaggaattacaaactcaattactatctagagatcttagttcatttgataacatatacataaacaaaggtatggaatactttagattggctggtttccggaggactgaagagaaaagcacttgatcacaagaaagaaaacagatttatctaattttttactta

SEQ ID NO: 197409 - DNA, 679 bp, Homo sapiens
ataaaatccttatcagacaagcaaatgctaagggaattcatttcaactagaccacacttatgagaggtccttaagggagtgctaaacttggaatcaaaagaatgacacttgctaccacaaatagtcacttaagcacatatcccacaaacactataaagcaactacacaattaagtctacataacaaccatataacagcatgatgacaaggtaaaaatatcacatatcaacactaacccttaatgtaaatgagctaaacgccccacttaaaacacatatgaaatggcaatctggataaaaagatgagaatcaatagtgtactgtctttaagagacccatctcacacataatgacatccgcaggctcaaaataaaaagttgaataaatatctgccctgcaaacgagaaaattttaaaaagcaggaattgctatgttttatattagataaaacaggctttcaactttttacaattaagaagcataaagaaggacattacataatggataaagggtataatccaacaagaactaactatcctaaatgtctgcacacccagcattggagcacccrgattcataaaacaagttcttcctgacctacatgaagactcagacaaccacacaaaaatggtgggaaacttcaaaaatccactgacagcgttagacagatcattgtggca

SEQ ID NO: 197410 - DNA, 566 bp, Homo sapiens
tcttgttagtgtatagaaactactgattttggtgagtatttttgtatttttcaacttacctctatagtgaggtaaattatgtactagttttaatagtttttatgtggggtctttagggttttctgtatgtaagaagtgacgttttggccagatgcagtggctcacacctgtaattacagcactttgggaggctggaggcagatatatggcttgagcccaggaacatgagaccagcctaggcaacatggcaaaaccctgtctaccaaaaaatacaaaaattatctgggcatcatggagcacacctttagtctcagctactagggaagctgaggcaggaggataacctgagcctgggaggttgcagttgcagtgagtcctgatggtgcaactgcactccagcctagatgacacggtgagaccctrtctcaaaaaaaaaaaaaaaaaaaaaaaaaaagtgatggttcttgttttcccatttaaatgtcttttattttctaaatttttattaattggtctggcaagaatgtccaataccatgttgaataaaactgtcaagagatggcatt

SEQ ID NO: 197411 - DNA, 607 bp, Homo sapiens
acattttgggatcacaccaagtaagtccagaggacagaattaatttatgcaaataggyggctagaatcctatgccacttctcactttaacactgactcctctctaaatttagcatctaatagcttcataaactttctttatgatgagttgaagaaagagaaagaaaactgggaccaggttcgcaggtggttcagcttaatgtgttaatgggaccaaaaaatactggagctgcattaagtggcacttaggggtgactgtaaagaaaaataatgaaggaacaaatccttcctgtacacagatttataagtagtgcacttcggcatttacattgtatatagagggatggtctgaaataaagatatagactcttggtcagtggtaaatagtaaatgattgattggtcactggtatagattaaaagattcgagacaagcagtttgacggaagaggtattttggctcaaagtgctcagatgttgtaccttacgtcaatttccacctgagatcattcattacagaggagacagttatccagtgatggtaagtcaccctctatcgtcagcaaccccagtactgcacaataggcccatgattaggaaagtcacagt

SEQ ID NO: 197412 - DNA, 607 bp, Homo sapiens
acattttgggatcacaccaagtaagtccagaggacagaattaatttatgcaaataggtggctagaatcctatgccacttctcactttaacactgactcctctctaaatttagcatctaatagcttcataaactttctttatgatgagttgaagaaagagaaagaaaactgggaccaggttcgcaggtggttcagcttaatgtgttaatgggaccaaaaaatactggagctgcattaagtggcacttaggggtgactgtaaagaaaaataatgaaggaacaaatccttcctgtacacagatttataagtagtgcacttcggcatttacattgtatatagagggatggtctgaaataaagatatagactcttggtcagtggtaaatagtaaatgattgattggtcactggtatagattaaaagattcgagacaagcagtttgasggaagaggtattttggctcaaagtgctcagatgttgtaccttacgtcaatttccacctgagatcattcattacagaggagacagttatccagtgatggtaagtcaccctctatcgtcagcaaccccagtactgcacaataggcccatgattaggaaagtcacagt

SEQ ID NO: 197413 - DNA, 574 bp, Homo sapiens
tgtattattaactatatgttaatatctaaagctaagtagagtaagaaatttaaaagtagaaattcacagaatcctgtaagcaaaaaatatgtgataacttctatttttttcctatgaatgaatttcttaattacccatttcttataagattttgtggaaatgagtaggggctaaaatatgaatgatactcttactggaatcatttaaagcaacaaaatatatataaatctaggcataaataaaagtacattttatggctatcaatagaaattctaactaccagttatattagttctcaaagctcttaagtttttaaatttcaagagtgttaatctctcttgaaatttttctgcaattatggaattatttttaagttatttattttggatttatgtgaaataatttaacaataatctattcttcctgctttcaaataaatttatattctaacacctaattttgtgagcatattarctataaattcacatgtaaaaaataagccatgtcaaacaatgcaatttttacttatattcatcttttttatgaaggacttcagtaacaaacttatttagtt

SEQ ID NO: 197414 - DNA, 574 bp, Homo sapiens
tgtattattaactatatgttaatatctaaagctaagtagagtaagaaatttaaaagtagaaattcacagaatcctgtaagcaaaaaatatgtgataacttctatttttttcctatgaatgaatttcttaattacccatttcttataagattttgtggaaatgagtaggggctaaaatatgaatgatactcttactggaatcatttaaagcaacaaaatatatataaatctaggcataaataaaagtacattttatggctatcaatagaaattctaactaccagttatattagttctcaaagctcttaagtttttaaatttcaagagtgttaatctctcttgaaatttttctgcaattatggaattatttttaagttatttattttggatttatgtgaaataatttaacaataatctattcttcctgctttcaaataaatttatattctaacacctaattttgtgagcatattagctrtaaattcacatgtaaaaaataagccatgtcaaacaatgcaatttttacttatattcatcttttttatgaaggacttcagtaacaaacttatttagtt

SEQ ID NO: 197415 - DNA, 468 bp, Homo sapiens
ttatttctaaatgtgtgctaattataattctgctcacyattaatttctcaatataaaaatcagggagtgttttaatgcattgtgtgcattgttccacgccattttaacacatgtgaaggtatgtgtaagcactgacacaaacgaaatttaaaaatactctgtgatcacaaagctatctgtcatggaaccctttgatagtctcaatcatgtcctctctccaagcccatgtaacccatggtcagcactaaccatgtgtatgtacctcttttgtataaatattttactaatcactctaggtattacattagacatataaaatttatcacaatctacagatgtcaacattttactagtttgtatgaagtgtagaaaacttgaggccaaggggtggatcagttgaggtcaggagtttgagacaagcctggccaacggggtgaaacccgtctctactaaaaatgtaaaaattag

SEQ ID NO: 197416 - DNA, 468 bp, Homo sapiens
ttatttctaaatgtgtgctaattataattctgctcaccattaatttctcaatataaaaatcagggagtgttttaatgcattgtgtgcattgttccacgccattttaacacatgtgaaggtatgtgtaagcactgacacaaacgaaatttaaaaatactctgtgatcacaaagctatctgtcatggaaccctttgatagtctcaatcatgtcctctctccaagcccatgtaacccatggtcagcactaaccatgtgtatgtacctcttttgtataaatattttactaatcactctaggtattacattagacatataaaatttatcacaatctacagatgtcaacattttactagtttgtatgaagtgtagaaaacttgaggccaaggggtggatcagttgaggtcaggagtttgagacaagcctggccaacrgggtgaaacccgtctctactaaaaatgtaaaaattag

SEQ ID NO: 197417 - DNA, 222 bp, Homo sapiens
aggatttggttgtttatgtgattttcagcgattttttatttggaaaaatgtcttgaatgacctaactactatctctgtraacaggaaatttctgaatgcatatagtgattaggagacttttgaaaggaagaaaggattaaaagtctgaaatacctgaaagcaaagaatgggacttctatgaaagagaggaaaatggtacagtaaagcaagaccagagactcc

SEQ ID NO: 197418 - DNA, 222 bp, Homo sapiens
aggatttggttgtttatgtgattttcagcgattttttatttggaaaaatgtcttgaatgacctaactactatctctgtgaacaggaaatttctgaatgcatawagtgattaggagacttttgaaaggaagaaaggattaaaagtctgaaatacctgaaagcaaagaatgggacttctatgaaagagaggaaaatggtacagtaaagcaagaccagagactcc

SEQ ID NO: 197419 - DNA, 578 bp, Homo sapiens
ttcctcagctagaaacataggaataattaactcwtctcctttcacatccctgagcagacactgttagttttacttaaaaaaattagatctcagatccagccattcgtcaataccttttttacttccaccttaatctaagacactatcatctcacctgaattctagcaaaagctttctaattggactccttgcttccactctggccaattacatattattcaagtgtgcttcattttaaactaaaaatgagatagtttcacatctactcaaaacccctttccatgttcatcagggccttccatggtctaggccctattaatcctctgacttcatctccttcctctctctcaccactccagctgcactgatttcacttttccttgaacaggacatgcttgttctacctgagggccttcacagtttctgctactttggtttccttagatgtgtgtttaaatattacatccttcttaaagggacgtttggttagcaccctattgaaaataatttccccttctctacccgtctactcccaatcactattatttctcttcagaggacttgtcttcgtcagcgaa

SEQ ID NO: 197420 - DNA, 578 bp, Homo sapiens
ttcctcagctagaaacataggaataattaactcatctcctttcacatccctgagcagacaytgttagttttacttaaaaaaattagatctcagatccagccattcgtcaataccttttttacttccaccttaatctaagacactatcatctcacctgaattctagcaaaagctttctaattggactccttgcttccactctggccaattacatattattcaagtgtgcttcattttaaactaaaaatgagatagtttcacatctactcaaaacccctttccatgttcatcagggccttccatggtctaggccctattaatcctctgacttcatctccttcctctctctcaccactccagctgcactgatttcacttttccttgaacaggacatgcttgttctacctgagggccttcacagtttctgctactttggtttccttagatgtgtgtttaaatattacatccttcttaaagggacgtttggttagcaccctattgaaaataatttccccttctctacccgtctactcccaatcactattatttctcttcagaggacttgtcttcgtcagcgaa

SEQ ID NO: 197421 - DNA, 472 bp, Homo sapiens
gtgtctataggacaccagtcgtattggattgggctcaccctgatgacctcattttatttccctcttttaaaattttgccttttaaatgcttttgcgttttgttccagctctattgaggtatattgacaaataaaattatatatatttgaagcgtacagtgtgatgatttgatatacatatatgttgtgaaatgattgccacaatcaagttaattaacacatccatcaccacatatggttaacttttttgtgtttgtgagagaatgcttaaagtctactgtcagcaaatttcaagtatgcagtattagtattactaactgtcaccatgctgtgcattggatactcagaatgtattcatcttctcactgaaaatttgtatcccctgaccaatatttcctaactgtgccactcccctcartccctggcaatcaccattctcctctgtttctatgagtctgactttttatttcatt

SEQ ID NO: 197422 - DNA, 578 bp, Homo sapiens
ttcctcagctagaaacataggaataattaactcatctcctttcacatccctgagcagacactgttagttttacttaaaaaaattagatctcagatccagccattcgtcaataccttttttacttccaccttaatctaagacactatcatctcacctgaattctagcaaaagctttctaattggactccttgcttccactctkgccaattacatattattcaagtgtgcttcattttaaactaaaaatgagatagtttcacatctactcaaaacccctttccatgttcatcagggccttccatggtctaggccctattaatcctctgacttcatctccttcctctctctcaccactccagctgcactgatttcacttttccttgaacaggacatgcttgttctacctgagggccttcacagtttctgctactttggtttccttagatgtgtgtttaaatattacatccttcttaaagggacgtttggttagcaccctattgaaaataatttccccttctctacccgtctactcccaatcactattatttctcttcagaggacttgtcttcgtcagcgaa

SEQ ID NO: 197423 - DNA, 580 bp, Homo sapiens
ctctaatgctggtatgtagtcggccccggagggaaccactattacttgaaatgtgccagtgtcgtcaatctaaaagaagcagaagcagcagaaagaacttagtgggtagggctgcaagaacctcttaggactacatagagaactgacatctggagagagtaacactgctccttctaagaaggtacgggggaggcacagcatgtaagcatggctaagagctctgtctgggtttaaaccttgactctcaatttaactatatgacaagttattttccatgtttcttcatctgtaaaataagagtactactacctcctaacaggactactgtgagcattaaatgggttcatatttgtaaagcgcttgcacagacagtacagtgtgggtggttaatgatcacaaaacattttcatatctattactgcagcaatacagtgagttatgctcatcatccccattttacagatggggaaactgaagctcaatgaaacgttaaaaggaccgatcaaaagacactgaagccatttaagaaagagtatcagagacctcctctccccyacctaagtctcagagacccatgtaa

SEQ ID NO: 197424 - DNA, 524 bp, Homo sapiens
ctgtaacagtgaattgctgagacagaaaagagaacttcaataaatggagaggcattccaagatcttgttggaaagtctaaaatattgaaggatgaacataattccaagtgaaatcccaacgggaataatgcaagaggccatctggaagaataaagraccaaaaactagaactatttgaaaaataaaactaatgaatgagggatttccagtgaaatgttcattagaacagagaacagttaatattccataatataatcccttaacatcttacaagaagggaaatattaagtagtatggcattggaacattagccaccctataaaatgaatgtatatgaagtttataattatgtaaataaatttttatgtgacactttcaagtaaaaatttagaatatactcagaaaaacatttatcccaattgtgttacattgcatttttaaaagctaaaaggaaataacaaaatgtatataatctttctgggcagtaagattttggtgatttttcttctttctattttttgatt

SEQ ID NO: 197425 - DNA, 385 bp, Homo sapiens
ttcagaacgtgaatttgggggggatacattctgatgatagcaaaaagaacatatttgaaacctgaagatttgagttctaagcagttggaactcttcttctaattacattctactagtttacttcagagaagtaaggagaaaaatcatatgaacatgcacatgtaaaaatgctttggtaacttgaaaggctaaagatagataagagtaaatattaaaaattagccattaatttaattggcttattactgacttgctcttttccctttgcatattgagaattgagagttgtctgrcaacaaccatgactgttgatttgttattttcttcttgaatttctatcagtttttgattgatatattttggagctatatcattaatgcttaat

SEQ ID NO: 197426 - DNA, 563 bp, Homo sapiens
atttagtgggggaggttcaggtaatcacttacttaagagaaaggtaaactataggattgagagattaaatgtgtatgtgtgtgtgtatatacataaaacaatggtcaaactatgtatgaaatagagccatgacctacagtctgtcacatttagcccagaaaattaacctgtcatctagagtaaccagcccagaaagctggtcagacttgcagaaagttagagaactatatctagcaacacatgcaggaaaccaaagtaccgccataacaattggtctaaaatgatcaggacttgattaataactaacaggttctctaactttgttatcactgctgacttaggaccaaccagaaaaaaawatatatatagatagatacacttccaatgaatcatgtagaatgccctggttctagttagtctgcctacagcttccccatactaacagcctccaatgagagcatatatgaagtcttccctttttctgcaacactttcccactcctctgcctggctttgagtatcttcaaaacacaagtaatgatggttaactcccttgatatagca

SEQ ID NO: 197427 - DNA, 640 bp, Homo sapiens
agtaagatgcttgcccaagaatcccatctcagcctctagggaagctcacctaagaccagatagagggtcaaaagtctgactgaagaagtaagacttccaacaactacctgtgcatttccaaacaccctcatactttgccttcagcagtcaaagtatctggatgttgctctcagctttgcttgtcagcattcggcatttatttttaaagaggccacagggatgaggagaagtcacctgatttaycttttgctcacagccctcttagggcagcagggtcaagggcacacacagagggtcttttggggtggtgggcagtgtggtatcagggagatgtttagcctttgagtcaaaaatctttatgttaggccattggcccattactccttagcatgggagtaattttcctatctacaaattgggaatgtaaatattcaccctaaggtgtttttcagagacctacttgaaataatgaatatatttgcacttttatattataaaatgttaatgtaaatgtgagagtttctttaagtcatatacttcagactgcagtgggttggttataggctaaacgtctttgtcatcactgggtaattaatgccaatggttccctaaaatggtcctattaatttacatttccacc

SEQ ID NO: 197428 - DNA, 640 bp, Homo sapiens
agtaagatgcttgcccaagaatcccatctcagcctctagggaagctcacctaagaccagatagagggtcaaaagtctgactgaagaagtaagacttccaacaactacctgtgcatttccaaacaccctcatactttgccttcagcagtcaaagtatctggatgttgctctcagctttgcttgtcagcattcggcatttatttttaaagaggccacagggatgaggagaagtcacctgatttaccttttgctcacagccctcttagggcagcagggtcaagggcacacacagagggtcttttggggtggtgggcagtgtggtatcagggagatgtttagccttygagtcaaaaatctttatgttaggccattggcccattactccttagcatgggagtaattttcctatctacaaattgggaatgtaaatattcaccctaaggtgtttttcagagacctacttgaaataatgaatatatttgcacttttatattataaaatgttaatgtaaatgtgagagtttctttaagtcatatacttcagactgcagtgggttggttataggctaaacgtctttgtcatcactgggtaattaatgccaatggttccctaaaatggtcctattaatttacatttccacc

SEQ ID NO: 197429 - DNA, 608 bp, Homo sapiens
gcatgtgaattagagcacattaattaactcaatttagtcattgcacagtatatacaaatatcaaaatgttatgtcttacacaataaatatgtacaatttttaattgtcaattataaaaagtaaaacaataatgacaaaacaattacagccactagacattaggagggtgtgacttttttaggtagttaagtttctattatttggrcagagatagaatgataaaatgattgagatagtaattatgaaaattcatataatatagtttacatattatttctacagaataaattttaattatcaaaatattttattttaccaacaatggaactgagactcatagaaaatagctgctgcacctaagatcactactgtgataaatagaattgtataaagctagcttttcttactcctgcaaactctatattcttgccacacacaggatcatgttaatcaacttatttctttacctcctgagaggttggggtaaatgaattttgaaatatttcccacctaaaataaaatctcccaatgtgtgtaccacaaaaaattattttcttatacagttaataattatccctcaattaagataaactctacttaattatact

SEQ ID NO: 197430 - DNA, 608 bp, Homo sapiens
gcatgtgaattagagcacattaattaactcaatttagtcattgcacagtatatacaaatatcaaaatgttatgtcttacacaataaatatgtacaatttttaattgtcaattataaaaagtaaaacaataatgacaaaacaattacagccactagacattaggagggtgtgacttttttaggtagttaagtttctattatttgggmagagatagaatgataaaatgattgagatagtaattatgaaaattcatataatatagtttacatattatttctacagaataaattttaattatcaaaatattttattttaccaacaatggaactgagactcatagaaaatagctgctgcacctaagatcactactgtgataaatagaattgtataaagctagcttttcttactcctgcaaactctatattcttgccacacacaggatcatgttaatcaacttatttctttacctcctgagaggttggggtaaatgaattttgaaatatttcccacctaaaataaaatctcccaatgtgtgtaccacaaaaaattattttcttatacagttaataattatccctcaattaagataaactctacttaattatact

SEQ ID NO: 197431 - DNA, 470 bp, Homo sapiens
gatcgggattattgtcttttactcctaaagagctattacatttttagtaaagctattgttcttattcatacatttatgatttaagaagtattttcagtgcttactcttacataccagtcaccatgttggtacaatttgaactaacattaggactctataaattttcaactctttaggaatctcmctcctcctagtagcccccatatttttaaatgtaatgttttactattttctcttctacttcagggcttagaaaaaaaattctgtaaagtgctagatatctagtcagtattttagatggtatgagtcagacagttctggtcacagctactcagtttggttgttgaagctcgaatgtgtggccatgttccaataaagcttgattcataaaaataggcgatggtccaggtttgacccaagggtcataatttcccttcagcatacaaacatgttcaagtctttcacatact

SEQ ID NO: 197432 - DNA, 606 bp, Homo sapiens
actgctagttttattattcctccttcaaggaattttattgataaacaattgtatgtgtgtgtatatatatatatatatatatatatawaaaacactacccctccaaccaaaaagagcatatgaatttcctacattatcgttaccaaggcaacgaccactacaaagcaatgacatatttatgtaagttttaaatccaacatagacattgtttgttttaagtagttttgggaagagatcattttaatggatggaaacaacatcaaattttaccttatgtgctttttatactatcctttgtcctaaattctgaaagctccctttatgaagattcaaggaatccacatcccctgcatgacacaccacactgagctcagtgaaagactgactcaccttgtcagaagaaatgtcttaaaagggtacgtgaaaatccttcaactgtttctttttaaagcatttttaacttgattgtacttttgcatatgtgtatgtatggacctaggtgaaatacaattacaggctgcaaaattacaagtgatgcatatgtatttaaaatatttttaattatgatcaaacctttagatttccaattatatattttataacatg

SEQ ID NO: 197433 - DNA, 588 bp, Homo sapiens
ttcagctcccaggtctgggttacagctaatcttattttggtttggtcacaataaaactttaataatcagaaatttgarctctaaatcataaagatgatcatcacctacacatgcctatgaaataagagaaacaagatagagtaaaatgtatataatataaatgctagcatatacataatatgtattatatttattgttgcatatattgagtgaaacatgcaatctctataggctttgtttcagtcattatttgtaagaccagagttgatctttacatattgcaatataccatgttccttttgctcttagatatcgcttactcttttcaatattttcgacttaatgaaatgactcaaaacttcaattttgaagtccttgctagtctaatatacttagggcttatctagtcttccattcacatttacaattagaactggggttttaagaaggcaccagcacatcctatggattgcagaaaagttcttctctatatccacgctggtacagcaactcttttaacccttcataatcgggatcatccagccaaataacaagccccttctttatctgttagtttcagttgcaaaa

SEQ ID NO: 197434 - DNA, 537 bp, Homo sapiens
ccagcacaagtaagttcttctgtatgcaacctagtatatagcaatgtgaagatgcaatttagaaatgaagaaacagtagtgaccgttccctctccccaccacacacacacataacctcaagctcaaattcaaagaaaaaggcgttttgcctcttaaatgtcattcaaggcagctgagtgtgtcaacatttattgacatgtcagtgccaatttcattcaactgttctgggacatgaaggattaaccagatcttgtcctcctttgtatcttcagggtttgtacagccagtactaagaaaagtgatagatacaatgcagttaataagctgcatgaacaaaagagctaatcaattactattttcaaaattcatgtccatcagggactttctagatgatattgctgacatttccagtatctatgcccccaacctcaggcctgcaaacccctctttagttccctgtgtgaaatagaaacctcaattgtgggtaaggcagktcctacatctgatattgttacaaatactgacaagttaaaacca

SEQ ID NO: 197435 - DNA, 475 bp, Homo sapiens
tttttatgtatttatttatttatttatttattttgagatgaagccttgctctgttgcccagcctggggtgcagtggaacaatctcggctcactgcaacctccgtctcctggcttcaagcaattctcccacctgagccttctgagtagtgggtattacaggtgcctgacaccacgcctgggtaatttttgtatttttagtagagatgagtttttaccatgttggccaagctggtctcaaattcctgacctcatgatcyacccgtctcagctcccaaagggtctgtgaacattcttaaaatgacaactacaggattaggatatttcataaatgtagttgataaagcagagtcagagctttctgtattgatctatacaaacatgtagatgagtcgatattattatattatcaaacatggtgaccaccaataccctgttttgtccagataccacacagcaggttttctatgataaatac

SEQ ID NO: 197436 - DNA, 475 bp, Homo sapiens
tttttatgtatttatttatttatttatttattttgagatgaagccttgctctgttgcccagcctggggtgcagtggaacaatctcggctcactgcaacctccgtctcctggcttcaagcaattctcccacctgagccttctgagtagtgggtattacaggtgcctgacaccacgcctgggtaatttttgtatttttagtagagatgagtttttaccatgttggccaagctggtctcaaattcctgacctcatgatccacccgtctcagctcccaaagggtctgtgaacattcttaaaatgacaactacaggattaggatatttcataaatgtagttgataaagcagagtcagagctktctgtattgatctatacaaacatgtagatgagtcgatattattatattatcaaacatggtgaccaccaataccctgttttgtccagataccacacagcaggttttctatgataaatac

SEQ ID NO: 197437 - DNA, 485 bp, Homo sapiens
cattactgggtatatacacaaagaaatataaatcattccactataaaaatacatcgatgtgtatgctcattggagcrctgttcacaatagcaaagacatggattcaatccaaatgcccatcaatgatagacttgataaagaaaacatgatacatatacaccatggaataccatgcagccataaaaaggaatgagattatgtccttttcaagggacatggatcaagctggaagccattatcctcagcaactaacacaggaacacaaaaccaaacacagcatgttctcacttataaatggaagctgaacaatgagaacacatgaacacagaaaggggaacaagcaacaatggggcctgttgggggagggcaggctgcgggcagagcattaggataaagagctaatacatgctgggcttaatatctaggtgatgggtagatagccgcagcaaaccaccatgttacctatgtagcaaacctacacattc

SEQ ID NO: 197438 - DNA, 485 bp, Homo sapiens
cattactgggtatatacacaaagaaatataaatcattccactataaaaatacatcgatgtgtatgctcattggagcactgttcacaatagcaaagacatggattcaatccaaatgcccatcaatgwtagacttgataaagaaaacatgatacatatacaccatggaataccatgcagccataaaaaggaatgagattatgtccttttcaagggacatggatcaagctggaagccattatcctcagcaactaacacaggaacacaaaaccaaacacagcatgttctcacttataaatggaagctgaacaatgagaacacatgaacacagaaaggggaacaagcaacaatggggcctgttgggggagggcaggctgcgggcagagcattaggataaagagctaatacatgctgggcttaatatctaggtgatgggtagatagccgcagcaaaccaccatgttacctatgtagcaaacctacacattc

SEQ ID NO: 197439 - DNA, 485 bp, Homo sapiens
cattactgggtatatacacaaagaaatataaatcattccactataaaaatacatcgatgtgtatgctcattggagcactgttcacaatagcaaagacatggattcaatccaaatgcccatcaatgatagacttgataaagaaaacatgatacatatacaccatggaataccatgcagccataaaaaggaatgagattatgtccttttcaagggacatggatcaagctggaagccattatcctcagcaactaacacaggaacacaaaaccaaacacagcatgttctcacttataartggaagctgaacaatgagaacacatgaacacagaaaggggaacaagcaacaatggggcctgttgggggagggcaggctgcgggcagagcattaggataaagagctaatacatgctgggcttaatatctaggtgatgggtagatagccgcagcaaaccaccatgttacctatgtagcaaacctacacattc

SEQ ID NO: 197440 - DNA, 497 bp, Homo sapiens
gtggatggtgtgaggatcaattggtttcttccatgtggctatccaattgttccaataccatttgttaaaaaggattttactcatatttatcggcaacatcggtgttttgtcacacactaaatttctatgtctacttgcattttttttggattttctattttgttctcttgggtcatctgcatattctaataacattgcattaacactttcaattgctagacaccatccaacatgtcatttcctttccaagtttcctgcttgcttaatcatccagaggaaataaatgttttagttaaactggtagctctaggaaaagaaatataatggtgattttatggaaattatgtttaatttatcaactaacttaaggaattgctattgttatgggcttgagtctttcttttcaaaaacatgatagaatcccacattttttcaagatataatttaagtgaaggccgagattmactgggtgagattatgggagtcagattttcaat

SEQ ID NO: 197441 - DNA, 370 bp, Homo sapiens
ttatttttaatattttatctagggttttaattattttaaaagtamttttgtgtgtatttttgtaagtttcctcaacttcattgtataaaaggtaaaactataaatacatttatttaaagactaccatttatcttgtcattatgccattctcattttatccaataatctgttttactaacagatcttccagagttttaataacatagtttaatgtctaaggcatttagtgtaaaattattgtagactgtgtctgaaacaaacaaaaaagctttctaagtaggcagagacatttttaagaggaagacaaaaagctctttagtcccaaatgaaactcacagccacaataattttattactttcatactactgt

SEQ ID NO: 197442 - DNA, 409 bp, Homo sapiens
ttattgtgtgaccttggccaagttacatgacaactttgtggctcagttctctcatattgaatagcaggatattaatagaccagaataatattcttaatggaaattacataagataattcctattgataacttaaaactgtatttggtgatatgcaatgcatgataattattagccaaattcttattattctcaggaaaagacactttatgagtgcaatgaaaaactactagaggattcttgagaaattattgcagtttttactcttttaaccgtatttctgtattttatcatcccttatttataccagtcttctatttatgagtaaatatggattaatattatttttstcaacaaaaactttttaaaagaaacaaaaaaaactttctggagctttccactttttaatcc

SEQ ID NO: 197443 - DNA, 539 bp, Homo sapiens
ttcattaacctacccattagaactgaataattgaagaactagggacagtgactccatctttatcatccttgagagcactgggtttcattaagacatgaactaatggttgaataagaagaaaatccttgaggcagtttttggttgctgctgatataccttgacctctggtagtgtgttatattttctcttactcatattttcacaggtcgagtgtgtcatgcatatttatctatagcatcaatcttattgatttagaaacaagtaatccattgaacaacataactagtcatccttggaatagttcaaaaagaattatgtgaaatagaaagcacaccttcattctttaaaaatactgtcttctgcaagataagcartctaatctaaagctagatttagtaatatttggaataggctgacaggaacatttctgaacaatggtgtcagagcagctcgtcctaaaagatacacactgtttacttctttctctgacaagtttatatgaccttctaatagcaaattcatatctgtcatttaacttt

SEQ ID NO: 197444 - DNA, 477 bp, Homo sapiens
tttaaaagacaatatgattaggtttaaaattttggggtcacaccctttaaacgaaaacatgaacatcacagtattgagctgtagaaacctaaasataaattgtttcccctttcctagtaacttgtttattttacccagggggtttgcaatctcctttattttaaattcactaatatcacaaagataagtcctgtgttgacctaaattactttctcagtatatggtgtgtttttcaatcttcagatgcctatctatttcatcacagtcttaattacttatttatctgtttcctgttccatttctttctcttctcaactcaataatattatttatccacacttggatctcttttgtttcttatatttatcatctctttataactgattttgtctcttgtcctgtccaattcacaaacttttattttgtgacttagtcaagttgtattccattcttcctgaacttttcagatgcattaat

SEQ ID NO: 197445 - DNA, 593 bp, Homo sapiens
gcatagcacaaagtaagtgctctaaatattgatattatgaatctcattaatattagttcataatgcttaatattatgacatatatagaggcctgttataagaacatgatggatggacatgtataatttyaacacatatacaggaatatataaatgtaagattattaacagtaacagtaatagaggcagtgatagaggaaatactagtaagcaacccttgtgtgtgatttaatctccctaaaataccaggtaacaatcagctggaaactatgcatcacctagcttttatcttggggtttaggaagagggttgttgccttgctggctcagtagggcacaacaaaacagctacaaatatcattgaacccctaccctaagctcagagatgaatgaaatatagacaaaatatgactcatgtcatcaagacctatatagaataatgggggaaagaacatataaaccactagtcgcagtctgaagaataagagccatattgttttcttagagaaacctgcccttgattcttttatgtcccctccctaccttctctgtcctctcttctctctctccatctagcttaggcatcctgactgtg

SEQ ID NO: 197446 - DNA, 537 bp, Homo sapiens
aaagtaaatgcacatttcatgcaggtcttctgttttaatatttgaatgtagaatttcccaatgttctgggatagtgcacagcacttggaaaagaccatagcagaatatcattgcccacacatatttgaattatttttaaaaaactgtgtgtgcgtatctagatttttaatcaaaacagaaccatgatagcaacactgatttcggaaaaactggaaagatggagggaacaggaactcaggcttaagccatagcacacttttcttttatcgattctccatttgttttgtaggatttcaacagtgaaggagacctgagaaaccataaaatcaatctctcaaattgaagttgaaaaaagcaaatcatctctcacacccaccctgattggtaataattaacttggsaatacttcagttactctttcattaagcagttctcctagatatcgaatttatgttagtttatttattggattcatcctaagcattcaaggtacttttgaaggatatgaggcaaactgttagcatcatttaacattta

SEQ ID NO: 197447 - DNA, 385 bp, Homo sapiens
acatatgaggaacgaatatgaccctgagcaccaaggtctggctgctcatcatggttattaagtaacatttgttagttattctgagcagtcacttactgagctatattactcaggataggccgaaagtgctgtttcaaaaaccctgaatctcagtggtttaacccaataaaagtttagtgttttccctcacttacggtcatgcatgagtcttgggtgggaatggatgaggaagccctaatccacacattcaacgaggaacctaggcctctcttatccttgacaccatcrtcccccaggtcctcagagatctcttatttcaattgatagattaataaagagagaaagaattgcacatagaaggtttgctgggccagtttgaatggac

SEQ ID NO: 197448 - DNA, 623 bp, Homo sapiens
caatgtcaagcgtaaattacttgtgatctgtaaacaaatctttacaatgccaaagcagtgtccttcagaagtaggaaggtatctctttttcaaaatctctgtcatatattgtcccatatttttcccaaacaggactttctcctcaggtctcactggtagaaaygggttcttcaacctctaccagacccctttccatcagacatcagtatgaatttgttggtttgtgttcagatactctgatgttctcctcatgttcttcaaccctcttccctctcacaaaaggaggcacatcattctcttcttagaagaagtcctcttaatctgatgtaaagcacctcagataaatagaaggctaaaggctattgtctctaccacttcatagataagcccaggcatcctgaatctcttttacactcacctgagacctccctccttcatcctattcacaaaagtacagatgacaggctcatacggctcagcatcacaatgtcttcccaatcctgtttcattaatttctaaagaattacactaaaataacaatcttcaaaaagtgcctatgtctaagaacctcttttaaagtaacttaatgtttctttctctcatgcaacaggtctctactttta

SEQ ID NO: 197449 - DNA, 558 bp, Homo sapiens
tctagtccttgctcaaggacatacctttaggtgagttaaaaagttatagctatatacttgggaggctgaggcgggcagatcatgaggtcaggagatcaagaccatcctggctaacacacaatgaaaccctgcctctactaaaaatacaaaaaaaaatagctgggcgtggtggcaggagccygtagtcccagctactcgggaggctgaggcaggagaacggcatgaacccgggaggcggagcttgcagtgagccaagattgtaccactgcagtccagcctgggcaacagagccaggctccatttcaaaaaaaaaaaaaaaggtatagctatatacataagcagaaaatacattttttaaaaaaggttacagctgtaattctggttttctgattccaaatctggcatttttatcaccaggaggtccctttgattcttcatttatcatataacaataaccacgacaaaaaaacataataaattatttctacagggcctattagatctctaaatatcttcacctacttaaaaacaaacaaacaaaatgggctttaattggct

SEQ ID NO: 197450 - DNA, 555 bp, Homo sapiens
tcatctagtccttgctcaaggacatacctttaggtgagttaaaaagttatagctatatacttgggaggctgaggcgggcagatcatgaggtcaggagatcaagaccatcctggctaacacacaatgaaaccctgcctctactaaaaatacaaaaaaaaatagctgggcgtggtggcaggagcccgtagtcccagctactsgggaggctgaggcaggagaacggcatgaacccgggaggcggagcttgcagtgagccaagattgtaccactgcagtccagcctgggcaacagagccaggctccatttcaaaaaaaaaaaaaaaggtatagctatatacataagcagaaaatacattttttaaaaaaggttacagctgtaattctggttttctgattccaaatctggcatttttatcaccaggaggtccctttgattcttcatttatcatataacaataaccacgacaaaaaaacataataaattatttctacagggcctattagatctctaaatatcttcacctacttaaaaacaaacaaacaaaatgggctttaa

SEQ ID NO: 197451 - DNA, 533 bp, Homo sapiens
atggtgattatgaggagccatcagtaaagaccccccaaacaattctaaaattagcttgaaagtatatgtgtagcattattaatgaatattcttaaaatagctatgaagagaaattagacttatgagatctgttttaaaactttttaaagcagtaataatggaacccatatggtaatatttcaaaattaagaaactcaatccagggaacaggataatttaacatgtgatttaaaagatactgctataaaaatggaagtaggaaataccrtatgatatatggggttaagataatagtaacaagagaaaataacatagatatgtttcagtaaattccaagaatcttaagtgttttaattagtcaaataaatccagaagacacagattaaacatttataccattaagaagagatgatcactttggagagtttgagtaatcaaatatacattttatataataaatatttattaagcaactactctgtagcaggtactattctaggtattagagaattactggtgaacaggatatccag

SEQ ID NO: 197452 - DNA, 481 bp, Homo sapiens
tacctatttgcattatttaggaacaaatagcaagcctgaatagaacttctcacagagataaataaggagaaaacaccagtatggatctaaaaagacatcacagagtaaggggggactatttaagcatgcagcatctagaatcagaatcccagctctaccatttactagccatgcaactttaggcaagataattaacctttctatgcctcatttataaaataagggtcatcatcacaaagattaaatcagtatgtaaaatactttcccaaatatccacatggtaaatgttaggtattgctatcattgtccctrttttattatgtctaagcaaaaaaaatgcaattaataaagacaataaactttggatacatcattaatgctttttttaatcaaatatttctggctagtcttccagacagatgtactttctgtctcctttaagttaggcaggatggtgtaacttgttttgatcattaaaatg

SEQ ID NO: 197453 - DNA, 583 bp, Homo sapiens
aagaactccttaagtacatctgtgttaaataatttctggatttggtaatgaactcaaggtgtttctgaatcaggtgaaaatgggggaaaatgttgaggaacactttctgtttatgcccttttagtttctcccccacctcctatctccctccagggtacttctgatcacacatgtaagacttatctatgctggagccaagggtgatgatggctttgtgacggagatttcttaaaggaagatacgaattttaatgtctggataggtgctcagatggaaaagggtctgaaaggagagattgctgaaatagaatgtttctagattgaaaaatgccctggaagggaacatgggaatctcaccattccaggcacccccatggggctgctgggctttttttgtggcatgattaccatctccattcgtatcttatggttgggctgttgmtagttgtcaagagaatctctgattcagagagaggaaaaatggagggtaatagcagttcttttttgaactggggctatctattaacctaccttctaatgggattgtatattggattgggaatagcaaaacattctttaagtat

SEQ ID NO: 197454 - DNA, 623 bp, Homo sapiens
tctctaatatacaaatttctgagatgaagcaatacaattgctatatatctttactcacattacttattatttcattaagatcatttccaaaataactcctgggtcaaaagtcttacagaattctaaagttcttgaagtcttgattcatattaataaattgtcccaaagaaagttagaatcatcaacttactctccaccagcaagttaggaaattacccatttcctggcactctcttctattctcggaagtaacatattttcaatgctggcagttgaattggtgaagaatagtattgccatggtttaatacaatctttttttaaaaagggtaattatttctgttgctgatattagtttcagacttctgactgatttatagacctgattctcctccctagagcagcrtgtgccctgctaaggacaggctacaagatgtgctgtctgccttctaggaaggtggctccatctggatgcaaaagaaaggatgggttgggggagggagtgagcagccctgggaaatgtccctggctcagcagctctttctcagcaacaattctgcagtgtagaacaggaagcatgcatgcttttgggggcagctagccaccttgtgacagctgtttact

SEQ ID NO: 197455 - DNA, 627 bp, Homo sapiens
atcgtccatatgtaaatttatatcctaagttgtgcgtttatgttaatttttatattggtatttggtctttgtagttgccatttttggtgtctgcttattactcccttgagtgaatgtcctgaaatttctgtgatgattcctttattattggacatttgggggtatttctaattttttgttatcataagcagcatgattgtagacattgtctttcacatggtgtttttcatattttgactttttccttaaagttcatggccaggagtgcattgccaaattgtatttgccaactgacaatgccatcagcaaaccaaaaataygttttattgcacccgaagtagcaaagctttctagcttttggttatatatattatgcaaacttgcaaaaagtaaccccattgccttttgatttgcatttctttcattacttgtgatgaacagttttctctcttactggagctagttgttcttcctcttttatgatttttcaaaaccattatgatagcttcttgaattaccttaaaaatggttttctgtgtacctcggagcactattacattgtcatcaatagttatttagtgcctaccatgtgcacagaactgtccaggcacttgctgtgggcttgct

SEQ ID NO: 197456 - DNA, 602 bp, Homo sapiens
ctgcaagtgggtctcaagtagatccagatgtggggaggaacagaggagaagcaagaaatcaggcaagtcctgacatcagcaacaactagtcgattgatgctttttttttttttagctttgcaacagtttccctgaaattgtgcagacagtcttaaacctgtcaattctggaggctcctgatttatatatgaacactgcactgtcattctccaagtgcaaaactacaaaatgcaatgtttctttctctttatagctatccattcttccatgaccttgagtttaatgacagctgcttctctagtttttccagttattagggaccttctccatgagcattagcaattctagaaattaggtaacactccctggcctatgayttgcacctgtgacccatgacagaggcagaattcatctattgcagagtcagcacatatggaaaaatagatgaagtcactgccttatccatgtccatggcagacattattaatcaatcacagcactctttgtaatttggcctagaaaatcttcacaattatgctccaaatctaatcaatggattagatttagcacatgataaaacttactgaccagtgaagcctagt

SEQ ID NO: 197457 - DNA, 496 bp, Homo sapiens
agtgaaaattggaggagagaatggaagaaaatgtttttgctggaatggccagtaaaaccattctaaggtggggacatttgagctgagactcacagggggggaagaggcaatcatagaagatctgaggaaagagcagtctatgcagaaggaacggctggtgaaaaaggccagagacgtgaaggagctcagtgtattggaaggayagaaagaaggccagggagttgggagaatggtaaggagagaagtatgtggtcatgtctgagaggctggcaaggagtgcattgtgtacagttttgctggtcatgttgggaagtttctgttttactcgaaacccagtggaaccattgaaagcttttaagcaatggatcaatttgatctgttttactctttaaaaagatcactctggctggctactgcatggagaatgaattctggcaggggaagagtggaagcagcccattgcagcccagctgtgagaaattagtcatttcgattg

SEQ ID NO: 197458 - DNA, 323 bp, Homo sapiens
cacaaaagcaattattggttacagggtaggcactggtgatttttcttctttttttctgtctcatattttcaggaacagtttacgtaattatttatactagaaatatattttargactttaaaaaataatacccatagaagtatatccagtgaaccaaaatgactcatttaaataaaacattttgcaactactgtattctacatatactgacataatttgtaatactgaagaataaaacagccaggcaacagaagtgatgccatatttaaaagtactaaaagcaattgttttgaaacgtaaattggaagggaaaattaagatat

SEQ ID NO: 197459 - DNA, 323 bp, Homo sapiens
cacaaaagcaattattggttacagggtaggcactggtgatttttcttctttttttctgtctcatattttcaggaacagtttacgtaattatttatactagaaatatattttagractttaaaaaataatacccatagaagtatatccagtgaaccaaaatgactcatttaaataaaacattttgcaactactgtattctacatatactgacataatttgtaatactgaagaataaaacagccaggcaacagaagtgatgccatatttaaaagtactaaaagcaattgttttgaaacgtaaattggaagggaaaattaagatat

SEQ ID NO: 197460 - DNA, 422 bp, Homo sapiens
tctagaggagaaagagactagcagaagtcagagaaaagaaaggagtatgttttasgacaggaatattaaggttcttttgtgggtggaaaaggaaaaggagataggtggagaataaggaccagaggctccagagacaatggttttgttatttttaaatccctcatcttttctttaattagacagcagctagaatgtttaaagactagttggaagttgtccctactgacttcaatttctaatgcttgagcctctattactatttggatatgagacaggggccatgtttgaaaaggtattaggataggaactgaagactagatctgatttagacaaagaaggttaaacacgtgtggagcaaaaaagataactcccgcagttatacctgcttgagatgattatttatatattttttaaaaatgaat

SEQ ID NO: 197461 - DNA, 412 bp, Homo sapiens
gagaaaagaaaggagtatgttttaggacaggaataktaaggttcttttgtgggtggaaaaggaaaaggagataggtggagaataaggaccagaggctccagagacaatggttttgttatttttaaatccctcatcttttctttaattagacagcagctagaatgtttaaagactagttggaagttgtccctactgacttcaatttctaatgcttgagcctctattactatttggatatgagacaggggccatgtttgaaaaggtattaggataggaactgaagactagatctgatttagacaaagaaggttaaacacgtgtggagcaaaaaagataactcccgcagttatacctgcttgagatgattatttatatattttttaaaaatgaatataaatccagcagttggaag

SEQ ID NO: 197462 - DNA, 410 bp, Homo sapiens
agaaaagaaaggagtatgttttaggacaggaatattaaggttcttttgtgggtggaaaaggaaaaggagataggtggagaataaggaccagaggctccagagacaatggttttgttatttttaaatccctcatcttttctttaattagacagcagctagaatgtttaaagactagttggaagttgtccctactgacttcaatttctaatgcttgagcctctattactatttggatatgagacaggggccakgtttgaaaaggtattaggataggaactgaagactagatctgatttagacaaagaaggttaaacacgtgtggagcaaaaaagataactcccgcagttatacctgcttgagatgattatttatatattttttaaaaatgaatataaatccagcagttggaa

SEQ ID NO: 197463 - DNA, 485 bp, Homo sapiens
aaaatgcagtagatctagaacattttgttagcatagggcacatgagcaaaagtttaataaacaccattactgagtattttttcaacctggaatccccaagaaaataagtataaattcctctaaaataaaatagctccaagtaccaaggtctatattttatgtatgaaaaatttccacttcaatatcatatgttctttttgcaattaaaatatatgcatgatggtaatttaaattactactatcattgtactttttatcacaatagaaatcagtattttcartacagcaaacatataagtggttattatttagctattattataagtagcagctaatcatatgtatatcttatttaaaaatactactgctatgtgtaacaaatcacctaactaaatgttaatcttaaatgtctccattaaagttaaggttttcatttttaatttcattaaaagtttcattcttaattttagaaaggaatatattaa

SEQ ID NO: 197464 - DNA, 368 bp, Homo sapiens
cactgaagctgcgtagacagcaaaacatgatcccataacaatatttaaatattctatgctttatttctgacctaatctttctcttgtctttcaaactgaaaccattctactttgccatttttagtaaattcttcattgaaatcaagcaagaaaacaatcatcactgtattacttatgataaggtcagcttttgtagtaagattaattctaaatcttacaatggttcaaatacaattcatgtttaattgttgctcacatgaaagtaytgggcaagtaagtagatatgtgggttagccctcttctatccagtggctcagggaatcagtgtatcaaaagctttgttctattcaataaatggattctaaggt

SEQ ID NO: 197465 - DNA, 561 bp, Homo sapiens
ctaaatttctaaataattcagtgtaattctagatgatccttaagagaaattatgacaacaattttgacatttctataatattttaacagaaatttattacagaaatrttttagcagaaatttataaattaataatttataagagaaagtataagttttaccttttaaatcacttcaggaatgtttggtgtgtgttcttcttacatattgctgtggttgagtcctgcataaaaataaaacaaaaatataaaacatattcaacacataaaaatctatgcataattaaaacatatttattatgtcatacattaaacagagctgagtttggagagcaaatacatttttgaagagataaatttttgagaagtttgaactgcgagttttttttttcctttttagggcatgacattttgaaactatgtccagttagaattttagctccgtcacgtgttagccatgtagatatgggcaatttagtcttgttctttgaccttggtatgtcacgacataaagaagttttaacttcagtgttacaatttatttaaacacttagtattatgcc

SEQ ID NO: 197466 - DNA, 561 bp, Homo sapiens
ctaaatttctaaataattcagtgtaattctagatgatccttaagagaaattatgacaacaattttgacatttctataatattttaacagaaatttattacagaaatattttagcagaaatttataaattaataatttataagagaaagtataagttttaccttttaaatcacttcaggaatgtttggtgtgtgttcttcttacatattgctgtggttgagtcctgcataaaaataaaacaaaaatataaaacatattcaacacataaaaatctatgcataattaaaacatatttattatgtcatacattaaacaragctgagtttggagagcaaatacatttttgaagagataaatttttgagaagtttgaactgcgagttttttttttcctttttagggcatgacattttgaaactatgtccagttagaattttagctccgtcacgtgttagccatgtagatatgggcaatttagtcttgttctttgaccttggtatgtcacgacataaagaagttttaacttcagtgttacaatttatttaaacacttagtattatgcc

SEQ ID NO: 197467 - DNA, 450 bp, Homo sapiens
ttatatttaccactttaggaatgaaaagcaaagataayataatgtaatagaatttattttaaaagtagtcaagagaaagtttcccacagaactttttaataaaatatttcaaaacatatgcaagaagagaaaagaatgaaatgaactcctatctgttctttttagttttataaatggaattctaatagattaacaaaatgcatcgttgtcagtgccatctttcaagaataatttattaagtgttttaattttaaataatatacaatgcatttgctcatttaaataaggatctgtagatgagcttattatagcatgaaagcatgcacaagctctactctactctcagccctgggtcacatatttgtaaaacagttacataaactcaattcagcgtaatacgtgttattgagcaactgctgtatgctaggtactgctttatgtgctgcagca

SEQ ID NO: 197468 - DNA, 443 bp, Homo sapiens
gatcggtaaatatgatcccattataataaaaagaacagcaaagacatgatgaaaatatgcatggatgtttgccagaatagtatatgataacgatctctgagtgataagcttagagacggttttcatatttttattgtgtttttacaacatattgttatataatgttgactttttttgcaataagcaaatatcacatttaaaataaaattaggttctatttttatacaccgtgaaatactagaaaagcaatgagaaatytttcttttatctaccgaagtcagtacgtttattttgtgaccaatatggtctagactgtgtctgttcaagatatataagaatgggttatttgcctaagaatacacttaagtcatagtgttaatgagaatccgagaaagagggtaggggaggaagtgtaatgccaacaagaggaagaaaaaggaaag

SEQ ID NO: 197469 - DNA, 579 bp, Homo sapiens
cctgtaaaaaacttaacagtctattacttttagattatttagaatcattttgttaatgaacagaactattagtttcttttgtttttgcttaggggtgctgagaaatttattgaaatacatagccatgcaccaaaagagcttgggaatccttagcttattaatcaaagaatgaaaatttttcccctcaaagttgctctgtagctttgtatagctttatatacacttccatattttgttatcttgtcacttagatcatttttattaaaaatcagttttttgatattgtactggtgtaaaaattagtctaaatctcctttaatttttttctggtgttattagaggcaaaaactagagaaataacatgttgcccaaatgaaagagtattttgttcytaatgaattttactctcccacattcaggttctttttattttttatttttattttttttgcattttgctaggatcattttcagaattattgttactacttttatattttagcttttaccattagctttaatattttactttaatgtacatactacatatttttgtctgatctatttgattcctgagtc

SEQ ID NO: 197470 - DNA, 566 bp, Homo sapiens
aataaaaaaagacctcattaaaaagttggcaaaggacatgaacggacacttttcaaaagaagacatgcatgtggccaacaaacatataaaaaaagctcaacatcactgaacatagtagaaatgcaaatcaaaaccacagtgagatacaacctcataccagtcagaatggctattattaaatggtcaaaaaatatcagactagagccaatgtaagcagttcctaatggcctattactcaaacaatttgagcaatactcgaacaatttgagcaataaaatgaataaggtagcagtagattataattcaggtatatatacaataaatatttctgtctacacggacataaagggttgagtaagtaaacaaatgggtacaaagaaataggatacatctcctgtgcaggaaaatttcaaataatttgtgaagctcttccatccaaaaaataaataaataaataartaaataaataaataaataaaccagatgctgacaaggttgcagggaaaagggaatacttacacagtgttagtgggagtgtaaattagttcaaccattgttgaaagcag

SEQ ID NO: 197471 - DNA, 602 bp, Homo sapiens
gactattataaatatacatgatatatatgtaccccacactgaagcacccagatatgcaaagcaaatattgttaaagagagagataaaccccaatacgataatagctggagattttaataccccactttcagcattgaacaggtcatctagatagaaaatcaacaaagaaacattggacataatctgcactacaggcccaacagacctaataaatatttacagaacatttcatccaacaggtgcagaatacacattcttctcctaggcacatggatgacactcaagaacagaccatttgctaggccacaaaaaaagttttaaaaaataaaaaatattgaaataatttcaactatcttctttctccacaatagratataactaggaatcaataaaatgaggaattttggaaactatgcaaatacatggaaattaaacaatatactcctaaatgaccagtgggtaaatgaagagattaagaagaaaatttaaaagtatattgaaacaaatgataatgaaaacacaatataccaaaacctatgtgataccttaagagcagttgatatgcttttgctgtgtgtccccacccaaatctcatcttgatt

SEQ ID NO: 197472 - DNA, 602 bp, Homo sapiens
gactattataaatatacatgatatatatgtaccccacactgaagcacccagatatgcaaagcaaatattgttaaagagagagataaaccccaatacgataatagctggagattttaataccccactttcagcattgaacaggtcatctagatagaaaatcaacaaagaaacattggacataatctgcactacaggcccaacagacctaataaatatttacagaacatttcatccaacaggtgcagaatacacattcttctcctaggcacatggatgacactcaagaacagaccatttgctaggccacaaaaaaagttttaaaaaataaaaaatattgaaataatttcaactatcttctttctccacaataggatataactaggaatcaataaaatgaggaattttggaaactatgcaaatacatggaaattaaacaatatactcctraatgaccagtgggtaaatgaagagattaagaagaaaatttaaaagtatattgaaacaaatgataatgaaaacacaatataccaaaacctatgtgataccttaagagcagttgatatgcttttgctgtgtgtccccacccaaatctcatcttgatt

SEQ ID NO: 197473 - DNA, 614 bp, Homo sapiens
tcatcataaccttttccaggaccttttccaaagttctaccatatctaaaccttaaattaaaatcaagttgaagtattctttcttccttttgcaggtttccttcaatktatcttgttgtacttatatgctcactaatctacatctgtgaaatgccccagttcttttcatcaatgctcaaagctccagatcagtaccacccttacacgtcacaagagttgctcttccctggaccaccttggtttagagagattgagtctacacttattataaactgcactcctcatgatagcagagtccatgaagccaaagaaagatgttcagtgacatctctgccctactttctagaccacatagatgctaacaggaacatgaaaagaatgaagatagatgcagagccaacagatttgctaaagagaatgtcactgtttaaacaaaaattttatttacgctccacaaaggaaatctaatagttaatatatcattatatctgcattagctcatttaatcctcatggtatctctgtactataggtacagattattccccttgtacagacaagaaaaaacagacattgagatttacaaatactttcccaagccataaatgttgtatat

SEQ ID NO: 197474 - DNA, 584 bp, Homo sapiens
tcttttttcttccttagctatgtatatttttgtatggttgtaattctgggcaaagagcccagattgggataatttttgtttgttcctcacatagtgtcccagattctgttttgagaggagcattgtaaattaataatatgattacagtgttattttcattatttattttctctaggatctagcacattgagacatattatttgcagtacttagctccgaatgcgaatacagactagttagtttccaggcactgcagttaccagcatctatttttttctccttagacaattagttataactattctgtctttcaggaatgggaaatagaactgatgagtttttctaaactcattcgacactatagtcctttatggtctaggttgtatggtgctccattcattaggaataatacattgcattgatgtctctgctaataattgcatgtgtataacagaaagccctttgtgtatcaatgtgtaatgctgagagatccactaccccaggaatcagggwatcacatatgtggtcatccactaagctcatcatccactaaactcctgcagggcctagaaaatgaaattggt

SEQ ID NO: 197475 - DNA, 560 bp, Homo sapiens
gcggtgcaataaccccagaattgcagtagctactaacctgttttcctcttgtacaattttcattcatctctggcaagcaggcaaatactaatccgtactgagacctggaaggtatcccaaaggaatcaacctgactccatgctttgcctctctaaaatacccctaaatgggactgtgttactggtgggacctcaccrtaattttgtagaagaccagaggctttggcatcagacagatctggtttcaagtcctagccctgctacttgctctctgtatgagcactttgctttgccttgattcctgtttctttatttgaataatgggcacaaatagggttattgtgagaattaagtgagacaattcgtgtaaaatccaaacacagtatctgacatagagtaagggctctgaataaatgttaactgttagatatattaaaagggctggaaattattataaatttagcacagttggaaataatatttcaagtgaaaagctattggaatcataggtttcttcaaagagcctcatacataatagaaatgcttttctaaaatttagag

SEQ ID NO: 197476 - DNA, 560 bp, Homo sapiens
gcggtgcaataaccccagaattgcagtagctactaacctgttttcctcttgtacaattttcattcatctctggcaagcaggcaaatactaatccgtactgagacctggaaggtatcccaaaggaatcaacctgactccatgctttgcctctctaaaatacccctaaatgggactgtgttactggtgggacctcaccgtaattttgtagaagaccagaggctttggcatcagacagatctggtttcaagtcctagccctgctacttgctctctgtatgagcactttgctttgccttgattcctgtttctttatttgaataatgggcacaaatagggttattgtgagaattaagtgagacaattygtgtaaaatccaaacacagtatctgacatagagtaagggctctgaataaatgttaactgttagatatattaaaagggctggaaattattataaatttagcacagttggaaataatatttcaagtgaaaagctattggaatcataggtttcttcaaagagcctcatacataatagaaatgcttttctaaaatttagag

SEQ ID NO: 197477 - DNA, 586 bp, Homo sapiens
tattttagtcttgatcttactataactttggactgagtataaaagcctcaaaatttcaacaaacacaactgtgttcccctttgtaacctaaagaaatgacttggctgagattagcagtgagagcacctttacttctcttatctgtcctcaacccttaaacctggctccattgtgggttgtcattaagtactcagtgaattgtgttgaataaattaaaaagaaaagtcttgagctgaaacaaattcctgacacatagtagtctgtaataaaatatgttgactgatagtgttacttgaagttatttttcctgaatattgtaaatgaaccctctttttggtcatataaaaaaaagcatattgtataacttggggacatgctataacatatactattagttattttatgacttcagaacaagctaataaaggaataaaactatatgamtattcccccctggctataattttctagagagaataggaatgatagaatcagtttaaaagtaaaaaagcattggcatattgtactctcaaagaatttggtcttcagtaattgtttgtttcctccctttccctcccccattttt

SEQ ID NO: 197478 - DNA, 336 bp, Homo sapiens
tgctcatctctctctccatgaatgtccctactaaaggacacaccccgcccccccacacacacaccaaaaaaaaaaaaaaaaaaaaaaaattgcctgggaaagaaagaaatgacaaaggaaaagttagtggaagtcttatccccctttccactattatatatataaatagctgacacactgtcttaraacctcctatctttaaggaatttattaacctaggatagaaataaagcagaccgggtgtggtggctcatgcctgtaatcccagcactttgggaggttgaggcgggcagatagcttaagtccaggagtttgagaccagcttgggcaacatgg

SEQ ID NO: 197479 - DNA, 399 bp, Homo sapiens
ccctatagggtgaggttgagagtgtgacccatgaggaggtgtgctatactcaaaaagaactgcttgagttttctagtttatgtaaacagaaatctggagaacaggcatgggaatggatattaggggtgggataatggtggaaggaaagtagagttgaatcaggctgaatttattgayttgggcccactaagtagggactctgcatttaatgttgcatctcgaagagttaaaaagggttctaatggttcatttgcttggttagctgaaagatgcattaaaagagggcccactgtgaatgagctggaaatgcctgatctcccttggattaatgtagaggaagggatccaaaggcttagggaaattgggatggtggagtggattagtcaatttagacctact

SEQ ID NO: 197480 - DNA, 395 bp, Homo sapiens
tctcttctgtgcacagacagttctttaaggattgaagctgggctgcctcaacccrcccaggagagcaagggcgaccaggaccatccctctgactccttttgactggaaggcaacaaaagtgttttcaggaggttctctgctcatatcaaatctcctcactttggaaacttcttgctggcatttcctggttgcgtctgcctcttctcaacagacttgaaggtctctgggagaacatgccttatctaattaataatcgcttcctcttattgaactcttactgtgtgctaggaattgtcccaggtattttaccctaaattgtctcacttacttctcccaatgcaattttttacctcatgaactcaatgcttagatcctaatttatttgcctgagatct

SEQ ID NO: 197481 - DNA, 395 bp, Homo sapiens
tctcttctgtgcacagacagttctttaaggattgaagctgggctgcctcaacccgcccaggagagcaagggcgaccaggaccatccctctgactccttttgactggaaggcaacaaaagtgttttcaggaggttctctgctcatatcaaatctcctcactttggaaacttcttgctggcatttcctggttgcgtctgcctcttctcaacagacttgaaggtctctgggagaacatgccttatctaattaataatcgcttcctcttattgaactcttactgtgtgctaggaattgtyccaggtattttaccctaaattgtctcacttacttctcccaatgcaattttttacctcatgaactcaatgcttagatcctaatttatttgcctgagatct

SEQ ID NO: 197482 - DNA, 433 bp, Homo sapiens
aatttttagaattgtcaaatttggtaaaaactctgtaaagtttttttcttatacatgagctctgtragatttgaggacattttacatttttcttttggtgtgattaatttttaatgttttagaaattgatgacattcattaaccagtttatatctgatacccttgttgtgaagatgtattatgttttaagttattttcatcaatatagtattttgtattaaatcagcaaaaaattaaaatcatttgccattgtgttctagtgacccactttctttattaatttgattgtaaagcagtctaagggcctatttataactcctattggaaagttatattttcctgttaacacattactgcttttgatgtgatactgttttgttacagtttgcatctcaaaattagaataatttaaatttattttctaaattattta

SEQ ID NO: 197483 - DNA, 635 bp, Homo sapiens
ttaattgcacatacatatacagtaggcaaagagccagaaaattgcttaaaagcagcttagagatgagaaatggggcagatcttcagrgctgtcctgctaccacctgggggtgccccacatgtaagtcctaataaattcacctacttgccaagctggacttgtctgcaccattctttggtctctcagctccttcccagtttggagggaaggttatgatcccgttttctcataacaggtgaaaccttgatgctctatgggaagagtgaacatcattttattgatcaaactgcagaatagtagaaagacagcattgcctgacgcttaggtggtttaccactacatgatactaaagtatttgatagaagagatggtaaaggcatctttttcatcttctttgcttgatacagagggttgatacaggttgaaaaaaaatctctagatggtactaggtaaatttattatactaaatgtgaatttttagaaatagaactttttccttctgaaggcaaccatgaggtggtagggaatcttcttttctgtcaatcagatctcaggaaagaatagacaactgaatagattgaaaataacccacattctacatatcttctgttaatttctaagagaagatgagatat

SEQ ID NO: 197484 - DNA, 516 bp, Homo sapiens
gaattccaatattccctggagagaatgtggttggatagctagagtcagatgtatgctacctgccaagtcagctctggttgggttggcacaccatacatgggtggtaccagggaccacccataaggagtttcaagtatggttttgcattagggttaatgtcctgaccaaatcacaggactaaataagagaaagtaaaattaggggaactgacagacactgtaattgtcctaaagaccagggatgaaagggggagaataatttctagaacactggcagaagcaatggaattaacaaggcatacataaggctagaaatatattttcccaggttactcctggaacaaataaaagaagaaaataatgatacaaaatcaatctaatgtaggaaaggatgtattctaacttcgatgatactttattgatacaaaacaagtgacagtgatcattaaatcaggtcagtgttaccttggctaagctctcaagttaatgaatgtsgagatgacctgtttgtagcaat

SEQ ID NO: 197485 - DNA, 542 bp, Homo sapiens
tcagcctcctgttttaaggtgggggttcgagtagtcacaccacatccaggacacctggtgaaagagttgaggttccgttgcacttaacccactccactggccatgagggagagaaggggagagaggaaaggaaagctggaagcccgtgsgcctgcggggtggggaataaatgatccgaggtcatctcagttgcaatatgagagggtggggttggggcagccgtgaccctagggaaggctggccgaggaggactttattctattagatactgggagatttaaacaaccactgttcaaatttcaaattggtttttttatgcttcaagtttttttgctgggctctcttcccagaaaggaaagggaagagatctagacatttactgacctcctaccacatgtgaggctccgggaaccggggaccaggaagacataaaccctgccctcacaagcttcacagtccacctggagaggcaagagaaggatggggctgcaggagcccagaggagaggctcctccctgagatcggaggagacttcctggagg

SEQ ID NO: 197486 - DNA, 542 bp, Homo sapiens
tcagcctcctgttttaaggtgggggttcgagtagtcacaccacatccaggacacctggtgaaagagttgaggttccgttgcacttaacccactccactggccatgagggagagaaggggagagaggaaaggaaagctggaagcccgtgcscctgcggggtggggaataaatgatccgaggtcatctcagttgcaatatgagagggtggggttggggcagccgtgaccctagggaaggctggccgaggaggactttattctattagatactgggagatttaaacaaccactgttcaaatttcaaattggtttttttatgcttcaagtttttttgctgggctctcttcccagaaaggaaagggaagagatctagacatttactgacctcctaccacatgtgaggctccgggaaccggggaccaggaagacataaaccctgccctcacaagcttcacagtccacctggagaggcaagagaaggatggggctgcaggagcccagaggagaggctcctccctgagatcggaggagacttcctggagg

SEQ ID NO: 197487 - DNA, 413 bp, Homo sapiens
acctgggactgaacaggcactcactaagtatgtgtttatatatatgaaataattttgagaaagttatctcagttctctgagcctcagcttcctcatctgtaaaatggggatgataatacaacttaactcataggttcattgtgaggattaagaatagcaatctatgcaaggtacttagaatagtgcctggcacgtaatgataatgctctcatgtacttaagagaaacaaaggctcagagaaggtaattgctttgttcagtgtaaagtgggagagctgggaatggaatttaggtttgtctaactccagaatctcagatgttgaccactattgtctattacctraggtaggttaacccacagcatccacttcctccctatttcagagtaatagaactgtcaagttttacttaagc

SEQ ID NO: 197488 - DNA, 537 bp, Homo sapiens
atatcttttttttctttatttctttttctataacctcagaagggaagaaatgttttatatcttgatctgggtagtggttacatgagcattcacatgtggaaaaattcaataagctctacacttaagattgatacattttatggtatatatttaaacctcaaatttataaactttttcaaaaaattaataagttattatgtagtagggttggcacctaytaaaagaaattttgggaaacacagaatcagggtttttccttattttgccagaattgtccagaaacataattcctccaagtcagaacagactcatctgtttttaaaacagaattaaacctcatggccaactaattggactctttcccaaagagagatatacctcacacaaacagctgtgtcttaaagatcaagtttttgttatagcctacaagctatggaaaattctgccagatgatttggagacattcatttctcctttatttcttgctagcagagccacacttttgttcggggtccaccagttctccacccgacctct

SEQ ID NO: 197489 - DNA, 537 bp, Homo sapiens
atatcttttttttctttatttctttttctataacctcagaagggaagaaatgttttatatcttgatctgggtagtggttacatgagcattcacatgtggaaaaattcaataagctctacacttaagattgatacattttatggtatatatttaaacctcaaatttataaactttttcaaaaaattaataagttattatgtagtagggttggcacctactaaaagaaattttgggaaacacagaatcagggtttttccttattttgccagaattgtccagaaacataattcctccaagtcagaacagactcatctgtttttaaaacagaattaaacctcatggccaactaattggactctttcccaaagagagatatacctcacacaaacagctgtgtcttaaagatcaagtttttgttatagcctacaagctatggaaaattctgccagatgatttggagacattcatttctcctttatttcttgctagcagagccacacttttgttcrgggtccaccagttctccacccgacctct

SEQ ID NO: 197490 - DNA, 584 bp, Homo sapiens
ctgaatgaatgacctgctaaagataacaatgacttaaacaatagccactcaagtatgccagggtcacaagacgtttggttccctgtagaaactaaagataacattttgacaaatgtccttgagttgtttttcagaaacgaggacccccaactgatggaaaatgccaatggctgtcacacagacctaagacagactggaaccagaaaatagatwaggaagtttcagaaattccttagcccctaactcacttcggaagacccctcactgctgcctttgaaaatccttgcttgtaagccatcagggagttcaggtctgaagcattagctgcctgtcctccttgcttggtgtcctgcaataaatggctttctctctcaccgcaaatcccagtgtcagagtttgcctttttctgcacgctggaagagtagatccaagtctggttcagtaacatctagtaccctgtacagttcttcataccccaatatcatatctacgttttgagacaggagattgcatttcagagcatatgagccttattcagcctgcgattgtgcatataaagggttgtgtcctggccgggcgtggtg

SEQ ID NO: 197491 - DNA, 564 bp, Homo sapiens
actagttagcaattattttttcccattctctgggttgtcttttcactttcttgatggtactgttttctacaaacatgaaattttaaaattttgatatagtcctaagagttttataattttagctgttatatttaggtctgtgatccatttttagttcacttttgtacataatataatatttactacagctctgtaagatgggtatttttatcttccttttatatgtaagataactgaaactcagagtctaaatgaattcccatgatcaaacccttatacgttgaagctaagattcagacctaaattttcaaaccaagctgagacacaaagttcactaaagcacaaagcctgcttaacwtttctagcattataatatctcagttattttggaatacaaagcatgcctgtattctgtgacgagatcagatggagaaaatgttggcattgtttcaagaatataataatttaatgaaatcctatttcattagatgcttaaatttaaaaaaataggtttttggcaaatatcttctaaggctggagttcattaaaaggacgcatactgtg

SEQ ID NO: 197492 - DNA, 606 bp, Homo sapiens
ttgaattgacattgaaattctcattgtacagtgactttttattcttatttgggggtcttaattgcaatagaatgttatcaaaatctaaattgtctaaataattcttacattcagggagatttgggattgtttggtttttccttattataactgccacattttagacatctggattttgtttcagaatttttcttaataatgaaaacccttaaagactttcagaagtaatttagccaattcatcttgccctgagctgaaatctttaaatctcttgcaggcgtctcaagataacgtactccatctctcagtaaaacatttccatacttattgtactcttgagaaattcttttttacatctgwcctgttccaatttgagcttgtctcctttcttttaccctctgacatttttaaggcgactagaacatcctggaagcagtcacataatcacccaaagaatttactgcttcatcgtctgacttttgaaaaatgccaagagctgttattgttaaagttaaataatgccataggatgataattaatttgatccttaactgttcagtgtcatctccccgcacagagaaacagtgaaatataataagtaataaa

SEQ ID NO: 197493 - DNA, 394 bp, Homo sapiens
atctagttcacatagattactgatttgtgtgtgtgtctgcatatacttgtgcacgcatgcatgtaggaactagctaattttaatatgaaattttaagaatcaagagtgatttgctatttcacttatcatagggcaataaatagcatttctagccatttcttaggcatgtttccttatctcataggtcaaaaccaatcagtttcagaaagtttagcctagtaagtgccaatggcataaacaagactaaccataatgctgccaaagtattaactattacagccaggaatttaatgttaggaagtrcaactacacttttcagatccaagtttctcaaattttcttattaagggaagctaggtgagccaaaaagatcagactcattttttaaaaagtc

SEQ ID NO: 197494 - DNA, 617 bp, Homo sapiens
tcgccgaagtggcagtgaccaaaatgaaattcaatccatttatcactatagactgaatcaagaaccataaaggacatttcaataagccttcccacattctcaggaggattacattttcccttctttccaaagagctaagacagagtacgatgttcaatccatgcccatctgaaaggatgatgaagttcagttgtgtgaggacactataaaggtcagcaaattggcaaagtaatccaggtttacaggatgaaatatgtcatctacattgaacaggtgcrgtggaaaaaaagctaattgcaaaaccacccatgtgggcattcaccgcagcagggcagttatcaccaggctaaagctggacaaagatgcaaaaagatccttgaacagaaagccaattcttgccaagtgggaaagggaaagggaaaatataaggaagaaacaatcaagatgcaggaataaagtaatcttatttacaaatagtctatatctccgagtctgttctagattattaggaaaaggctcctcaaccatggcctgaggaataaggaagtatctgtgcccttcaagccatcaaaacccacctcattctaatatctcaaaagaagatcatcacccccttc

SEQ ID NO: 197495 - DNA, 600 bp, Homo sapiens
ggcaccagtccaaggtcaaacaggcagttgctgggcacatgtcctcccagaagtatttttgtgtttgtgaggctgaaatggcctttgtgcaagactgtagtttttgtagagtctttttcgttgtatacatacaagtatgagcaccttctcttcatggccttcctcagcattatttgtcaggattttgttaacattagtgacttcattttgattctgacaactttcacacttctcacttcaggaaatataacattttcaatatagtcattttctaccaagcaatgccartgttaccaaatgggttcaagaaaaaaatgatgaaaaaaaagtttctcaatatcttattattttgagactgaacatgttcttctggacaaagggactcacattttgcttattaaagccttgtgttttccttttcctttaggaaatactttgacattattgtcaaggtctcttcactgtccctttaccatttaagttgctatctctccatatgtaaggcacatggatgtgctttggtcaaggaataggccaaggtggacatccagtccagagtgactcagcgagtttagggtacaggtgcatacttcacttgtt

SEQ ID NO: 197496 - DNA, 588 bp, Homo sapiens
acatcacaacacctgatggtactagcctggaaatgcctcttagatgccttacagaagaaaacacaaattcttcctagagaaaagatcttttatcctaaagaacaacacaaataatatttcaaggatggtgatcagcctacataacttttactaagtacacaaggaagcaaagcactttaattgggaatcagccaaacaaagcaacaacagcaacaacaaaaacaacaacaacaaacattggcagacagagagccaygaggacttcggatattagaattgtcagctgtgtatttttttaaaggcttattttgtttacataaatgaatacaaatttgaaagtaactgcagggaaggaggaaataattgaacatgatctgggagattacacaaagaatcaactagagcttctaaacattaaaaatgtagtttccaaaatataagacccatcagacagatttaagagccaattatacatagctgaagagagatttatggaaatggaaaataggccagaaaaagttagatagaatgcagcatagagagatagaaatatagaaaacatgaaagtgaagctaagaaacatgaagg

SEQ ID NO: 197497 - DNA, 546 bp, Homo sapiens
aaaacagattaatatacccagataaactggacatgtggtctccttaggtttaggaaaataccactgatacaaggtgcaatggactgaaattttgcatcaactcaaaattcatatgttgaaaccctaatccyaatgtgatcatatgcgaaggtagagtttttgggaagtaattagttcatgaagttagggtcctcattaatggaattagtgcccttttaaaaagagatcagagagtgaactagctctccattggccatatggagggtatagtgagaagacagccatatggaaaccaggaattgggccctcaccagacactgtatctgccagcaccttgatcttgaacatcctatcttgcagaaccctgcgagatttacgttgtttaagccacctacttcatggtcttttgttttagctgactaagacacaagagaaggctgcaagaaaatgttgagatggcagatctggcagaaccaggaacaaatatgctagcttctgtttatatgaagacaaattcttgcaaaaaaaaaaaaaaaaatggaagaa

SEQ ID NO: 197498 - DNA, 489 bp, Homo sapiens
aaatatgctagcttctgtttatatgaagacaaattcttgcaaaaaaaaaaaaaaaaatggaagaattcaactaacagtttaaactaaaatacttttctaaatgcctccaccctccaccctcacaaggcatgctgagaggacctgtaataatgtttatagagcactgagatgtgcccgaccagagagtgtactcattaacattagccaaaaatattattagagggaggagtgagaacagtatcagtagtagcataagtcatggcaagaataatagcagtagtcatagtggcatcacactgtgggagaggggtrtaagcggaaggcctttccgagagatcacagctggtcaacatgagcaacccagtcacctggggaaggagcaggaatgcgagggcgggagcaggctgcaacagagtggaggtgggatgcagtgggggatcctttgcagtttgggtttgcaaacttagccttcaagaggcaacatgaaat

SEQ ID NO: 197499 - DNA, 355 bp, Homo sapiens
acactaggtctttggttcaccataactttcttgactgtttctttggctgaagcatcaaattcacatgccaatgccaggcctgatttgtccacagaaatataaaaagtgtcctaatgcatttttcacattwccaaccttttggcaacaacctgctctgtgtgtgcatgtgtctgtgtgtttgatgttgatattcacaggcattatgaattgaagaaggcaaatttaatagagaagaggtaaaggggtacaccatggaatgaactctctgataacagaaactgtcttatttttctttgccttccgactgtgttatataatgttagacaaataataggcacttagcaaatgtgtgttg

SEQ ID NO: 197500 - DNA, 573 bp, Homo sapiens
gtctgtttcaagctgacaactttgattgcataaaactactttatacctgaaaacattttcaaccactgaaaaaaagtaacttatttttacaattattaattttaaataaatttttaaataattgtaaataaaacattacatttgggatattttaaaaattatttttaaaaccaaatraatattcatatatacaaattaattctttatttctgagttttagttgctttacctgagaaaaagaaaggagaatacaagtttaaatttcctccttcttcttaggaaagaatccctaatataaattgacatattcttcaaatactgtctctagtttaatctttatagtaatccaccaaagttggctataatttaatttatctaatgagggaaataggtctcaaacacattgataagtttcccgctttagaagctattaatacttggcctaaaaattataaacattagttttggagacattcagcttaagtttgaaggcaattttgaccactccttttatctcgttaagaattagtgtaggcattttcaacaggagatgatactgcctgatagtacctg

SEQ ID NO: 197501 - DNA, 573 bp, Homo sapiens
gtctgtttcaagctgacaactttgattgcataaaactactttatacctgaaaacattttcaaccactgaaaaaaagtaacttatttttacaattattaattttaaataaatttttaaataattgtaaataaaacattacatttgggatattttaaaaattatttttaaaaccaaataaatattcatatatrcaaattaattctttatttctgagttttagttgctttacctgagaaaaagaaaggagaatacaagtttaaatttcctccttcttcttaggaaagaatccctaatataaattgacatattcttcaaatactgtctctagtttaatctttatagtaatccaccaaagttggctataatttaatttatctaatgagggaaataggtctcaaacacattgataagtttcccgctttagaagctattaatacttggcctaaaaattataaacattagttttggagacattcagcttaagtttgaaggcaattttgaccactccttttatctcgttaagaattagtgtaggcattttcaacaggagatgatactgcctgatagtacctg

SEQ ID NO: 197502 - DNA, 492 bp, Homo sapiens
cacatggaatcatccagaaggcactaaaagtatttgtttgaaatgcaagggagagctctgaataaatttagaatcattggcatataaatggcatttaatgcaaggcagttggaaataggttgggaattcctaaaaagtgagttttgacaaagaattcttagcattgctggctcattctgaggctttcggtcctcctctctcgttgttttacaaaatagtacaacactcaaaaaatacttcaaaaataaatttcttctcacaatccaaaaatagcattgytgtcagttttacacatttcagttaaatagtaaacaggttatgtattatgtataagaactacaaataacaatgaatagttttaaactatataaaattatgcgatgtgtacatataccctaatgaaatatgtttttatttacttaacattactggaaaaatggattatgaaaatgattgagcatggtgtatctcagagccattatttatatatgt

SEQ ID NO: 197503 - DNA, 559 bp, Homo sapiens
agatctttaaaatgattgagctatagtcacttttcactaaatttctgataaaggaacccctgctttttccaaagtttctcctcctcccacccatccactcttagccatctaaagcttagagtctatgctgcccccttctcacttaactctccaatatcttttcctggcaggtgcattctatgaatttcttagcaggatcacctggtctttttcaggcttgcaccaggttgctcttgcatttgtctttaagtccttgatggtactacagtctctccctacaatacaactttccccctcctactttccctcaagatgatttatcgttccttattctgcttccttagcatgttacctctatagcactgtcatatgctcgttattttaacatatttctctccctcactaaaatgagacctgggtgctcagatgccatttgcagtgtgagtcagttcatgagaagtatattataaataacaacaggaaatggcaagaagttttcagagatgctgaaactatatttgcagagttgattrgaggatgctttgtctgagagagagtc

SEQ ID NO: 197504 - DNA, 470 bp, Homo sapiens
attttttttttaaatcttttagactgtacttttactttactttttctatgtgtagatgtgtttaaacaactacttaccattatgttacttttgcctacagtattcaatacagtcatatgctatacaggtgtgtaacctaggagaaataggctgtactgtataacctcgctgtgcagtacgttatgctgtctcaggttgtgcaagcaaattctgtggtgtttgtacaacagtggaaccatctaactgagaggcatttcctgaaatatatctcagttattaaatgactgtatatatgctatatctatgcagtgtactgaaaattgtcaaaggrttaatcactggtatctgtaatcatttctcataaggagggatgtaagtgtatcattattaaacacccaaaatgttagatggaattctctgctttggcaaatgtttaaaaaataataactattttcattgtttcctgcttg

SEQ ID NO: 197505 - DNA, 564 bp, Homo sapiens
ttaaatacaacaaaaatacaggaagtctgtgtacagaatcaataytgaatatgttaagactgaataataaatgagtttagtacttacatagaggaagatttattaatcaattaaagaactagagtactgcttattgtctctctattggtttctgttatgttgactgatgcagtatagggtaacaatgagcaatccttagaatttctgtttgtttattatactgatatatttttattattatattttattcatgggcattattggtaggcaggaaagttccaattaaataaagtaaaaaataaaatgattagagtttaacaataattacagacaagacttaaaaagtaatgaatatcaaatacatgtttatctgccagaaaaataaatccattttgtggtgtatctttagcgttgacataatgatatatagtttgtttcctgaagtagatttaatggtgttgattattttgtggactagaaagcagcagaggaaatcagcatattgctttatgtcattcttccatagccttttgccttgaattggaacactaaataatagtcaaa

SEQ ID NO: 197506 - DNA, 288 bp, Homo sapiens
tctacacaagtgaaagggaactcatggcatgtgataacagcatctattgccttgtcacttgttttaatgcgagaatttgaaggggctttcagcctatggaatcatcactaacttgggggaatcatcccatatttatrtcatcagcacactctcaatgcttaaaaaccctttcatttgcaaactcataatctcactccagcactcctaatccagtgtttttcatgctggctgaagattagaatcacctggaagtaaaaattataaaaaataaaaattaagctcttctct

SEQ ID NO: 197507 - DNA, 576 bp, Homo sapiens
ttctcattgcaaactaattaaattctttttttatagatttatctgccttactgtctatgtaagtgtagtatatgttataaatctgttaggttgcaaaggaytgtttcatattttgtgaatgtttctaatgaacatgtctggattgaaagagtaggaacacattttatccagatttctagaaataaaaattatggccctgattttttcactgtataactacacagttttttacccctatggaatgttgattctttacctgtaaagagaagttagaccatattctgttgattaaattttctctaaaaggtctttaaattttataaatgtttgaaaagtttgttttaaaagcctgtcgatataggcataggaaattgtaggtagtttttattttttccttttctgtctattttggaagcatttatggaacattgtgggggtttatacaaatattttttatgtcaagacgtcatatgcaaggagttaaatctctggctaattgtggacttgtcagagtggaagccagagtgcagcaaactgaagactgaatagtttgatacagtggaaaccatgaatata

SEQ ID NO: 197508 - DNA, 553 bp, Homo sapiens
attgtgcataatcaaatcaacttaggtctgttcacagcagatggtctactagactttctccttaaaatcctctataccaaaaggttatgtctagaaaatccactcgagctctgttttcaactctgtcactggttctccatatctgacatttgaatttttttacttttttttttttactttgacagggtcttattctgtcatccaggctagagtgcattggtggaatgatagctcacagaagcctcaaactcctgggcttaagggatcctcctgcctcagcctcccatgtagatgggactacagtgtatgccaccatgactggctaatttttattttttttattgttgttggtggggatgaggtcttattgtactgctaggctggtcttaaaytcttggccgtcaagagatactcccaccttgacctccaaagtgctgggattacaggtgtgagccaccacacccagcctgacatttgaaatcctttactggaagttaccatcagatatggcaaagaaaatacagaaagaagatatttaccaatatgctttact

SEQ ID NO: 197509 - DNA, 401 bp, Homo sapiens
ttgttttaatgctaagcagaaagtgaatgatggaggttgcccatgggcaatgaagtttacctttgtcttatgtgttgcttaacttgattctacatccagataatagtgttcagatcaaaactaacaaccccatatttccaaaccatttatagtagggtttatcttgagaataatttctgagggtgggagtttatattctattaaagatttttggttcatcactgtctgaacactaaaggtattgaatgtagtgtttctgtacttctgactattttgtgtggctttctctatagagaagagcatgcgaatagagatgcatagcctgcaggtgtttgcatattgaatccacatgtgctttttccgttasttgctggggatggctttgatggaatctgttatca

SEQ ID NO: 197510 - DNA, 595 bp, Homo sapiens
agcccttttttggtgtccagaggtatgtttttaaaaattagaaaaaaatactatcctggaagcaaagggtactctagaagtcagtcacttcttaaaagaaacaatttgtgaatccacttggaatggaggacattctcaccagcaggcagagtgtgtggtcctttcatttaggtgaaaattgttgcccgtacattcctttattttaaatttggagttgaagaaaaattgagagaaagacatctaggggttcaaatctacttcacatcaaccataaatctgattttggagaactagtctctaggtgacgagtaggtacgagtatataggaagtcaattctagaggaagaattctctgcaaccacgaaatagatactgagaatgattgaatyggctaaatatctctccttatcaattttacatgcaaaaggcttgcattcaaaatgaagttcagtttttgcctccctgaaattgtgtatgaataacaattttttattggagaacagcatcgacatgtgaagctttatttactctttgctgatacaggaaggagtattattatccctttccagaattatctttagcagtttctatcaat

SEQ ID NO: 197511 - DNA, 474 bp, Homo sapiens
aatcatggtggaaggggaagcagatatgtcttatatggttggagaaagaggaagagagagtgaaggaggaggtgctacacacttttaaacaaccaggtctcgtgagaacccactcactatcacaagaacagtaagggggaaatctgcccccatgattcaatcacctcccaccaggcccctcctccaacactggggrttacaattccacatgagatttgggcagggacacaaatccacaccatcactattcatcttcctatttgctgcagaagcagagaatgtacatgttgtttgttcaaaagtgatacatatttaaggtaaaaaaattaaacatgcataaatctcaaaagaaaaaaattacccagagaaaaacagtactgataatatagtgtaaaactttctagaatactttcatgcacagagatgcatcattttcacaaaaaaatagttattttatgcatactgttttataac

SEQ ID NO: 197512 - DNA, 494 bp, Homo sapiens
caaatgtttctgagaagaaaagtcttggcccaatctgaattttgattatttattggttatagatatagatgtaggtatatagacatagacacagactggtatatctaggtatagatataaacatagatataaagatatgtttttatctagaggtcttacagatgttaaaaaatcctttagataaaaataccgtcagaggtacttaggtgtagatttccttygattaagtttgcccagaagatagttgactcttaaaactgcatatctggatattttttagttctgaaaagtttcttaacattgtttcatatttttgtcctccctcataaataataattgtatttttgttgtattttccctctgtctagttcatatctatcatttatccagcctttgcatttcaagaaagtcactcaaattagatctcaacaccctgttttagctttttcatggcatcattttggtctctatttcctgcaatatgagttttaatt

SEQ ID NO: 197513 - DNA, 573 bp, Homo sapiens
tctcagtccattctcttcttatatctttttatttctgtttcaaagaagccacatctaatttaatttgataaaagtgccaacatcatcttaaaatgttcttctaagataattagatcacgattttccaccaatgtgcttctcttctgagtcttcagaatacgatttcttttcctttttctccccaatttgaccagggatgtagacttttctttattttctttttacctttgtactactcaaattccactctcagatttgtacctagagagtaagataaagacaagccccagtccaattgctatggtttggatgtgagtccccacccaaatctcatgttgaattgtaatrcccaatgttggaggcagggccaggtgggaggtgattgaatcatgggggcaggtttctcacaaatggtttagtacaatacccttgatactgtccttgtcatagtgagtgagttctcatgcaatctggtcatttaaaagtctgtggcgtctcccccatctctctctggctcctgctttccaccatgtgatatgtcttctccccttcgccttgtgccataattgtaag

SEQ ID NO: 197514 - DNA, 573 bp, Homo sapiens
tctcagtccattctcttcttatatctttttatttctgtttcaaagaagccacatctaatttaatttgataaaagtgccaacatcatcttaaaatgttcttctaagataattagatcacgattttccaccaatgtgcttctcttctgagtcttcagaatacgatttcttttcctttttctccccaatttgaccagggatgtagacttttctttattttctttttacctttgtactactcaaattccactctcagatttgtacctagagagtaagataaagacaagccccagtccaattgctatggtttggatgtgagtccccacccaaatctcatgttgaattgtaatacccaatgttggaggcagggccaggtgggaggtgattgaatcatgggggcaggtttctcacaaatggtttagtacaatacccttgatactgtccttgtcatagtgagtgagttctcatgcaatctggtcatttaaaagtctgtggcgtctcccccatctctctctggctcctgctttccaccatgtgatatgycttctccccttcgccttgtgccataattgtaag

SEQ ID NO: 197515 - DNA, 587 bp, Homo sapiens
tgtgctccaagcattgtcctggtccatagtaggctcataatattgtttccaatgaataaatgagggatatcagggagtatatctgcttaaccatggaaaagttaaaggaccatcctgaccagatcgcagatgagtgtttcaggtgtaccaaagtggctcttattggcaggaccacagagggccttttgtgaaatggaaaaagggtycccatctggctggaaatgactgtaaaaatgcaggccttcgtgaacacaaaggcctttttacaaggaaaaaggagccccattttggatgaagcagtctcatgccagggacaaggcttaacaatctgaacagagggtagatttcatactcttgttccacctttggataggtgtgtgtcctttgtaacagccctgcttgtcatatactacaaaggactaactttctctctcaccacgagtcattgcattccctaatgtgggaagagggtcctacttgtattgagaaccaaatatcatccatcttcaattcttggaacagcccattttttccccagggcacatggtcttttaaataagacaaggatcagtaaattttatgggcat

SEQ ID NO: 197516 - DNA, 587 bp, Homo sapiens
tgtgctccaagcattgtcctggtccatagtaggctcataatattgtttccaatgaataaatgagggatatcagggagtatatctgcttaaccatggaaaagttaaaggaccatcctgaccagatcgcagatgagtgtttcaggtgtaccaaagtggctcttattggcaggaccacagagggccttttgtgaaatggaaaaagggttcccatctggctggaaatgactgtaaaaatgcaggccttcgtgaacacaaaggcctttttacaaggaaaaaggagccccattttggatgaagcagtctcatgccagggacaaggcttaacaatctgaacagagggtagatttcatactcttgttccacctttggatagrtgtgtgtcctttgtaacagccctgcttgtcatatactacaaaggactaactttctctctcaccacgagtcattgcattccctaatgtgggaagagggtcctacttgtattgagaaccaaatatcatccatcttcaattcttggaacagcccattttttccccagggcacatggtcttttaaataagacaaggatcagtaaattttatgggcat

SEQ ID NO: 197517 - DNA, 170 bp, Homo sapiens
gaattcaaaaaggcctcagcagtagcctaagaaaatctttattacagaaaaacttacagatttgatgtaaaacatgcttataatcactttgggaatagcgtttgcatgatgtattacagcttgtatgaactggaaagagmaaacctcttctaaatgattatccaaaacag

SEQ ID NO: 197518 - DNA, 551 bp, Homo sapiens
tggggtcagtgaaaacttgagctgagtgtagaaggataacttagaaataggttaggtgaagggctgggccttgaggcaagagggagcagctgaacaaagtttggagggataaaacatgtcccaggtgggtgccgtggctcatgcctgtaatcccaacactttgggaggccaaggcakgaggatcacgaggtcaggagattgagaccatcctggctaacacaatgaaactctgtctctactaaaaattttttaaaaaattagcttggtgtggtggcacttgcctgtaatcccagcgactcgggaggctgaggcaggagaattgcttcaacccaggaggcggaggttgcagtgagctgagattgtgcctttgcactccagcctgggtgacagagcgagactccatctcaacaacaacaacaacaacatgccccacctgaagaagtgcaacgaattctgcacagctggagtgaagggtatctgtgggcaagggcaagagttaaggtcaaaggtggagataaggtcaaagggtaaagactgggcagaacaataag

SEQ ID NO: 197519 - DNA, 564 bp, Homo sapiens
gtagaaggataacttagaaataggttaggtgaagggctgggccttgaggcaagagggagcagctgaacaaagtttggagggataaaacatgtcccaggtgggtgccgtggctcatgcctgtaatcccaacactttgggaggccaaggcaggrggatcacgaggtcaggagattgagaccatcctggctaacacaatgaaactctgtctctactaaaaattttttaaaaaattagcttggtgtggtggcacttgcctgtaatcccagcgactcgggaggctgaggcaggagaattgcttcaacccaggaggcggaggttgcagtgagctgagattgtgcctttgcactccagcctgggtgacagagcgagactccatctcaacaacaacaacaacaacatgccccacctgaagaagtgcaacgaattctgcacagctggagtgaagggtatctgtgggcaagggcaagagttaaggtcaaaggtggagataaggtcaaagggtaaagactgggcagaacaataagggcctcagaagtgacctagggacttgaactatttctagaa

SEQ ID NO: 197520 - DNA, 564 bp, Homo sapiens
gtagaaggataacttagaaataggttaggtgaagggctgggccttgaggcaagagggagcagctgaacaaagtttggagggataaaacatgtcccaggtgggtgccgtggctcatgcctgtaatcccaacactttgggaggccaaggcaggaggatcacgaggtcaggagattgagaccatcctggctaacacaatgaaactctgtctctactaaaaattttttaaaaaattagcttggtgtggtggcacttgcctgtaatcccagcgactcgggaggctgaggcaggagaattgcttcaacccrggaggcggaggttgcagtgagctgagattgtgcctttgcactccagcctgggtgacagagcgagactccatctcaacaacaacaacaacaacatgccccacctgaagaagtgcaacgaattctgcacagctggagtgaagggtatctgtgggcaagggcaagagttaaggtcaaaggtggagataaggtcaaagggtaaagactgggcagaacaataagggcctcagaagtgacctagggacttgaactatttctagaa

SEQ ID NO: 197521 - DNA, 468 bp, Homo sapiens
tcaaggcttatagcttgctttcttcaaggaggcagctcaagctgtacctggacccccttgaaccacagctgaacagctgggatgtagggagcagtgtcccaaggctgcatagggcatccaggcactgggcctgacccasgaaactattcttctctcctagccctccagatttgtaatgggagggggtgctgtgaaggtgtctgaaatgccttcgaggccttttccccattatcttgaatattagcacttggctaccctttaggtatgcaattatctccagcaggtagttgctccacagcctgcttgaattcctcttcagcaaaagctttttctttctcttacacatggccaggctacagattttccaaatttttacgctctacttcgttaaatatatattccaactttatttctttgctcccatgtctgaccataggcaattagaagcagccacaccacatcttgaac

SEQ ID NO: 197522 - DNA, 564 bp, Homo sapiens
gggcctgacccacgaaactattcttctctcctagccctccagatttgtaatgggagggggtgctgtgaaggtgtctgaaatgccttcgaggccttttccccattatcttgaatattagcacttggctaccctttaggtatgcaattatctccagcaggtagttgctccacagcctgcttgaattcctcttcagcaaaagctttttctttctcttacacatggccaggctacagattttccaaatttttaygctctacttcgttaaatatatattccaactttatttctttgctcccatgtctgaccataggcaattagaagcagccacaccacatcttgaacactttgctgcttagaaatttcttttgccagataccctaaatcatcactctgaagttcaaacttccacagatcgctagggcatgaacagaatgcagccaagtgttttgctagagcataacaagggtggcctttgctccagtttccaagaagttcctcatttccatctgagacctcatcaatctggccttcactgcccctatcaccatcagcattttgttcaca

SEQ ID NO: 197523 - DNA, 666 bp, Homo sapiens
tcaaagggggcacatctggtgagaaacttcttgctagtgggactttctgaagaatcccaaggcagctcaggatatcacatagagaaggagctgagtatgttcacttgctagcttcagactctcttcctcttcttataaagccaccaggtccattcccatgataacccattaatccattaatccctgaatggattaattcattcaggaaggcagagttctcatgacccaatcacctcataaaatccccacctctcaatattgcctcattgattaagtttcaacatgagttttgcaggggacattcaaaccatagcactgatttatccactaygatttgctatatttttaagcagttattacttttctctggcttcttcctaccttttggctagcatattcctctgcatttataaagatatattaaagccattcataaattgatagcagctcacatttcagaaaacttaaatcactttaattttaaaaatgtaatacttctgcctctcttctattgtttttaatatactttcttccctatagtttctgtcggtgaaaaagtttagagagaagtttttattttcttatatttgaaaagcaatatggaaatgtaggaaaaggaaagaggaaaactggtaaatactttgaactctaaatatgatttttata

SEQ ID NO: 197524 - DNA, 580 bp, Homo sapiens
ttctggatattattccattgttggatgcatagtttgtgaatattttctcccattctgtgggttgtctgtttactcagttgattatttcttttgctgtgcagaagcttcatagtttaattaggtctcatctatttatttttggttttgttgcatttgcctttgggttcttggtcatgaagtctttgcctaagccaatatctagaagagtttttccaaattatcttctagaatgtttatgatttcaggccttagatttaagtctttgatccatattgagttgatttttgtagaaggtgagagatgaagattcagttttattcttctacgtgtggcttaacaattatcccaggaccatttgttgaagagggtgtcctttccccactgtatgttttcattygctttgttgaagatgagttcgctgtaagtatttggctttatttctgggttcttaattctgtgacattggtctacatgcctatttttataccagtaccatgctgttttggtaactatagccttgtagtatagtttgaagtcaggtgatatgatgccttcagatttgttctttttgcttagtctt

SEQ ID NO: 197525 - DNA, 580 bp, Homo sapiens
ttctggatattattccattgttggatgcatagtttgtgaatattttctcccattctgtgggttgtctgtttactcagttgattatttcttttgctgtgcagaagcttcatagtttaattaggtctcatctatttatttttggttttgttgcatttgcctttgggttcttggtcatgaagtctttgcctaagccaatatctagaagagtttttccaaattatcttctagaatgtttatgatttcaggccttagatttaagtctttgatccatattgagttgatttttgtagaaggtgagagatgaagattcagttttattcttctacgtgtggcttaacaattatcccaggaccatttgttgaagagggtgtcctttccccactgtatgttttcatttgctttgttgaagatgagttygctgtaagtatttggctttatttctgggttcttaattctgtgacattggtctacatgcctatttttataccagtaccatgctgttttggtaactatagccttgtagtatagtttgaagtcaggtgatatgatgccttcagatttgttctttttgcttagtctt

SEQ ID NO: 197526 - DNA, 605 bp, Homo sapiens
attgttttttctttatgatatctgtttctctggagaatttttcatccatattctgtatcatttctataatttatttaagcttttttatacctttctctggtatctcctcgagtaccttaatgatcaaccttctgaattctttatctggcaattcagagatttcttcttcattaggatccattgctaggagmtaggagctaggagctagtatgatcttttagtggtgttatagaaccctgctttgccatattaccagaattactcttctggttccctctcatttgggtagcctatttcagtggaaagttctgaaactcaaggcttgctcttcagattttgtttcatggggtgatatcttgatgtgatgttctcccccttaccctaggaatggggcttccttagagccttactgtaatgattgctatttctcttctgtatctagccactcagaggggctaccaggctctggactggtgctggagaatgtctgcagagtgtcctgtgatgcgatctgtctcaggtcttccagccatggataccagcacctgctctggtggaggtggcaggggagtgaagtagactctatgggaatccttggttgtaga

SEQ ID NO: 197527 - DNA, 605 bp, Homo sapiens
attgttttttctttatgatatctgtttctctggagaatttttcatccatattctgtatcatttctataatttatttaagcttttttatacctttctctggtatctcctcgagtaccttaatgatcaaccttctgaattctttatctggcaattcagagatttcttcttcattaggatccattgctaggagataggagctaggagctagtatgatcttttagtggtgttatagaaccctgctttgccatattaccagaattactcttctggttccctctcatttgggtagcctatttcagtggaaagttctgaaactcaaggcytgctcttcagattttgtttcatggggtgatatcttgatgtgatgttctcccccttaccctaggaatggggcttccttagagccttactgtaatgattgctatttctcttctgtatctagccactcagaggggctaccaggctctggactggtgctggagaatgtctgcagagtgtcctgtgatgcgatctgtctcaggtcttccagccatggataccagcacctgctctggtggaggtggcaggggagtgaagtagactctatgggaatccttggttgtaga

SEQ ID NO: 197528 - DNA, 303 bp, Homo sapiens
aagcatatttgtactcttgtgataattgtttakaagaaaaattaaagcaaaggagataggtattaaatatggacagtgtcttagtacacttctgctactataacaaaataactgagactgggtagtttttaaggaacagaaatttatttctcacagttccagaagccagatagtttaagatcaatgtgctggcaggcctggtgtttggtgagagccccatcccctgcttccaagatggcaccttgcaactgtgtcctgcagaggtgacaaatggtgtgtctccagaaggcaaaacgcagaagg

SEQ ID NO: 197529 - DNA, 207 bp, Homo sapiens
tgtgtgtgtgtgtctgacaatttcttcattcattcattcaccactcaggttgtttccatatcttggctattrtgaataatgtttcaatgaatgtataagtacagatatctctaagaggtgctgatttcatttctttgggttatataccaaacagagaaatggctatgcatgagggtaagtctatttttaattttctgacacacctcc

SEQ ID NO: 197530 - DNA, 592 bp, Homo sapiens
ctaattcctgtcctcatgacatacacccccattattttcattaccgtcttcttatttctaacataacaagatattgcagacttttcttgctcttccatgccccagccctgaaatcagccatttctttgaggagcgctggtcctttttattggtgaaaccaagatatggctaccagctatgctcattgctacttggtgtctttgcttctaggctatttgagcagatgaagctgggaaatatatrcatatatgtgcatatatatacatacgcacacgtggatacatatatacatacacatgcatgtatgcatatatatacatgtaaatccatgtacacttacatgtttcaaggctctcaaaagtatttcatactgtagcagttttgttttgtctccagagcattaattgcctgttggatcatttttatgatggtagctttaaaattcttgtcagataattccagcaactgggttgtctcaggtattggcatcttgtcttttttcattcgagtcgtgattttcctggttcttaatatgtcaagtttttttttaaattgtattctgagtattttttatattctaatgacattctag

SEQ ID NO: 197531 - DNA, 472 bp, Homo sapiens
aaatctgactgaatatttcccattaagaaaagtttttttaattagttgaamctctcttgaatatcattgatggcttgtatgtatttatgaacatcaatattactctttccggggttcagaggtgattgctgcttttagattgctgtgcatgaatgagatgtctgagagggtaaggtatgtgagagagatgaagacagacacagactgactgaaaagatggattttgtatagcatcatacaaccaatataattgttgctctttagaacattgaagtgctcatgtaagtgaacaagttgcatattctctcaagtgaaaacttagcctgtttttgttgtgtgtctctggggagctctgatgtctgagcctcactcttcggggctctattttggagtcctgcattctgagatctaagggcaagtaggaaggataacttattttttatgcccacagattattgaatgctgtttgttc

SEQ ID NO: 197532 - DNA, 493 bp, Homo sapiens
tctgactgaatatttcccattaagaaaagtttttttaattagttgaacctctcttgaatatcattgatggcttgtatgtatttatgaacatcaatattactctttccggggttcagaggtgattgctgcttttagattgctgtgcatgaatgagatgtctgagagggtaaggtatgtgagagagatgaagacagacacagactgactgaaaagatgsattttgtatagcatcatacaaccaatataattgttgctctttagaacattgaagtgctcatgtaagtgaacaagttgcatattctctcaagtgaaaacttagcctgtttttgttgtgtgtctctggggagctctgatgtctgagcctcactcttcggggctctattttggagtcctgcattctgagatctaagggcaagtaggaaggataacttattttttatgcccacagattattgaatgctgtttgttcccaagagggaatatatcttctaga

SEQ ID NO: 197533 - DNA, 524 bp, Homo sapiens
aatgccacacttcattcacgcttcattgcttcagcaactgcagtcctaacacctgagggacagtcagagaaaccccattccctcacttcacacctacatctcccaagaggagctagattgaaagcaacacagaggaaatccctgtgggtatcagtgtgtttttatacacgtgaattttttttttagttgcatatataccagcaaaggaaacacatacattttttataagagaaaatcctcccacctagttttgcttcctgttaggtggtctgggagaagggagaaaagttgaggttgtcccttttgaattctaggttaatcctttgtaccttaaactaaaaattgaagtagtttagctaggcgagtttctcttttcttttctctttggtgtaaagggtatgagattaarccatatcagatataatggctcaagggaaattaagaagatggagaagcgaagagcagcagctggggagatacttgaggaaggggagaagcactcttaacattacttagaggaagca

SEQ ID NO: 197534 - DNA, 611 bp, Homo sapiens
gaattccagagacattgttccagtggacataaaggtgtatttctctcctttttgtgggcagctgggmataacttatggggtcgtaggtagcttttgtccatgggtgcataaacagtcccttttgttgaagagaagctaggtacagggatgggaatgggtccagtccacacagttgctgctctttcacaaggactgaaagaggcccccatgtcagctggtgtctgggagggcagctaaggcagccacatgggaaggctggctgggtggcttccagaagtcccatgaagcttccaggcttgagggtggctctccccacaggccggctgtttggcaggctccccaggaccttggctggctgccattgcatttcggcgttcacggactctgaaggatctgcttactctaactgatcttattcctgcataatcttttctttttctcctgctctgctgcctgtttattttttgttatcagaggaagaagaaatgctcgaaccaggaaccaggtatttactagaaaggcccattagccccattcaccgtgatggaaactgtctttagtgctgacttccagaacagagcccaccttgcctgttgctgatgggtccatat

SEQ ID NO: 197535 - DNA, 511 bp, Homo sapiens
agcttccaggcttgagggtggctctccccacaggccggctgtttggcaggctccccaggaccttggctggctgccattgcatttcggcgttcacggactctgaaggatctgcttactctaactgatcttattcctgcataatcttttctttttctcctgctctgctgcctgtttattttttgttatcagaggaagaagaaatgctcgaaccaggaaccaggtatttactagaaaggcccattagccccattcaccgygatggaaactgtctttagtgctgacttccagaacagagcccaccttgcctgttgctgatgggtccatattcttgtcctgtccctgggcacagtcaatcaaggaaagaattcacaggtggggtgtggaggagccaagaacatatccaaatccatgctgtcttcacaagagcatattacatgtgcctcatggtttactcacgttgtgaggaggctaggcctttgatttggccccttttaaagaaagtttaaaagaa

SEQ ID NO: 197536 - DNA, 593 bp, Homo sapiens
cagttctgggaactggtaaaagagacaagactgacagatgggttttcacattctagtaggactatttcagttgctaatgacagaacccccaactcaaatcaacttaagcttaagagagagtaagttcctatacctgaaaagtcccagggttgggatggcttcaggcacagctggatccaggagcaagggtgatttttgtcagcactttgtctctgtcttcttgttctgcttccctctgtgctggtttcattctcrtgtaggatcttccggtgcagtggtctctggcaattccaggctttcaccatcatcttacccaaactctcagtggaaaagggcttcctttctataatggttccaagagaggtcctggggtggagtctcattggactgccttgagtcatgcacccagtcatgatccagtccccatggcctgagagggagctaatgggtcagacccgggtcacaggaacagaaaagcaaatccagatgtcacgttcagcttgatcagactcctgagaggctaaagtcatcctgaactgaggaatgtgtcctgcagaggctttgtttggagatgtgaaggccgccaccttctg

SEQ ID NO: 197537 - DNA, 627 bp, Homo sapiens
agttgagcagtgttcccttctcttctagtttttggaagactttataaggaattattactaattcttttttaaatgtttggtagaattcaacaatgtagccatctgggcctgggcatttatttgtgggtagttttttgatgattgattcaatctcttgttataagtgtattcatttttttttcttcttaagtcagtttcaatagtttgtttctttctaggaatttattaatttcatctaagatatccaacttgttggcatataattgttcatagtacttctttatgatcctttttctcctgtaaaataatggtagtaacgtcccctctttcatatctgattctaatcatttgaatcctctctcatgttttcttggtttatttagctaatggcttgtcaatttcattgatcttttcaaagaaccagcttttggtttcatgattttctctattgtttttctrttctctattttattaatttctgctctaatctttattatttccttccttctgctagctctaggtttagtttgcacttttttttccagtgtcttaaggtggaagtttaggttattgatttgaggtttgggtttttttccctaatataggcatttacagtcatacatttcc

SEQ ID NO: 197538 - DNA, 446 bp, Homo sapiens
ggccaagaaggcagaaagtctgagttcagatctgagctttaccacagagtggctctaaaccttcatgttcaactgtacaatgggactatccgtcctatccgcctctcaggtagatgaaatggggtaggcaatacgaaagagctgtgtacattgtcaagagccctattcatatgtggcctgcttaatggctccctcctartctgatttgagatgagcattctttcagcagcatttaatgggctaagtcagatacattcaaatattttttgaactattaatgtcaatgaaattttacacagtctctccatatataaagtaaatgaaagtagggctgcaagaatcagcaggaagaggggagctagagacttcccccaataccacccgacccatcagcctctcatggcagcatccaaggcctctgcacagacccctagggctcccagcga

SEQ ID NO: 197539 - DNA, 478 bp, Homo sapiens
ccagtctgagtgccacattataggaacagcaggaaggagttcagtttgaccctgtggctcaagccttaatgaaggatgcttccctggaagctgggactacaggacgctccatccccgtggttggaaaactgaccrgtgacagctcctgctccatccgtggccttgactctggaagacatttcccagggagctcttttgtgggtcagtgcagatgcccagcctgggggcttcagattaaaccaactaaaaccagtttctgtggttccggctgctgtcctcactgggctagaaaatggaagaggttttaaatcgtggctcctggcaggcaaggagaacagagtggctcatttccagcaaaaggcagagatgctaatctcataaggcagaaggctgcctgccagcaattgcacgcattttgcacggtccctccgtttctcccttccttcctactaatctgatccatttatctacaaagcca

SEQ ID NO: 197540 - DNA, 478 bp, Homo sapiens
ccagtctgagtgccacattataggaacagcaggaaggagttcagtttgaccctgtggctcaagccttaatgaaggatgcttccctggaagctgggactacaggacgctccatccccgtggttggaaaactgaccagtgacagctcctgctccatccgtggccttgactctggaagacatttcccagggagctcttttgtgggtcagtgcagatgcccagcctgggggcttcagattaaaccaactaaaaccagtttctrtggttccggctgctgtcctcactgggctagaaaatggaagaggttttaaatcgtggctcctggcaggcaaggagaacagagtggctcatttccagcaaaaggcagagatgctaatctcataaggcagaaggctgcctgccagcaattgcacgcattttgcacggtccctccgtttctcccttccttcctactaatctgatccatttatctacaaagcca

SEQ ID NO: 197541 - DNA, 406 bp, Homo sapiens
gcctgcttcctggtttgcagatggtcaccttcttgttgtatccccaagtgatggagagtagagagcaagatcaaacccttgcatctcttcttataagggcactaatcccgttcatgaaggctccatgctcatgacctgattactccccaaagtaaagtgcattcayattcagggttaggatttcaacctacgaatattggtgggacacattcagggtattgtgctccccattggccaaaccctcaaaaaagccagagggcaaggaggtccatgcaggacagcctcccagggcccagtctagagtggagaggggtccggagaggatccagagaagcaaaaagaaaagattcatccaccaagcatttgaggatttctcaacagtttcccctgacaacgtgggcaggtc

SEQ ID NO: 197542 - DNA, 493 bp, Homo sapiens
ttgggttaagtctgcttgtgttctataaccttgttgtacttaaatattgatatatttctataggtttggaaagttctctgttatttttttcaataygctttctaccccaatctctctttctgtctcctatttaaggccaataactcttagattttcccttttcatgctattttataaatcttgtaggcatgcttcattttttttgttattgctttcctctgtctgtgtgttttcaaatagcctgttcaagcacacaaatcctttcttctccttcatccattctgctcttgagagactctgatgcattcttctgtttgtcagttaatagggctgttccagaatttctgcttgagtttttaagattattttaattctttgttaaaattatctgatggaattctgaatttcttctctgtaatgtcctgaatttcattgcgtttcttcaaaacagctattttgagttatctgaaaggtcacatatctctgtcactct

SEQ ID NO: 197543 - DNA, 493 bp, Homo sapiens
ttgggttaagtctgcttgtgttctataaccttgttgtacttaaatattgatatatttctataggtttggaaagttctctgttatttttttcaatatgctttctaccccaatctctctttctgtctcctatttaaggccaataactcttagattttcccttttcatgctattttataaawcttgtaggcatgcttcattttttttgttattgctttcctctgtctgtgtgttttcaaatagcctgttcaagcacacaaatcctttcttctccttcatccattctgctcttgagagactctgatgcattcttctgtttgtcagttaatagggctgttccagaatttctgcttgagtttttaagattattttaattctttgttaaaattatctgatggaattctgaatttcttctctgtaatgtcctgaatttcattgcgtttcttcaaaacagctattttgagttatctgaaaggtcacatatctctgtcactct

SEQ ID NO: 197544 - DNA, 385 bp, Homo sapiens
gaattctgaatttcttctctgtaatgtcctgaatttcattgcgtttcttcaaaacagctattttgagttatctgaaaggtcacatatctctgtcactctgggattgctcattggtgccttatttagtttggcaaagtcatgttttcctagatggtcttaatacttttggatgtttgtcaatgtctggacattgaaaaactagtttattctaatcattgcagtctgagcttatttatacctataattcttgatagggctttccaggtatttaaagggaattgaatgttgttctaaatctttggtcactgtgtgcattagggkgcaccccaagcccagtaacactttaagtcttgctgactcatacaggtgccaccttggtgatctt

SEQ ID NO: 197545 - DNA, 452 bp, Homo sapiens
aggtcacatatctctgtcactctgggattgctcattggtgccttatttagtttggcaaagtcatgttttcctagatggtcttaatacttttggatgtttgtcaatgtctggacattgaaaaactagtttattctaatcattgcagtctgagcttatttatacctataattcttgatagggctttccaggtatttaaagggaattgaatgttgttctaaatctttggtcactgtgtgcattagggggcaccccaagcccagtaacactttaagtcttgctgactcatacaggtgccaccttggtgatcttcagtaagatacaagagaattcccagtattagcaggtaaagtcttgttctctttacttactttctcccaagcagtgtctctatgtctcttcgtactgarctgcctgaagttggagaaggggtgtcacaagccctcctgtgacta

SEQ ID NO: 197546 - DNA, 427 bp, Homo sapiens
gaattcccagtattagcaggtaaagtcttgttctctttacttactttctcccaagcagtgtctctatgtctcttcgtactgagctgcctgaagttggagaaggggtgtcacaagccctcctgtgactaccattgctgggactcttcttggtcacagctgaggctagcacagtactgggtcytgcccaaggcctatggtgactagtgtctggctatggctgctgtatattcaatgctcaagggctctttagtcagaggtgctgaatcctgccacgcctaggtctttcatttcagggctgcaggttcccttctggcccagggtgagtctagaaatgtcatctgggagctatgtcctagtattggggtctttatggattagatttgtgctttattgtactacggctgagctgttaccgaagttgcaagac

SEQ ID NO: 197547 - DNA, 427 bp, Homo sapiens
gaattcccagtattagcaggtaaagtcttgttctctttacttactttctcccaagcagtgtctctatgtctcttcgtactgagctgcctgaagttggagaaggggtgtcacaagccctcctgtgactaccattgctgggactcttcttggtcacagctgaggctagcacagtactgggtcttgcccaaggcctatggtgactagtgtctggctatggctgctgtatattcaatgctcaagggctctttagtcagaggtgctgaatcctgccacgcctaggtctttcatttcagggcygcaggttcccttctggcccagggtgagtctagaaatgtcatctgggagctatgtcctagtattggggtctttatggattagatttgtgctttattgtactacggctgagctgttaccgaagttgcaagac

SEQ ID NO: 197548 - DNA, 483 bp, Homo sapiens
gtcagatctctttcactgtctcagtcacaattttgcaatgacagtttcaaaagctgcttatcacccctttaaaaacaccttgtacactcactgttacatcgtaacataattaaggcttgttggtttcacctgtgaggttactttttgtaaagttcaraagctgaaaatcttaactgcttggcatagctaaagttgagtaacagtggatttaaagggattttgttaaagagtgctcagcttaattaaaactgggtattcaagtaataaatatatttaaaaggcctttatatttttctcttcttggatcttgttttctggaaaaaaatttttatttttctcagttgactaaatcatctttctccattttatttcttgacactcttaatgcatgtgtgagaggccctaagataacttctggtagtccttgggaaaaacagaggaggtgccacagaccccattgtggggaaaaaagcaaacaaacaa

SEQ ID NO: 197549 - DNA, 483 bp, Homo sapiens
gtcagatctctttcactgtctcagtcacaattttgcaatgacagtttcaaaagctgcttatcacccctttaaaaacaccttgtacactcactgttacatcgtaacataattaaggcttgttggtttcacctgtgaggttactttttgtaaagttcagaagctgaaaatcttaactgcttgrcatagctaaagttgagtaacagtggatttaaagggattttgttaaagagtgctcagcttaattaaaactgggtattcaagtaataaatatatttaaaaggcctttatatttttctcttcttggatcttgttttctggaaaaaaatttttatttttctcagttgactaaatcatctttctccattttatttcttgacactcttaatgcatgtgtgagaggccctaagataacttctggtagtccttgggaaaaacagaggaggtgccacagaccccattgtggggaaaaaagcaaacaaacaa

SEQ ID NO: 197550 - DNA, 522 bp, Homo sapiens
ttttgtcacttacagacaatygttatcttgctatgttccttctcaaaagatgggatataatcaagctataagactttaacagctgttctcaaatgcagatttccaatagctttgaagattgtaacattggaaaaaatgtacaggactcatgaagaactgaaatgtttatgaatatcaagtgaaacaagagttgtcttaaatggattgtgctcagaaagctaaagcaatctttttgacttttgcttagaatattgctgatccttattttgtttttcagagtcaaggaaacttattttgaactatgtgcagcctttaataattaagtaagttatactcttgtgaacaaaattcggagcaggtttgtttctctgtacctggttcctctagaatttggaaaccatctgtgagtaaccttaacttacggcaatatagttgtttgcatcagtgccacaagaagtcttttttttttttttttttcaataagacacaattagaaaaactggttattttatcaaagctttg

SEQ ID NO: 197551 - DNA, 522 bp, Homo sapiens
ttttgtcacttacagacaattgttatcttgctatgttccttctcaaaagatgggatataatcaagctataagactttaacagctgttctcaaatgcagatttccaatagctttgaagattgtaacattggaaaaaatgtacaggactcatgaagaactgaaatgtttatgaatatcaagtgaaacaagagttgwcttaaatggattgtgctcagaaagctaaagcaatctttttgacttttgcttagaatattgctgatccttattttgtttttcagagtcaaggaaacttattttgaactatgtgcagcctttaataattaagtaagttatactcttgtgaacaaaattcggagcaggtttgtttctctgtacctggttcctctagaatttggaaaccatctgtgagtaaccttaacttacggcaatatagttgtttgcatcagtgccacaagaagtcttttttttttttttttttcaataagacacaattagaaaaactggttattttatcaaagctttg

SEQ ID NO: 197552 - DNA, 522 bp, Homo sapiens
ttttgtcacttacagacaattgttatcttgctatgttccttctcaaaagatgggatataatcaagctataagactttaacagctgttctcaaatgcagatttccaatagctttgaagattgtaacattggaaaaaatgtacaggactcatgaagaactgaaatgtttatgaatatcaagtgaaacaagagttgtcttaaatggattgtrctcagaaagctaaagcaatctttttgacttttgcttagaatattgctgatccttattttgtttttcagagtcaaggaaacttattttgaactatgtgcagcctttaataattaagtaagttatactcttgtgaacaaaattcggagcaggtttgtttctctgtacctggttcctctagaatttggaaaccatctgtgagtaaccttaacttacggcaatatagttgtttgcatcagtgccacaagaagtcttttttttttttttttttcaataagacacaattagaaaaactggttattttatcaaagctttg

SEQ ID NO: 197553 - DNA, 560 bp, Homo sapiens
aggtaatgaagacagaatccttatgaatgaattagtaccctcataaaaacagaaatgaaagaacacattttttstctctctgctctccccaacatgagaatacaatgtgaagattgtcatcaacaaaccaggaagtgaagcctttccaaacaacagatttgctgccaccttgatcttggacttcccagcctccagcctgtgagaaaaaataatatctgtttttgaagccacctggtgctatttttgttatagtagcctgaactgactaagagagtagacaacagtggtaactctggattaaaatatacatattactggaattaagttagtgtaaatttgaagcagactgataaattgagatatatattgtaagccctattgaaacaattaagaaaataactaaaaaagtaaactaattaaaaaaagactgagctgatttttcattgtagaattcaattgttttggatgggggaaagtgatttgtaacacataattaaataattacaatctttttgaaatagtttcctcatcagtaaagtggaggtaaccctacatcctag

SEQ ID NO: 197554 - DNA, 551 bp, Homo sapiens
tcttctgcaggtaggtgctagttaaagcttgtgaatagataaaatttctcaaatatatcattatagaacaagtataaagaaagaggactatgaataaaatcttgacrtttcacaaaccgtgatggcagccaattccagcactgggagaaacaatctggtatagaggaagggagtgagaagacatcatttctttttctgatacaaattcaatatgcaatttacattaatgcttctcaaactgtagtgtgaacaaaaattatcttgaagtcttgttaaaacacagattttcaggtcctatttccagatattctaattcaaggggtttgaaaggatgccagggagtttgaatttctaacaaactctcacatcatgctgatgcctcccacctaggaccacccttcattatatctcaaagctctaaattaaaccttcttactcacagtgtggcccatgggccagaaacattggcatcacgtgggagcttgatggaaatgtaaaatcctaggctccaacccagatctactgactcagaaactgccttttaacattat

SEQ ID NO: 197555 - DNA, 551 bp, Homo sapiens
tcttctgcaggtaggtgctagttaaagcttgtgaatagataaaatttctcaaatatatcattatagaacaagtataaagaaagaggactatgaataaaatcttgacgtttcacaaaccgtgatggcagccaattccagcactgggagaaacaatctggtatagaggaagggagtgagaagacatcatttctttttctgatacaaattcaatatgcaatttacattaatgcttctcaaactgtagtgtgaacaaaaattatcttgaagtcttgttaaaacacagattttcaggtcctatttccagatattctaattcaaggggtttgaaaggatgccagggagtttgaatttctaacaaactctcacatcatgctgatgcctcccacctaggaccacccttcattatatctcaaagctctaaattaaaccttcttacycacagtgtggcccatgggccagaaacattggcatcacgtgggagcttgatggaaatgtaaaatcctaggctccaacccagatctactgactcagaaactgccttttaacattat

SEQ ID NO: 197556 - DNA, 633 bp, Homo sapiens
acttaaattaagagaagttagaacaagagatataagtttggtattcttctgcaggtaggtgctagttaaagcttgtgaatagataaaatttctcaaatatatcattatagaacaagtataaagaaagaggactatgaataaaatcttgacgtttcacaaaccgtgatggcagccaattccagcactgggagaaacaatctggtatagaggaagggagtgagaagacatcatttctttttctgatacaaattcaatatgcaatttacattaatgcttctcaaactgtagtgtgaacaaaaattatcttgaagtcttgttaaaacacagattttcaggtcctatttccagatattctaattcaaggggtttgaaaggatgccagggagtttgaatttctaacaaactctcacatcatgctgatgcctcccacctaggaccacccttcattatatctcaaagctctaaattaaaccttcttactcacagtgtggcccatgggccagaaacattggcatcacstgggagcttgatggaaatgtaaaatcctaggctccaacccagatctactgactcagaaactgccttttaacattatccccagttgactcatatgggcatgaatgtttgtgaagc

SEQ ID NO: 197557 - DNA, 594 bp, Homo sapiens
agaatgagggttgaaatttcagctcttctatttactagctgtcaattatttggcaaattgtttcagcatcaacaccttctttagaaatgtgggaaataatagcaacttcattaggttggttggttttaataataacacatttggagtgaatagtgcaataatttgttcatattattattaaccttttaccaaataattttacaggatctagataaatgttgaggatggtgatgatgatgattataaaaaaatcctgtattcagtgcttactctgttccatgctctgggctaagtactttacctaaaataaccccttcttaatatgtgcaaagaaaacttcttgagtttccagattctcttctaatcaccaccatactcttagctcttgatcagtgccaagtgtctcaaaaaagttgtataaatatattgtcttcactttttttactcccattcacacaagcctactcctatatatcttstactatgttgccagaattagtggatttttttcactacacatcttactttagttttcaacagagtgttttaaaaaaaagagtgtaaaaacagtttcttttcctgatttccataaga

SEQ ID NO: 197558 - DNA, 614 bp, Homo sapiens
tactgaaaccaatcagtgatctcttggaactcctattaagaaaatgctcctgggtactaacaaaatagagtatagcaaatgagctgaaattacttttaactttatcaaatatgtgatataaaggtgttaatgtttattaacatggcttcatgttaatagctccatcaaggatcagatgtttatagcagtaagaattctgtatgattattttacatcttttgctttagacatgagaccatcattaacagggaagaaataaactgatgtcaaaaagaaagaatatgtatatactttgcattttccattraaatgctaaatttcgtgcacagaaagaaattcagcatgacatatatagctttatatttccatgactgtcttcatacattttgagttatagtcatatcaagaaacttgacttcccttaaacacaatatccactgcctcatttgccgtacttttatacatgatgttatctctaatgggaacataatcttatttcctgcttctttaattaatacttattttttccaatactcaagtaggtattacctcctgtgggaaacgtttcttgattttcttccgtatctaacatgtattaagtgaccttattcagt

SEQ ID NO: 197559 - DNA, 329 bp, Homo sapiens
aatatagttcaggaagctccctcctcctgttggccttatttcgattcttctagggctatttacacrtagccaaataccccagaatttaaaattaaagcctttggaatgtctggcagaaagaatatattctagaagtaaaacctcagacttagattcttttgactgtttggcatcattattttgaatttgcaatgtgaatgagaaacaaacaaatgaaaaagataaagtaaaagaaaaccctcaatttcaaagttgcacatatttgtcattatttaaaaagaagagtacatgttaaaggcctaaatattttaaataaacattttctacca

SEQ ID NO: 197560 - DNA, 329 bp, Homo sapiens
aatatagttcaggaagctccctcctcctgttggccttatttcgattcttctagggctatttacacgtagccaaataccccagaattkaaaattaaagcctttggaatgtctggcagaaagaatatattctagaagtaaaacctcagacttagattcttttgactgtttggcatcattattttgaatttgcaatgtgaatgagaaacaaacaaatgaaaaagataaagtaaaagaaaaccctcaatttcaaagttgcacatatttgtcattatttaaaaagaagagtacatgttaaaggcctaaatattttaaataaacattttctacca

SEQ ID NO: 197561 - DNA, 329 bp, Homo sapiens
aatatagttcaggaagctccctcctcctgttggccttatttcgattcttctagggctatttacacgtagccaaataccccagaatttaaaattaaagcctttggaatgtctggcrgaaagaatatattctagaagtaaaacctcagacttagattcttttgactgtttggcatcattattttgaatttgcaatgtgaatgagaaacaaacaaatgaaaaagataaagtaaaagaaaaccctcaatttcaaagttgcacatatttgtcattatttaaaaagaagagtacatgttaaaggcctaaatattttaaataaacattttctacca

SEQ ID NO: 197562 - DNA, 237 bp, Homo sapiens
ccagaatttaaaattaaagcctttggaatgtctggcagaaagaatatattctagaagtaaaacctcagacttagattcttttgactgtttggcatcattattttgaatttgcaatgtgaatgagaaacaaacaaatgaaaaagataaagwaaaagaaaaccctcaatttcaaagttgcacatatttgtcattatttaaaaagaagagtacatgttaaaggcctaaatattttaaata

SEQ ID NO: 197563 - DNA, 561 bp, Homo sapiens
agagagggaaaacacagcaattgtgaggtattgaataaaaaacaaggaatcaaagcatattactagaaaaaatcacttaatcacaaagaacaaatgtaaaagaagaaatgaaaaaaggatcaacaaatcaactggaaaacaagtaacaaaatgacagtagtaaccccttacctatcatttaccttatatgtaaatgaaattcttcaatcaaaataaaacagaaaggctgaatgaattaaaaaaaaaaagacccaactatatgctcatacaagaaactcatttcatctataaagayacacgaagactgaaagtgaagtaaggaatgaaaaagatattccacacaaatggaaactaaaataaagcaggagtagctatacttacattaggcaaaatagagcttaagccaaaaactgtagaaagataaagacactcacaatgataaaagagtcaatagagcaacaggatataacaaatataaatatacatgcactcaacataggagtgcctaaatatataaagaaaacattaatagacttaaagaaagagattgcactgcagtac

SEQ ID NO: 197564 - DNA, 599 bp, Homo sapiens
gtaaaaaaaatactcttatcacatttaaaaatgttaaaattatatcagataacttttctaaccaaaatataataaaactaggaatcaataacatgaagaaccttgggaaatgtacaaataaatgaaaattaaacaacatgctcctgggcaactaatgagtaatgaagaaattgtgaagaaacatttttgaagaatattgatacaaatgaaartggaaacccaacataccaaatcctatgggatgttgaaaaagaagttacaataggaaagtttatagcaaaaacacttatatcagaaatgtagaaagattccaaagaaataagcaaaagttgcatttctaaaacctagaaaaatgagaacaaaataaaccccaaactagtaacagagtgaagaaataataaagatcagagcataaacagaacatagactaaaaataaacataccacagaaatacaaaggatcattacagactcttataaacaactatacccctaacaaattagaaaacctagaataaatggataaatttatggatatgtacaacctaccaagattgaataatgaagacacagaaaaactgaacacctgaacagaccagt

SEQ ID NO: 197565 - DNA, 599 bp, Homo sapiens
gtaaaaaaaatactcttatcacatttaaaaatgttaaaattatatcagataacttttctaaccaaaatataataaaactaggaatcaataacatgaagaaccttgggaaatgtacaaataaatgaaaattaaacaacatgctcctgggcaactaatgagtaatgaagaaattgtgaagaaacatttttgaagaatattgatacaaatgaaaatggaaacccaacataccaaatcctatgggatgttgaaaaagaagttayaataggaaagtttatagcaaaaacacttatatcagaaatgtagaaagattccaaagaaataagcaaaagttgcatttctaaaacctagaaaaatgagaacaaaataaaccccaaactagtaacagagtgaagaaataataaagatcagagcataaacagaacatagactaaaaataaacataccacagaaatacaaaggatcattacagactcttataaacaactatacccctaacaaattagaaaacctagaataaatggataaatttatggatatgtacaacctaccaagattgaataatgaagacacagaaaaactgaacacctgaacagaccagt

SEQ ID NO: 197566 - DNA, 475 bp, Homo sapiens
  misc_feature (1)...(475): n = A,T,C or G
ttttaaaaatttatgccttacaatttattaagtaaagtggatcatgtacacacatcaaataaacagagaaacagggatctatttccaggaaaagggattatgaacagtcattgcattgctggagttcttggaaactggacaggtaccattttttgtatcaataataatgagtttttaattaaaattaaagcayatccatgattatttccttttttccatagctacctacacaatttcataaactcatgacccagtgtaatcctgagtccttgaaatgtttctaaaagtgattcaccctttcagtgaaataggaatagaatangggggacttccatttccaggatttttcttagccagaagtgtcccctgtaggcttgggcagaattacagatatcttgagattaaaggaaaaaaaggagccacattgactgcttccatctgcttcagagcaaaacttgctatacctgtgtgttag

SEQ ID NO: 197567 - DNA, 475 bp, Homo sapiens
  misc_feature (1)...(475): n = A,T,C or G
ttttaaaaatttatgccttacaatttattaagtaaagtggatcatgtacacacatcaaataaacagagaaacagggatctatttccaggaaaagggattatgaacagtcattgcattgctggagttcttggaaactggacaggtaccattttttgtatcaataataatgagtttttaattaaaattaaagcatrtccatgattatttccttttttccatagctacctacacaatttcataaactcatgacccagtgtaatcctgagtccttgaaatgtttctaaaagtgattcaccctttcagtgaaataggaatagaatangggggacttccatttccaggatttttcttagccagaagtgtcccctgtaggcttgggcagaattacagatatcttgagattaaaggaaaaaaaggagccacattgactgcttccatctgcttcagagcaaaacttgctatacctgtgtgttag

SEQ ID NO: 197568 - DNA, 504 bp, Homo sapiens
gcagctgcagcagatccagagggcacagtaatctgcatgaacaggtggcccgaatccccatcactcatcaccaatacaatgatacttctcctttgctaaccctttggcctcgtgtgggagtttcctttgaccagctatcagaggaggaaaattaccaggtctgattcatggataccttattgaatatcttggtatgaaccaaaaatggactattactgaactgtatcccccctcctgggtggccctaaaagacaatggtgagagaagttctctaagtggacaaagtttggacgttgcatctggtcacctatgttgtgtacagtgggaagtgctatatggtaatgatatgtgtacaggaggctctctatatccactggttctactctgaagattcaaccaactgctaatatcagaaatatttggaaaaaatgcracaataaatgaaacaaattttaaaaaatatatagtataagaacatttacatagcatttacattgtgttgag

SEQ ID NO: 197569 - DNA, 490 bp, Homo sapiens
ctaataaagttctaatagtggactctgaagaagtggagatttatgacatgactgataaagaattcagaagttcagagaaccacaagaaaatayagatgaaaaattgaatgaaattctgggaaacaattcatgtactaaatgtgaagtttgacaaaaatataaacaataaaaaacccaaatagaaattataaagctaaagaatacaataactaaatttctgaaattaatagaaagtgtcaatagcaggtcttgaccagcagaagaagaatcagtgaacctgaatacaggacatttaaattagtcagaggaatgaaaagaaaaaaaagaaagaaaaacaatggaaaaggcctatggtaattatgggacattatcaagaaaacagatctacgcataataggagttccctagggaaaagaaaaagaaaaagaaccagaaaattggtgttaagataataatggctgaaaatttcccaaatctaggaaaagatgac

SEQ ID NO: 197570 - DNA, 550 bp, Homo sapiens
ggttcccaaacctcaattcttgacttctgtgtacccacaggctcaaaaccacrtgaaagctgccaatgcttacggtttgcaccctctgaaacaatggcctgagctctatgttggccccttttagccatggctggagtggttgggacacagggcaccaagtctctaggctgcacacagcagcaaggccctgggcccagcccacaaaaccatttttccctcctatgcctccaggtttctgatgggaggggctgccctgaggacttctgatatgccctggagacattttccccattgtcttggcaattaacacttggctcctcattacttatgcaaatttttgcaaccagcttgaatttctccttagaaaatgttttttttttttcctatcacatcatcaggctgctaattttccaacttttatactctgctttccttctaaacatagttgcaattccaaaccataattttgtgaatatataaaactgaatgcttttaacaatacccaagtcacctcttgaacactttgtatttcttagaaattacttctact

SEQ ID NO: 197571 - DNA, 483 bp, Homo sapiens
cctgaatcctctgaatccttatttgtacctctctttatatttctcgatttatctccacccttacrtctctccctgtatctgcatgtgaacatagaatgtagccccttattttgaccaacatagagagctatgcaccgcccaccagcacatacaacagaggtgtggtgcatcaccactaccagattttgagcctgtgtcagccttactgatatattcatatgcagctcgaacaccttagaatgaaatattgggtatatggctcctaaaggccctttagttactcctcttacttgcgtctgccttctctcttctataacttccctactacaatcctctctttcaggagcaggaggaaaatgtcccgctgctttcatctgccaagatgttcagctctctctgctcctgctgtcacaccagaaattgattgatctgtatgggttcaaacaggtaataagtaaaggaaataaaatttaattccagatg

SEQ ID NO: 197572 - DNA, 515 bp, Homo sapiens
atagtgttatatttgtaccgggaagatttactttttcaagcatgcaattataaaaagagccagaagctggtccgaaactgatatgaattgagtctggatcttattcatcataactcctggtcaattttattgcatattgtgctgtctcttactacgacatastccttcacatgtcctgactcaaggttgagctgcttagcagacttcattctatttggtttattctgaacctctatttgtgtctccctttcactgtaagtctaccaaaatttctgctgagatgttttctactttctgattggtttcttcattcctgatttatactgcttaggaattgacaaatttctgagaagaaaaacagcagggaatgtggggctaacctctctgtgcttttgttttctccaggcttctgcacctcatgttgcaaacaccttggctgttgtcacaattccttgaaaaaactgtttttgttcatttttaaatattttaacaatatttgtggtgaacatcagtgg

SEQ ID NO: 197573 - DNA, 387 bp, Homo sapiens
gggataattggttcagtttcagaaggcccagttagtgccrttagaaagaaacgcaccttgctgctctgcactggtcacagtagagagaacctatcaggcctccgcatctcaatgccctcagcactcatttagaataaaagtcgtgttcaaatataatttttcaagaaagggaaacccgtgactcccatacagatagaaaattaacatgctaaaatgtttatttaactaattattaataaaggaatcagatgttaaaactggttcagagagaatccaaaggggagacacagctgggtgaggtggcttatgcctgtaatcccagcacttcggtgggccaaggagagaggatctctacaaaaaacttaaaaaaaaaaaatagacgagtgt

SEQ ID NO: 197574 - DNA, 443 bp, Homo sapiens
gagagagcagtagtgcaaaacagaaagccaagcaagctgaatgccccacttcttctgcctgctttgttctagccatatccacagcccataggatggtatccactcataytgaggtcatgtcttcctttcttggtccactcattcataagtcaatctcctctggagataccctcacagacatacccagaagcaatgctgcatgcaaccttcaatccagtcaagttgatacctaaaattaaccatcacagacaatgtgacttacagcttttatagggctgcaagcatatgaagatgatagttttacaatgatgaaggagggttgggtcagtttataagtcagttgttttttttttttttttttttttttcgcctgtgggaataaggcaactgagtgaatattgggagaaaacagcctgaaagtggagagagggcagcatgtagcc

SEQ ID NO: 197575 - DNA, 613 bp, Homo sapiens
ttgcagctcaaaaacagcaataactgtagagaaaggaatgagtgtcactttcttccaataaaacttttggaagttttactggtagtggtagtggtctggatttggccagcaggctgtagtttgctgacctctgctgcagagtcatactgctcagattcaaccctggctccaccattttctttgacttcaggcaagttgcttaacttctctgagcttcagtttatttttctggaaaactgggataatataagtgctttcctaatagggcaatggtgatgattaaatgagatartgcttaaaagacatctagaacagctgaacacattataaccctttcaactgctgttggtactacttctataatcactaagaacggcttgactttcagaggtctacagataattaacatatataagacaatttcatcagctgtattgctagacaggttttgagggatgagcaaagattttgttaagtatcccaagtgacttttccattttcctctgcaaatatttcatggtaagaaagtactggttttgttctttatacaggatctatgttcactgaaattagtcaacaaggaatcaaaagatccagtagattctcttcaagg

SEQ ID NO: 197576 - DNA, 540 bp, Homo sapiens
tgcatccttgacaataaaaaggaggtcaattcatgaggttaaaacatggcaggtatttacaagtgacggttctcatttcttcagtcttacctgcatgtatatggggaaaaaagcaggcatttttatcattcattttaagtcatgaaaattagaggatgataggataacatgtccatgtgggatccatccagaaaacttcaaatcagtgggattttagagcaggcatatatatacgctatttcattacacttctaagacagtggttctcrggatattatcagacctttgtgaattatctagtaactggtgtgtacatttcttacagtactataccacagtagttttaaaaatcatctatatactactactttccattaataatttaataagtacttgtgtcattcttcattgcttctttcactaaagtcacatctctccccaataataactgcttttattggttccaaagcatttttaatgcctccattcttatttgaacactgccacgtaatgccagagatagacagaagtgggggtatg

SEQ ID NO: 197577 - DNA, 446 bp, Homo sapiens
ctggcatagtaggatcctaaatctttgtaatgtgtatttctcaccatctggtgcacatctgtcttactaaggcatctggagaacttgctgcttatcgttcaacatgtctgattaatatgatatcatcaatatagtggtttcatctgattttctgccaaatggccacaatgttaaaatatactgtagcttacatatactgttgttcctctcatgtgaaagcaagctgcttcttatactcttttctttgagatattagaaaaatacaaaaaactratttgccaagtcaatggccacataacgtgtcatggttttgttaatcttctctataaatataatcacattgttacagaaatatttctaaaacaatgttaatgattacaacaatgacagtagtgaacttctagtgggcacttataatatgccaggtattatgaaatgtaatcttg

SEQ ID NO: 197578 - DNA, 446 bp, Homo sapiens
ctggcatagtaggatcctaaatctttgtaatgtgtatttctcaccatctggtgcacatctgtcttactaaggcatctggagaacttgctgcttatcgttcaacatgtctgattaatatgatatcatcaatatagtggtttcatctgattttctgccaaatggccacaatgttaaaatatactgtagcttacatatactgttgttcctctcatgtgaaagcaagctgcttcttatactcttttctttgagatattagaaaaatacaaaaaactaatttgccaagtcaatggccacataacgtgtcayggttttgttaatcttctctataaatataatcacattgttacagaaatatttctaaaacaatgttaatgattacaacaatgacagtagtgaacttctagtgggcacttataatatgccaggtattatgaaatgtaatcttg

SEQ ID NO: 197579 - DNA, 446 bp, Homo sapiens
ctggcatagtaggatcctaaatctttgtaatgtgtatttctcaccatctggtgcacatctgtcttactaaggcatctggagaacttgctgcttatcgttcaacatgtctgattaatatgatatcatcaatatagtggtttcatctgattttctgccaaatggccacaatgttaaaatatactgtagcttacatatactgttgttcctctcatgtgaaagcaagctgcttcttatactcttttctttgagatattagaaaaatacaaaaaactaatttgccaagtcaatggccacataacgtgtcatggttttgttaatcttctctataaatataatcacattgttacrgaaatatttctaaaacaatgttaatgattacaacaatgacagtagtgaacttctagtgggcacttataatatgccaggtattatgaaatgtaatcttg

SEQ ID NO: 197580 - DNA, 523 bp, Homo sapiens
ttagaatcttagctctgctacttactagctgtgtaaacttcatctgcaagatattgctaataaaagtaactattgcaatcaggctattgaatcaataagttaaatcaaagcttgtaaagcaccagacacagtgcttgacacatgataatgtcccaaaatgtgaaaaagcctctcattacaaactgcaagagtcctcttctgtctctcagaagttcaaaatkatgttgattgacttgcatccttatcatacaaactgatcttaagaaacagttttccctctttcacatttctcatcctatcatctgatacttcagcccatttcctcccacttccatctagatttttctaactcgatctgatccacaagggagcctttgatgggcaaaatggaacataaatgcttagggtctttccagctctttatggtatctcaactcccatgacaacagtctcattcccactttgaagcattgacctatgttttgtcaaaagttaatctatattttgattcaacatagaacca

SEQ ID NO: 197581 - DNA, 538 bp, Homo sapiens
tgctacttactagctgtgtaaacttcatctgcaagatattgctaataaaagtaactattgcaatcaggctattgaatcaataagttaaatcaaagcttgtaaagcaccagacacagtgcttgacacatgataatgtcccaaaatgtgaaaaagcctctcattacaaactgcaagagtcctcttctgtctctcagaagttcaaaattatgttgattgacttgcatccttatcatacaaactgatcttaagaaacagttttccctctttcacatttctcatcctatcatctgatacttcagcccatttyctcccacttccatctagatttttctaactcgatctgatccacaagggagcctttgatgggcaaaatggaacataaatgcttagggtctttccagctctttatggtatctcaactcccatgacaacagtctcattcccactttgaagcattgacctatgttttgtcaaaagttaatctatattttgattcaacatagaaccaacagagtgaattcaacttttttttttttta

SEQ ID NO: 197582 - DNA, 538 bp, Homo sapiens
tgctacttactagctgtgtaaacttcatctgcaagatattgctaataaaagtaactattgcaatcaggctattgaatcaataagttaaatcaaagcttgtaaagcaccagacacagtgcttgacacatgataatgtcccaaaatgtgaaaaagcctctcattacaaactgcaagagtcctcttctgtctctcagaagttcaaaattatgttgattgacttgcatccttatcatacaaactgatcttaagaaacagttttccctctttcacatttctcatcctatcatctgatacttcagcccatttcctcccacttccatctagatttttctaactcgatctgatccasaagggagcctttgatgggcaaaatggaacataaatgcttagggtctttccagctctttatggtatctcaactcccatgacaacagtctcattcccactttgaagcattgacctatgttttgtcaaaagttaatctatattttgattcaacatagaaccaacagagtgaattcaacttttttttttttta

SEQ ID NO: 197583 - DNA, 405 bp, Homo sapiens
aaggagaaataagatccttttcctacaagcaaatgytgagggaatttgttatcatcatacttgccttgcaagagatcctgaaagaactactaagtatggaaaggaaagaccattaccaacaactgcaagacacacgtaagtacacagaccagtgacactataaagcaactacacaaacaagtctgtatactaaccagctaacataatgacaggatcaaatccacagatatcaataataaccttgaatataaataggctaaatgccccaattaaaagacacgcagtggcaagctgaataaggaagcaaaactccatagtatgctgtcctcaagagacccatctcacatgcaatgacacccatacgttgagagtaaagggatggagaaaaatctaccaagcaaatgg

SEQ ID NO: 197584 - DNA, 535 bp, Homo sapiens
ggcaagctgaataaggaagcaaaactccatagtatgctgtcctcaagagacccatctcacatgcaatgacacccatacgttgagagtaaagggatggagaaaaatctaccaagcaaatggataacagaaaaaagcatgggttgcaatcctaatttcaggcaaaacagactttaaacaaaccactctcttggaccatagtgcaataaaaatagaaaccaagactaagaaaatcactcaaaaccataaaattacatggaaattaaataacctgatcttgcaacacaatgatacaggaaggtttaatgcaagctgttttaaatatgtttgctctctcyaggagaccctaggtaactatgttgcagtctttgtggccctgtgacctgcaggtactgggagatccacaaggaggatgctaggagaccctggaagctgggaaatgaaagcagatgtggaaagataggcaagctggccaactagacacagccaagagaaacatctgccaccaagggaccgggacacagggaagactggcacc

SEQ ID NO: 197585 - DNA, 551 bp, Homo sapiens
atacacaaatggccaataaacatatgaaaaaaatgctaaacatcattagttatcagggaaatgcaaatcaaaaccacaatgtgataccaccttactcctacaaaaatgaccataattaaaaaataaattaaaaaaagatattgacatggatttggtgaaaagggaacacttwtacattgctggtgggaatgtaaactagtacaaccactatagaaaactgtatggagatttcttaaagaactaagaatagaactgccatttgatccagcaatcccactactgggtatctacccagaagaagtcattatatgaaaaagacagttgcacatgcatgtttatagtagcaaaattcataattgtaaaaatatgaaaccagcctaaatgcccatcaaacaatgagcaaataaagaaaatgtgggatatatataaatatatatatccccccttaaagcatacatttatatattatatatcatctacatatatatttatgtacacacacacacacacacacacacacaccccatggaatactattcagccatcaagat

SEQ ID NO: 197586 - DNA, 508 bp, Homo sapiens
tgagcctaaaaaatgcccatcttatttagagggttttttcttcccttttccaaatgaaaagagattaaccagcatctgatttttgttaaaggacatttaaaaaaccccttcaaccttccaaatttataaatgacttttcttccagccatccatttggctaacttaatggccctttcaattccctctactgatttgctttcatattaagccctgtatttaatagtttcaagcacttctttcttattgttctcactcaatccaaactaataatactttcttactgcactaggtacagttcttcacagcccataggtgagtttgtgagctcctggcatgatctactgcttgcaaggaagagaagtcttagccccagcctttaattccttctccccagtgatgcaccaagttcytgctttcctaaatggtaaaaacagataaaaactgttttcttgtccttgtgataaaaaaacaaataaattgctgatgtcctgaaaaaggaaaaaagtta

SEQ ID NO: 197587 - DNA, 464 bp, Homo sapiens
caataatagttcattactgggacaaactataagtatcttctgtaacttgctaagtgctattggaaaacagtttaaaaagacaaaaagacttttggtaaaggcagtttttgcttatctaatcaacatgcagagtgcactgcttacaaagtttacctctatatactagactgcaagctcttgtaagagagggacaattttctcagtggtactgagtcaggccgtgtgtgggattgcaaaggctcataaaatagtaatactctayctagtagtacatgacttcttctttatttaacaaacatttattcaacaaacattgaataaatgtttgctaaataaacaaaaaaaaaacatgagttgaattttaccgttatttgtaacattatcttctcaacccctgcacacacacacaatctcctttaaataatagtctcctatcattgcttaaagttacatttgttgaattt

SEQ ID NO: 197588 - DNA, 532 bp, Homo sapiens
ttatgccactttgacactcaccagttacatccaataaagatgcaaataacattcttttcaatatttaaagacatcttttatcctcactattctttcatgttcaaaataattccaattctctcaatgttacttctttcagacctttatccttctctgctgcctttaggtctttaatagatggtttccccaaagctgtgatcactggattcaagcaatactctttatcctgacatgttcctaatgctaaaagattgttaattgttcaagataatrtagtccattcatatagacctctgttcaattgtttttctactccctctagcttacttttttctagtcagtttgtgttttagagagctcaattagatttctcctaagtgagttaacatcccaaggaaaaaatactttttacgacaagtttttttttttttctagtttaaccaggaacaacttcaagtttctggtgttagagaatatcttataggccagttagtggtgtatatagttactgtcatgcttaacaattcataat

SEQ ID NO: 197589 - DNA, 565 bp, Homo sapiens
accagtcttgttctcgcctatggatgggggccttttttttttttttaagaagaagaggggaagaagggaggaytgaacagacaaaaacagtcaaaggattttatatttttgacagcaaaggtgagttttagcttctcttggattctcctaaacatgttggaaaagatgatagatttgggttcagatgtaggaatccttgggtaaatacaccatcctgtagatcataggaacatttccagaaagtctgtttgcaaaacgagtgtatgccaaagcattttacatttgcaccaaagagctaatatttgatagatgttcagattattccactataaaacattgactcaaattctttatggagagacatgtctgtaactggcatgtctcccaggttaccaatctaggaaccaacttaccaaaacagattcctaagtaggctacatgtgcccagagaagttttgattcagcaggtaggaaaccactttgaatctaaagatcaggttcaaatggccaaaattaaaattttatgttagaaaaacgaattcattgaatataatttgccatgatc

SEQ ID NO: 197590 - DNA, 565 bp, Homo sapiens
accagtcttgttctcgcctatggatgggggccttttttttttttttaagaagaagaggggaagaagggaggactgaacagacaaaaacagtcaaaggattttatatttttgacagcaaaggtgagttttagcttctcttggattctcctaaacatgttggaaaaratgatagatttgggttcagatgtaggaatccttgggtaaatacaccatcctgtagatcataggaacatttccagaaagtctgtttgcaaaacgagtgtatgccaaagcattttacatttgcaccaaagagctaatatttgatagatgttcagattattccactataaaacattgactcaaattctttatggagagacatgtctgtaactggcatgtctcccaggttaccaatctaggaaccaacttaccaaaacagattcctaagtaggctacatgtgcccagagaagttttgattcagcaggtaggaaaccactttgaatctaaagatcaggttcaaatggccaaaattaaaattttatgttagaaaaacgaattcattgaatataatttgccatgatc

SEQ ID NO: 197591 - DNA, 565 bp, Homo sapiens
accagtcttgttctcgcctatggatgggggccttttttttttttttaagaagaagaggggaagaagggaggactgaacagacaaaaacagtcaaaggattttatatttttgacagcaaaggtgagttttagcttctcttggattctcctaaacatgttggaaaagatgatagatttgggttcagatgtaggaatccttgggtaaatacaccatcctgtagatcataggaacatttccagaaagtctgtttgcaaaacgagtgtatgccaaagcattttacatttgcaccaaagagctaatatttgatagatgttcagattattccactataaaacattgactcaaattctttatggagagacatgtctgtaactggcatgtctcccaggttaccaatctaggaaccaacttaccaaaacagattcctaagtaggctacatrtgcccagagaagttttgattcagcaggtaggaaaccactttgaatctaaagatcaggttcaaatggccaaaattaaaattttatgttagaaaaacgaattcattgaatataatttgccatgatc

SEQ ID NO: 197592 - DNA, 665 bp, Homo sapiens
gtgacattgccccaatataccaaaggatttcaggtggtatctggccttggagatacatgctgaggctggaggctaagcctgttggccttgggagtggcgactaaggagggtggttgatggttgactctgagctgggtcagtaagaagctggatgtgagagcagcagagcctcactgtaggtgggtagcagccctcactggtggcatcctgtgcagaggaaacacatgatgctggggccagtggatggatactcctaagtctctgctctaagttttggggcctgccttagtcccagtgttctagcatcatgcsagatttgtccacaagctgtcaaaagagaaatttctcactgtgtcattaccaaatccaccaacctacctgcctctcaagccatattgtctaccttccctcctactgcaaggcattacctccttatgttctttcttcaggcagcccttccactagtgcatgagatccactggtgcctcatctccttaagatcactgctccataattctttttttctgtactatcagtccccattccaatcattcccatcaggacatcgacttgctgtaatacctcccatcctacaaacatgtcttctactaactgtgcacactctctgcttccatatagtagaattcccataaatgattatatat

SEQ ID NO: 197593 - DNA, 665 bp, Homo sapiens
gtgacattgccccaatataccaaaggatttcaggtggtatctggccttggagatacatgctgaggctggaggctaagcctgttggccttgggagtggcgactaaggagggtggttgatggttgactctgagctgggtcagtaagaagctggatgtgagagcagcagagcctcactgtaggtgggtagcagccctcactggtggcatcctgtgcagaggaaacacatgatgctggggccagtggatggatactcctaagtctctgctctaagttttggggcctgccttagtcccagtgttctagcatcatgcgagatttgtccacaagctgtcaaaagagaaatttctcactgtstcattaccaaatccaccaacctacctgcctctcaagccatattgtctaccttccctcctactgcaaggcattacctccttatgttctttcttcaggcagcccttccactagtgcatgagatccactggtgcctcatctccttaagatcactgctccataattctttttttctgtactatcagtccccattccaatcattcccatcaggacatcgacttgctgtaatacctcccatcctacaaacatgtcttctactaactgtgcacactctctgcttccatatagtagaattcccataaatgattatatat

SEQ ID NO: 197594 - DNA, 665 bp, Homo sapiens
gtgacattgccccaatataccaaaggatttcaggtggtatctggccttggagatacatgctgaggctggaggctaagcctgttggccttgggagtggcgactaaggagggtggttgatggttgactctgagctgggtcagtaagaagctggatgtgagagcagcagagcctcactgtaggtgggtagcagccctcactggtggcatcctgtgcagaggaaacacatgatgctggggccagtggatggatactcctaagtctctgctctaagttttggggcctgccttagtcccagtgttctagcatcatgcgagatttgtccacaagctgtcaaaagagaaatttctcactgtgtcattaccaaatccaccaacctacctgcctctcaagccatattgtctaccttccctcctactgcaaggcattacctccttatgttctttcttcaggcagcccttccactastgcatgagatccactggtgcctcatctccttaagatcactgctccataattctttttttctgtactatcagtccccattccaatcattcccatcaggacatcgacttgctgtaatacctcccatcctacaaacatgtcttctactaactgtgcacactctctgcttccatatagtagaattcccataaatgattatatat

SEQ ID NO: 197595 - DNA, 665 bp, Homo sapiens
gtgacattgccccaatataccaaaggatttcaggtggtatctggccttggagatacatgctgaggctggaggctaagcctgttggccttgggagtggcgactaaggagggtggttgatggttgactctgagctgggtcagtaagaagctggatgtgagagcagcagagcctcactgtaggtgggtagcagccctcactggtggcatcctgtgcagaggaaacacatgatgctggggccagtggatggatactcctaagtctctgctctaagttttggggcctgccttagtcccagtgttctagcatcatgcgagatttgtccacaagctgtcaaaagagaaatttctcactgtgtcattaccaaatccaccaacctacctgcctctcaagccatattgtctaccttccctcctactgcaaggcattacctccttatgttctttcttcaggcagcccttccactagtgcatgagatccactggtgcctcatctccttaagatcactgctccataattctttttttctgtactatcagtccccattccaatcattcccatcaggacatcracttgctgtaatacctcccatcctacaaacatgtcttctactaactgtgcacactctctgcttccatatagtagaattcccataaatgattatatat

SEQ ID NO: 197596 - DNA, 619 bp, Homo sapiens
catgtgtaagggcctctgtcctttgggcttcactcaaggccagcatcttctcagatctcagtatcccttcccgaggagaaggggaaaaaatggattcccagaagctgctcctataactcaaacgtgtgaactaacaatgaatgctttgaagatcaccctgcatgaaatacaattctcagtggttaggaaggtcagttcttctaaaacattttaatggtgtgactttttttccattggaatgtttttgcaggcacgattttgttctgattctctacttctcttccagaccccaagtgttgtcatgtttttcttctgcctgcacaggaattagcatcactgagggmaagacataccctgagtgtaaacttcacttaacgtcccgagataagcaggacagggtccatgtacattgttgttcttgcaataggcaacagtgagctggtcttaacctactctgacccaagaattttggtttttatttttacacaagcatccagctgcccatgacttgagttatgtcctaagtggaaaatgaagagacaaattctcctcaacctgttcccagtgggttgactcaccttacctttggagatcccacaggtgctggggagctgctgcc

SEQ ID NO: 197597 - DNA, 619 bp, Homo sapiens
catgtgtaagggcctctgtcctttgggcttcactcaaggccagcatcttctcagatctcagtatcccttcccgaggagaaggggaaaaaatggattcccagaagctgctcctataactcaaacgtgtgaactaacaatgaatgctttgaagatcaccctgcatgaaatacaattctcagtggttaggaaggtcagttcttctaaaacattttaatggtgtgactttttttccattggaatgtttttgcaggcacgattttgttctgattctctacttctcttccagaccccaagtgttgtcatgtttttcttctgcctgcacaggaattagcatcactgagggaaagacataccckgagtgtaaacttcacttaacgtcccgagataagcaggacagggtccatgtacattgttgttcttgcaataggcaacagtgagctggtcttaacctactctgacccaagaattttggtttttatttttacacaagcatccagctgcccatgacttgagttatgtcctaagtggaaaatgaagagacaaattctcctcaacctgttcccagtgggttgactcaccttacctttggagatcccacaggtgctggggagctgctgcc

SEQ ID NO: 197598 - DNA, 522 bp, Homo sapiens
ttatacgtgcatacttttgcactcaaaacactgtaccagggactaccggggctccaatgatgaaaactataaaattcctactttttggtgagaatcctagtcaggaaacttttgtcttctagaaaaagaatatactatactggctcaaataaattcaaaagaaaaatacatttcccatttcccataagtacaatctagaaagaacatattttgggtacgatttaggtgtctcaattaaagcactaaagatataattctactgttcaccctgatatcctcaacagcagatctaccctaaagcaggttcattttttggttacaaggtggctgtcagtgacacttaggactatgagctatcctactgatatctagtatgtgtgagtgaaagtgtaaacaagaaaggtggaattcaggggagaaagggagggagagaaggtgagtggaaagaaaactagaaccrcaaaagtaggtagaaaaactttaccctggttacagagtataagcctctctttttggtttcat

SEQ ID NO: 197599 - DNA, 557 bp, Homo sapiens
tatttcactcaagtatatactccaaatcattgaaaacagggactcaaacagatacatgtacagtcatggtcatagcggcactattcgtaatagatgaaagggggaaacaacccaagtgttcatcaacagatgaatggataaacaaaatatggtatatacacacaatggyatatcatccactcttaaaaagaaatttaattctaatatacgctatcacaaggatgagcctggaaaacattatgctaaggacaccaaaggacaccaaaggacaaatattgtataaattcactcatatgaaatacctatgctgggaaaattcatagagacagaaaacagagtagatattagcaggttttgggggtagggtaatgggaaattactacttaatgggtacagagtttctgtttggagtaattaaaaagatttgaatagcaatgatggttgtacaatatgatgctattcatatctttttcattaatgccactgaattgtacacttacaatggtaaaaatgattccaactgctccacatcctcaacaacacttggcacactactg

SEQ ID NO: 197600 - DNA, 563 bp, Homo sapiens
gacactcttccaagttttgcacaggtattaacctatttaatcctcaccttcaaaagtatatcttataggtgatgaaactaaggcacagagatactaagcaatttgctcaaagtcatacaaactggtaagcagagctgggatgtttatcaagaactgaagaaatgaagaatatgtctgctcctgggtctctgtgtaactcagaactgctgttctgatgacttctgcccacagtgcctctaaagcttactttgtatgcctttatactacctttgtctgtctctggcctttccacacctctccattgggaccatctcttattttcttccatgacttccctattctcagaaaaccttttctggttagcctcaaggtgcctcaccatttaccaattccattctgaytatggtcctcatggtcgcttcccaataccaaatagaatcaataaaatattatattgccaaagattattaaggtcactttaaataatgaaatataagccatgatcaacattacaagatattatcagagttacatcctagttataagatggttgccaacatgcg

SEQ ID NO: 197601 - DNA, 563 bp, Homo sapiens
gacactcttccaagttttgcacaggtattaacctatttaatcctcaccttcaaaagtatatcttataggtgatgaaactaaggcacagagatactaagcaatttgctcaaagtcatacaaactggtaagcagagctgggatgtttatcaagaactgaagaaatgaagaatatgtctgctcctgggtctctgtgtaactcagaactgctgttctgatgacttctgcccacagtgcctctaaagcttactttgtatgcctttatactacctttgtctgtctctggcctttccacacctctccattgggaccatctcttattttcttccatgacttccctattctcagaaaaccttttctggttagcctcaaggtgcctcaccatttaccaattccattctgactatggtcctcatggtcgcttcccaataccaaatagaatcaataaaatattatattgycaaagattattaaggtcactttaaataatgaaatataagccatgatcaacattacaagatattatcagagttacatcctagttataagatggttgccaacatgcg

SEQ ID NO: 197602 - DNA, 598 bp, Homo sapiens
gcagattgtgttaagctttcagattttgttgctttgataggtgaaaaatggcacgagtatagttttaattatatttctcttatgagtagagttgatattttttgtgtcattggtcaagagccattgtgtgcttaatttattgtactttctttgccgtgctcaaactgttcatcttttttctgacttttctattaagttgttggtcatattctgatcgatttctagaggtcctcatagataaggaaggcacaagttgtaaacaaattagaatgtaaggtacaagaaagcagagcttttgtcagttttagtcactgataataaccctcaatattccataagtgtctgacatataaattagtctttattcacaagtraattacaaaatgttttcctagtcatttgtattttgacttttcttatgttgatttttgctatgcaagtcctttttaaaaaatgtatgtggttgaattcatcaatcttttaaagcttctagattttaagaaatatttaataagacctcctctactcttaggttataatgtagttcttgtgtgttttcttccagcgatttcataattccatttttcctcacttaaat

SEQ ID NO: 197603 - DNA, 598 bp, Homo sapiens
gcagattgtgttaagctttcagattttgttgctttgataggtgaaaaatggcacgagtatagttttaattatatttctcttatgagtagagttgatattttttgtgtcattggtcaagagccattgtgtgcttaatttattgtactttctttgccgtgctcaaactgttcatcttttttctgacttttctattaagttgttggtcatattctgatcgatttctagaggtcctcatagataaggaaggcacaagttgtaaacaaattagaatgtaaggtacaagaaagcagagcttttgtcagttttagtcactgataataaccctcaatattccataagtgtctgacatataaattagtctttattcacaagtaaattacaaaawgttttcctagtcatttgtattttgacttttcttatgttgatttttgctatgcaagtcctttttaaaaaatgtatgtggttgaattcatcaatcttttaaagcttctagattttaagaaatatttaataagacctcctctactcttaggttataatgtagttcttgtgtgttttcttccagcgatttcataattccatttttcctcacttaaat

SEQ ID NO: 197604 - DNA, 516 bp, Homo sapiens
ataaaacaattagagtggattgttgtgataaatatgaaaggtaaaacaatgttycagaagataatttaggtgactatcttcatgatttcagaaacgggaacgattttttaataagaacacaaaagcactaactgaaaaggaaatgttgataaattcctgttaaaagggaaatgttgataagccatttaactgtattaaaattaagagattctattcctcaaaagacaccatttttgaaagttaaaaaaaccgaaacaagccacaaagtggtaaaaaaaaatgaaatctcataaacatgatcaaaagaagtcagaccaaaaaattgtatgctatatgtatactatattactccagttacgtaaaattaaaatataagtaaacctaagctacagtgtttagtgattgcaaacttgcatggtgaagccattaagacaattgctgtaaaagcaaggatagtgattgtctttggggagagtaagagtcggaaaacaaagagcttctgggaggtggcagtgc

SEQ ID NO: 197605 - DNA, 516 bp, Homo sapiens
ataaaacaattagagtggattgttgtgataaatatgaaaggtaaaacaatgtttcagaagataatttaggtgactatcttcatgatttcagaaacgggaacgattttttaataagaacacaaaagcactaactgaaaaggaaatgttgataaattcctgttaaaagggaaatgttgataagccatttaactgtattaaaattaagagattctattcctcaaaakacaccatttttgaaagttaaaaaaaccgaaacaagccacaaagtggtaaaaaaaaatgaaatctcataaacatgatcaaaagaagtcagaccaaaaaattgtatgctatatgtatactatattactccagttacgtaaaattaaaatataagtaaacctaagctacagtgtttagtgattgcaaacttgcatggtgaagccattaagacaattgctgtaaaagcaaggatagtgattgtctttggggagagtaagagtcggaaaacaaagagcttctgggaggtggcagtgc

SEQ ID NO: 197606 - DNA, 624 bp, Homo sapiens
gcaggatctctaggcttaaattttatcaactaagtaatccagcagaaacagctttccgtctctcccaatgattccaatcaaaagtctcagaactgaatatcattggctttccttggttcacatccccatccctcaacmaatcactggactagaaatgggatcgtctgattggccaggcttgggtcatgaatccagctgatcctatgggttgaagcagcaccaccaagccaaacggagtaagattgggagagggtgttttcccgaaagacaaatgatgttgtttcatcagaaggggaaatggatgctgacacagatcccaagtgtctactatacctacttagacaaagaaactcctctcattcagacttgagatgtcaggcctcagtgccattcatgaaattgggtgtctcagtcacattcgccttaaagtaaccatcacaataggttatctaacttactgttttagaaaattattgaaaagctttcatatggcaaaatgtacaactggaaagcatttaattatataaatggactattttccaaaagaaagcttccagaatcatgagtaggaaaggatgaggactgaagttaaagtagttcccatcagtgaataaaccaaaaatt

SEQ ID NO: 197607 - DNA, 624 bp, Homo sapiens
gcaggatctctaggcttaaattttatcaactaagtaatccagcagaaacagctttccgtctctcccaatgattccaatcaaaagtctcagaactgaatatcattggctttccttggttcacatccccatccctcaaccaatcactggactagaaatgggatcgtctgattggccaggcttgggtcatgaatccagctgatcctatgggttgaagcagcaccaccaagccaaacggagtaagattgggagagggtgttttcccgaaagacaaatgatgttgtttcatcagaaggggaaatggatgctgacacagatcccaagtgtctactatacctacttagacaaagaaactcctctcattcagacttgagatgtcaggcctcagtgccattcatgaaattgggtgkctcagtcacattcgccttaaagtaaccatcacaataggttatctaacttactgttttagaaaattattgaaaagctttcatatggcaaaatgtacaactggaaagcatttaattatataaatggactattttccaaaagaaagcttccagaatcatgagtaggaaaggatgaggactgaagttaaagtagttcccatcagtgaataaaccaaaaatt

SEQ ID NO: 197608 - DNA, 572 bp, Homo sapiens
gtgtccaaaataaatgattttaaaaactgtattcaattcatttttttwatttatttttacttttattttaggttcaggggtacaggtgaaggtttgttacacaggtaaactcatgtcacgggggtttgttgtacaaattattttatcacccaggaattaagcccagtacccaatagtcaccttttctgctctccctcctcccaccctccaccttcaactaaccccaatgtctgatgtttccttctttgtgttcgtaagttcttatcatttacttcccacttataagtgagaacttgtggtatttggttttctgttcctgtattagtttgctaaagataatggcctccagctccaaccatgtttctgccaaatacatgattttgttcttttttatggctgaatagtattccatggtatacatgtacaacactttgtttatctaatctgtctcaatttattttaggtacaaattgaaatacctagtgcttcctgaagcttttaagatcatttaaatgtagtcctattagtctattatctaatcaagtacacttaaggaggtttttgcttacaaa

SEQ ID NO: 197609 - DNA, 587 bp, Homo sapiens
tatcctaagcacctaggatagtaattgacatatagttggcacttmaaaaatttgatgattaatgaattaattcttagggcagaatatttgttgtatttaacttttaaaaaattttgtggtaaaaattagagtaagttaaaaggactaatgacaaactggcaggacagataaaggaccaatttccttttaatacataaagaattcttacaaattaataagaaaaaggcaaaggaagatggcagagtaggagatcacagccttcattcctcccacagagagcaataatttggcagccattcatgaaggttaataactctggaagggctcaggagtccaaaagatgtagtaatacagtagaataaaaaactcaagaataattacacaaaaagtgaagaaagaacagtttcattttgcctgcatcaccccatccccagtgctggcactgctcagcatggagagtgatctctggctagcaagtccctctcacagacaaaggaaggggaggatgaataagcagcttccccagcctttcaggaactggccaaatcaccctacccagatcgctggggaaaatggcaaacctggga

SEQ ID NO: 197610 - DNA, 587 bp, Homo sapiens
tatcctaagcacctaggatagtaattgacatatagttggcacttcaaaaatttgatgattaatgaattaattcttagggcagaatatttgttgtatttaacttttaaaaaattttgtggtaaaaattagagtaagttaaaaggactaatgacaaactggcaggacagataaaggaccaatttccttttaatacataaagaattcttacaaattaataagaaaaaggcaaaggaagatggcagagtaggagatcacagccttcattcctcccacagagagcaataatttggcagccattcatgaaggytaataactctggaagggctcaggagtccaaaagatgtagtaatacagtagaataaaaaactcaagaataattacacaaaaagtgaagaaagaacagtttcattttgcctgcatcaccccatccccagtgctggcactgctcagcatggagagtgatctctggctagcaagtccctctcacagacaaaggaaggggaggatgaataagcagcttccccagcctttcaggaactggccaaatcaccctacccagatcgctggggaaaatggcaaacctggga

SEQ ID NO: 197611 - DNA, 587 bp, Homo sapiens
tatcctaagcacctaggatagtaattgacatatagttggcacttcaaaaatttgatgattaatgaattaattcttagggcagaatatttgttgtatttaacttttaaaaaattttgtggtaaaaattagagtaagttaaaaggactaatgacaaactggcaggacagataaaggaccaatttccttttaatacataaagaattcttacaaattaataagaaaaaggcaaaggaagatggcagagtaggagatcacagccttcattcctcccacagagagcaataatttggcagccattcatgaaggttaataactctggaagggctcaggagtccaaaagatgtagtaatacagtagaataaaaaactcaagaataattacacaaaaagtgaagaaagaacagtttcattttgcctgcatcaccccatccccagtgctggcactgctcagcatggagagtgatctctggctagcaagtccctctcacagasaaaggaaggggaggatgaataagcagcttccccagcctttcaggaactggccaaatcaccctacccagatcgctggggaaaatggcaaacctggga

SEQ ID NO: 197612 - DNA, 548 bp, Homo sapiens
aggattcgtcactaccaaaaaacccgacgtattcaggcaacaattagcatgacgaatggaatagtacctcacttctcagtactaatgttgaatgtaagtggcctaaatgctctacttaaaggaaacagaatgtcagaatggataagaattcaccaatcaaatatctgctgtcttcaacacataaggactcacataagcttcaggtaaaaagatggaaaaaggtattccaggcaaatggacaccaaaagtgagcaggagtagctactcttatatcagacaaaacagactttaaagcaacaacagttaaaaaagacaaacagggacattatataatgataaaargactagtcccaaaggaaaagatcacaatcataaatatatatgaactgaacactggaggtcccaaatctataaaacaattactaccggctctaagaaatgagatagacagcaacacaataatagtgggagacttcaatactccactgacagcactagacaggtcattaaaacagaaagtcagggattgttggcaagatggccaaata

SEQ ID NO: 197613 - DNA, 242 bp, Homo sapiens
ctttgttctctggccatctctactagggtggtaaggagaagcggaaaaaactcaaytcagtgcacatgacaccctgctgtaaaaactttttaaaggtaaaactatcatttacagatgtttgttaaaatatagattcctggtcccacacctagtgaatggttactacggctgcataataaatgatctcaaaacgtagtgacttaaaacccattcaaaagtttttgcttaccatttcgtgggtc

SEQ ID NO: 197614 - DNA, 368 bp, Homo sapiens
cccattccttggtatgagaagtgtggcagtgctctttatatattttgtgaatgatttaatgagtgcatttttttttataaagaaggagacmgatccatagtcaaagcattgtcctcttacttaccagtaaagacactgaattctatgatcagccattcaaaaaagtattcaggtcttgtttatctactttttattttttattaatcctgctcattgggctaactaaaacaacagatctcttatttgacctcaattaaagaacacagtttggagagacagtggtctaatggaagtaaatgttcagaatgactattattttattgaatccctttttcttcactggggcttcataattggtgctcccacta

SEQ ID NO: 197615 - DNA, 535 bp, Homo sapiens
cactataagaaagtcgatagtctgacaccaacagaagcatagatgctgtatttctccacatacagcttgaagccatgcacttgataaagccagtcgatcagatggctacagaagaacggacacgctagaaagtgtgcagggacatagactcatggagtgaactgtgtgaccttttgaaaattactgctcagtgtaatctctaccgggtggagatgtagtgactgtaattactacattctgctagagctcaattattttcaacttttaagaatgcacagtaaggagatmatttgcttgtttgtatgtatgttttcttttgttaagacctgcagtgaaaccctgaagcaatgaaaagatagaatgaaagaataatgtataaatagaactcacagggttcattcccttaatcacagagagacaatgctgagctgatatgattattagtaactgtggtgaggtgaaaatgaccccaaatttattctgtatgggacaaaacaaaataaaacaaaaacctgaagagctgttttaaaaagca

SEQ ID NO: 197616 - DNA, 447 bp, Homo sapiens
ggagggttccttctttctctatcttgtggaatagtgtcaaaaggattggtgccaattcttctttgaatgtctggtagaattctgctgtgaatccctctggtcctggacttttctttgctrgtaatttttaaattaccatttcaatcttgcagcttgttattggtctgttcagggcatctaattcttcccaatttaagctagtagggttgtatttttccaggaatttatccatctcttctagattttctagtttatgtgagtaaaggtattcatagtagcctcgaatgatctttttatttcagtggtgtcagctgtttcatttattagtgaggttatttggattttctctcttcttttcttggttaatcttgctaatggtctatcaattttatttatcttttcaaagaaccaggtttttgtttagttatcttctgtatttttttttgt

SEQ ID NO: 197617 - DNA, 395 bp, Homo sapiens
tacacaacgatcacttcccttgtttagtaatggctagtatctgcacaaccatccctgatttgaattcccctttacaacatctcagttaagcctcatgactgcagcaggcattctcaccacmcccatttcagaactgggaggactggggctccaaggaaagtggctggcctgaggtcccagagccccttacgtggcacagctggttctcagccaggcttcttagtcctggtctggtccagtctcctctctcttcatgcctacaagtcttgacctaacccaaggctggcatcacatccctccttgccactccttcaatatcagcccaggagtatggacaaaatgagcagctcgttaattgactgtgaggagataaagagggaaggagtaggggagag

SEQ ID NO: 197618 - DNA, 390 bp, Homo sapiens
ccttgtttagtaatggctagtatctgcacaaccatccctgatttgaattcccctttacaacatctcagttaagcctcatgactgcagcaggcattctcaccacccccatttcagaactgggaggactggggctccaaggaaagtggctggcctgaggtcccagagccccttaygtggcacagctggttctcagccaggcttcttagtcctggtctggtccagtctcctctctcttcatgcctacaagtcttgacctaacccaaggctggcatcacatccctccttgccactccttcaatatcagcccaggagtatggacaaaatgagcagctcgttaattgactgtgaggagataaagagggaaggagtaggggagagggggttggaagc

SEQ ID NO: 197619 - DNA, 483 bp, Homo sapiens
gctgttgtgaggattaaattaggaccagggctaaagtgtgccaaaaaacctcctcagtaatggagtttgataacattttagagtaatgtttttaaaaaatcaaaataaatgcagcaaactcataaggaacaaaattccaaaattttaaataaacacagaatgagatgatgatgtgtgaagcgtctgacacacaggaggtgttcaacaaattgtccagctcttccccttctccccagagaggacattatacggcccaggcagtgcagatgcctgtcgcagccctaaggcagctgtccccaagtctgtttgactagctcattcatctgggcaaagtgtaccaagccccctttggaatagtcccaaagcagcaacattttctaattgtcttctctttacaccaaggtgggccctgagagggctgttttaaarcaagagcaagggagaatattacctaaaatgttttcatttcttgggaaaaacaac

SEQ ID NO: 197620 - DNA, 453 bp, Homo sapiens
tcacaaactctcaactgatgcaggccagccaaaagagaaagttaagaaygtttcacattttcttttcttttcttttgagacttagtttcattcttgttgcccaggctggagtgcagtggcactgtcttgactcactgcaatctctgcctcccgggttcaagcaattctgcctcagctttccgagcagctgggattataggcgcctgccaccatgcccagctaagttttatattttttagtagagatgggatttcaccatgttggccaggctggtgtcaaactcctgacctcaggtgatctgcccgtctcggcctcccaaagtgctgggattacaggcgtaagccattgtgctcggtccacattttcatattaagataaattccaaattcattaaaaacctaaatgacaaaaagaaaacaactattctgagaatgctagaaatatcggtgaaca

SEQ ID NO: 197621 - DNA, 437 bp, Homo sapiens
ctggtattcacaaactctcaactgatgcaggccagccaaaagagaaagttaagaatgtttcacattttcttttcttttcttttgagacttagtttcattcttgttgcccaggctggagtgcagtggcactgtcttgactcactgcaatctctgcctcccgggttcaagcaattctgcctcagctttccgagcagctgggattataggcgcctgccaccatgcccagctaagttttatattttttagtagagatgggatttcaccatgttggccaggctggtgtcaaactcctgacctcaggtgatcygcccgtctcggcctcccaaagtgctgggattacaggcgtaagccattgtgctcggtccacattttcatattaagataaattccaaattcattaaaaacctaaatgacaaaaagaaaacaactattctgag

SEQ ID NO: 197622 - DNA, 437 bp, Homo sapiens
ctggtattcacaaactctcaactgatgcaggccagccaaaagagaaagttaagaatgtttcacattttcttttcttttcttttgagacttagtttcattcttgttgcccaggctggagtgcagtggcactgtcttgactcactgcaatctctgcctcccgggttcaagcaattctgcctcagctttccgagcagctgggattataggcgcctgccaccatgcccagctaagttttatattttttagtagagatgggatttcaccatgttggccaggctggtgtcaaactcctgacctcaggtgatctgcccgtctcggcctcccaaagtgctggsattacaggcgtaagccattgtgctcggtccacattttcatattaagataaattccaaattcattaaaaacctaaatgacaaaaagaaaacaactattctgag

SEQ ID NO: 197623 - DNA, 416 bp, Homo sapiens
actttccttcttggaatttgtccaattttggaatgaagtttcctggtctagtcacaaattcattaacaagagctcaaattaagggcttcccctcagtatggtgtccctcaaagtcctgccttggggacttgattgaccaagtaaaggaaagcactcactgtgcagatagcacgggaagagctgctttggcttccccaagatcaacaggccctgaaaggcaaagacctgggtttggaaggtgcagcaggttagaggaagagtggggcttctctgcttctgagaacagcatggggaagttcccagcagggtgcctgcgtctccaagtcacacagggttagtcacccytcttgccccagaggctctgcttagctcttctgtcagtcagaatctcaatttcatctatacctcacagccac

SEQ ID NO: 197624 - DNA, 537 bp, Homo sapiens
aatgatttaaaaattgaatttattatcaaaagggaagcagaatgtaaacatttgaaattttttccatctgaccatgtaaagaataataaagcatattacatattaaggggaaaaaaaacaaggatgtggccaagtggcagtttaataataagattagcatgaaagccaggtgttattcaccaagacaatgggaaaataatcctaaaggcatttcagagatcttgaaggctgttctgtgcatcacaggcccagaatgccagggacttggggccagaattgttttggggaagaggtccggggtacctgtgggattttggaactcacttcccaggactgactgaggtctgtgctcctcacattccagagcagcccacctcagccaccccagctgtggctcaagtgggcccaggtgcagctcagaatgctgctctggagagcataagtactgagcctcagtggcatcacatatactaattctacagkcaagcagagtgcaggggctgtggaggcatggctccctccacctagatttcaaag

SEQ ID NO: 197625 - DNA, 388 bp, Homo sapiens
atcctaggtagtaggtaagtaaaacgtggtggctctacaccagggaattttatcaggagttagaaagaacaaactagatctatacaaaacaacataaacagatcccaagcactcagaagtgagtgacaagtgagaaagcaaatgggatctccaaaagaataccatttttataacttamaaccataggcccaaagcattacatattctgcaaagatattttgtaacgtgttagagctgttgcctacagaggacaggaaaacagaaatggagggcgggaataaagtgaatgatttctttcaaacatcttgtctccattcagactttctcaatccccctaaggattcagatgtattgaccctagatttctgagtctagagcctttctttct

SEQ ID NO: 197626 - DNA, 388 bp, Homo sapiens
atcctaggtagtaggtaagtaaaacgtggtggctctacaccagggaattttatcaggagttagaaagaacaaactagatctatacaaaacaacataaacagatcccaagcactcagaagtgagtgacaagtgagaaagcaaatgggatctccaaaagaataccatttttataacttacaaccataggcccaaagcattacatattctgcaaagatattttgtaacgtgttagagctgttgcctacagaggacaggaaaacagaaatggagggcgggaataaagtgaatgatttctttcaaacatcttgtctccattcagactttctcmatccccctaaggattcagatgtattgaccctagatttctgagtctagagcctttctttct

SEQ ID NO: 197627 - DNA, 388 bp, Homo sapiens
atcctaggtagtaggtaagtaaaacgtggtggctctacaccagggaattttatcaggagttagaaagaacaaactagatctatacaaaacaacataaacagatcccaagcactcagaagtgagtgacaagtgagaaagcaaatgggatctccaaaagaataccatttttataacttacaaccataggcccaaagcattacatattctgcaaagatattttgtaacgtgttagagctgttgcctacagaggacaggaaaacagaaatggagggcgggaataaagtgaatgatttctttcaaacatcttgtctccattcagactttctcaatccccctaaggattcagatgtattgaccctagakttctgagtctagagcctttctttct

SEQ ID NO: 197628 - DNA, 628 bp, Homo sapiens
gcctggtaagaattagctgggtatccagtcatgcatagagagttccaagacaggctcaggccctggcaggcagtcagagtgctttgcagatgcagtaaatcctgggtgaggaggaaacatcaacattcagagctcacctgaaggtctatagccaacaggacttgactcaaggaaccgtggcatggtggacttgaggtttctggctacagcccaatccagacaactcagggcagtggcactactgatgctgaaagcasgggacatcagtgggactcatttcacagataagaaaattgaggttcagagaatgtaaataattaacatggtcatgcaactggtaaatggcagacatacagacacaaacttggctctctctgactccaaactctatgctttttcttacccctgcatttttccaaagcagagtaaatgctgtttatggcatgactcaaagaaaggggagtaaaggtacactctgccattctcttgtcactcaaaaggcccatctctgtgatcagcaaatattttaagtagtctgggctcgcctacctccagatcatgctgaagtcagatctcagatctccctccccctccccaacaagggattagctaagaaataaagtcccat

SEQ ID NO: 197629 - DNA, 445 bp, Homo sapiens
ctgaggggctgggtgagctgctctgggccccttagtgagccagaacaacagcatgtcgggtggagctgagcacactgacccctgcaccaacagcagcatgctgggcggagctgagcgcgctgacccctgcaccagcgctgacccctgcaccaacagcagcatgccgggcggggctgagcacactgacccctgcaccaacagcagcatgccgggtggggctgagcacactgaaccctgcaccaaactgcccgctgcccaccccactcacccacctagtgctggaagcatctgtgggagcagccctaatgcagctcctcagarccactggccggtcttccagaactgtcccctgcactcgagttggggctgcagccaagccagggccaaggccaccatcctccgggtcaggcttgtcacctgcccacggtgctccaccaaagatcca

SEQ ID NO: 197630 - DNA, 598 bp, Homo sapiens
gaaggatgcctccggcaggaggtgacatctacccaaacccacccaatccctttgtgctggccaggcaaagagtcagagagaggaccagtgctccatatgggggaaaccgcacatgccatggccggggaggtggacggagcacagctggtgggaagagctgaccaggtgggtggacaggagcatcaagggcacggtgcccggtggcccatcactcagggggctggtgagggagattgtaggcagcccagggcttctggggggagccttgatctgattccagttcagaagcatggtggctgcggcagggggaatgggctgcggaacaaaaatgggtctggggtcctggggagaaggtgttacaggcacctgggagaggggtaatggtccagacgggagcatgmgagacaaggacgagtggcaggtatgaaggaggtgaggagcgaaatggacaggacgtggtagggtagagccggctgagatgggagggaggaggaagcacctggtgggcttccaggtctgtggctgaagaaccggcccccaaagttacccaggcccccatccctggcagctgtgagggtagtggacatggtggaaagag

SEQ ID NO: 197631 - DNA, 416 bp, Homo sapiens
ccaaatttcaccccaaaattatcacgattaaaataatgatggcaacaataataattccatttcaggtgaaattcagattctaaatctttagaaacctttgctgtttttaatgggcttgcaacacacagtttagttaaaaactctgcctgctcggcagaagcagcctcaagaygtgccccagcccagctctgtcccgatgcggcacccatgccctcctacggggaatgtctggaggggtccctgcatggggactctggggttagggccaggaggacatactgtgataccttctggtgccagaatgacattgacagtggcaggcaggtggcctggtgagccaagccctgtgtgttttgtctccaggtgtggcccctcaattcacagacccgggctacccctggggtggccccatctct

SEQ ID NO: 197632 - DNA, 428 bp, Homo sapiens
caaatttcaccccaaaattatcacgattaaaataatgatggcaacaataataattccatttcaggtgaaattcagattctaaatctttagaaacctttgctgtttttaatgggcttgcaacacacagtttagttaaaaactctgcctgctcggcagaagcagcctcaagacgtgccccagcccagctctgtcccgatgcggcacccatgccctcctacggggaatgtctggaggggtccctgcatggggactctggggttagggccaggaggacatactgtgataccttctggtgccagaatgacattgacagtggcaggcaggtggcctgrtgagccaagccctgtgtgttttgtctccaggtgtggcccctcaattcacagacccgggctacccctggggtggccccatctcttaattcctcaaga

SEQ ID NO: 197633 - DNA, 416 bp, Homo sapiens
ccaaatttcaccccaaaattatcacgattaaaataatgatggcaacaataataattccatttcaggtgaaattcagattctaaatctttagaaacctttgctgtttttaatgggcttgcaacacacagtttagttaaaaactctgcctgctcggcagaagcagcctcaagacgtgccccagcccagctctgtcccgatgcggcacccatgccctcctacggggaatgtctggaggggtccctgcatggggactctggggttagggccaggaggacatactgtgataccttctggtgccagaatgacattgacagtggcaggcaggtggcctggtgagccaagccctgtgtgttttgtctccaggtgtggcccctcaattcacagaccmgggctacccctggggtggccccatctct

SEQ ID NO: 197634 - DNA, 580 bp, Homo sapiens
cccgagtagctgagactacaggtgtgtgccactgtgcccagcaagatattaaaaaatacatatgcgcggacaccactctaaaccaactaaatcagaatcagatatagtgaagtcattaatcattttgctcctgggtctttatgacagttttgctcctgggaaactcctgggaatgtggtagagagagagaaagagatgggaaaatacgattttaagaagtgttgctatgcattttgaaaataatatttctttggtgtttgtcttgagggatggcaataaacatttcaattgcttttaagtatgcttgcatgctggaatgatggttctatgaatgcagcatcraactgggattgggccacatggcagccagcatgagactttatgccacatttataaaacatgaatgtcatgagcccactctcagggaccttactatttggagggttaggtcagatccacaaatctcttctatctcatggtaaaggaagcctggcgtgtagcaggagatggtgtgaaacaatatcatattgcatgatcaatatttgtattcttagcaatattaaactttttgaccccctcc

SEQ ID NO: 197635 - DNA, 593 bp, Homo sapiens
gaattctgattggctaatttaggccagattttcatccctgagccaatcaactgaggccagaggggtggagtcatgtgagaacatggcagcccccatgagaggcacgtgactggagtaggaagtgtgagtctccatagaggggagagggctgctaggctgaaaaggcaaaagatgtctgcagtaaaaggaatagattaggagatatattctgttaaacctgttaattattaaaaaaagaaactttcaatatacagttacagtatacgtgagccggtggctcacgcctataatcccagcactttgggaggccgaggtgggcagatcagaggtcaggagttcgagacmaacctgaccaacatggtgaaaccccgtcttgcgcacctgtaatcccagctactcaggaggctgaggcaggagaatcacttgaacccgggaggtggaggttgcagtgagctgagatcatgccactgcactccagcctgggcaacagagtgagattccctctcaaaaaaaaaaaaaaagttacattgtggttccttcagcatgatttatcagaaaggaaaaacttaccatatgcatatttcctatgcata

SEQ ID NO: 197636 - DNA, 596 bp, Homo sapiens
gaagaattctgattggctaatttaggccagattttcatccctgagccaatcaactgaggccagaggggtggagtcatgtgagaacatggcagcccccatgagaggcacgtgactggagtaggaagtgtgagtctccatagaggggagagggctgctaggctgaaaaggcaaaagatgtctgcagtaaaaggaatagattaggagatatattctgttaaacctgttaattattaaaaaaagaaactttcaatatacagttacagtatacgtgagccggtggctcacgcctataatcccagcactttgggaggccgaggtgggcagatcagaggtcaggagttcgagacaaacctgaccaacatggtgaaaccccgtcttgygcacctgtaatcccagctactcaggaggctgaggcaggagaatcacttgaacccgggaggtggaggttgcagtgagctgagatcatgccactgcactccagcctgggcaacagagtgagattccctctcaaaaaaaaaaaaaaagttacattgtggttccttcagcatgatttatcagaaaggaaaaacttaccatatgcatatttcctatgcata

SEQ ID NO: 197637 - DNA, 593 bp, Homo sapiens
gaattctgattggctaatttaggccagattttcatccctgagccaatcaactgaggccagaggggtggagtcatgtgagaacatggcagcccccatgagaggcacgtgactggagtaggaagtgtgagtctccatagaggggagagggctgctaggctgaaaaggcaaaagatgtctgcagtaaaaggaatagattaggagatatattctgttaaacctgttaattattaaaaaaagaaactttcaatatacagttacagtatacgtgagccggtggctcacgcctataatcccagcactttgggaggccgaggtgggcagatcagaggtcaggagttcgagacaaacctgaccaacatggtgaaaccccgtcttgcgcacctgtaatcccagctactcaggaggctgaggcaggagaatcacttgaacccgggaggtggaggttgcagtgagctgagatcatgccactgcactccagcctgggcaacagagtgagattccctctcaaaaaaaaamaaaaagttacattgtggttccttcagcatgatttatcagaaaggaaaaacttaccatatgcatatttcctatgcata

SEQ ID NO: 197638 - DNA, 449 bp, Homo sapiens
gaattcctaggaactgtggatattgctcgccccacagtatcttatcagttaattgcattcttagatgtgctaagagtcagcttgcacaagttaagtccttgaggaaggggctgccagtgaaaaagccaagataaagtctgtctagctctcttagctaaaakaaagtcaattcaggtagaaacaaggctaagtgattaaaagaaaaggaacgtctacgaacaaagttaataaaaacaaggttaggctttacagatggggtcatccttatattcagcacagtgtttgttctgaaacttcaatggagtgttcctagtttgataacttgggccatgccaaataaattgaatttctctttcttaacaacagatgtttgaatacagccccgtgtccctctctgctccttcctgccttcctcctctcctcttccttcccttccttttcaagagcag

SEQ ID NO: 197639 - DNA, 449 bp, Homo sapiens
gaattcctaggaactgtggatattgctcgccccacagtatcttatcagttaattgcattcttagatgtgctaagagtcagcttgcacaagttaagtccttgaggaaggggctgccagtgaaaaagccaagataaagtctgtctagctctcttagctaaaagaaagtcaattcaggtagaaacaaggctaagtgattaaaagaaaaggaacgtctacgaacaaagttaataaaaacaaggttaggctttacagatggggtcatccttatattcagcacagtgtttgttctgaaacttcaatggagtgttcctagtttgataacttgggccatgccaaataaattgaatttctctttcttaacaacagatgtttgratacagccccgtgtccctctctgctccttcctgccttcctcctctcctcttccttcccttccttttcaagagcag

SEQ ID NO: 197640 - DNA, 374 bp, Homo sapiens
tcccatttcactaagtataaaagaggggattttagagaaggtctcagaagaaagagatgtgggggtttggtgaaactcaccagaggctgaaccctctccagcataacacagggattgggaggagtggggtagcattaggccaggtkcatggcccagtgctgctgtctctggactttctgctctctctggacctgtttgctagctgagctcatccatttgcataattttcagtgccatttctcagctgatgagtcctgaacttttgtcttgagtctagacttctccttcaaacagcagtcttaaacactcaacttctttcttgttttttccacttgtcaacccatgaacacctcaatcttgttacatccaaagcc

SEQ ID NO: 197641 - DNA, 374 bp, Homo sapiens
tcccatttcactaagtataaaagaggggattttagagaaggtctcagaagaaagagatgtgggggtttggtgaaactcaccagaggctgaaccctctccagcataacacagggattgggaggagtggggtagcattaggccaggttcatggcccagtgctgctstctctggactttctgctctctctggacctgtttgctagctgagctcatccatttgcataattttcagtgccatttctcagctgatgagtcctgaacttttgtcttgagtctagacttctccttcaaacagcagtcttaaacactcaacttctttcttgttttttccacttgtcaacccatgaacacctcaatcttgttacatccaaagcc

SEQ ID NO: 197642 - DNA, 530 bp, Homo sapiens
tgttggccaggctggtctcgaactcctgaccttagctgatccacccaccttggcgtcccagagtgctgggattaaggcttgagccaccgcacccaacctgtgtttcttttttaagcaagaaaacaaatgcctctccccagctctcactaaaccaatccctctttttttttttttttttttcccataggattcttttccttcttgccccagtgcaaacattctattttcttttggcccttctgtccatctgtgaaagggtcaggctttctagctaacccgtaatcaaatatttttgatgaccacagtcaagacagtacttattattttttttgagatggagtttcgctcttgttgcccaggctggagtgcaatggtgcaatctcagctcactgcaacttctgcctccagggttcaagtgattcttttgcctcagcctcccaagtagctgggattacaggtgcacaacaccacrcccagctaatttttgtatttttagtagagatggggtctctctatgttggtcaggctga

SEQ ID NO: 197643 - DNA, 416 bp, Homo sapiens
gaattctggggataaaagagttactttttttctgaggtttttttttttcttggccattaactttkcttttttctgcactttctctcctctctcactactctctcataggttctgcccctggaaaacaaaatgaaggatcctcggaagttcccactcatcctgtacctgggcatggtcatcgtcaccatcctctacatcagcctggggtgtctggggtacctgcaatttggagctaatatccaaggcagcataaccctcaacctgcccaactgctggtacgtggagggaggatggaaacctaggagcactggatatttttaaaaactaatgggtcacagtgtggattctccctcttacttatctcttaaaccagcccacttcactctagcccaccatcccctgccactgccagccct

SEQ ID NO: 197644 - DNA, 521 bp, Homo sapiens
actaaactcttaccttttttcttctcttgcgcaaattcctatttaagggacctgggaagycatgccctacagagcataaagtctcactagaagggttttatttaaccttatataatgtggcttgcttttggacctgacactggcatgacatcacataacaggcaaggagatcaaaatatcgtaaccccaaatatatttatttgccatatcttgaaatagccctgcaaagttgtttcttgcaggggaaaaaagtctacattctgtagagaacccccttccctttctaggcctttttcttcagatccaggagagattcaactaagtctggcctctttttaagtctgataagaaacatttacaatctattctctctgaagcttgctacctggaggaggcttcatctgcatgataagaaccttggtcttggcggtggctcatggctgtaatccaagcactgtgggaggccgaggtgggcggatcacctgaggtcgggaattcaagaccagacggtccaacatgga

SEQ ID NO: 197645 - DNA, 393 bp, Homo sapiens
aaaaaccccctctctactaaaaatacaaaattagccaggcgtgttggcgcatgccggtaatcccagctactygggaggctgaggcaggagaatcgcttgaatctgggaggtggagcttgtggtaagcctagatggcaacattgcattccagcctgggcaacaagagtaaaactccatctcaaaagaaaaaaaaaaaaaaaaaagaactttggtctccacagtcttaacccagaaaatgtataaaacctagttgtggctcaaccaccttggacacatgtcctcagtgtctcttgagggttgtgtcatgggccaccgtcactagtatttggctcagaataaatctcttcaaatattttacagtttgactcttttcgtcaacactttcctaattga

SEQ ID NO: 197646 - DNA, 394 bp, Homo sapiens
ggaattcaagaccagacggtccaacatggaaaaaccccctctctactaaaaatacaaaattagccaggcgtgttggcgcatgccggtaatcccagctacttgggaggctgaggcaggagaatcgcttgaatctgggaggtggagcttgtggtaagcctagatggcaacattgcattccagcctgggcaacaagagtaaaactccatctcaaaagaaaaaaaaaaaaaaaaaagaactttggtctccacagtcttaacccagaaaatgtataaaacctagttgtggctcaaccaccttggacacatgtcctcagtgtctcttgagggttgtgtcatgggccaccgtcactagtatttggctcaraataaatctcttcaaatattttacagtttga

SEQ ID NO: 197647 - DNA, 462 bp, Homo sapiens
cttatagcaccagtccattgcctcaatagggcttatcatgctttgtcattttacactagcatgattattgctaaatgtttatctttcccactagaatgtaagtgtctgagggcaggaactttatctgatttgttcacggctgtattaccagcacagtggccagctcaaggatagatattcaatatgtatttgttcaatgaattmattcattcattgaaagagagtggtgaaattctgaacagggacagagagatgacctaggcatcttttttttttttccaaatatggattttgttttatgatggtgaaaatataaagaagcaaatataaaatataaagagtgaaaaattgtctttggagactctttacagagtttttttgtattgtttatgatatcaataacataaaataaaatggaaataaccaaaatgtctgtccttaaggacttggtgaatacattat

SEQ ID NO: 197648 - DNA, 408 bp, Homo sapiens
tactgaactggctgcattcccagaatgtgtccactcctgccccttaccaggatgtgaaggttgacccagtgggactctgagggtctccttcctggttgttgtcatagccagcactataggagagagtctagggtggtttgtctcctgcattcttgcttctcctatcaatgaccttcttccccctgttctacctgggggcacmtcagaaggccttaaaaacacccaaaaatcccagacaccatcaagcctgccacaaggaatcttgggagcagatgcataccaaataggaaactaaaccttaagccccagagctaactcccgagtgagactgcagaggtaggcaatccatgttgggctctggcagtcctcctcttctacccagagggccacatcatgtcccacagagtc

SEQ ID NO: 197649 - DNA, 536 bp, Homo sapiens
aaaacatcataaagtgaccaaatattcatakttttggtgtcccagaaggtgaaaagaaaacaaaagagttataaaatttgttaaataaagcaaaagatgaaaatatctcaagtctagccagagatttagtcatccagatacaggaagttcagatttccctaaaataaacaaaattcaaaaaggtttttaccatggcatattttagtgaaactgttgaaaatcaaagacagagaaattctaaaaaaaaaaaagagaaaggcatctagtcatctatcaatgaacccctatcagactaacagaagatttctcagaagaaaccttacaggccaggagagaatgatataatatattcaaagtgctaaaagaaagaaactacaactcaagtatactatacccagaaaaattttccttcataaatgaaggagagattaagtctttcccagacaagcaaatgctgaggaaattcatcaccactggaccagctctacaagaaatgcttgaaagagtcctacacccagaggagaaagaacaataac

SEQ ID NO: 197650 - DNA, 444 bp, Homo sapiens
ctaggaactaacaaatcactatttgctaagaaatcctgagctaaagaaatttctctctttttccctaatacaatttccagctggcttacttcatatagaagcaggaaaacatayacactcagagatgcatgcatgctcttcttctaaaggcaatcaccaacagaacatgcaccctacacttttctgattgaagcacatctcattctagagtaaagtttgggaggatctctcctcctagaggtaagaatcaggacggtcttcctcgctgttatacctcacctcttaacacagcatctggcacaagcaggtgctgaaattccatgagtaggaagatgaaggatgaatgcgtgcacacatggatagatgtatgcatgggcacatgcatgcatgcatggaaatgagttggtctccttgattggagatcagctgtatttatagatctat

SEQ ID NO: 197651 - DNA, 444 bp, Homo sapiens
ctaggaactaacaaatcactatttgctaagaaatcctgagctaaagaaatttctctctttttccctaatacaatttccagctggcttacttcatatagaagcaggaaaacatatacactcagagatgcatgcatgctcttyttctaaaggcaatcaccaacagaacatgcaccctacacttttctgattgaagcacatctcattctagagtaaagtttgggaggatctctcctcctagaggtaagaatcaggacggtcttcctcgctgttatacctcacctcttaacacagcatctggcacaagcaggtgctgaaattccatgagtaggaagatgaaggatgaatgcgtgcacacatggatagatgtatgcatgggcacatgcatgcatgcatggaaatgagttggtctccttgattggagatcagctgtatttatagatctat

SEQ ID NO: 197652 - DNA, 578 bp, Homo sapiens
tagatggcttacaataacacccttaattgcctctgctgcccaccttttaatcactctaattctcaaatatgatggttaattttatgtgtcaatttgactgggccacaggatgcccacacacctggttaaacattttctgggtgtgtctgtgagtatatttttggaagacattagcatttgwattgggagactaggcaaaacagatggctctccccagtgtggataggtgccatccaatcaaaccattgaaggcttgaatagaagaaaaaggtgaaagaaggctgaaatctctgcatgtctgagctaacacgctggtcttctcctgccctcggtgcttctgattctcaggcctttagactcagactggaatataaatcattcattctccagctctcagacctttgaacaccaccatcagctttcctaggactctagcttgcagatggtagattacaagacttctcagcctccataatcatgtgagtcaattccttatataaatcttattatttctctatatctatctatctatctatctatctatctatctatctatctatctatctatctatctatct

SEQ ID NO: 197653 - DNA, 578 bp, Homo sapiens
tagatggcttacaataacacccttaattgcctctgctgcccaccttttaatcactctaattctcaaatatgatggttaattttatgtgtcaatttgactgggccacaggatgcccacacacctggttaaacattttctgggtgtgtctgtgagtatatttttggaagacattagcatttgaattgggagactaggcaaaacagatggctctccccagtgtggataggtgccatccaatcaawccattgaaggcttgaatagaagaaaaaggtgaaagaaggctgaaatctctgcatgtctgagctaacacgctggtcttctcctgccctcggtgcttctgattctcaggcctttagactcagactggaatataaatcattcattctccagctctcagacctttgaacaccaccatcagctttcctaggactctagcttgcagatggtagattacaagacttctcagcctccataatcatgtgagtcaattccttatataaatcttattatttctctatatctatctatctatctatctatctatctatctatctatctatctatctatctatctatct

SEQ ID NO: 197654 - DNA, 547 bp, Homo sapiens
ggccagcctattggagcaacattaaygcatgatgatctcccactgagagaaaacaattaataaaaactttgaaagtctataaacaaatgaataacatgtttgcttttaaatcaactattatatttttatttttaaactacatttgaagtactgatatttaaaattatttaaggagagcagaattattaacaaaaatgttttctttaaggtattgatataaatcaacaggcatttattagggaatcatgtgacagataatcgtaagggatacaaagatgaataaaatctagattactgccttcaaacaatttacagtgtagtaaaaataactagacaagttcacaggtaatgaggatacaattaattcattcaaaattcattcatggtactagtaccaaaacagatatatagacaaatggaacagaacagggacctcagaaataacaccacacatctacaaccaactgatccttgacaaacctgacaaaaacaagcaatggggaaaggatctcctagtcaataaatggtgctgagaaaactggctagc

SEQ ID NO: 197655 - DNA, 455 bp, Homo sapiens
tgtctgtcagcatagtattctcttagcttctgtatactgcctacatttatgcgcagtgtgtgtgtagacattgcgtgaaagggcttatgtatgccatctcctcttcatttatgtatatcagcctcttacaggttggtcctattatggaccccatattgcagctggggaaaatgagaagagatttaaggtcatagtaagtgttgtatccagaattcagacccaraatttttgctctaaaccagtgctctgtatcacccctctcagagaagcctttatctggagcagtggttcccaaccaggggtgattttacctcccaagggacatttggcaatgtcctcagacatttttaattgtcagcactggcatctagtaggtcgaggtcagcaatgttgctaaacatcctccaatgctcaagaaagctcctcagacaaagaattatccagcctatgtcaac

SEQ ID NO: 197656 - DNA, 544 bp, Homo sapiens
gtgagggctggcagagggcggcttcctggacattagctgttgtctgaatttccctggcagcaaggaagggacaaaatggcaatgcacagattcccaaatgcgtcagttcagagggtgctgtttctttggcaagcacttattgagcacctactgtgtgtatgcatgggcatacagtggcttcctctggtaccagaatgaaatgcaaaatcatgatgtcccaccctctccctggctcatccactccagctatgctgacctttctgctcctccaatgcactgcctaggccctgakgcctaggcacttgctgtgccccttttggtatgctcttcccaggcctcagccccaaatatcccatttctggagagacggcccctgactccctgtctgctgctgacaaaccctcacccgttaccctccaatccactgtcctattttattcactacatgattattgtacttatgtgcttactagtttactgtctgtctccctccaccagaacatcagctgcacaagggcagggacctggtctgctgggtctccag

SEQ ID NO: 197657 - DNA, 544 bp, Homo sapiens
gtgagggctggcagagggcggcttcctggacattagctgttgtctgaatttccctggcagcaaggaagggacaaaatggcaatgcacagattcccaaatgcgtcagttcagagggtgctgtttctttggcaagcacttattgagcacctactgtgtgtatgcatgggcatacagtggcttcctctggtaccagaatgaaatgcaaaatcatgatgtcccaccctctccctggctcatccactccagctatgctgacctttctgctcctccaatgcactgcctaggccctgaggcctaggcwcttgctgtgccccttttggtatgctcttcccaggcctcagccccaaatatcccatttctggagagacggcccctgactccctgtctgctgctgacaaaccctcacccgttaccctccaatccactgtcctattttattcactacatgattattgtacttatgtgcttactagtttactgtctgtctccctccaccagaacatcagctgcacaagggcagggacctggtctgctgggtctccag

SEQ ID NO: 197658 - DNA, 544 bp, Homo sapiens
gtgagggctggcagagggcggcttcctggacattagctgttgtctgaatttccctggcagcaaggaagggacaaaatggcaatgcacagattcccaaatgcgtcagttcagagggtgctgtttctttggcaagcacttattgagcacctactgtgtgtatgcatgggcatacagtggcttcctctggtaccagaatgaaatgcaaaatcatgatgtcccaccctctccctggctcatccactccagctatgctgacctttctgctcctccaatgcactgcctaggccctgaggcctaggcacttgctgtgcccctyttggtatgctcttcccaggcctcagccccaaatatcccatttctggagagacggcccctgactccctgtctgctgctgacaaaccctcacccgttaccctccaatccactgtcctattttattcactacatgattattgtacttatgtgcttactagtttactgtctgtctccctccaccagaacatcagctgcacaagggcagggacctggtctgctgggtctccag

SEQ ID NO: 197659 - DNA, 340 bp, Homo sapiens
aacaaagagccgctaatccggcgggcgccgcgggcgggctggcgggcggaggcatcccgccccttcccggcttggcmgccggagtttgcagcgcgttaattaccccgcgcccggtgccccgcggcacccacccccggcctggacgtccccgggcgcgagcctcccgcagccccgccgacgggcgccgcggcgaatggcgaagcccctctgccccggctgccgtgggctcgggcacccgcgctccacggcagctcacgtgccccgcagatccgccggcctaagggccctcgcgtaccaagctacctagacagcggggcggggactggcgaagccagagaca

SEQ ID NO: 197660 - DNA, 580 bp, Homo sapiens
gtaattttatctcaagcccaataccaggaaaactgcttctctgatcaactggtatgtttttattttcaaggacaataaatcacaaaaacatgattccttctttgctttggctgctgggaatcccaaggtaatgttttaggtccaactctagtcgtggtacagggtcattagaacctgtgctctgtagacaaactttacctttgtttccattacttggtgtctcttattttccaaagattctgacctcctgcttgattctatttatctatataacattttcccttttttttttccttttttgagacagggtctcactctctgtcacccaggctggagtgcagtggctcartcacagctcactgcagcttcgacttcccaggctcaagtgattctcccacctcagcctccctagtagctgggtctacaggtgtgcaccatcatgcctggataatttttttttggtatttttgcattttttgtagagatgagttctcgccatgttgcccaggatgatctcgaactcctgagctcaagcaatccacctgccaaagtgctgggattacaggcctgagtgactgca

SEQ ID NO: 197661 - DNA, 563 bp, Homo sapiens
  misc_feature (1)...(563): n = A,T,C or G
nnnnnnnnnnnnnnnnnnnnnnnnnnnnnnnnnnnnnnntgtgactaattatacctagattaccatatacagagatttaagagtattttatcctgtcatcacatctataagattaagacttaacttcttcttttcataaaaactaagagaaatccaaaatatagttttgtcatccaatctagaaaataaataagaaaaatgcatatctgattaaattatgaatttataaaaaatcatttagttatatgctattgctcaaacaactaagttaaaaaagaaaaagaaaaagaaaaagagtttcttgtgtattcagtctactgggatattaactagcctgtracagtgagaataaagaaaaattactgctttgtttaacttgcagaactattcattaattttatttacaaaagttaaataatttcattaatttggggaatatagtactactcaaaatgttttatttatgaaatagaatattgctatttcattaccataaaacaaacagtgggtaagtcaaatgtatatttaaagatttgttttaaattagattttgagcttaagtt

SEQ ID NO: 197662 - DNA, 576 bp, Homo sapiens
ctggcataactttcatactgaccaaactcatgaatgtgggcaggcagtgatagaggcagtcttaggcaagcaagaaatccacagactcccagttcttacccaaacttcagcagtttttcaagaataaacagttctcatattgctgtttgcctttggccatgtttggaagtacttatttgcttatttttgggtcaattttagattcatagttgatttgggggtaaaggatttgcctgttttctcactcatccatagtcagagacaaataacattaaaataatttttgtctccccccaaacatataaagatgtagagatacttgcctaggaggtcatatcaaagttatattttagtactaggaaataagaaaccatcatagatttgctaacaacctttgggacatttgagagttctcaggtgaataaatactaagtcaaaatctgaagaaattaatatacacagggatgacttcaacagaaatatgtgcattctattagtttctccacaagctacctaccatgaagtcttacttgttcaatctgatgacrttgactatctttcttgagaatgtatgta

SEQ ID NO: 197663 - DNA, 478 bp, Homo sapiens
gcattattctcagtactgtttcttttacagatgaccttagctgtctttggcttcactgctttcacgattttgaatttcatctgataaacttcattctagcccagtggttcctccacttagaacttaagcactctatgatacctggctgttttggaatcttagctgaactatctgtccttgtttgtctcatggttctacattgctttgtgtcatttcttatttttctatttctagtcctagctctagtccatgcttggatttctctataggagtacaagcttttacctattaagaaacaataggtaaaatcttgagagagagagagagagagagagagagagagctctcartggagatcagggaactagccccaatcccatctttgttccctaaaagagaaggaactgtggcctctttgactggaaatttcccacttcttgatacaagtgttaaaatgatgcagacagcaccctatccc

SEQ ID NO: 197664 - DNA, 441 bp, Homo sapiens
ccagatcctggtcttttatttgatgcaaaactttttattagtgattcacctccttacttgtgatttgtctgttcagattttctatttcatcatgatttagtctctgcaggttktatatgtctagaaatttattcattttttctaagttatcaaatttattggtgtataattgttgatagtagtctattatgatccctatatttctgtggtatcagtaatagtttcttccccattatctcaaaaataaatgttatttgagtgttccctttctttgttctagtctagctaaatgtttgctgactttatctttacaaaaaatccaactctttttttattgatcttttctattgtttatccagtctctatttcatttatttcttcttttatctttattatttcctttcttttttgactttgggcttagtttgttcttttttcttc

SEQ ID NO: 197665 - DNA, 441 bp, Homo sapiens
ccagatcctggtcttttatttgatgcaaaactttttattagtgattcacctccttacttgtgatttgtctgttcagattttctatttcatcatgatttagtctctgcaggttttatatgtctagaaatttattcattttttctaagttatcaaatttattggtgtataattgttgatagtagtctattatgatccctatatttctgtggtatcartaatagtttcttccccattatctcaaaaataaatgttatttgagtgttccctttctttgttctagtctagctaaatgtttgctgactttatctttacaaaaaatccaactctttttttattgatcttttctattgtttatccagtctctatttcatttatttcttcttttatctttattatttcctttcttttttgactttgggcttagtttgttcttttttcttc

SEQ ID NO: 197666 - DNA, 556 bp, Homo sapiens
taggaatttattactataaactttcctgttaaaactatttatatgtttaatgtttgtgggtacatactacccacaaatatatatatatatatatatagtagatgtatatatttatggagtacatggtatattttgatacagccatgaaatacataataaccacatcaggataaatggggtatttatcacttcaagcatttattataattacgtttgctgtatcccataagttttggttttaatgatgtgtttttatttttgtgtgtctcaattatttttaaatttctttatttctttttttacccattagtcgtataggagtatgtcctttaggaattctttatgcttagaataaagtagagatagcagtgtccatatcagatgttacagaaagaaaataaaaatttaccatgttactattaaaataatgcacggctgtatgacgcatattggattatcatgatcttcataggaagttcaaacacaaccagatagaacttyttgtctctcctttcacagaagacatagtgtatttttcaacctctatgcttcactc

SEQ ID NO: 197667 - DNA, 654 bp, Homo sapiens
atcttaccttttacaaatcaatttaaccttcccacctatttgccttcccagatagcccaggaaagaccaaaggaaagcagatgtactgtcgtactgtgtatagcttacctatattgacccatgcacaagatgaatcacaagatatcgatatttataaatgcagagggattttgtattctttcaacataagttttggtttaaaattaatcagacataccaattaacagagccaaatctacctatagaatattttcagttgacctagtggccatgacattgagtattcttttttattcctatcaaatttgttcacatttaaaaaaatcaatgtttactttgtgtgggtacgtaatagtatatatttatatgggacatgagatgttttgatacaggcattcaatgtgtaataatcacatcatagaaaatattcatcccctcaagcatttatcctttttgttacaaacaatcaaattatctcttttagttattttaaaatgtctaattaaattattattgactatagtcactctgttgtgctatgaaatcctaggtcttattcatcttcctaacttttttgtatcaattatatgcytttagttattttaaaatgcacaattgaattattactcagtatgatcactctgttgtgctatg

SEQ ID NO: 197668 - DNA, 532 bp, Homo sapiens
ctgatcgctgaacaaacgcagcttttgccaaaacgaaagaaatccctgctcaaaaaagttgacgttacttcgagattaactcccaggtttgcaaaatctggtaaaaatctttccatctggtgtacttccttcgcctcgccgccacccccaactccagaaaagcagcacaaggctccttgtctccctccgaggcggctgcgacggcggaaacctgatccgagcctgactttcagtaaacaccagcgcagagagcaataaagcatccggaacatttgtctcgggcgcgcggcccccgcccgctaaatgtttgataagcggctgtcggaggggagatttgtcagcggtccgagccgaaggcggggagggtggagagaaggctcgtctctgcgcccggcggccgcccggtgggtggctgcgttackgtggcccggagcccgacagaggtgcgtgtcaggggctcgggaggcctttcccgttgcgccacgccgcccttccgccccggcgagcgccttcgagacctggggctatttgg

SEQ ID NO: 197669 - DNA, 491 bp, Homo sapiens
acctctccttgaattaatgtgatccgattcatcttccctccaagttttttttttaatttaattacccctccctgccctggccctgccagcttcagctccacctccttggaggaagcaggcgcttttacagagcgccgcgcggcaggtcccctttcagccaatcacatctgcggaaccgcgttccgagtcgtttgagggtgtctggtaaagcaagctcggggcggtgttggaaatctgaatstcacccgcggtccggagcagataggatgggctgggaaggtacccgcgaactgccgccggaattcgctggcagctgtgcgaggctcaggtgttctagtttgacatttcccttcctgaaagcggcaaggagaggtctaagagtgggcaaacttcaacgttcggttacagtgtaattaatgagagtggtgggtttttatgcagtgtaattatgccacgatttgttgttgctcagtggctttttcacaaatttc

SEQ ID NO: 197670 - DNA, 569 bp, Homo sapiens
atcccattttgtagtcccgggcagacccgaaacccctgaaagaactccactccagaagacgccagaacaagttcccacgaatttcatgggcgcccttcacatgaaaacctcagctcccctatcctcaaggaacggggaagggcgccggggagggacttcggtggccagctgtccctgggtcgtgggcgctgtttgctctgcggagcgccagccctgcacacagcgggtgcgggaagcgttgatgggaggctggagggcggggtgagcgtaaactaggatctagccggttccaggcgtggagaatcaaatgtggtcctagatctgtaagttgcgaaaaggggcttttgggagcgtcagagctttctcactccggtcccccgccgccttgaggctggcagatttataccmcacaggtggatggagacctaaacaaaacagtcccggccgctgcctgccgctcgccccccacgtcccccgggcccaccgcaaacttcaacaaaataaacaactcaccacaggcattcccttgtctgcagcgcgacgcttgccagctgggaaaataagccgca

SEQ ID NO: 197671 - DNA, 559 bp, Homo sapiens
ttcttccttggtctattctactattaatacttgtgattgcattataaaattcttgtagtgtgttttttaactctatcaggttagtaatattcttttctatactggctattttgtttgtcagctcctgtattgttttactgtgattcttagctttcttggattgggtttcaatgtactcctgcagctcaatgatctttgtttttatccatattctgaattctatttctgtcattttagccatctcagcctggttcagaactcctcctggagaggyggtatgatcatttacaggaaagaaggcactctggccttttgagttgtcagaattcctgcgatggttctttctcatctttgtggttgaatattccttcaatcttttaagttgctaacctttggatttttttttccttttatcctattcgatgatcttgagggtttgattgtgatataaggtggattcagctgattggcttcatttctggaagattttaggagagtaatgctcagctctcaactcctaactgcatgctttaactgagggggacttgtattgaggctc

SEQ ID NO: 197672 - DNA, 591 bp, Homo sapiens
atgatttaaataacacaagcagccaaaaaagtgatttttttgtttatcttaactattatttgtaactccttggatccagatctttgtaagcagctctttctttacaatgtccatcatgacttttgtgcttccttgtccctaatttttatttatccatttccttctgtgcaagcctctgtgcctgatgatacctacatttttataattaaccttttctatttcttttgctttttcttttctccctctcttctatgtctgctagtttgcacatatataaatgtgcatacatacatatatgtgtgtgtgtacagtatatatcagattattaagctttattaatacctagttagaaacaaaaatatttcatttagtaaaataagcatgaatatcatcaattcacaaagagagaacagaatttaactgatttatctgaggtgactcataataagtcagtttcttakgtggcaatgaaaacaagtctttaatgcagtattctaatagaagtagttgaaagcttttgctttatatatttatgctgaggttgttaggtacatataaactagtgaatattatatcttcttggtagatgtt

SEQ ID NO: 197673 - DNA, 366 bp, Homo sapiens
gaattcatctatgtgtctgccccctctccagataccgtgctgtcttgatgactgtaactttataaggtcttaaaatcaaatagcgtggakttccacttgtggccaagatcgataaacagggaccggatgaccctccttcctaaaacagcagcaacaaataaacaaaaccaggcaaaatatgtgaaacaatggttttcaagacacaggacaatgtaggacagtaatccctgacagacgggaagcaaacaagatgttccctgcaattaccccagcttgccttgaggtggtttccaggctgtggagcagaaaaggaaactgaggcagattcagtagccttcttgaggagatgtggttgagagagaacaa

SEQ ID NO: 197674 - DNA, 533 bp, Homo sapiens
tttttgtgctaagtccccatctgtttactatttccatgcttttctttaaatccttgaataatttctagtgatagctggtcaaaaaaccttagctgccaattttataatctttgtcatctttggatttgtttctattaaccctttctttctctctctctttttttttttttttcgagacagagtctcactctgttgcccaggttggagtgcartggcgcaatcttggctcactgcaacctctgtctcctgggttcaagtgattctcctgcctcaacctcctgagtagctaggattacaggtgcacgctaccacgtctggccaatttttgcatttttagtagagaccgggtttcaccatgttggtccggctggtctcaaactcctgaccttgtgattcacccaccttggcctcccaaagtgctgggattacaggcgggagccactgtccccggccgctttttctcttcatgggcttctgctacttcctatatgtgtagcaattttttatggtatgttggacgttgttatgctacc

SEQ ID NO: 197675 - DNA, 314 bp, Homo sapiens
gagtatttcacacagattactgtctttctcctttcaagcagacagctgacatacccctgccaggctggtgtgtctaagctccaggtgaagagactgtagctcagaaaagttaaagaactttccccagattaaaactcaaaattatatcctcaatttagatccatttcactttaaacaaaggatgcactctaaattataatttggyttatttacctgcttattagcaattattttgtaattaatcacaattatcactaaaatatacatcttttaacaatgcattggtgcagcctgtaaacagcaaaactgaattc

SEQ ID NO: 197676 - DNA, 547 bp, Homo sapiens
taaatacacatgcaggtcgggcacagtggctcatgcctgtaatcccagcactttgggaggccgaggtgggtggaccacctgaggtcaggagttcgagaccaggctggccaacatagtgaaaccccgtctctactaaaaatacaaaaaaaaaaaataaaaaagaaaaaaattaactgggcrtggtggcaggcacctgtaatcccagctacttgggaggctgaggcaggagaaatgcttgagcccaggaagcggaggttgcagtgagtcgagatcacaccattgtactccagcctgggcgatagagcgagactctgtctcaaaaaaaaaaaaaagttcattgattactgtttttccccaaggttttttgttcacctgtaaagtaatatgtagttgataagaggatgggggggatatttaagatctttattctgacaacactttctgttgtcctaaactgatgtggcagataggatagatttgagtcaaagaaagggatatggatttggtgaattattgtgccttattcattgaatattgactgccttca

SEQ ID NO: 197677 - DNA, 547 bp, Homo sapiens
taaatacacatgcaggtcgggcacagtggctcatgcctgtaatcccagcactttgggaggccgaggtgggtggaccacctgaggtcaggagttcgagaccaggctggccaacatagtgaaaccccgtctctactaaaaatacaaaaaaaaaaaataaaaaagaaaaaaattaactgggcgtggtggcaggcacctgtaatcccagctacttgggaggctgaggcaggagaaatgcttgagcccaggaagcggaggttgcagtgagycgagatcacaccattgtactccagcctgggcgatagagcgagactctgtctcaaaaaaaaaaaaaagttcattgattactgtttttccccaaggttttttgttcacctgtaaagtaatatgtagttgataagaggatgggggggatatttaagatctttattctgacaacactttctgttgtcctaaactgatgtggcagataggatagatttgagtcaaagaaagggatatggatttggtgaattattgtgccttattcattgaatattgactgccttca

SEQ ID NO: 197678 - DNA, 486 bp, Homo sapiens
acaaggtgatctttttctcctagaatctcaagaaaggaacacagcactgccaacatcttcatttcaggttagggaaatctgtactggatttaaagaattagaaaataataattttttgttgttttaacctactacatttttggtcatttgttatggcagcaacataaaactaatgcacagttttcatccaagttatacttctaattaaaaccttaccactttaacaaatcctgttctttctagccacagcctcttagcatgaactccagtttctttttgtaaagtaatcctctataaccttttatactaaactttctatactaaaagcatcagtagatttccttgctgtatttcagcccaaattagctgggcttgactaatcacagcagggtcatttaggagtgacataatcctaaacacaatcctgaaggtgaatgcatgctctctyttctgacattaaaggtggtttcaatcacgtctggcacc

SEQ ID NO: 197679 - DNA, 648 bp, Homo sapiens
ttattcactaccatgaaaacagtatgagggaaaccacccccgtgattcaattatctcccactgggcccctcccacaacatgtgggaattatgacagtacaattcaagatgagatcagagccatggtggctatacaaagctttcctaaagatggaaaaatattaatttctcctttatctttgaagcatagctttgcgawatatagaattcttggtagacattttcttttctctcagcaccttgaatatgtcatcctattaccttctgttctctgtggtttctgattagaaatcagctgtaatctaaataagaattccttgtacatgatcaatcgcttctctcttgatgctctcaagattatctctttgtaatctaaataagaattccttgtacatgatcagttgcttctctcttgatgctctcaagattatctctttgtatttgggttctggcaggttgattatgaatacttgtggatctctttgagtttatcttgcttgcaattcactgagctacttggctgtgtagctaaatgttttctatcgaattggaaaggttttcagccattatttcttcaaatattctttctgcccctttatttctctccagttcttctgagtttcccattattcatatgttgttggtaatc

SEQ ID NO: 197680 - DNA, 619 bp, Homo sapiens
tttttgcaaatgcaaattgtgtgagcagtatacatttttatacctgtatatttgacttctgagtgatttccatgaatagtcaatcatctttgtatcactttgggtaactaatacaggtattttgctggtctctataacatttgctataatgtatcaaattttgtaggaagtaaaggtaccrgttcatatataacctcctgtcacctaagaaatgcttactggctgaattaggcagctcagctgatggttattcaaaatatagacagcatttgtagtgctccaaagctcacctacccatgttcaaatccaagcatttccatttattagctgtgtgactttgagaaacatcttgacatctctgggcatcagtttccatatctacaaaagaggggtaattgtagacatatataatacactaagatgagatagaagaatacttgaggatggcaagttttcaccttgtgggtgtgtttgggtgcaaagcccaaaggttgggacttccagacagatagagaagaagaatatttccctgccttcagggagcttatgagctaatgtggcaacaagaaaagatacaaaaagccaatgaaaggtgcctctgagtgtgcagtgatggtta

SEQ ID NO: 197681 - DNA, 660 bp, Homo sapiens
gcctttcagcaacttcaagtatccagaatgctccagatgtcaagatagcccatccttccacagactccagtgtttatcatgaccccctccctccatcataaatgaattttaacacaaaggtagtactcttgaacagcaagtagaaataaagatgaaaagggcacaaagataactaatggtattccacaattggctgatcagaaagaaaagagcatgccaactgcctaagaacacccatagacaatcagttgttttgaatgaaggtgaattttctctggagaagtggcagaaatcaaaagaaagtcagagagaaaacagagggaggtggaggtggtagcagcaggtcatagaaattagcagtggwggcactatcttggcagtggtgacaaccagtactaaaaagagagaaagaattttaaaagtacaatgcagactatgggcaaatataaatagtataatgaagttttggacagccacatacaacttttatttattttacatctgtagaaattccagtcttcagtctttagagaaaattcttacttcaataattacaaataactgagctttatcagtattcccactgatttgcatgacagtattatggcaatttagctattgtctggaaaaattaatatagctttatatacagtataattt

SEQ ID NO: 197682 - DNA, 591 bp, Homo sapiens
gttctagcttaaaaaaatctccaaaacagtccacttccctttgcttctactgccacctccttagttcacgctaccatgatttccccatgaatacagctaaatctacttaattggcttgcctatccactctttcctgtctcatattcactacaaacagggagatctttctaaaatctaaatcttatcatgtcactcctttgcttaaaatcattctattacttttcctagaaaaatgttcaaatttccaactgtgctttaaagggcccacattgcagacttcatctctaaccactcccttgtttccaatcctactagatttccatcatttcttcaaactcacaatgctctctactgttgtacagcttatagggtgyttttatttgtcatttatatcctgagaatgcagtgatggatatacggaattacttctacttcagtacagagtatcagacattaagaccactccacccagattcattaaaagattaaaggggcggggagagggaatgaggtaccaacctgaatgagcatccagctaaactggcaaagatacaggtaatgtgtgacagcagccatagctgaacagctctc

SEQ ID NO: 197683 - DNA, 571 bp, Homo sapiens
ctgtcttaaatctttaaacttgtactatttttttcagtttcaagtgtatgttttacttcatttatactgaaaatataactgactttgagaagtcaaactaaaatatcaggcttatgttgtgaatcaytgcagacaatcttaagtgtttcatatgagcttagtgttcaattcagtgcaagcacagcctaaaccaagatctaatttatcttgtagtaattgtgattattttgtgctctggagagttctgatagagagattcatgcatctacagaaatgcattctaatataaatatctttctataataatttcttcattcattctccaaatatttgttgagtatctcctatacacattccagacactgttctagactccaagtatacagtcttatacaaaagacctcactcagattgctttctttttgaagaaacagggagttcaaaatataaaataaatataaaatataatattggatggtggtcaaggttttaaaaaaaataaagcagcaataggaacagtgaaaaagatgaccaggaaaggcctatttgaggagtgacatttggagagggc

SEQ ID NO: 197684 - DNA, 576 bp, Homo sapiens
caaaagacctcactcagatgctttcttttgaagaaacagggagttcaaaatataaaataaatataaaatataatatggatggtggtcaagggttttaaaaaaaataaagcagcaaataggaacagtgaaaaagatgaccaggaaaggcctattgaggagtgacattggagagggcataccatgtggagtctgaaagaacatcctagatagaagagacagcaaatgcaaatccttgagataagagcagctatacaaatatctaacctttaagtattgcccactaagtgctaagcactcttttcagtaatcacttagaataacttatttaatcctcacaataatcctaagaggtaattactagaattataatccccattttataaatggaggaactgaggcacagagagcttatttaacttctcaaggttaaatcctaggaggaggcagaaccagagtttgaacccaagcattggtctggctcccragtctgtgctctaaccactgtgcacactgcttctctgaacaaaaaggctgctggggctgggcactgagcaatgtctccttacaaaagtggta

SEQ ID NO: 197685 - DNA, 604 bp, Homo sapiens
gtgatctgcccatctctgcctcccaaagtgctgggattacaggcatgagctgccatgcccggcctagttattgtacttttcaattcaagaatttctatgtggttcttttttatgatttctatctctttattgatattttctatttgatgtcattctcatatgctcatttagttatatagacatagtttcttttatgttttgaacataattaaaatagctaatttaaagtatttgttcagtaaatctaacatctgggttgcctgagggatagtttctattcattattttcttgtgtatacatcatatcttcttggttttttgcatattttgtaaatttttgttgaaaattggacattctatgtggaaattttagaaatcataaatttttctctcargatttgttgtttctgttcacagtagtagttgctatttattgacttttctgaatttacagatttaatttcgtatatctatattctttgtcacacgtggccactgacatctctgtttcattaatttagtggtcagctaatgattgaacagagatttccttaaatgcctgtaatgaagaaatctcctagtctttgccagaaggctctatgtg

SEQ ID NO: 197686 - DNA, 598 bp, Homo sapiens
aactctcttctcttgtctgctgccatgtgagatatgcttttcgccttctgccatgatcttgagrtctcttcagccacgtggaactgtaagtcgataaaatccctttctttggtaaattgcccagtctagggtctatctttatcagcagtgtgaaaatgggccaatacattgccatccttagacgtgtctctctcattgtatccaaggaaaacagtagtgaggcttttccttagatgtcaaatacattgttggattctggcttctcatcccagctccttcctgaggaattgacaatgctgaagcacctcttgctttttcttagttggaagagtcatcagcttgggagtggacatggagagaacagagaaagcttattggatggtgtcttagtcccttctcacactgctataaagaactaccttaaagaggtttaattgactcaccattccacaggctgtacagaaagcacggctgggaggattcaggaaactgacaatcacggcagaaggttaagaggaagcaagcccatcttaccatggcagagcaggagagagagagagaagggagaagtgccacactctcttaaacaaccagatct

SEQ ID NO: 197687 - DNA, 491 bp, Homo sapiens
cttggtagatactaaacctgggaactccagtggtctagaaatgtactgtgtcatgtaacttataataggtgagtaagaatatgatcacaggcatgtccagaactaaagcttatattttgcctctacactacattgtttctagatcctccatttcataacagttttatccttgtctgaactcccactgcattaaccataatctgaagagttccctttgaacaaatttgcatcatccttaaagacttcctatggccagatataaacacaccctggactataattgtaaatgctttaaagttaaggactaccttttatgtttcttgtgtagcctgagcttaacctagtaaacaatgtgccctctgtccatgcttattaaccacatgaataatacatacataatacggatggtcttgttcagagaattggatgatgtcaatggtgtgtaaacatgcagaatacactggrtagcatcctattgtttagcatttatt

SEQ ID NO: 197688 - DNA, 606 bp, Homo sapiens
gatgactatgtatcttgggggtggtcatcatgtatagcgtctctctgggggttctctgaatttcctgagtttgcatgccaacatttctagcaaggttggagaaattttcgtggccagtatcttcaaatatgtttccaagtttcttgctctctctctatctccttcaggaatgccaatgattcataagtttgttctctttacataatctcctatttctcagaggttttgttcatttttaaaaattctttttttaaattttttgtatgcctgtgttgatttgaagaagtgatcttcaagttctgmgattctttcctcagattggtctattctattaatgcttccatttgcactatgaaattcctgtagtgggtttttcattttcagaagtttagtttggttctttcttaaaatggctatgttgtctttcagctcttgcatcattttactattttccttggattgggtttcaaccttttcctgtatctcattgagcttccttgacatccagattctggattctatgtctgtcatttcagccacttaaatctggttaagaaccattgctgggaagctagtgttatttggaggtaaaaagtcattgttgtt

SEQ ID NO: 197689 - DNA, 604 bp, Homo sapiens
ggaacatcacacaccggggcctgacagggggtgggggactaggggggggatagcattaggagaaatacctaatgtagatgacaggttgatgagtgcagcaaaccaccatggcaacmaacctgcatgttctgcatatgtattgcagaacttgaagtataataataataataataaacctttgtcttttatgcaaccagtgagttctgtccatacacagtgggctttcctttttgggcatactcagataagggaacttagactagggacttccttaagacatgcttgcagctgcagagataagaggatttacacaaaccaaacacgtccacagtggaaaattccatctcctgacacatgactcaggctaaggaaccacatgctcactagaggggcagggtggagctgtcacaaatttctgctttatgcaaataagatgcccagtcctaactggttttttccaccttatgtaaatgaaacaccccacctcattcgcttttgcataaaagcctttgtactcaactgtgaaatgccaaccttcctcgggccccctccccgcagtggatagcttttctctctctcttattaaactttcactcaaactcac

SEQ ID NO: 197690 - DNA, 578 bp, Homo sapiens
cacttcaccaggctcttgggctctttctaatttgttaagtgttagatgaaagaaaaaaaagaaaaaacttcaagagagataattaaggtcttagaaaaaagagtcatcacaatggaaggagacagtttgtctcacttttttggatagaataataaactcaatgagtaggcaaaactgtttctggctaaaatgatagagatgtgaatgacagcaatagaacagggcagaactattgggtgggagaatcyaatgatacaatttttagagaagatattgtcctctcagaaccccaacacccagctacccactagtttattgaatttagtcaaaagttcttttaaaatggggagaaaaagcaagatactggaaccttaccttagttaataattgcttttcagggaaacatgtattatgtactttttaaatctcatgctgtttgaagaacaaaaatttactaataaatgttacattaaaaattagccaaaaattataaactaagcagtttactaaattacatggatagtctttttccctgacaacttagtaagaactttttaaaaagcatcttttagcattag

SEQ ID NO: 197691 - DNA, 668 bp, Homo sapiens
tttcattcaaaacctctttttgattattttttctttttgtttgagggcaggtaaggcacaatcagttgctttgtctgcctacatatgtttatttaatacaaatcatggcaagtctcttggtaagttagggcttcaattcatcaaaatgtcatgtaaattcaggctgactacagaaacagtggcaaaactagcttaaatctctctgtgtgttactccttagacattaatttactttaaatatgtggaatttttgtggtggttaatrtgtgtgtttatatttatatatttataaatattaaagaaatttagtggtatgttatgttaatagaagttcaaatagaatgagaggaaaatattcagcatgaggatttttataagactgagaaatatattttttattttattgtttgatttttattactgttatttatcctagtgtaaaatggttacttgatgaatcccaaaaattatattaacatgagaagacacattattgttttccagattatatattttacatttgatctaaaacttcttcaaaaaatttggtggactcttgataattttcacagtctataaatgtgtgtgtttttgtccatttattagtttatctgttttctcataagaatcaatacctgaagtaccactatataatgtgaaaccatttt

SEQ ID NO: 197692 - DNA, 668 bp, Homo sapiens
tttcattcaaaacctctttttgattattttttctttttgtttgagggcaggtaaggcacaatcagttgctttgtctgcctacatatgtttatttaatacaaatcatggcaagtctcttggtaagttagggcttcaattcatcaaaatgtcatgtaaattcaggctgactacagaaacagtggcaaaactagcttaaatctctctgtgtgttactccttagacattaatttactttaaatatgtggaatttttgtggtggttaatgtgtgtgtttatatttatatatttataaatattaaagaaatttagtggtatgttatgttaatagaagttcaaatagaatgagaggaaaatattcagcatgaggatttttataagactgagaaatatattttttattttattgtttgatttttattactgttatttatcctagtgtaaaatggttacttgatgaatcccaaaaattatattaacatgasaagacacattattgttttccagattatatattttacatttgatctaaaacttcttcaaaaaatttggtggactcttgataattttcacagtctataaatgtgtgtgtttttgtccatttattagtttatctgttttctcataagaatcaatacctgaagtaccactatataatgtgaaaccatttt

SEQ ID NO: 197693 - DNA, 576 bp, Homo sapiens
aattcttactaaatctagcagccagtcttcaagatggtcctcacttatccccacctttttggtgtttgtgcccttgtgcagtatacttccatattgaataagtctggcctatgaaaccaataaaatattgttacaatgatgaaatatgtctttggaggctagattatagaagggacttcagtttctaccttgctcttcttggataacttgctctggaagaagccaacttccatgccatgaggaagctcaagcagctccaaggagaggtctacatggtaaagaactgatgcctccttccaagctcaaagccartaaaggacttaggcctcttgataacagccatgtaaatgaggtatcttggaagcagatcttccagcttctgtcaagctttcaagtgagcaaatctctggttgacattacgactgcaacctctcgagaaactctgagccagagccactctgttaagctgctcccaaatttctgaccaacagaatatcacgtgataataaaggtttattgtggttttaagctggtaagtttgaagttaatttgttatgcaacaataaataactactc

SEQ ID NO: 197694 - DNA, 576 bp, Homo sapiens
aattcttactaaatctagcagccagtcttcaagatggtcctcacttatccccacctttttggtgtttgtgcccttgtgcagtatacttccatattgaataagtctggcctatgaaaccaataaaatattgttacaatgatgaaatatgtctttggaggctagattatagaagggacttcagtttctaccttgctcttcttggataacttgctctggaagaagccaacttccatgccatgaggaagctcaagcagctccaaggagaggtctacatggtaaagaactgatgcctccttccaagctcaaagccaataaaggacttaggcctcttgataacagccatgtaaatgaggtatcttggaagcrgatcttccagcttctgtcaagctttcaagtgagcaaatctctggttgacattacgactgcaacctctcgagaaactctgagccagagccactctgttaagctgctcccaaatttctgaccaacagaatatcacgtgataataaaggtttattgtggttttaagctggtaagtttgaagttaatttgttatgcaacaataaataactactc

SEQ ID NO: 197695 - DNA, 576 bp, Homo sapiens
aattcttactaaatctagcagccagtcttcaagatggtcctcacttatccccacctttttggtgtttgtgcccttgtgcagtatacttccatattgaataagtctggcctatgaaaccaataaaatattgttacaatgatgaaatatgtctttggaggctagattatagaagggacttcagtttctaccttgctcttcttggataacttgctctggaagaagccaacttccatgccatgaggaagctcaagcagctccaaggagaggtctacatggtaaagaactgatgcctccttccaagctcaaagccaataaaggacttaggcctcttgataacagccatgtaaatgaggtatcttggaagcagatcttccagcttctgtcaagctttcaagtgagcaaayctctggttgacattacgactgcaacctctcgagaaactctgagccagagccactctgttaagctgctcccaaatttctgaccaacagaatatcacgtgataataaaggtttattgtggttttaagctggtaagtttgaagttaatttgttatgcaacaataaataactactc

SEQ ID NO: 197696 - DNA, 254 bp, Homo sapiens
aatattgagaaaagattatttctgtttagcaaaataagattagctgtgctatatttactctattttatctagattaatatcttttaaaaaatattgagcatgtttaaggtcttagatttattctgagatgtggcagtgcacaygagctattgtaaggttgctgaaagagtggatccaagctctagtgtctgtttaacatcataagattatatcaatacttattttaaaggctcttgtccagaggagtaagtggt

SEQ ID NO: 197697 - DNA, 546 bp, Homo sapiens
cagctctgactgcccttcttgtcatgtgggagaataaattcctttactgttgaaaacacttccagctgattttctgttacctgcagccactgaaccstatattgtcaaatctcaggtacccttttcagttcaactcttgactagaacatacagaaattttgacacatttacttatttcccccttattgaaacatttagtttctgtgaaactggtgtctcctattttttcctccttcattaggaaatacagtgatagttctcctttgtgaaattactaaaatttagaattcctcaggatttctcttgggtctctctttttctttttttttctctttctttttttttattttcttacagttgcttcatacttgatatttcttcctttgacatttgctaacatctatgagctaattaccctcaggtaacttggtacagacctattctctgaattccaggtatatattttgaccgtcttgttgagacatcctctgatattccacaggtttctcacactgaaaaagtccaaaattgagtcactgatgcttg

SEQ ID NO: 197698 - DNA, 611 bp, Homo sapiens
gttgtttacagtggggagggaagtttattaccaacttatcagttatggttggaacctaaggaaagtttgaaaactaaaagaagaaagaaaaggaaaagaaaatagggacccttaattcaagatgtggatctgatgtcataaatgtctaagagtctgagcttcatctcaaagcagctgggccagttgagcataccctgctgtagttctttctaacctggcatcagaattggactgaataaaatgtacagttctggccactatagcaggttgtgtcagacttatccttctgctgaaaacaactataaaagttggacaaaatgtataaaacaactatttgaaggcatttgagaacaaccaatacagctaagaattgaggagttgtgatcctggagaaaagggaataatgtgtagtgagttccacatttacctttgctttttccctaggggcatttcacacattgttacttgagggaatagggaccaagcagaaagcatcagtcttaccagactgaggatacaaakgtcagagttcagggctgccgaagaagatggaaattaagaaggaaaattccagaaggtaggaaagaagagagaaggagcccaataattgc

SEQ ID NO: 197699 - DNA, 591 bp, Homo sapiens
gattgagagggaatatttgcaatacatatatccaacaacaaactcatatggagaaaatatatagacttctacaattcagtgaggaaaatgcagaaatcccaataggaaaatggacaaggacttgaacagtcatgtcacaagaaataactaataaacacctaaaaagatgctcaatatcaccagggaaatgttcttttaaattgcaatgagatattgctacacacccaccaaaatgactgaaattggaaaagctaacaatarcaaatgttgacaaagatatgaagcaactggaactctcattcattgccattgggaatgtaattttgttcatccatttagaaaaatggtaatatctacaatagctcaatatatgcatgtcttatgacctaggaatttcactcctggatttttattatatttaaataagtgcttgtgcccaccaaaagacatgtgcaaacatatacaaaacagttttatttaacatgactaaaaacaacccaatgttcatcaacaaaaatggataaattgtgttatattcaaacaatggaataccacatagcaatgaaaaagaatgaggaactattacaaaca

SEQ ID NO: 197700 - DNA, 604 bp, Homo sapiens
tgagtcctatcactataaatggttttgaaattagccttattgtgcttctagcctttaaaaaatgtacacatattgggtaatctgaattgcttagaaaatgaccatctaactcatccttgctttttatgctctgaatgaatagttgaactggaagcattaaaatattgaaaacagtaagattggctaaaggacttcaactttattgagccttaaaactatgcctcaggtaaacctgatggtgagatttctaacctcatagtattcaaataactttaatgcaattttaactacagaatgggatggyaaaccaaattcttatccatcttatccaaagtagccctttgacaatgtagacaaaataaaattaacaacatttgtgaagcaccgagtagagctcacaagagaagaggtgtgctcttcgaagatcttatataaaactcatatggtatatgtacagcatatgtttaccattgcttcaactgattaacttcaacaaaccatgttggtggactcatatgagtttgcatgtagaagtagtaaagagcctagattctgtggcacagtttccttaggttttaatccactgaacaagcttgtgagccta

SEQ ID NO: 197701 - DNA, 573 bp, Homo sapiens
gctgtaaatctgggactataaacatgtctacttttctgttaaacctgctgctgtgcgtgaggtacaataagctctcttttcagttttatggtggccagtatgttggcttgccagtcttgatgctgttgattctactgttcccaaagcctcctgccaagctcttgacccaagtcacgctccctggtgatgtcataatgctgctrcgaatttgctcattcactgtacctgcagggatgccccaagagtcacataccttccctgttagtcactcgttggagaataacaccttgaaatgagcagggcctctccttcccctgatttcaaagccattacattttcagaattttcataatgagtttatagatacagtaagatgactattacctttatggaaattatttttaattgtttttttctcaaaaataacactattaatttgttggaccaaaaaaattttctccacattcataagcaaaatttatttcaattaaacacatatttatgaaatacagtgcctggtatttgaaatcatcaccattgttatgtatgccaaatatctggaggaaaagaaga

SEQ ID NO: 197702 - DNA, 583 bp, Homo sapiens
gagcccaggagttcgaaactagcctgggcaacatggcaaaacccagtctccacaaaaaaataaaaagtaaagagtcaggtaatagaccctgggtgtttgctcctcctattttctcccaggcatttctgcctcaaatgccttatgtctaagaactccttcctgcctcaccctatgagatagaggctattgtcacccccattttagaaatgaggaaacccaggcacagtgacatcaggttaagtgccatgtctgaggtaacacatcaataaagggcagaaccaggagtacactcttctatgtccatcctcttggccaccatacatcctgctcaacaccaacaaggcagaattgaatcaaggtgctctgattctcagactagcatttaattctaacttgcaagaccctagaacggtctgtcagaggctgatgactcacaaagcagcatcgktttaaaaaggtgaggcattcactagaatggcaactttgggcttcgtgtttagaagtgccggggctaggggtaggggaatgtgataaatataggctgaacttccattaaacaaaaatgtactgtgagaaaaagctt

SEQ ID NO: 197703 - DNA, 397 bp, Homo sapiens
ctggaacttcttcactgtattccctgactcccacaaatgtacactcatctgtggtagttgtcaaaatcaatgcttccatgggggatgatggtagaaagctcctatgctgccatctttctgatatcactcctcatttccagctcttcatgttccttcttatattttttctctgagctctgcttgtcagtcttgttccctgcactccaatgtatcctgagggtatatttctgttcttcacctttgtagttagtttcacaaaagcaagaaacccagatggatcctagagttagtagtagagtcaaaagtcaaagtgtggtacttgaagatragttttatgaaatattctggtataaaaggttccattttcaaccaaacactaaatcccttttgttaagaa

SEQ ID NO: 197704 - DNA, 440 bp, Homo sapiens
aaagacatagtagctaccctcctggggcctacagatttcttttaaacatcaacttgcctgtatttatagggtcttgtggcttcaaacatttataaaataatttagggaaatttgtttgttggattggaatgcacctggatccctaattcagatggctaagtgatgttatgtgtttttagacaatgaagctggaaatccaagacaaaatattccctggattttcagacattgcatgttaaacacataaaataatcttattcttattcattgatatattggtttttttaatggaaacaactgaactggtgtgcaagaagggatyctttaatagaatgcatggggtgggggttattctttcttactctatgtcttgatgtttatttcatccagagttcaaacttggtggccagtgtcacttggttagcagcagtgatttgtga

SEQ ID NO: 197705 - DNA, 592 bp, Homo sapiens
taacattcataaaacaagcaagataatctttgtcccagcagttcccagcaagtcatgaagtacaccctgataggaggattctcacatgatgtgtccacctctgtacctatcactgtggccaggaggatattacaggattatttgcctaaatcaaacagcttctgtcactggaggtgggtaaatgtcaattccacctaaaccatatgaagaagtggtgatttcccaaaggagctgtaagatgtcattgccaagatgyggttgtccaaaaatagatgttcaccataacatggaaccatgtttatcattgttaaagaaaatatgactatgaaatgacacattgagcatatccaaattttgatgcatagatttcagtgcaaatatcttttgattcatttatttaactatctcatttttactgttttttttggttgtttgcaccattccactattagaaacaatacttcaactggcacaattgtacatacattcttatatgtaagatgatcctagaataaattcctaaaaattgacttgctgagctgaaaaaatacacaatttaaggtttttacacatcttgccaaattgcccttgt

SEQ ID NO: 197706 - DNA, 642 bp, Homo sapiens
gtcacacaaaatttttgatttcctagtgcatataaaagttatgtttaccctctactttaatctattaagtatgcaatagcattatgtctaacaaaattgatgtatgtaatagtaggctgtcatgacaaaaaagtgtacatactttgacttataatactttattttgtaaacatcctaataatcatctgagcttttggcaagtggtggagggtcttgcctcagaggcaaggtttttttgccactgaggtggagrgtttttgctggtagagggtcttgcctcagcgttcatggctgctgactgatcagggtggtggttgctgatggctgggtggctctggcaatttctaaaagaaagacgaaaatgaagtttgccacatcaattgattctccttttcacaaaagatttctccgtagaatgcaatgctgtttgccagcattttacccacagtaaaacttctttcaaaattggagtcagccctctcaaaccctgcctctgttttatcaactgaattgatgtaatattctaaatcctttgttgtcatttcaaccaagttcacagcatctttaccaggagtagattccatctcacaaaactgtttctttactcatccataagtggcaactcctcatccattaaatttt

SEQ ID NO: 197707 - DNA, 381 bp, Homo sapiens
tcaataaaacttcactggccacaggagacttcccctaattcaactaaacaaacactgttccttcttctgttaagaatgtcatcgggcagtctaatgggctttgaaaaactctttggagctctgcactggaaaggaagataaaaggaagccacggatgagcagtgaagcagtcaggctcggatccctgccctcacctctgagatcagcacrttccgaaatctgatgagattcataaattcacaaggaagtacttactgcacaatttgccatgacaatttccaaatggcttagggtgatcatgacacctttagtctcagaatgccaggagaatacttgaaaggccctgaattgatgaaaaccatcatggttagagctattttc

SEQ ID NO: 197708 - DNA, 587 bp, Homo sapiens
ggaactggaatcgctgggtaaattaagtttgtgtaaggaaaggagaggttgggaacagcactcaacagggcagyctaggatgcgttttgtgtgcaaagatgtatagattcacttgtacaacacatattctacagtgcctttgggagttgtctaagctgattgctcatttcatttactgtgggaaaattctaagtcctccacatttccattgacctgatctccagaccttgggatttgccttctagtttgaagtaatgccaactctaaataaagtcaaacctacaggggtcccattatcgctaatctagaaaggattggagattctttctttcctttcttccttccttccttccttctttcctttcacttgcaatggagagcatgaggataggaacaagataaaagcaacacggtattttctaaaaacaaacaaacaaacaaaaaaaacttgcagcaaaatggtaagaaatgaaaccactaccaagatcatgtccaatccaaactgaggagggcagcagctggattcaattaactttgcgcaaaagtcctccatcaagccttctgccttctgaagtgataagcattac

SEQ ID NO: 197709 - DNA, 587 bp, Homo sapiens
ggaactggaatcgctgggtaaattaagtttgtgtaaggaaaggagaggttgggaacagcactcaacagggcagcctaggatgcgttttgtgtgcaaagatgtatagattcacttgtacaacacatattctacagtgcctttgggagttgtctaagctgattgctcatttcatttactgtgggaaaattctaagtcctccacatttccattgacctgatctccagaccttgggatttgccttctagtttgaagtaatgccaactctaaataaagtcaaacctacaggggtcccattatcrctaatctagaaaggattggagattctttctttcctttcttccttccttccttccttctttcctttcacttgcaatggagagcatgaggataggaacaagataaaagcaacacggtattttctaaaaacaaacaaacaaacaaaaaaaacttgcagcaaaatggtaagaaatgaaaccactaccaagatcatgtccaatccaaactgaggagggcagcagctggattcaattaactttgcgcaaaagtcctccatcaagccttctgccttctgaagtgataagcattac

SEQ ID NO: 197710 - DNA, 642 bp, Homo sapiens
gtcacacaaaatttttgatttcctagtgcatataaaagttatgtttaccctctactttaatctattaagtatgcaatagcattatgtctaacaaaattgatgtatgtaatagtaggctgtcatgacaaaaaagtgtacatactttgacttataatactttattttgtaaacatcctaataatcatctgagcttttggcaagtggtggagggtcttgcctcagaggcaaggtttttttgccactgaggtggagagtttttgctggtagagggtcttgcctcagcgttcatggctgctgactgatcagggtggtggttgctgatggctgggtggctctggcaatttctaaaagaaagacraaaatgaagtttgccacatcaattgattctccttttcacaaaagatttctccgtagaatgcaatgctgtttgccagcattttacccacagtaaaacttctttcaaaattggagtcagccctctcaaaccctgcctctgttttatcaactgaattgatgtaatattctaaatcctttgttgtcatttcaaccaagttcacagcatctttaccaggagtagattccatctcacaaaactgtttctttactcatccataagtggcaactcctcatccattaaatttt

SEQ ID NO: 197711 - DNA, 587 bp, Homo sapiens
ggaactggaatcgctgggtaaattaagtttgtgtaaggaaaggagaggttgggaacagcactcaacagggcagcctaggatgcgttttgtgtgcaaagatgtatagattcacttgtacaacacatattctacagtgcctttgggagttgtctaagctgattgctcatttcatttactgtgggaaaattctaagtcctccacatttccattgacctgatctccagaccttgggatttgccttctagtttgaagtaatgccaactctaaataaagtcaaacctacaggggtcccattatcgctaatctagaaaggattggagattctttctttcctttcttccttccttccttccttctttcctttcacttgcaatggagagcatgaggataggaacaagataaaagcaacacggtattttctaaaaacaaacaaacaaacaaaaaaaacttgcagcaaaatggtaagaaatgaaaccactaccaagatcatgtccaatccaractgaggagggcagcagctggattcaattaactttgcgcaaaagtcctccatcaagccttctgccttctgaagtgataagcattac

SEQ ID NO: 197712 - DNA, 642 bp, Homo sapiens
gtcacacaaaatttttgatttcctagtgcatataaaagttatgtttaccctctactttaatctattaagtatgcaatagcattatgtctaacaaaattgatgtatgtaatagtaggctgtcatgacaaaaaagtgtacatactttgacttataatactttattttgtaaacatcctaataatcatctgagcttttggcaagtggtggagggtcttgcctcagaggcaaggtttttttgccactgaggtggagagtttttgctggtagagggtcttgcctcagcgttcatggctgctgactgatcagggtggtggttgctgatggctgggtggctctggcaatttctaaaagaaagacgaaaatgaagtttgccacatcaattgattctccktttcacaaaagatttctccgtagaatgcaatgctgtttgccagcattttacccacagtaaaacttctttcaaaattggagtcagccctctcaaaccctgcctctgttttatcaactgaattgatgtaatattctaaatcctttgttgtcatttcaaccaagttcacagcatctttaccaggagtagattccatctcacaaaactgtttctttactcatccataagtggcaactcctcatccattaaatttt

SEQ ID NO: 197713 - DNA, 539 bp, Homo sapiens
gctttcttggccgaatctacatctgtgagttttcagtaaggcgaaaactgaaataagctagctaggccaccatttctttttcaaatagtgtatattgctataactaccatatgttttagagaaaccagttatgtactacttctgttatccagatgggaaaagcaaaacaggtggactattacataatatgccaacaagctgaatttagaatttgaaggtcagcatctcctgcccatggcttaaacctctgagtagtatcatatcccaaaagctcttccttccttttcgtctcatgggactatgagggaccttgggtctgatctgtttttgtggcttttcaaaaaattcttagctgtcaattctttgtatcctttaaaatcttatgcaaatgcccaatatgtaaaatccacataactggggggactctggttgaagatcaatagkggggtggtgggagccctctgtccatttgatcctgaaaggacttaacggtaaactaggactcctccaagcacaggttgaaaacctgtgaaatagtt

SEQ ID NO: 197714 - DNA, 642 bp, Homo sapiens
gtcacacaaaatttttgatttcctagtgcatataaaagttatgtttaccctctactttaatctattaagtatgcaatagcattatgtctaacaaaattgatgtatgtaatagtaggctgtcatgacaaaaaagtgtacatactttgacttataatactttattttgtaaacatcctaataatcatctgagcttttggcaagtggtggagggtcttgcctcagaggcaaggtttttttgccactgaggtggagagtttttgctggtagagggtcttgcctcagcgttcatggctgctgactgatcagggtggtggttgctgatggctgggtggctctggcaatttctaaaagaaagacgaaaatgaagtttgccacatcaattgattctccttttcacaaaagatttctccgtagaatgcaatgctgtttgccagcattttacccacagtaaaacttctttcaaaattggagtcagccctctcaaaccctgcctctgttttatcaactgaattgatgtaatattctaaatcctttgttgtcatttcaaccawgttcacagcatctttaccaggagtagattccatctcacaaaactgtttctttactcatccataagtggcaactcctcatccattaaatttt

SEQ ID NO: 197715 - DNA, 311 bp, Homo sapiens
gtatatgtgcacatgcacacatacacataggactgaaattgctgaattaatcacgggatatattcactttcctagataatgttaatttcacaaacatacaatttatacttccattagcagtatttgagaattccttttgctccacatccttgccaatayattaaattgtctgaaattgccaatttttttttttttttgagaaaaggtctcactgtgttgcccacgctggagtgcagtggcaggatctcagctcactgcaacctctgcctcctggctcaagcgattctcctgcctcagcctcccaagtagct

SEQ ID NO: 197716 - DNA, 376 bp, Homo sapiens
ttcattgcacacttggctcagtgtgtctgtcctaagtgtcttacatgccattacgttttccttgtttgggagttttcattgtacagatttcaccttttctttttggaaattattttgagagaggttggagtgtaggatgtgctggtattttgggtggattccctgctgttgtgtcatcactgagagctcatggcttggctctggtatttctacaaaagcaggagatcttctgtttctttccctctggggtttgcccctacacaaccacagcaaggctgtagtagcttcagtgatgagagcaaaggctccagttactaaggtttytggggttacacttgcaatgttttcctactatgaaacagagtgcctcctgaat

SEQ ID NO: 197717 - DNA, 382 bp, Homo sapiens
gtgtatgggtggggtggggggattctcaaagccatgttacttgctgggaggagtcctgccayacagcctctgtcacaccctcttggaggagccctgccaagcttgagatcccagcaaagtccctgccaggctgtggctgagttcaagctggagcagctctcccaggagtccagatcctatgatggagaaggtgtaggatcctattgtaaagattggaagtgactcagaggcacacatctgcacacttgcaccactacaaggtgcacacaggcctgggcacacacatgccatgtactcgtactacagatacaggcccccccacacacccagctgctgagctgtgagcccacatgcactcatggctgatggtctctggtgggcc

SEQ ID NO: 197718 - DNA, 558 bp, Homo sapiens
tgagtgcaagtttttttattttgtttttttatatggatacctagttgttccagcacattttgtttaaaagactatcctttctccactgaattgcctttacatrttggtcaaaaatcagttgcttatctatgtgtgagtctatttccatgctctcttattaaattcctttaatatatttgtgtatgtgtaggctcattgttttttagatgaaataactagaatcaccctttcctcagctagttagcttacaattaatgggttacttatatataaaacttaaattttggctgggcacggtggctcacgcctataatcctagtactttgggaggccgaggcaggtggatcatgagtcaggagttcaagaccagcctggccaacatggtaaaaccccgtctctactaaaaaaaaaaataaaaaaaaaataattagccaggatggtggcacattcctgtaatcccagctactcgggaggctgaggcaggagaattgcttgaactgggacccgggaggcggaggttgtagtgagccaaaatcgtgctactgcactccaccctgg

SEQ ID NO: 197719 - DNA, 391 bp, Homo sapiens
tgtgtgtggagttctctgaagtaaacagtgtgatggtgtagagagcacctgtgtgagtctgagatgaggggatgtgatgttgtggacttcagccaggtttttggcagctagtgtctgtccctttttcagtagctccagtcttcttatgaagaatgagttctttctgtggtgtgtgactttagtgggagggcagctcttgctctatgcctctcagttgccttccactgtaaccagtcctgtaactggtctgggcacactcggwgggggatccatggtagctccttgccatgaagatgtgggtagaggagggttctgtggggcctcggaggtgttcaacattttctagaagtgttcctggtgggtttatagaggcattgatatggtttggctg

SEQ ID NO: 197720 - DNA, 351 bp, Homo sapiens
gtgagtctgagatgaggggatgtgatgttgtggacttcagccaggtttttggcagctagtgtctgtccctttttcagtagctccagtcttcttatgaagaatgagttctttctgtggtgtgtgactttagtgggagggcagctcttgctctatgcctctcagttgccttccactgtaaccagtcctgtaactggtctgggcacactcggagggggatccatggtagctccttgccatgaagatgtgggtagaggagggttctgtggggcctcggaggtgttcaacrttttctagaagtgttcctggtgggtttatagaggcattgatatggtttggctgtgtccctaccca

SEQ ID NO: 197721 - DNA, 272 bp, Homo sapiens
cctggttgttacgttaaggttgtcactcataacctctttggctctttgcaagctgtttgcattgaaatggcatagctcatcttgcctctgaatgtccccagtccatttacttaaggctggtgacaccgttactcatgacactgtcccatcccttgtgctggtyggggaccctggcttccagacactcttcgagatgatgactgcgttctgtcaatgatgaccacaaatgcaagtcttccccagagaaagcagtaaaatgtgagtgagaattc

SEQ ID NO: 197722 - DNA, 593 bp, Homo sapiens
atataccacattatctatggatggtgaaattatgagtaattttaatattaatctgaataagttttgagttttttcctaaactttcttcagtgatcacctgttacacttataatcaggaaaatcagcattttattaaaaaggcaagcactaaatgagtattttaaaataatattgaccatgcatatatcactaactttggaggcagcaagatgtagagttgaatatcagctctgccacatactaactatatgattttagtaaggccaagtttccctctttcctgagtctcaaagtgcacatcactgaattcatgagaaatgatctgtcagtggtatacagtgagtgattaaagtcacttatgggcagcttacaaaacatcaaaaacaaagttgaaggtaacctaaatgttaatgaaaatatataattttttagattattctaaataacacacattaagatggcatggtttaacaytgtagagagactttaagttaaaagactaaaaatacttctatttaaatggctacttttatggattgctttgggtctccccagaattcatatattgaaatcctcacccacccccagtactt

SEQ ID NO: 197723 - DNA, 501 bp, Homo sapiens
cttctatttaaatggctacttttatggattgctttgggtctccccagaattcatatattgaaatcctcacccacccccagtactttagaatgtgatttggtttggagataaagtctttacagaggtaatcaagttaagatgaaatcattagggtaggccctaacccaatgtgagtgacatgctttttttttttttttttttttttttttaagtkggagggtatttgaacacagagaggtgcacagatggaagacaatgtgaagagacatacagggaaggaagttgtctatctacaggccaagaagaaaggccagggacagatctttctctcagcttactcaaaaggaatcaacgctactggcaccttgatttgagactcctagcctccagaactgtgaggcaatacatacatttctcttgtttaagccattcaatttgttgtacttttgttatggaagccctacagttactttacttttccgtacattaatatttttgaat

SEQ ID NO: 197724 - DNA, 584 bp, Homo sapiens
tttggcatgaatcctttggctataacacatcagagccatgaatatgactatttgctgaattatgagagctcgctagcaaatcattgaacccgagggtgatctgggatccctggatacacctgatatctgtgaatctcttctacacagaatgaacggcagcaatgttatttccaaagaaaggagaaatagtttcaggggaacagcatttttcaaaaaatgttcaggtcaagctgtcatataaaattcccatctgctttagtatgagtctgatcaatgtgtgtgcattcttctttaaacacatagttcaattacaacaacagaaacaaaatatatttcctcttttcattgcttcaaggtgaatatttgttttcttattatttatctagtagtattttcctcatacctktttctaacacaggtcccttagactggtcaataacaagtaaaacagctaaattcagtatctttgagttgagttactagccaaatttcctctgagcacaaccttcctaactttaacaagatccaaagagacattttccccagagatgcctttaacttggcagagaatgtgggaccatcac

SEQ ID NO: 197725 - DNA, 581 bp, Homo sapiens
aataagcatattttatactttatcaaatgatgttgtctttcctaggtatttctacctgcagaaaacaaactaataaacaaaaccagaccaaaactgtgggaagaagaaagcaggctgaatacaaaacatgttgcataggaaattccaagctttatctctaattataaaatgtctagaatactgcaggcagcaaaaagcaactcaacraatataaagagataactacagatgtgaagtcattatcaaagactaaggagaagaaataaaaaaaaggttcaatcatgtagcccattacaaagatcaaggcatcaataaacacgccttatgttccaagtgcatatacatcagctttcccagcagctaggagcctggcagctccgagagaccagtgaccagacaatatatcttttgatttatcatgattatttatatggtgttatagattgcaaatatatattaaatttaattaaatatctgaaaaaagatataaaatcacaaaaactaaaaccttacaaaagcttcaaacttctagcaacaatggcacttacataggagtcttagccaaggagcaaggaaagaaa

SEQ ID NO: 197726 - DNA, 429 bp, Homo sapiens
tagtacacaaaccatcatagtagtctctgatggttattgtatttttctggggtcaagggtaattactatcttatttttaaaattgtgtttatttggatcttctctcttcttctttattagtctagctagcagtccatctgtcttattaatttttcaraaacacagcccctggatacattgatcttttgaatggcttttcatgtctcaatttccttcaattcagctctgattctggttatttactgtcttctgatagttttggggttggtttactcttgcttctctagttcatttagttgtgatgttaggttgtttattttaaatctttctaactttttgatgtgagcatttagtgctataaatttcctggttaacattgccttagctgtgtcccagagattctggtatattttatctttgttctcatta

SEQ ID NO: 197727 - DNA, 610 bp, Homo sapiens
ccatcatagtagtctctgatggttattgtatttttctggggtcaagggtaattactatcttatttttaaaattgtgtttatttggatcttctctcttcttctttattagtctagctagcagtccatctgtcttattaatttttcaaaaacacagcccctggatacattgatcttttgaatggcttttcrtgtctcaatttccttcaattcagctctgattctggttatttactgtcttctgatagttttggggttggtttactcttgcttctctagttcatttagttgtgatgttaggttgtttattttaaatctttctaactttttgatgtgagcatttagtgctataaatttcctggttaacattgccttagctgtgtcccagagattctggtatattttatctttgttctcattagtttctgggaacttcttgatttctgctttaatttcattatttacctaaaaggcattcaaaagtgggttgtttagtttccatgtaactgtatggttctgagcaattttcttagtcttgatttctaattttattgcactgtggttcaatatgactttgtttctttgcttaggattgtctaaagtctgattatgt

SEQ ID NO: 197728 - DNA, 429 bp, Homo sapiens
tagtacacaaaccatcatagtagtctctgatggttattgtatttttctggggtcaagggtaattactatcttatttttaaaattgtgtttatttggatcttctctcttcttctttattagtctagctagcagtccatctgtcttattaatttttcaaaaacacagcccctggatacattgatcttttgaatggcttttcatgtctcaatttccttcaattcagctctgattctggttatttactgtcttctgatagttytggggttggtttactcttgcttctctagttcatttagttgtgatgttaggttgtttattttaaatctttctaactttttgatgtgagcatttagtgctataaatttcctggttaacattgccttagctgtgtcccagagattctggtatattttatctttgttctcatta

SEQ ID NO: 197729 - DNA, 566 bp, Homo sapiens
taaattgcaactaaattattgattctgctggaaggttatatgagtttatgcactaaatggtttcatcatttatcaccagccctgcagtgagacaccatgggcatatatcagctcttaggaaatakgttcacacatacacactgtggcatgagctttttctaagtcaaagctgaggcctcacaaaggatgttaaccttctaggtgttttaaatacatccatctgtgagaagacttcaaaatggattttgcaaaaggtaattggaattaacagctttttgtgatttggagcttggcatagacaccaaacaagaacaaaatgatcatgttcctaggaaattagggccactgtccatagctgttaggtctaaatggagtttgtggggttgagaatagtgcaatataaattgatatggttatttgtgtggtgcagcagcaaggcagaagtcagggaatcttccttggttggaggctttagaaatctccagtataataaaatctggtataagcactgaacaaataaagaggggggcaaccttcctagagaaatgaaatgaatgcaggtccaa

SEQ ID NO: 197730 - DNA, 609 bp, Homo sapiens
aaactgtgctatatccatacaataaaatattattccacaacaaaaagaaataaatgatttttcccaccacaacacagaagaatcacagaataattatgctgagtaaaagaaatcagacaaaagtcatatatgtaacagtatgatttcatttatataaaattctacacgatgcaaagtaatgtacagtgactaatcagggattgcctggggacaggatgggggctggggatggatgaaaggaggagcaagatggagagattacaagggacaaaagtaagccttatgagggtgatggatatgttcattatctgattgtcgtcatgagtttattggtatacacatatcaaaacttatcaagctatatacttcaaatatatacaacttattgtatgtcaattaaaccacaataaagctagtttaaaaatctgcacaatacttccatcatgattaactaagaaaaagatatggtcttgtcttcttgggcttacagacttttaggagtcatgaacacytatgatataaggtgttgtgaactctgtggctgttttacagcatatctttaagagcttcattttcctccttgtcttttagaaataagtgcttagaatg

SEQ ID NO: 197731 - DNA, 524 bp, Homo sapiens
ttaatcagtcttatttgaaacagaatgtatttctccactgcataagtaattggctgaaaccagaaccattaacaaattgaatgaagwtttcgttaatgccagggaactgtgctgttagcaaaatcactcttattatgtcacagtattcaaagatgtgcatttgttaaatagagttgatgtactttttcagagtgttgccaattgtgagaacatttgttgaatgacatttcagtgtcctcaaacttgtgctattatcttcatatattcttggtatgcagaggtgacaaacaatttgaaaaaaaaatacattgatgatttccctcacttccctccaacttgaatatgaaggccagtcttatgatttggtactttggtcaagtctgtgggtcaagggatataattaagttccttgtcaccctaacagtgagactaggccgacttttgtggtgtctaaacttgagggtattggttagggaatatccctgaattgtgtttgtaataaggcatttgcacttcttattgtg

SEQ ID NO: 197732 - DNA, 524 bp, Homo sapiens
ttaatcagtcttatttgaaacagaatgtatttctccactgcataagtaattggctgaaaccagaaccattaacaaattgaatgaagatttcgttaatgccagggaactgtgctgttagcaaaatcactcttattatgtcacagtattcaaagatgtgcatttgttaaatagagttgatgtactttttcagagtgttgccaattgtgagaacatttgttgaatgacatttcagtgtcctcaaacttgtgctattatcttcatatattcttggtatgcagaggtgacaaacaatttgaaaaaaaaatacattgrtgatttccctcacttccctccaacttgaatatgaaggccagtcttatgatttggtactttggtcaagtctgtgggtcaagggatataattaagttccttgtcaccctaacagtgagactaggccgacttttgtggtgtctaaacttgagggtattggttagggaatatccctgaattgtgtttgtaataaggcatttgcacttcttattgtg

SEQ ID NO: 197733 - DNA, 524 bp, Homo sapiens
ttaatcagtcttatttgaaacagaatgtatttctccactgcataagtaattggctgaaaccagaaccattaacaaattgaatgaagatttcgttaatgccagggaactgtgctgttagcaaaatcactcttattatgtcacagtattcaaagatgtgcatttgttaaatagagttgatgtactttttcagagtgttgccaattgtgagaacatttgttgaatgacatttcagtgtcctcaaacttgtgctattatcttcatatattcttggtatgcagaggtgacaaacaatttgaaaaaaaaatacattgatgattyccctcacttccctccaacttgaatatgaaggccagtcttatgatttggtactttggtcaagtctgtgggtcaagggatataattaagttccttgtcaccctaacagtgagactaggccgacttttgtggtgtctaaacttgagggtattggttagggaatatccctgaattgtgtttgtaataaggcatttgcacttcttattgtg

SEQ ID NO: 197734 - DNA, 506 bp, Homo sapiens
ttcaaatcatgaattcttgttrtagaaatttaaatcttttcatcttaaaggtggtgttagtattgactgatttggaatgaccttcacattttttagctacttatgtgagttcgtctgcattttccttttttttttcattgaagtatcacgtatcatatctttattagaataaatcacactaaagcatactttctcacccttaattacacatacaaatgagataattcaactgataggacataattcaaatataaataaaatcattctctcacatatttaacattgttgagtggattttaaattgtatatatttaaggtatacggcatgctgttttgatataaatatacatagtaaaatgattgctactattaagaaaattaacccacccatcacctgccattattaccttttttgtgtatgtggttaaagcacgtaaaatctattttcctagcaaaatttcagtttacgatacaatatcattaattatagtcctgatgctgtacat

SEQ ID NO: 197735 - DNA, 506 bp, Homo sapiens
ttcaaatcatgaattcttgttatagaaatttaaatcttttcatcttaaaggtggtgttagtattgactgatttggaatgaccttcacattttttagctacttatgtgagttcgtctgcattttccttttttttttcattgaagtatcacgtatcatatctttattagaataaatcacactaaagcatactttctcacccttaattacacatacaaatgagataattcaactgataggacataattcaaatataaataaaatcattctctcacatatttaacattgttgagtggattttaaattgtatatatttaaggtatacggcatgctgttttgrtataaatatacatagtaaaatgattgctactattaagaaaattaacccacccatcacctgccattattaccttttttgtgtatgtggttaaagcacgtaaaatctattttcctagcaaaatttcagtttacgatacaatatcattaattatagtcctgatgctgtacat

SEQ ID NO: 197736 - DNA, 649 bp, Homo sapiens
taatagtcgttcctgaaaaaatataagcctttcccatgaggacattttctgtcaagaggtaagtgtgggtcagctcatttggaggctgagggggcatctgrtttcttcataatattatataaaatttgtgagtggctaagctacctcattgtttcttctgtggataagggcctgctgccttgaattctagtcagcctggatgggtggggctgatctaagctgagggtcttgatagctgcagagcacacagtaatcatcatacctgataacaccatattgaaatgatcaagacaataatgataatagatagcatttattgaccaattaatatgtgccaggtattgttctgtgggcttttatgtttttttctcattggagctttgcaattaataagcagtgagttacttcttttattggcccagagggctgaaaataatttgcagcttaataaagtagctactttgcttctatagtgattggtttgccacctgttttaagtgtgggccatggcttctctaataaaccctattctttatcttgctcttaaacattttgttttgatagccatgaaaccctcctcagggtaggtgatttatttccatttgccaaatgtgaagagtgagagaatgaccttgataaagggttgggt

SEQ ID NO: 197737 - DNA, 512 bp, Homo sapiens
ttattaagtaaatatttcatcctctgagttttatagggaacacaattttgccgattttttgttgctacatatcagaagttcctattttttcagccaccaataacaattttttaatgaatttctagtttttcctaatagattgctcactgtttttcaagctgaaggccactgtttaactccaaaaccaatactacatattttatttttatttttttaaattgtggcaggaccttacctttggtaacatcagttagctattgctaataacataccatttcaaaatgtagtggtttaaaacaataaccatttattattgttcacaagtctgtaggtgggcaaggcagttggctggctrggcttggctgatccaaggctgacttgctcatgtttcagcagtttgccgggtctagtttgggatgattttaatcagtgggatgagtggactttatgtcggttatcatttagcaggttaccctgggctgttcacttggttcagagacatgcagaaaaga

SEQ ID NO: 197738 - DNA, 592 bp, Homo sapiens
gacttattcactgttctgctttaggcttttacaaatagaatctaaaacatttaacctaacatctgagatgtgggtttaccactrttattccaagtcctttaattttgtatgtcttcattttaaagtccctaagttcatgttattaatggttattttcctatatgttttactttctcatgtatataaattcatattttaaagtcttaaattctgttttctgatgttgagggtcctataaggttgtactcttaatgggtggcttactttcattttctcatttaattattatttttaaaaaatttcctagttattgattctcatgttatttcttatgattgttgtcagtatctccctaaatctaataaggagacagaaaccacaaagtaattttaaacaggggaagtttaatataaagaattagaaagctatgatacgtgagtaactataaaagtgtaaagagaactgtaacaaacatactaggcctgaaggaggagagtatttaaggaaaagaacaacttggaagagggtccttccccaaagttagagttcagaccttgttagagaaggtacaatctgctaaggccagagttgg

SEQ ID NO: 197739 - DNA, 592 bp, Homo sapiens
gacttattcactgttctgctttaggcttttacaaatagaatctaaaacatttaacctaacatctgagatgtgggtttaccactgttattccaagtcctttaattttgtatgtcttcattttaaagtccctaagttcatgttattaatggttattttcctatatgttttactttctcatgtatataaattcatattttaaagtcttaaattctgttttctgatgttgagggtcctataargttgtactcttaatgggtggcttactttcattttctcatttaattattatttttaaaaaatttcctagttattgattctcatgttatttcttatgattgttgtcagtatctccctaaatctaataaggagacagaaaccacaaagtaattttaaacaggggaagtttaatataaagaattagaaagctatgatacgtgagtaactataaaagtgtaaagagaactgtaacaaacatactaggcctgaaggaggagagtatttaaggaaaagaacaacttggaagagggtccttccccaaagttagagttcagaccttgttagagaaggtacaatctgctaaggccagagttgg

SEQ ID NO: 197740 - DNA, 592 bp, Homo sapiens
gacttattcactgttctgctttaggcttttacaaatagaatctaaaacatttaacctaacatctgagatgtgggtttaccactgttattccaagtcctttaattttgtatgtcttcattttaaagtccctaagttcatgttattaatggttattttcctatatgttttactttctcatgtatataaattcatattttaaagtcttaaattctgttttctgatgttgagggtcctataaggttgtactcttaatgggtggcttactttcattttctcatttaattattatttttaaaaaatttcctagttattgattctcatgttatttcttatgattgttgtcagtatctccctaaatctaataaggagacagaaaccacaaagtaattttaaacaggggaagtttaatataaagaattagaaagctrtgatacgtgagtaactataaaagtgtaaagagaactgtaacaaacatactaggcctgaaggaggagagtatttaaggaaaagaacaacttggaagagggtccttccccaaagttagagttcagaccttgttagagaaggtacaatctgctaaggccagagttgg

SEQ ID NO: 197741 - DNA, 413 bp, Homo sapiens
aatcagaaaccaaatcggcttttttgactgcgaactgattacaaggaatgggtattggagaaccaaaatgacaaaagagtaaggctgagaaaacatcgaggcaggamctacaagaaacagctagcacttctagggtaggggtaacaagggaggaggtggatttattagaacctagaagctggtgtggctgcttcagaatctcagagatagggctcagcccagccaggatccagacctcaaggagagggtcaacttgactggggctgctgcctcaaaaactcagaggaaagccccttggagctggactcagacctctgaggaggaggctctggccagctgccgctggtatctctgtggggaacatactaagctggtctgggagactgagggaagaatcctgagaactggaattc

SEQ ID NO: 197742 - DNA, 411 bp, Homo sapiens
aatcagaaaccaaatcggcttttttgactgcgaactgattacaaggaatgggtattggagaaccaaaatgacaaaagagtaaggctgagaaaacatcgaggcaggaactacaagaaacagctagcacttcyagggtaggggtaacaagggaggaggtggatttattagaacctagaagctggtgtggctgcttcagaatctcagagatagggctcagcccagccaggatccagacctcaaggagagggtcaacttgactggggctgctgcctcaaaaactcagaggaaagccccttggagctggactcagacctctgaggaggaggctctggccagctgccgctggtatctctgtggggaacatactaagctggtctgggagactgagggaagaatcctgagaactggaat

SEQ ID NO: 197743 - DNA, 413 bp, Homo sapiens
aatcagaaaccaaatcggcttttttgactgcgaactgattacaaggaatgggtattggagaaccaaaatgacaaaagagtaaggctgagaaaacatcgaggcaggaactacaagaaacagctagcacttctagggtaggggtaacaagggaggaggtggatttattagaacctagaagctggtgtggctgcttcagaatctcagagatagggctcagcccagccaggatccagacctcaaggagagggtcaacttgactggggctgctgcctcaaaaactcagaggaaagccccttggagctggactcagacctctgaggaggaggctctggccagctgccgctggtatctctgtggggaacayactaagctggtctgggagactgagggaagaatcctgagaactggaattc

SEQ ID NO: 197744 - DNA, 621 bp, Homo sapiens
catatatccactgctgaagtatcatatagaatactttcactgctttattattatttttcaatatgtaaaaatatatgtatttatttactggcatataaggcatgccagttctacaaggaagttttgggggaaaacactgaagtagttttatcctatttttttgttttgtttctgtttctttgttttttaaattgytttaatgattttccaaaatggagctgctggaggtcctgaaattgcataactctgcttactctcctctctgttgactttatttcacttacctgctagtcactccatttttgtcactgggaatgatgctcattagagtctatatacacacacagaagctactggagtgcactttgcagtttagccatgtcagagcctagacaacccctgacacccccactagagccctctgaaatctgtagacttctcctaccttcaactcttgctcacagcagctccattcacttagaatgtccttctccctccctctttacctgagtttttccccgtgcatttttcaggattcactaattggcaccttttctagtcagtcttttttaaaacaaatttttttttgagacagggtttcactctgtcatgcaagctgga

SEQ ID NO: 197745 - DNA, 610 bp, Homo sapiens
agatggaacacatttttaattatgcaaaatttgctgtgtaatctcaaaaatatagcagtggcttaatacataaacattcaggtcaaatatatttattctgggaccaccttaggatttttgcatcattgccagatgggttgcaagctcttataattgaagattttgtttcctttccttgttctttgcgktaaaagtaattagtaatgaaatagcagtgtttaccctataattcacgagtgaacagagcaagtattaacctgccagtgaagtgggttttaataactcacaacataatatccaaaccctggtggcagaggacaatgtttagagggtggtaatttagagattagtatacgtcttagacactgtttataaacatgctttagttttctcttgggaaaacagcttttacttaaatggttttaacactgaagaaaaacattatatatatatacgtgcgtgtgtatatatgtgtgtgtatatatatatgtatatatatgtagtgctattagtgctatttacactgaagtacaaaatagcaaaggggacaatttggtattagtattagttaaacttttgaagttgacatataacaatagagtaaaagctt

SEQ ID NO: 197746 - DNA, 610 bp, Homo sapiens
agatggaacacatttttaattatgcaaaatttgctgtgtaatctcaaaaatatagcagtggcttaatacataaacattcaggtcaaatatatttattctgggaccaccttaggatttttgcatcattgccagatgggttgcaagctcttataattgaagattttgtttcctttccttgttctttgcggtaaaagtaattagtaatgaaatagcagtgtttaccctataattcacgagtgaacagagcaagtattaacctgccartgaagtgggttttaataactcacaacataatatccaaaccctggtggcagaggacaatgtttagagggtggtaatttagagattagtatacgtcttagacactgtttataaacatgctttagttttctcttgggaaaacagcttttacttaaatggttttaacactgaagaaaaacattatatatatatacgtgcgtgtgtatatatgtgtgtgtatatatatatgtatatatatgtagtgctattagtgctatttacactgaagtacaaaatagcaaaggggacaatttggtattagtattagttaaacttttgaagttgacatataacaatagagtaaaagctt

SEQ ID NO: 197747 - DNA, 608 bp, Homo sapiens
agatggaacacatttttaattatgcaaaatttgctgtgtaatctcaaaaatatagcagtggcttaatacataaacattcaggtcaaatatatttattctgggaccaccttaggatttttgcatcattgccagatgggttgcaagctcttataattgaagattttgtttcctttccttgttctttgcggtaaaagtaattagtaatgaaatagcagtgtttaccctataattcacgagtgaacagagcaagtattaacctgccagtgaagtgggttttaataactcacaacataatatccaaaccctggtggcagaggacaatgtttagagggtgrtaatttagagattagtatacgtcttagacactgtttataaacatgctttagttttctcttgggaaaacagcttttacttaaatggttttaacactgaagaaaaacattatatatatatacgtgcgtgtgtatatatgtgtgtgtatatatatatgtatatatatgtagtgctattagtgctatttacactgaagtacaaaatagcaaaggggacaatttggtattagtattagttaaacttttgaagttgacatataacaatagagtaaaagc

SEQ ID NO: 197748 - DNA, 610 bp, Homo sapiens
agatggaacacatttttaattatgcaaaatttgctgtgtaatctcaaaaatatagcagtggcttaatacataaacattcaggtcaaatatatttattctgggaccaccttaggatttttgcatcattgccagatgggttgcaagctcttataattgaagattttgtttcctttccttgttctttgcggtaaaagtaattagtaatgaaatagcagtgtttaccctataattcacgagtgaacagagcaagtattaacctgccagtgaagtgggttttaataactcacaacataatatccaaaccctggtggcagaggacaatgtttagagggtggtaatttagagattagtatacgtcttagacactgtttataaacrtgctttagttttctcttgggaaaacagcttttacttaaatggttttaacactgaagaaaaacattatatatatatacgtgcgtgtgtatatatgtgtgtgtatatatatatgtatatatatgtagtgctattagtgctatttacactgaagtacaaaatagcaaaggggacaatttggtattagtattagttaaacttttgaagttgacatataacaatagagtaaaagctt

SEQ ID NO: 197749 - DNA, 610 bp, Homo sapiens
agatggaacacatttttaattatgcaaaatttgctgtgtaatctcaaaaatatagcagtggcttaatacataaacattcaggtcaaatatatttattctgggaccaccttaggatttttgcatcattgccagatgggttgcaagctcttataattgaagattttgtttcctttccttgttctttgcggtaaaagtaattagtaatgaaatagcagtgtttaccctataattcacgagtgaacagagcaagtattaacctgccagtgaagtgggttttaataactcacaacataatatccaaaccctggtggcagaggacaatgtttagagggtggtaatttagagattagtatacgtcttagacactgtttataaacatgctttagttttctcttgggaaaacagcttttacttaaatggttttaacactgaagaaaaacattatatatatatacgtgcgtgtgtatatatgtgtgtgtatatatatatgtatatatatgtagtgytattagtgctatttacactgaagtacaaaatagcaaaggggacaatttggtattagtattagttaaacttttgaagttgacatataacaatagagtaaaagctt

SEQ ID NO: 197750 - DNA, 360 bp, Homo sapiens
cttttgaaaatgtccccgtatgccctagaaagtcatcctagcaatatttctcttgttccaatctggctttgactgaaagtcgatccttcaggtggctgagttctgaattggagaccccccgcgtggaggccagtcccgggtagggagtagctccgaaatgcatcccaggrcactgaaggggagtgccggatctactttgggttctcactgtggtttgagacactacatgggcttctttagctaacagccgaggaagggcctctactccttcatccttacccacatcaaatgctaattctgatgtgcatccccatcagatttggaaagctgagtggcgttttgcggttttaaaaagaattc

SEQ ID NO: 197751 - DNA, 360 bp, Homo sapiens
cttttgaaaatgtccccgtatgccctagaaagtcatcctagcaatatttctcttgttccaatctggctttgactgaaagtcgatccttcaggtggctgagttctgaattggagaccccccgcgtggaggccagtcccgggtagggagtagctccgaaatgcatcccagggcactgaaggggagtgccggatctactttgggttctcactgtggkttgagacactacatgggcttctttagctaacagccgaggaagggcctctactccttcatccttacccacatcaaatgctaattctgatgtgcatccccatcagatttggaaagctgagtggcgttttgcggttttaaaaagaattc

SEQ ID NO: 197752 - DNA, 441 bp, Homo sapiens
agaattcttctattccccttgattgttttttacatttttattttatgagtgttatactatttctttattcagaaagaatggcccaacttgagaaaatgtacaccatcttttgaaacttaattagattaaatcgtttatgtctttgtgtaaaacatatatactttcatgcctttatggtgamagttacagaaagttcattttggggaaatgtaaaacagataaaactatctggttcttactattaatacatttatttgtttaatagcaacaaatagagcggcagttaaaatgcttggcatttcgaaaccctggaccacaggtagcagactttaatcctgaaacaaggcagcagaaaaagaaagcccggatgtcaaagatgaatgaatatttttctaccaaatacaagtaagattctgacttattgtatttgatctgtgggat

SEQ ID NO: 197753 - DNA, 373 bp, Homo sapiens
gtgggtaataacaaactcctctgagctaaaggagcatgttctacccaatgcaaggaagctaagaaccttgataaaaggttacaggaactgccaactagaataaccagtttatagaagaacataaatgacctgatggagctgaaaaacacagcatgagaactttgtgaagcatacacaagtatcaatagctgaatcaatcaagcaggagaaaggatatcagagattggagatcaacttaatgaaataaagcatgaagacaagattagagaaaaaagaatgaaaaggaacgaamaaagcctccaagaaatgtaggactatgtgaaaagaccaaacgtatgcttgattggtgtacctgaaagtgatggggagaatg

SEQ ID NO: 197754 - DNA, 498 bp, Homo sapiens
atttggatttttaaaaatccttggctcatcacagtagagcacattgttagtctttcagcagttcatatgygttagttatacctccttcaccagattctaatttgtggggagcaggatcatattttttgtgtatcttatataagcctaccacattggtgtgcttaaaatagatcctcataaattcctgttgattaaaaataatacttgtgaaataaaagtttaaatagttttgtaacttcatgagcattttaatgaacatattaggaggacaagctaccagttatctactacagccttacatacattatagatcacaaagataaatgtggttctaatttttggtgggtgttcagtagaagaaaaggatcattgagtaggacagcatagcatggtgttccagaataatgtaagaaacagaacaggtatcagtgttaaaattttttacaacttttaatcatatattatgtaggaaattggtagataaggtaattttgagaa

SEQ ID NO: 197755 - DNA, 434 bp, Homo sapiens
tgcgtataaattagctcatacagtgttttgtctttctgtgcctggcttatttcacttagcataacaccctccaggwtcatccattttgtcacaaatggcagtgttttctttttaaaggttgaataatattccattcattatctgttcatttgttgacagacacttaggttgtttccttatcttggccattgtgaataatactgcagtgaacatgagggtgcagatatctcttcaactgatttcatttcctttgcgtataaaccaggagtgggattgttggattgtatgatagttttatttttaatgttttaaggaacctccatactgtttttcataaaggctgtaccaatttacattcccaccaacactgtacaatggtttctttttctctgctgtcttcctaacacttgctgtctcttgtctttttgataata

SEQ ID NO: 197756 - DNA, 408 bp, Homo sapiens
attcaggacttttaggtaatttctcattatccaccctcgcagcacctcctctcccttctgagtctccattgtctgtcattccactttttacatccatgtgtacacattatttagctcccacttatgagtaagaatatgcagtatttgtctttctgtgtctgacttgtttcacttaagataatggcctccagtttcatccaagttgctgcaaaagatatgattctgttcttttttatggctsaatagtgttccatgtctatatatacacaccatattttctttatccagtcatccaatgatggacacttaggttgatcccatattgttgttattatgaatactgtgataaacaggagtgcaagtacctttttagtacactgatttcttttcctctgggtagatgcccca

SEQ ID NO: 197757 - DNA, 420 bp, Homo sapiens
caacatcttgcacaatattattatattttcatattttccctatttatctctctgttcatctctgagattggtaacttcctgagggctgcatctatgcactttgtaccagcaagaaatactctgaactgcaaataacagggaatctaacagaaatggacttaaacaatgaggaaattccttttatcgcataataagaagctcagagggaaggtggcaccagggttgatcaatacagtgctcaatgttgctatcaagactctgatgtgctttcccagtcctcatactcactaaccttgtgtcccaggtgtcacatctggccacaacaaggataaagggaaggagggagcagctgttcctataggtgccttttargattgcacattttcccaagaagcacctctcccctctcacatctcactg

SEQ ID NO: 197758 - DNA, 520 bp, Homo sapiens
tggtaacttcctgagggctgcatctatgcactttgtaccagcaagaaatactctgaactgcaaataacagggaatctaacagaaatggacttaaacaatgaggaaattccttttatcgcataataagaagctcagagggaaggtggcaccagggttgatcaatacagtgctcaatgttgctatcaagactctgatgtgctttcccagtcctcatactcactaaccttgtgtcccaggtgtcacatctggccacaacaaggataaagggaaggagggagcagctgttcctataggtgccttttaggattgcacattttcccaagaagcacctctcccctctcacatctcactggacagaacaacatcacatgctttcctgaagccagtcaccarcaagggaatagaattttccattggactgacttagacatatccgccgagttgggatttgggtcatcatcagtgaggaagacagacatgaacaaaataaatgttccattagcaaggttgggaatagcat

SEQ ID NO: 197759 - DNA, 610 bp, Homo sapiens
acagtttttaatgacaaataataatgtatacatttagggtacaatatgatacttgatatatatctccacgtggaatgatgaactcaaactargtagcatatccatcacctcatatacttatttttgtgatgggaacatttaaaatttattattttaccaattttgaaatatataagaattattaactacaatcgccattctgtgcaatggaggcctaagctttagtgatgtatgttgctttaaatgagctactttcagtttaatggaactctcctgtactggccagctattcaacaaaataaacaaatatgtacatagcaccatctcataggttgtgtattcctcacattctaacacctgtataagaaatacacacggactaacaagcagcacgtattactacagtttcattcatttccaaaatttcaatcacatactatttcttatcctctccaaaatccataaaaacacacactggaattattacacttaaatgctttcattggttaaaaaaaagaaacgttctatattttctatctgactcttaaagcttatccaataaattcctcacagtactttttctatgtgaagttgggagataaatagtttg

SEQ ID NO: 197760 - DNA, 285 bp, Homo sapiens
aaacagcaacagcaaccaaactcagctaccacccaccgttcccctgagtaaagcaaaggaaataaaatcattccaatccacatcttattctactcacagatattttctaagttattcacactgaaatgagactattcttccaatgcttataccagaatcagtgcttacccgtgagagaaacaaatctgttggaagacttggttactgaatattggaagaaggggaatttcargcattttcccgtccccctgtcacagatgcctgactggcagttgcaggtctctc

SEQ ID NO: 197761 - DNA, 418 bp, Homo sapiens
gaattcagacttcagtttagctaaggaggtggcatcccagaactcaagtaattccaggtaccctgtgggcagaaaatttgacctgagtagcacagattacagttgaaggatatctagaaattgaaaggtcagaaggaataatggtctgcttgggttgtttttggtcttaacatgtcccagtggagacaaaaataaccaaaacatttcaaaggcaataactagcckagtaaattagtaaaagacgaaagaaacccagacattttttcagcatccctcccttagtgagaatccaccctccatacctctcatttgtacctcatagccttctttgtgtgagtcatttaggcacgtgcccacctttctgttagagcattcatcctgaagatttttatgtcatccttctcctacaaagttttgg

SEQ ID NO: 197762 - DNA, 486 bp, Homo sapiens
tatattggtatttactatattagaattaggctgggcacggtggctcatgcctgtaatcccagcactttgggaggccaaggcgggtggatcacctgaggtcaggagtttgagaccagcctggccaacatggtgaaactgtgtctctactaaaaatacaaaaattagccagaaggtggcagctgcctgtaatcccagctactcgggtggctgaggcagggaaaactgcttgacctaggaggcggaggttgcagtgagccgagattgtgccactgcactccagcctgggcaacagagtgagactccgactcaaaaagaaagaataaaactattacacrttaaccaaaaatatgcttatgaaaaattagtttcaaaaacagtgagatgagaggcattgttttacatttttacaaatctttttaatgtcttaagaatattctaaaatttgcttttgcattcagactgttgcagtaaattatttggattaaa

SEQ ID NO: 197763 - DNA, 442 bp, Homo sapiens
tttcaattaacttcaacagagctttattgagaatctaccatgtaccaggcactatgctacatgctgaacatgcaaatataggaaataccactggcctcacggttatagtcttgtaggggactgggctatgcagaaacaagctgtattgtgatatatgcaataatgcaagtttgtacatattaccttctgagcaaagcagcaaagastgttctttttccataagttgttgactttctgtcttgtgaccctggtaagtaaccatgatcgaactgatcaagaatctgtaacttggccaaaggtaaccacaaaattgtgcaaaactacaggatacatagagtaaatatttttggggtttcattattacagatgacgttgaggagagaaaagttttacatttttacaatcttaggtttaccaatgggctctgggaggcctaatagca

SEQ ID NO: 197764 - DNA, 442 bp, Homo sapiens
tttcaattaacttcaacagagctttattgagaatctaccatgtaccaggcactatgctacatgctgaacatgcaaatataggaaataccactggcctcacggttatagtcttgtaggggactgggctatgcagaaacaagctgtattgtgatatatgcaataatgcaagtttgtacatattaccttctgagcaaagcagcaaagagtgttctttttccataagttgttgactttctgtcwtgtgaccctggtaagtaaccatgatcgaactgatcaagaatctgtaacttggccaaaggtaaccacaaaattgtgcaaaactacaggatacatagagtaaatatttttggggtttcattattacagatgacgttgaggagagaaaagttttacatttttacaatcttaggtttaccaatgggctctgggaggcctaatagca

SEQ ID NO: 197765 - DNA, 442 bp, Homo sapiens
tttcaattaacttcaacagagctttattgagaatctaccatgtaccaggcactatgctacatgctgaacatgcaaatataggaaataccactggcctcacggttatagtcttgtaggggactgggctatgcagaaacaagctgtattgtgatatatgcaataatgcaagtttgtacatattaccttctgagcaaagcagcaaagagtgttctttttccataagttgttgactttctgtcttgtgaccctggtaagtaaccatgatcgaactgatcaagaatctgtaacttggycaaaggtaaccacaaaattgtgcaaaactacaggatacatagagtaaatatttttggggtttcattattacagatgacgttgaggagagaaaagttttacatttttacaatcttaggtttaccaatgggctctgggaggcctaatagca

SEQ ID NO: 197766 - DNA, 443 bp, Homo sapiens
tttcaattaacttcaacagagctttattgagaatctaccatgtaccaggcactatgctacatgctgaacatgcaaatataggaaataccactggcctcacggttatagtcttgtaggggactgggctatgcagaaacaagctgtattgtgatatatgcaataatgcaagtttgtacatattaccttctgagcaaagcagcaaagagtgttctttttccataagttgttgactttctgtcttgtgaccctggtaagtaaccatgatcgaactgatcaagaatctgtaacttggccaaaggtaaccacaaaattgtgcaaaactacaggatacatagagtaaatatttttggggtttcattattacagatgacgttgaggagagaaaagttttacatttttacaatcttaggtttaccaatgggcyctgggaggcctaatagcag

SEQ ID NO: 197767 - DNA, 234 bp, Homo sapiens
ctgtcatgagacaatactagagggatgatgcraaaccattagaaaccacccccgtgatccaatcacctcccgccaggccccaccttcaacatgtggggattacaattccacatgagatttgggtggggacacagagccaaaccatatcactagattatatggtaatcctagctttaattttttgaggaacctccatattgttttccataatggcaggatcattttatattccac

SEQ ID NO: 197768 - DNA, 234 bp, Homo sapiens
ctgtcatgagacaatactagagggatgatgcgaaaccattagaaaccacccccgtgatccaatcacctccygccaggccccaccttcaacatgtggggattacaattccacatgagatttgggtggggacacagagccaaaccatatcactagattatatggtaatcctagctttaattttttgaggaacctccatattgttttccataatggcaggatcattttatattccac

SEQ ID NO: 197769 - DNA, 234 bp, Homo sapiens
ctgtcatgagacaatactagagggatgatgcgaaaccattagaaaccacccccgtgatccaatcacctcccgccaggccccacyttcaacatgtggggattacaattccacatgagatttgggtggggacacagagccaaaccatatcactagattatatggtaatcctagctttaattttttgaggaacctccatattgttttccataatggcaggatcattttatattccac

SEQ ID NO: 197770 - DNA, 234 bp, Homo sapiens
ctgtcatgagacaatactagagggatgatgcgaaaccattagaaaccacccccgtgatccaatcacctcccgccaggccccaccttcaacaygtggggattacaattccacatgagatttgggtggggacacagagccaaaccatatcactagattatatggtaatcctagctttaattttttgaggaacctccatattgttttccataatggcaggatcattttatattccac

SEQ ID NO: 197771 - DNA, 614 bp, Homo sapiens
cactgcactccagcctggatgactgagtgagaccctgtatcaacaacaacaaaaagacctcaaagtgtgtggttttggtcacttgagaaaaaaatgatttgggcagagaaggtagaaagaataattgggttcatgtttttcactacttatttattatctccatatagaaggccaaactcacccccaaaatttttttgagtaaatttttttacctgttcatttttccaccttttatgcacaataaaattcactctctcgtataccaatctaaaaacagctgtgtgggccaggtgagtggctaaagcccgcaatcccagcactttaggaggcggackgatcatttgaggtcaggagttcaaaaccagcctggccaaaatggtgaaaccccgtctctactaaaagtacaaaaattaaacaggtcgtggtgacacatgcttgcaaatcccagctactcaggaagctgaggcaggagaatcatttgaactcaggaagtggaggttgcagtgagccgagatcatgccactgcactccagactgggcgacagggtgagactctgtctcaaaaaaaataaataacagttgtgtgatcacctccacaatcaagatacagagaa

SEQ ID NO: 197772 - DNA, 634 bp, Homo sapiens
tcgccccaccagctagagataattactaataatctgatatatttagaggttattacctgttaattcagaaatactactttagatatgaagtcttttcaaccctgcttgatggctaaacagcacaaagtgatataaaggacagtctaacagcaatcctgaggaggctaaactcctatccacctgctgcctaacactgggcaggcttacatgcctgctccatcattctgatttcaaaaccactactgctccatcaggccagcatcacttcaacaaatacataaacatgcatctttctggtattagagattaagaacttgcctgctaaatactgcaatgcrcaatgccaggatagctcataaatgggaagtacttcaaacctctttgaaagcaacacaaatataactggggtaagatgtctttctcagagttatgaagatcttttaaactccttatcttgaaccgtaagaaaatcacaaattaatttttgacaaagtgttttcaaattaaataaatgctgctctacaacatggatgaacttggagggcattatactaagtgaaatagacacagagaaaactattgcatgatttttacatgttctctaataaataaaaacaagagagtagaaaggtgg

SEQ ID NO: 197773 - DNA, 634 bp, Homo sapiens
tcgccccaccagctagagataattactaataatctgatatatttagaggttattacctgttaattcagaaatactactttagatatgaagtcttttcaaccctgcttgatggctaaacagcacaaagtgatataaaggacagtctaacagcaatcctgaggaggctaaactcctatccacctgctgcctaacactgggcaggcttacatgcctgctccatcattctgatttcaaaaccactactgctccatcaggccagcatcacttcaacaaatacataaacatgcatctttctggtattagagattaagaacttgcctgctaaatactgcaatgcgcaatgccaggatagctcataaatgggaagtacttcaaacctctttgaaagcaacacaaatataactggggtaagatgtctttctcagagttatgaagatcttttaaactccttatcttgaaccgtaagaaaatcacaaattaatttttgacaaagtgttttcaaattaaataaatgctgctctacaacatggatgaacttggagggcattatactaagtgaaayagacacagagaaaactattgcatgatttttacatgttctctaataaataaaaacaagagagtagaaaggtgg

SEQ ID NO: 197774 - DNA, 602 bp, Homo sapiens
atcatgatagttgagagagagagcgcgagagtgtgtgtgtgtgtgtgtgtgtgtgtgtgygcttttaaattggagggagcatgtcaggattgttaaattgactcagtttgtcttgtttatctccaaaatatcttctaaatcttttttcacatattaatgtaaacataggatttagtacattaattagtacaatgacagtttaatgctagtttaaaacagttgtctaaatgccacaaaaatcatgtccattataagtcaaacgagaaatgtataagaagttggtgtaattatttaggattggtttcattgtaatgagaccttttcacagtcacttggattcattgtgtaaatatattaaagagtcactcagcttattagaattacattaaagggttctgaattcatgatatggactttgataatatctactaacccaggcagaaactctggaaggagaatgtttaatatttaccagtcttcagcatacatgaaattctacttcccaccctggcaagaaattgaagatttgagtaaataccaaattatcatacaagagaactttactaagtctccttttaagcagcaagatagttgtggtacat

SEQ ID NO: 197775 - DNA, 368 bp, Homo sapiens
cctcgctctctcttgctcctgctcccaccatgtgagatgttttgctcygcatttgtcttctgccatgattggaagcttcctgaggcctccccagaaacagaaaccgctatgcttcctgtacatcctgcagagctgtgagccaattaaaccccttttctttataaattacccagtttatagcagagcaagaacaaactaatacagtatccatctcctcatgtagttaccttctgtgtgtgtgtatagttatcttctgttactttctgtgtgtgtgcggtaagagcacctgaaacctacttctagcaaattcccaatatagtgttactaactatacagaatgattatgatacaacattattaactgtact

SEQ ID NO: 197776 - DNA, 368 bp, Homo sapiens
cctcgctctctcttgctcctgctcccaccatgtgagatgttttgctccgcatttgtcttctgccatgattggaagcttcctgaggcctccccagaaacagaaaccgctatgcttcctgtacatcctgcagagctgtgagccaattaaaccycttttctttataaattacccagtttatagcagagcaagaacaaactaatacagtatccatctcctcatgtagttaccttctgtgtgtgtgtatagttatcttctgttactttctgtgtgtgtgcggtaagagcacctgaaacctacttctagcaaattcccaatatagtgttactaactatacagaatgattatgatacaacattattaactgtact

SEQ ID NO: 197777 - DNA, 549 bp, Homo sapiens
gggaagctctaaatgtccaggtaggagtggctaggctatgtttcaaggagagatgtaacatctggagcccaactcctttctcttccacaaatgtgggttggaatacattttctgctgtgctctgaattgaaacaaggaagaaytgcaagagtaaaaccaagaataaacgcttcagaagcatcttttaagaccatgcagcagcccctgaaaataaaatttggggttattctgcatggggacataaaaacacaaacataaatgccctctgaagacaaacatctccaaagtaatataatgaatagggagtgcaaaagtaagagaaggaacaaatctcggcctcaacacatggcaactttgctgtaaattataacaaagtgtgttagttttagatttgtttcactaattcttttaggaactaaaaaagttgccatggtctctttgccaccatctctccttgaaacatagcttcccatatttcgggaatggaaggtgcatgggtcccaccaggcaaggaggtccttcccttcttttgccatgggtgtggatgct

SEQ ID NO: 197778 - DNA, 531 bp, Homo sapiens
ccttcagtcttgagtcagagggacagagctaggtggagtttcggcagagctcaggcttgcgygcagaccctggagccttagatacttccgctttccagcaaaagcagctgcagctctggcaaagtgggaggttagactcccacacatatttctaggaaagagcctgaatcccgggagctgagcagcaacagcccgaagatcccacttccacagcatctcacaagataagacccactggcttggaattccagccagctaccaatagctgcattgcagccccataaaaagaagctcggcaagggggtgacatctttgctgttcggatgcgttagtcattccagctttcaggctttggagagtctgagccaatccagggtggaagggatcccccagcacagcacagctgctctaccaaaacgtggccaggctgctgatttaagtaggtgcccgatcccattcctcctcactgggtaggaccttccaactgggacctccagttgcccggctcaagctctccacggacagagatct

SEQ ID NO: 197779 - DNA, 507 bp, Homo sapiens
tcagagggacagagctaggtggagtttcggcagagctcaggcttgcgcgcagaccctggagccttagatacttccgctttccagcaaaagyagctgcagctctggcaaagtgggaggttagactcccacacatatttctaggaaagagcctgaatcccgggagctgagcagcaacagcccgaagatcccacttccacagcatctcacaagataagacccactggcttggaattccagccagctaccaatagctgcattgcagccccataaaaagaagctcggcaagggggtgacatctttgctgttcggatgcgttagtcattccagctttcaggctttggagagtctgagccaatccagggtggaagggatcccccagcacagcacagctgctctaccaaaacgtggccaggctgctgatttaagtaggtgcccgatcccattcctcctcactgggtaggaccttccaactgggacctccagttgcccggctcaagctctccacgg

SEQ ID NO: 197780 - DNA, 516 bp, Homo sapiens
cttcagtcttgagtcagagggacagagctaggtggagtttcggcagagctcaggcttgcgcgcagaccctggagccttagatacttccgctttccagcaaaagcagctgcagctctggcaaagtgggaggttagactcccacacatatttctaggaaagagcctgaatcccgggagctgagcagcaacagcccgaagatccyacttccacagcatctcacaagataagacccactggcttggaattccagccagctaccaatagctgcattgcagccccataaaaagaagctcggcaagggggtgacatctttgctgttcggatgcgttagtcattccagctttcaggctttggagagtctgagccaatccagggtggaagggatcccccagcacagcacagctgctctaccaaaacgtggccaggctgctgatttaagtaggtgcccgatcccattcctcctcactgggtaggaccttccaactgggacctccagttgcccggctcaagctctcc

SEQ ID NO: 197781 - DNA, 564 bp, Homo sapiens
aaaaaaaaaaacccaatagtttaggctctcataaaataggttattctgagggcaggccttgttaagaagaacaaaatcccctggcatttttcaaaatggttacttcctccttcccaggctggaagcwtgagataatttttcaccattattcactgtgaagacctggttgagctcctggaggtaaaactcacaaaaatacaggagatctctctctaatcctcagtctccctagaattttaactctcagacttgtccacactgagcctccaacaatttttcaattataatttaggttttcctaccctagcactggttcccacagtttttctgctctaaggtttttgctccaattaaattaagattctcaatatttacctggagagaacattctgtccaattttgagagcaatgattttccctgtgacctcacttctcttttggatctaaggagagttaagggttcttgattttttcagtttgttcagccttttacttgctgttagtatggagtgatgacttctagctccttagaggacagaatggaaacagaaagacttgaatatg

SEQ ID NO: 197782 - DNA, 584 bp, Homo sapiens
caaggggtggccaggcaccaaaacagarcagcaaagttgtcctacaaatatgtgttactagacgagaatctagctcaaaatcctcccactttggcactggcccctgcattgccagtgtttcctaccatcctgtttcgctaaattcccagccctttgggacatggcatttgtttcaattgatgctctgtttttcatcatgaatacatgattttattctgagcatgatttcaatttgattgaagctctgtatagttgctggaaacttttcttcagtcggctttgggacttctccacagccagactacccaagccccacactgttcccttctcatttcaatactggtctcgccagacagaaacacaaggtctcctatgacagctcaccaggtctttttctatgtggcccaagggtgaggccaaggaccacactcgataaatactttttagattaacgaaacatccatgagttagtacctaaagggaagagaaaagtcacccataactttaagtggatatatttcttacatagttggcttccaaaccaaaaagaggcagctattcattctgacccttctccaactctc

SEQ ID NO: 197783 - DNA, 603 bp, Homo sapiens
aagcttaatcttacagctaccaaggggtggccaggcaccaaaacagaacagcaaagttgtcctacaaatatgtgttactagacgagaatctagctcaaaatcctcccactttggcactggcccctgcattgccagtgtttcctaccatcctgtttcgctaaattcccagccctttgggacatggcatttgtttcaattgatgctctgtttttcatcatgaatacatgattttattctgagcatgatttcaatttgattgaagctctgtatagttgctggaaacttttcttcagtcggctttgggacttcyccacagccagactacccaagccccacactgttcccttctcatttcaatactggtctcgccagacagaaacacaaggtctcctatgacagctcaccaggtctttttctatgtggcccaagggtgaggccaaggaccacactcgataaatactttttagattaacgaaacatccatgagttagtacctaaagggaagagaaaagtcacccataactttaagtggatatatttcttacatagttggcttccaaaccaaaaagaggcagctattcattctgacccttctccaactct

SEQ ID NO: 197784 - DNA, 604 bp, Homo sapiens
aagcttaatcttacagctaccaaggggtggccaggcaccaaaacagaacagcaaagttgtcctacaaatatgtgttactagacgagaatctagctcaaaatcctcccactttggcactggcccctgcattgccagtgtttcctaccatcctgtttcgctaaattcccagccctttgggacatggcatttgtttcaattgatgctctgtttttcatcatgaatacatgattttattctgagcatgatttcaatttgattgaagctctgtatagttgctggaaacttttcttcagtcggctttgggacttctccacagccagactacccaagccccacactgttcccttctcatttcaatactggtctcgccrgacagaaacacaaggtctcctatgacagctcaccaggtctttttctatgtggcccaagggtgaggccaaggaccacactcgataaatactttttagattaacgaaacatccatgagttagtacctaaagggaagagaaaagtcacccataactttaagtggatatatttcttacatagttggcttccaaaccaaaaagaggcagctattcattctgacccttctccaactctc

SEQ ID NO: 197785 - DNA, 434 bp, Homo sapiens
actggtctattctaacagttaaatcgactctttttgaatataaatttctatgtagacctagacaaaagcataacagagcagaagtgtccgtaatccctgtacatcctcaaatcacastgctttaactgctgacaaagacaaatgtttactatggtctagcgcggagaagccaatacggtgagcaaaatgctatctcgcctcacacatcaacacacgtgccagacagattctgactgcaaagtctgttattggtgatgagagaggcagagagggcacagctggatatttcagatccacagctgagctggcagcagtgggagttcaagccatcttctcactttaaaagctggaatgaatctgtgagagttatttaaaggtgtgctttattaaagaggcactttctgactactgtcaaacttcacgagcaaaagctg

SEQ ID NO: 197786 - DNA, 610 bp, Homo sapiens
atgatggaatattacacagcaataaagacgaataaaccatagcctcagagatgagtatggatgaatctcaaaataataatgaacaaaaatagaagaccacagaagaatgcatttagcatgattcccaatttatataaagttaaaaatataagatggctattacatatattatttggagatgtatatatgggtggcagaagtattgaaaagcaaaaaaaaaraaacaggcaacacaaaattcaaggcagtggttacttctaggtgggaggtagaggatgcatgaaaatgaggggctcagagaataatacagcacagggagttttctatttctatttcttaatgtgggtagtggagacattgccatttgctctaatactactctttaaactacatacacatgttccatacattatacattttttatatatcacagaaaaggaagaaggaagaaaggaaagaaagggaaagaaggaaaggaggagggagagaggaggataggaaaaggaaagataaaaaaggataattataaaatccttggaatgctaaggaaaagaagcttgccatgggactctcttttaaatgaaagtacacatacttctacaaacactac

SEQ ID NO: 197787 - DNA, 645 bp, Homo sapiens
  misc_feature (1)...(645): n = A,T,C or G
ctctaatgattattcagtcttctcttcaatgaaatatgctaacgcctgatgagagagcatctttctttcatagcacagttaacaactgtaattcttcaaccagctgttctctaaggattcccctgacaagctcttattttcattgcattatttcttgttctccttgtctaaactgtacacaagttacccagattttccactctggcccctttcaataaagaacgcttggcttgacaaataattagtcataaccagtattaaaaaataaatattacaaattctacatgctaaaattatattgttctatgtgacttctaaattayttaacagttcatatgtagaaccttcttcccataaggctccantggtttaacttctcatttatgaaaacaatcccagttattttatggagctagttaccatgtaaacattatagcccataatcttatgtcaggtgtagcatgaactaaaactcaatctatgtatactgtgtttagggcaactgaatccagatacttgaacatattaagatataagcctaaataaaacaaaattaaaccctacttgactcttctcctttgtaacctagtaaaaaacttgtaaattttttttttgttgtcaaatatttatatgtgtaccaattta

SEQ ID NO: 197788 - DNA, 615 bp, Homo sapiens
  misc_feature (1)...(615): n = A,T,C or G
gatgtagtcaaatggttttagccaaatttgcaatgagacctagggaggaaaatatatcaagaaagaacaaatttaagaaaggatgtgttgctgttggggaagccaggatttcaatgtggacttcaggagacatttacttggatgcatcttaattcttgaagcagaaaggcccaaatttgccctccacgctgaaacagaagtgactgttaagtcaaacataactttaggatatccatccttgaaaatattttgtttgacgtgctaaagatnatataagacagttaagcttctatattcattaaacaatttgtttattgaatatgaatttcaaatgtagaagcaatatgtgaaagtaacaggaactctcattcattgctgggaggaatgcaaactagtacagccactttggaagacagtttggcagtttcttacagaactaaacgctcttaccatacaatccagcaatcacactcctaggtawttttccaaatgagttgaaaacatacgtccacataaaaacctgcccatgaatgtttatatcaaatcataattgccaaaacctgaaagcaaccaagatggccttcaataggtgaatggataaacaaactgtggtac

SEQ ID NO: 197789 - DNA, 593 bp, Homo sapiens
tgatatatttgtgagaatttattaatttattctaggctattcaatttgctggtgtgtaattgtgcattgtagcctcttatgatctgttgaatttctgggatatcacttgtaatgtccattcttttatttctcattttatttatttgtgtcttgtctcttttyttccccctgtggtatctataaaagtcagggagctcaaagtgcataagctattttcaggagggattggtaggcctggagttcttgctggagggggaatactcaggaagtggtatactcagaagccgaatactcaggaagtgccaatctgtgtttagaagctgccagggggctgcggtttgtctgctccttcaactctccaatgcaagttagttagaagccaggctgtcaagttgacactggaagagtgtgtcataaactccttctaggcagaaaaaggaagctgcatgtttaagccccttttctgcgttgcttccagcccctagaagtgcctgtgtgcctacataaaaccgccattgtattctgtggtccatctagagagacacatgggtgcctaatctcctccacactcaaagttggtgaattaagagcca

SEQ ID NO: 197790 - DNA, 592 bp, Homo sapiens
atatccacaatcctgtctcctaggctatagtaatatcctcctaattacactccttgtaattgctcttgcatgacttctagtccattttttatacatcaaggtaatcattttataaagggaacatgatcatgtgatcatgcttaaagcatattacaacccttaaggaaaaagaaaacccaaatctgtttattagcccctcctcatttcttggctaacagttactcacctttcargtctcacatttcctctgggaaacctttcctctctggcagttaaattcctaccaggcattcccaaagcaggctgctttctccattgaaggtggttcttgttaacactgatgattacttattcaatgtttgccttcctgaccagactgtaagctccaagaaggcaggggcttctttagtcttgtcactgctctgttttcagcccttccggcaattcttggtgctcaataaatatttgttgatttgattcattgaattatgtatatacttacagtttatagaaatctgagaattcagaaattctcagatttctgaaacatattctgaaacaataattcagaaaatataaaactggagaattc

SEQ ID NO: 197791 - DNA, 586 bp, Homo sapiens
catatttatatccacaatcctgtctcctaggctatagtaatatcctcctaattacactccttgtaattgctcttgcatgacttctagtccattttttatacatcaaggtaatcattttataaagggaacatgatcatgtgatcatgcttaaagcatattacaacccttaaggaaaaagaaaacccaaatctgtttattagcccctcctcatttcttggctaacagttactcacctttcaggtctcacatttcctctgggaaacctttcctctctggcagttaaattcctaccaggcattcccaaagcaggctgctttctccattgaaggtggttcttgttaacactgatgattacttattcartgtttgccttcctgaccagactgtaagctccaagaaggcaggggcttctttagtcttgtcactgctctgttttcagcccttccggcaattcttggtgctcaataaatatttgttgatttgattcattgaattatgtatatacttacagtttatagaaatctgagaattcagaaattctcagatttctgaaacatattctgaaacaataattcagaaaatataa

SEQ ID NO: 197792 - DNA, 622 bp, Homo sapiens
gacacagtgttttactggaaagatgattgtctacttcagggaatagcctctttggaatgtgaattccatatggttttgtgaatagaagttcaaccatttcagcagcacatgattcagaagaagtcaggtaagcctattaaaccaagtacactgtcaattgcaatggtaaacgtttggtgaacggggaaaagagaaatggccattggtagctcttcaactccaattctggatggcaacttgtaatcaatttataacggaggaactggcaatggagatagttctcccaatccacattacgaaacacaaaatctagtagaacagcttttgaaggcttttagaaataacaagtttttctggggatgttttctgtagattaaggactgggaaactagttagcatcctcagagtygactttggcaagctgaggagccctagcttgtcagggagcttcacccttgcctgcctgagcaggcaatcgctgacttcagtgaggaaatatataatgcctgcagcaggggaagaaccagctattcagtctttctctcttcatccttatttccactcccttttcctttctcaactttctctactgccaagaaaagcatgtgcatgaggcaacaat

SEQ ID NO: 197793 - DNA, 451 bp, Homo sapiens
tgatctagagtatgttgaagaagatggacatgtggtggtacgaaaacaattcccctgtggcctgctggactggktggaaccagaacaggctaaggcatacagttcttgactttggacaatccaagagtgaaccagaatgcagttttccttgagatacctgttttaaaaggtttttcagacaattttgcagaaaggtgcattgattcttaaattctctctgttgagagcatttcagccagaggactttggaactgtgaatatacttcctgaaggggagggagaagggaggaagctcccatgttgtttaaaggctgtaattggagcagcttttggctgcgtaactgtgaactatggccatatataattttttttcattaatttttgaagatacttgtggctggaaaagtgcattccttgttaataaactttttatttattacagcccaagagc

SEQ ID NO: 197794 - DNA, 468 bp, Homo sapiens
tgaattctttaatgaggcaaacctttcatgtttctattcactatcctgtaggtatacctggcagttttgctacagagtgactcaggattaaactmcaaatatcctcaatatagattagtcatagggaagggccagtgactgacaataggcacaagagaagcactaggctttttggttttaaataaataatatactctgagttgaagcaattaaatcttcctccaaatacaactttctacctagatattaaagaaacagaataacagttgagtttgtagaatctgatatatttctctcagattttttctccttcagaggtacacacacatatgcttattttaagtcaatcatcctacaattgctcaagttaaaaccatatagcagaaaacatttggaatttcaattagatatgtcaagattgaagcaactgggtcaattgcttgctgaacaatcatgaacatgacactg

SEQ ID NO: 197795 - DNA, 462 bp, Homo sapiens
cagtgtttcccaaagaggagcttggaagcctctgaatatttctagaggcagcctcggtagttgtttctatgattgtcaacagaaatcaagaaggaagagttaagggaccaaaactgacaaaaacaatttttaaaaatctgtttttttgttgttgttgttatttttttaatcccaagtagctggaattacaggcatgcgccaccactcccagctagtttttgtgtttttagtagagatggggtttcaccatgttgaccaggctggccttaaactcytgacctcaaatgatccacccaccttggcctcccaaagtgctgggattacaggcatgagccaccacgcccagccaaaaatctgatttcttaaggagcaattaaagaaacaattactgaagaggatgactaaaacttgatgtttagagaactattaaagaatttctttttaaaaagcactgtggagcct

SEQ ID NO: 197796 - DNA, 507 bp, Homo sapiens
ttaacatttgcttgagtacacagaaaacaagaacaccatagaaatcctgggtaataaacataagaatctctgactgttccatgctttgtgctcagattgctttactgcrttctcttgtcttgagtagtgtcaggagctcggctcaactggagagagagtgctgaactgcccaggtgttgttggaatactggattaaaggacaatcaaaataaaagtgacagtcaagcttttcatcacttattgcaatagtataaacaagagtctaaaccagagaaagcacctgctccattccattcctctcacagcccccatggaatggcccactagttgaaagtcaagtagaccagcacagagagaggagttgtcctcactgtctgagagctccaaacaaaaggcttgggcagttttatgggcccagggcctagcaggaggcagagggaagggctaggagtgcaaaagcactgagtcagggtggagcaaatcatcttcgagttttcccgataagga

SEQ ID NO: 197797 - DNA, 547 bp, Homo sapiens
ccttcctactggttaccaaattgactccatgatatttagtaattagtctacttaatagaaagcgcatttatttccttttttgttctatagactacaattttggttctgtccacatgatggcaccacaaccccaaaaaaatcatgttctcagtcggaaagaagacaacataagatttacacagcgttaatattttattaaatgcctccatgttgtggcagacagacctgaayttcacatggaatgttcaacagtttatcaaatactgaagtccatttggtaaagatacataccatagtgtatgctaatcaaagaagaaattgacatttaaaaaaaatcatgacaatctattcttcagttttttatcttaggccacaaatgaatacacatacacatacacacatatgtatacatatacagtttattatcaaccataaagacatggtgtgtaaactagctttgataaattctagtaatattttctaaacctgcaagccttctacatcttagagagtaggtttgcacaaatctgggaagcaaaggtcaccc

SEQ ID NO: 197798 - DNA, 590 bp, Homo sapiens
cttggtacatgtccttctaaggataggttagtattccaaatctccagatgaatttaaaattacactagttatggggaaaggaatgtttgaaattggttcttctcaggtttcctgggcattggacatacatccattacatttccaaaaggtagaggaaaaagagatgaatggacaagagtctttattctactcactcaggccacaatttaaagaccacaaaaaagaaagaaaaaatattactttgacttcttccaaactataagagtaggtatttttcacatttgtttatacattctcttctcagtagaacatgggctttccttccaagctgctggagctgagattttccaaagtagaaatttgtagtcagggagcagaatatygaataacgcataaaaaaggatctttctggttgagtttcttttatatagcttgcaaaacggatttgagcacatgtatgtctgttcttggcttagtttatataatcaaagattattgaaagaaaagccattttggcttgctcatctgtctagatggcattacatcttatggaaatgtctggtacaggtcttcaattcctttcctccaat

SEQ ID NO: 197799 - DNA, 499 bp, Homo sapiens
agtttgaaaagaggaaaatgttctggagataaatggaggtgaaggttacacagcaatgtgaatacacttcatgccactgaactgttcactttacagcacctaaaatgatcaattttatgttatgtgtaacttaccatatttttctttttcttttttttttttgaggcagaatctctctctgttgcctcgcttggagtgcaggggcacaatctaggctcactgccacctctgcctcccgggttcaagcgattctcctgcctcagcctcctgagtagctgggattacaagcgcatgctaccacacctggctaatttttttgtatttttaggagagacagggtttcaccatgttggccacaatggtctccatcttctgacctcgtgatctgcccacctcggcctcccaaagtgctaggattacaggcatgagccacygcgcccggccccacatttttcctaatggcaggccctagaatatctgtcctcggagtactgaattc

SEQ ID NO: 197800 - DNA, 643 bp, Homo sapiens
taggctgggaatacgcaggttgttggtttttgagatttccctccctgtgccttcatgccagctgtgaaagagtcaaaaggctcctaactgtcaaaataaaaatgacacttggtcacagaggaaacagggtataggtcaatcacattgatgactttttaactatgagaagccattaatgttactgaataagcaaatctgtttgcataaccagatttttataggctactgggaataaaggttttcctaagtgggtgatttgtacaacgatagcctttgggtctctgatggaacagctctgatgaggaaatgttcctttaattatgcggaaggccaattaccacwttatagccacattgttttgcagattgcatataatttcaccatttccatagcttcagcactataattctggagaaaattcaggcaccaagaagacacttgaggcacattatgctggagacaaagatgttttaacaaattcaatttaagcttcaacattaaagttattttgttgaataaaacataatgcaataatgagcttgtgtatgtcaactctatagtggaggtaataatagctagagagagcatgtcccatctcctctttttaatgctcatttgagtaatacataattctatagagaga

SEQ ID NO: 197801 - DNA, 576 bp, Homo sapiens
acagctatacactgccatttacatgcagacatccacccacagatacacacatccggagaccaagacagaaagcaaactccaccataaaagcacggttccccgaacaggagaaacgcaccattcactcaagggaggtacctatttgtttaattcagcctgtgataggctgttgccaagcccagctctgaaagtcttcccctctaggaaaagagatggattttttctttactcaagaatatagatctaaaaaaaacaaacacttctgcatctcaaagcaggctctacctcctgagctacacatattgatcagcattttattgtcaattttcttttatttgaactggataaaaatataacctaattgtgttcttactgacagtttggaatcagtcacactaaatccaattctctgrgttctcatggttaaggtgtttaatttgggggacaacaaagcaaaagcattggtcatgttttaatataattagtacaggatatatctaaggggttcaagtatcactgtagcaagaagctcattctgcagtaaaagggggattctgccactaggattgagtgagg

SEQ ID NO: 197802 - DNA, 396 bp, Homo sapiens
tggcatttttacttaaggagcataaatacagaaaacttgaagataccagtagtggtttttggcctgatcagcctccatgggtggttgagccctcatcctgtcactcaccaagccccttctattgtcactgtgtgaccttttcccagacccagagaggtggaaacttcctgactgaccaccatggttcataaaagcaatggactggaggcaggggtgccgggactctggctctgctgctcccagcagtggggcctcttcctttctcttstcccagcctgagtcaagcccctgggccctacagacacagtgcatgagcttgggaggagaagggggaatgggagaatcagagagcccagaacacgcatgagggctggttacacccatgggtcactctcc

SEQ ID NO: 197803 - DNA, 534 bp, Homo sapiens
ggtgcagtggctcacacctgtaatcccagcactttgggaggctgaggcgggcagatcacctgatatcagttcaagaccagcttggccaacatggtgaaaccccttctctaccaaaaatataaaatttagccttttggtactctgagcagcaccatggcggttgttaagaacaagtgccttatgaaaggtggcaaaaagggagttaagaagaaagtarttggtccattctctaagaaagatcagtatgatgtgaaagcacctgctatgttcaatataagaaatattggaaagacttggtcaccaggacccaaggaacccaaattgcatctgatggtctcaagggtcttgtgtttgaaatgagtcttgcagatttgcagaatgatgaagttgcatttagaaaattcaagctgattactgaagatgttcagggcaaaaattgcctgactaacttctatggcatgggtcttacctgtgacaaaatatgttccaaggttgaaaaatgttcaacaatgatcgaagctcatgttgatgtca

SEQ ID NO: 197804 - DNA, 516 bp, Homo sapiens
ttggagctttctttaataactgatagagtgtacctgagaatctggctctaactgattcatccaaaagcagtgttatcttgattggtcaagctactttttttctaagcttttctcgtttccaaaattaatattatttattttctgttctttaaagagacaataaagcaagtaactgaacccaatttttggcacatggaaagcccttaatactattggctgtaagtttcttacattttgtaagctcattaggttcaccctcatttatctrgtgtgacatttttgcattaaatttaaccccctttatttgcaaatgcaaaatattatttcatccaattttgaatcccaaatataataaacataaaataacaataatttaacatttttctctaaataattgaaggattcgtttgaatccaaagaacttgcttttgaaatattctttctttacctgtattttataagtaacctctgtatctatgttaaatggatttatctgaatacaagtcacatttgtat

SEQ ID NO: 197805 - DNA, 649 bp, Homo sapiens
agaattgttttcagccttattgaggattaatagacaaaaattgtatatatttagggtatataacttactgttctgatgttttatttttaactttaaaaatagtttaaaatttttgcttttatgagacacataatggaatatgtgcagrtaaataactttggatcgtattttataggataagctgggttaagtaactaaaataatgcccttaaataaacttatagggcagtataattaaacattttaccgtgaaaatctaaaaacctattgttaaattactatgacaggttttaagtgataaagaaaatataaatgctatcaaccttatttgcttccattttaacctcagaaaatatgtgctcttttcctttgtaggttttaaagaaactatcatatgtatacacacacatatacatgtcatgttttaaggcacccaagagaacatatatggctattaaatctgtctttataaaagtgccagttttactgtgctttagagctttaaaacataatacattagtaatatgtattgatttaacagttttctgcataggaaaacaatgtattagaaaagcaaaaaattcaactgaataaatacttgttaaatacaaattgtatatgaagtactgtgataacttcttgcagaggg

SEQ ID NO: 197806 - DNA, 649 bp, Homo sapiens
agaattgttttcagccttattgaggattaatagacaaaaattgtatatatttagggtatataacttactgttctgatgttttatttttaactttaaaaatagtttaaaatttttgcttttatgagacacataatggaatatgtgcaggtaaataactttggatcgtattttataggataagctgggttaagtaactaaaataatgcccttaaataaacttatagggcagtataattaaacattttaccgtgaaaatctaaaaacctattgttaaattactatgacaggttttaagtgataaagaaaatataaatgctatcaaccttatttgcttccattttaacctcagaaaatatgtgctcttttcctttgtaggttttaaagaaactatcatatgtatacacacacatatacatgtcatgttttaaggcacccaagagaacatatatggctattaaatctgtctttataaaagtgccagttttactgtgctttagagctttaaaacataatacattagtaatatgtattgatttaacagttttctgcayaggaaaacaatgtattagaaaagcaaaaaattcaactgaataaatacttgttaaatacaaattgtatatgaagtactgtgataacttcttgcagaggg

SEQ ID NO: 197807 - DNA, 406 bp, Homo sapiens
catctatctaagaaacctgagcaagaaacagaagagactgaataaaaattatctaatattattttcaagtttcaaccagaaaaaataaaataaataacaaaactctataaactttacatagtctattgtattttattaaatattttataattaaaatattatgatatataagaatatttacaaaaaatgtatacaatcccaggtgtaaatttttattccctgaatagaatgraacattttaaaatattatttgtgctatgaatactttccatacatatttcagctgaagaaataatacctgtgtctaagtttctgtctgttagctgggaacagacttcttgcaacaaagactctcacctcattttaaaatcaaataacaaaaaactttctttactgtaatggattc

SEQ ID NO: 197808 - DNA, 613 bp, Homo sapiens
aaagagagactcaatttgcttgggaggaagtaaaagaaaagaatgagagtctatgcctggtaatccagakaattttttcagatttaattcaagaccaccaaggtagtacctctgtgagtctgcaagaaacacagcattattgggttttaggcccaagtctcttcaaataccttgaaagctttcccaagaaggacaggcataaaaaaggccaagttgcgaagactataataaatgcctaactattcaatgcctagaaacagaatatctacaagcatcaaggccatccagaaaaacatgacctcacaaatgaactaaataagtcaccagggaccaatcctgcagaatcagagatatatgaaattttagacagaatattcaaaatagctgttttgaggatactcaaattcaagaaaatacagagaagaaattcagaattttatccaataattttaacaaatggattggaattattttaaaaaattaaggagaaattctagagtagaaaatgcaattgatatactgaagaatgcatcaaaatctcttaatagcagaattaatcaagcagaagaaagaattagtgaacttgaagacaggctatttacaaatacacagt

SEQ ID NO: 197809 - DNA, 613 bp, Homo sapiens
aaagagagactcaatttgcttgggaggaagtaaaagaaaagaatgagagtctatgcctggtaatccagataattttttcagatttaattcaagaccaccaaggtagtacctctgtgagtctgcaagaaacacagcattattgggttttaggcccaagtctcttcaaataccttgaaagctttcccaagaaggacaggcataaaaaaggccaagttgcgaagactataataaatgcctaactattcaatgcctagaaacagaatatctacaagcatcaaggccatccagaaaaacatgacctcacaaatgaactaaataagtcaccagggaccaatcctgcagaatcagagatatatgaaattttagrcagaatattcaaaatagctgttttgaggatactcaaattcaagaaaatacagagaagaaattcagaattttatccaataattttaacaaatggattggaattattttaaaaaattaaggagaaattctagagtagaaaatgcaattgatatactgaagaatgcatcaaaatctcttaatagcagaattaatcaagcagaagaaagaattagtgaacttgaagacaggctatttacaaatacacagt

SEQ ID NO: 197810 - DNA, 613 bp, Homo sapiens
aaagagagactcaatttgcttgggaggaagtaaaagaaaagaatgagagtctatgcctggtaatccagataattttttcagatttaattcaagaccaccaaggtagtacctctgtgagtctgcaagaaacacagcattattgggttttaggcccaagtctcttcaaataccttgaaagctttcccaagaaggacaggcataaaaaaggccaagttgcgaagactataataaatgcctaactattcaatgcctagaaacagaatatctacaagcatcaaggccatccagaaaaacatgacctcacaaatgaactaaataagtcaccagggaccaatcctgcagaatcagagatatatgaaattttagacagaatattcaaaatagctgttttgagkatactcaaattcaagaaaatacagagaagaaattcagaattttatccaataattttaacaaatggattggaattattttaaaaaattaaggagaaattctagagtagaaaatgcaattgatatactgaagaatgcatcaaaatctcttaatagcagaattaatcaagcagaagaaagaattagtgaacttgaagacaggctatttacaaatacacagt

SEQ ID NO: 197811 - DNA, 559 bp, Homo sapiens
caatactatcaaggttctaaaaggaaaaggatggcaaactcttagtagtctaatgtgaatggagtttaattacaaagctaattacttacaaacatatagttttaggggaaccacaaagacactgtagtaacagagctggtaacaataaggtattatcatctcccgatccaaaggaaaaggaaggggaacatatttaagaaatcagatattacaacatatcagaaacatgcagaagacagaagaacagaacattaaatagggtcaggggtcttgagataaatgtaatttttgccaggtgtagaagtcagaagcttaaagcaacttaataggaaggtagacgagaaaataaatactctaacttcatcttctgcctccctacaatctcctaatgaggctttccatagtctgaccccagctgaaaccagagacacagagcactattgatgaaatactacagatcaatttcctgagccggaacccaaggaaaaggcagacaatgagggaaaatagagggacatacaacagatagaamaagcagccacgcttaggttgttcagtg

SEQ ID NO: 197812 - DNA, 414 bp, Homo sapiens
ccctggaaaggaggtgtaacttccaggtgttgccayggcaatggtaaaccgatgtggcacactggtgagtgtgttttatggaaagctgcttctgcccttgacctatgttaggtagtccccagtttggtctggtattcgagctctacctcaggagtagagtactgcctcctagctcaacaggatcagtgttataggttggaaaggtaactgaagcagcaatacagaggttgagagggaaggattacattagagattatgagatagctatactacaatttttatagtcaaggatgattaaggcttggtctggagtattggcaggcagtatgtagtggaaaggatatattggggaggaagtaaagggattgcactgaaaaaatgttaattatccattgaatgtggggtgagggggag

SEQ ID NO: 197813 - DNA, 414 bp, Homo sapiens
ccctggaaaggaggtgtaacttccaggtgttgccatrgcaatggtaaaccgatgtggcacactggtgagtgtgttttatggaaagctgcttctgcccttgacctatgttaggtagtccccagtttggtctggtattcgagctctacctcaggagtagagtactgcctcctagctcaacaggatcagtgttataggttggaaaggtaactgaagcagcaatacagaggttgagagggaaggattacattagagattatgagatagctatactacaatttttatagtcaaggatgattaaggcttggtctggagtattggcaggcagtatgtagtggaaaggatatattggggaggaagtaaagggattgcactgaaaaaatgttaattatccattgaatgtggggtgagggggag

SEQ ID NO: 197814 - DNA, 498 bp, Homo sapiens
acacatagacagacattatataatgataaaatgtttagtccaacaggaaaatatcacaattctaaatatatatgcacctaacactggtggtcccaaattcataaaacaattattactagacctaagaaattagatagcaacagaataatagtgaggaacttcaatactccgacagctctagacaggcaatcaagacagaaagtcaacaaagaaacaattaacttaaactatagtgtagaacaaatggacttaacagatatttataggacattctaccccaaaactgcagaatatacatttttctcatcagcacatggaacattctccaaggtagacaatatgataggccacaaaacaagtcacaataaatttaagacaatcaaaattacatcaagtrctctctcaggccacagtggaataaaattggaaattaactccaaaaggaactcccaaaactatacaaatacatggaaattgaataatctgctcctgaatgat

SEQ ID NO: 197815 - DNA, 212 bp, Homo sapiens
gatcttattttcttcctgaagggcaggcccagttctgcctaaaagaggcaagttttaaataaaaattttgaggctaagtgagaatycactgtgaatagtgaaaaactggcataggcagccgtgtggtcagggtggaagggaagctccaggaagactgcttttgtatttggatggatgcaagtccgtaaagtcagacgcagagctgagagagt

SEQ ID NO: 197816 - DNA, 212 bp, Homo sapiens
gatcttattttcttcctgaagggcaggcccagttctgcctaaaagaggcaagttttaaataaaaattttgaggctaagtgagaatccactgtgaatagtgaaaaactggcataggcagccgtgtggtcagrgtggaagggaagctccaggaagactgcttttgtatttggatggatgcaagtccgtaaagtcagacgcagagctgagagagt

SEQ ID NO: 197817 - DNA, 212 bp, Homo sapiens
gatcttattttcttcctgaagggcaggcccagttctgcctaaaagaggcaagttttaaataaaaattttgaggctaagtgagaatccactgtgaatagtgaaaaactggcataggcagccgtgtggtcagggtsgaagggaagctccaggaagactgcttttgtatttggatggatgcaagtccgtaaagtcagacgcagagctgagagagt

SEQ ID NO: 197818 - DNA, 574 bp, Homo sapiens
tcaccagtaaacccagtcaatgttccattaaatcagaagctgagatttccccttagtcaatttgggttcctcatgccaatgagccaacagtcagctctgagaggctgatctttatgggtctcataagatgggcttccttgccatttggcttccaggtgagtttggctaatgggaggcaccaacagagagtcaaaggatagaaggagagagagattgaagtatttgttcccctatctccctgtctctgctgggtcatgtgttggtggtggctgtattcctctaccaaagactgaaaagctcctgtcaggtggacctctcctataggagaggtctttcctctgacccttcaggcctagaattagtaatggcttcctgctgttgttagagtggttaaccctgcccacccctgtgtgaacagtcccttcatcacactgtctttagtcaccccttttgaatatgtgggccatgctgcccaattccctgactaatgcacatacaagaaagttgaggatttmcaaggaaaatggttactaggaggcagctactaacttgtagctcccactcagacagatgg

SEQ ID NO: 197819 - DNA, 585 bp, Homo sapiens
cagggcaccagcactgagagtttttggaaatacacagaaatttccctgaagatcccctccagtaattaccaacaactttttcttcctccttaaatgaaatctgcttttcctcaatcactaactctcaaaataaatatgaaaccatttttattcaatattttcttgttttacttaatgactgattttattttatgtgtttccccactgcaaatgtacagtattttagcaataatgggatgttagcaccaatctgcagccaaaccacagtttataacttgtttatgtggggaaatgcatttagatctggaaaaactccagtttataagtcagaaactgcctatggtatatgccctgagtttaagtaaaattcagtcagtaaatattttttgagagccttctaggtgamaaggcaccagtccaggggttataatgttctgcaaataaaatacataataacacaaacatacattacatcatctactccttacaacaactttactaggtagatgttactttcctccttgccaataaagaaactgaggcttggagaggaaagataacttgctcaagagcacaatcctagtg

SEQ ID NO: 197820 - DNA, 344 bp, Homo sapiens
ggaccacccataagaacctggagagccttgtcagaagaggggagaagagagatttggaggctcttttgttcttttagtggcgtgcaaataccaacattaaatccatattttcaccattagatataccagcaataaaatccgttgtattaaagcaaatgagcacatttaactcayggacctcactgatgcaagaggttacgtccaaaaaggtacagtgtttatttgaggtattttagagaaaaagaaaacaactgtgtaacttatctttaaatagcagattttaaaaatcaaaaatctgcctataggctaccaaccattgccatttaaaatttgccatctgcagt

SEQ ID NO: 197821 - DNA, 499 bp, Homo sapiens
aaatctaggctggagattaaaattttcatgtcatcaccatgtggatgacagttgaagccatgggagtggaggagttccccaagggagagagtatggaatgagatgctaagaaggccgatgtctaaactcagagaaccctgatggtgatgagatmagcctaggaagaaaagccaaggtaagcaaccagggaggtagaaatagaaccaaaagaaagtagtgggattcaagcaaagagagaatatttaggaaaaaggagtggtcatcgtgtcaaatgtgtcagagggcacaataagataagagttgaaagatatcaatatgatttgcaagaaagaggttgatcactggggaaagcacttccagagaattgatgagggcagaaggtgcgttgcagtgggttgaagagtgaatgggagttgaagtgacggcaaatataaacaactctttcaggatagctcattcctgtccatgtccactgtgccgttttcaaatgtctacctca

SEQ ID NO: 197822 - DNA, 397 bp, Homo sapiens
gcttctcttgtccctgaggtgagtaaaattgctttttccttatatctattccagagggccatctgctctgccccaggagagctttccgtggctccccatggattgtctgaggagaagccaacctcatgtacatcctctgcackttcattagtgacggttacttgaaagtcctatgctgggatgccttttgtttccataggacttcctctaaaaataccacaaaattaggttgtcagggagattatatgaaacccaaatgatacatttggtatttaattctaaaagcacaaccaagtaaaaacagtgtttttagctgcagattttaaatctgctgcatagttactctgttgtctgccaccttcatgatatttaaaaacatcttcccaggcaaggaaca

SEQ ID NO: 197823 - DNA, 572 bp, Homo sapiens
ggggccagccagaggttaaaagcaggtgattgattgaagatggtgcctcatctctttattgctgtgctattttgtgccacattcatagacattaaatggctctagtgttactgcctaaaggaaggtctatccaatgatagcctatgctgttttattccctctctctggaggtcagcatcatgtgggcaaacaagggtgggtttaatgtaattcactgaattccagagactgtctccacattctgatttgtgtacagataatcagagggcagatccacagaaccagctgaaggtgtagctccatgctcttcaatgaataccttttggacctctttggttaaatataaaattagttaaaataatcatttatccactttaaaacttatcaaaaacacattttcaaaaagaaaaaagaattataaattacaaagcattattctcatagagtctactcaaatgtttgtttcrggggatagagagatgagtgttaacaattgtaaaatgtcctcaattcagagatctccatgacaatgaggcaagcatgttgtgtatatctctgcagaaccaaaaaaa

SEQ ID NO: 197824 - DNA, 391 bp, Homo sapiens
tatctacaaaaatattgaaactacacacttttgtttttgttttaactaaggtgtatcacatctacaacatgtaaaatcttagaaatcttatgttacataagcacaaacaatggcttctaatcaagcttcaaataataagacctagtgcttgataattagggtagctatagtttccagtaatcgattatatgtttcaaaatagctagaagagaatacttcaaatgtttctagcataaagaaaagccaatttaaggttatatcacaattccactgattttatctttacaaatcatrtcaatgtaataaattatcacgacttcaaaaatatgtacattatgtattacaaaaataatctaaataaattatacttctcagactttgtgaagaattc

SEQ ID NO: 197825 - DNA, 568 bp, Homo sapiens
attcttattgtttcagtagaagccctggtctacttagaagcaraagtgaagttttttaatctgataaaggttattttcaaaattctacaagtatacatcatgctaatgctgcagtttcaaaaacttacatcctgagatcaaaaactagagtaggatgtcatttatcaccacatctcttcagtattatattgaaggactttgaaagtgggtagagaatcctgaggaagaagagagttggaagattcatcctgcaggataacaagacatattaagacttaatacattgttgtactaccagaaggaaagaaaaaataaaccaatggaatagattagaaaatccagaaacagatgcatatgaatagaattaacttatttacagcaagatatcatactagggaaggtgcagtaagggaaatgtggtcttttcaatatattgcaccagatcacttatatatttatgttctatatttatgtagattaatgaacacgaaaatgtttccacattacagtttagaaatgttaaaagaaattctataatataaataaattatgattctggagttgtaca

SEQ ID NO: 197826 - DNA, 645 bp, Homo sapiens
tcacactgctgataccatcaccttgaggattagaattgcaacatatgtatttttgtggggacataattattcagaccacagcaccttcctcactccaaatcaactgscatgtactgggtttgaacttacgtaactaaaatcctattgaggtgaaagtttcatggtacacaagcaagccaggtgtcccaaaataaattcaagtttccatttcttgggctagagagaatgcttacagatttaacatggcattttttctaggtcccagtattaaggatttttaaatatattgagatccattctcattcattgtcttaagagttatggtaatatatgcaacatatgggagtatgcatgtgtgtgtgagtgtgtgtgtgtgtgtgtgtgtgtgtatttgaggaaagtttatctttcaattatttgctgactatgcatctaacaacaattatctgcatgtttcatatgagaacaaaggaagaaattcaagaacatgatttggccaagttggtgctactctgattaagtcctctggttccaatatttatagtcttatcacaaatagttcaaggctcctaaagagatgggtctaaaaaaaacccactattctgcttttgtaattaacataaagacttatagggaccatagatt

SEQ ID NO: 197827 - DNA, 408 bp, Homo sapiens
ttacccagattcagacaatggggaatttcttagaaaaaggagaatggtcttcagatggggtacacccactcattccctcccagaccaatactacaattggacttgtggatgtcagaataatggccctcaaagatgcttatatcctaatccctgaaacctgtgagtatactacacatcgtaacatatgtaggatacatactacatggcaaacggaaattaaggttgcaaatggattgaaggtggcaagtcagctgatcttaaaatagattatcctggattctctgggcaagcctaacataatcataagggtctrtaaaagtagaaaagagtcagaaaggaaggtcacagtgattgtcacatgaggagctctttgaaggtggaggaaggggtctgtgaatcaagccatgc

SEQ ID NO: 197828 - DNA, 415 bp, Homo sapiens
ctggggttctggtttttacccagattcagacaatggggaatttcttagaaaaaggagaatggtcttcagatggggtacacccactcattccctcccagaccaatactacaattggacttgtggatgtcagaataatggccctcaaagatgcttatatcctaatccctgaaacctgtgagtatactacacatcgtaacatatgtaggatacatactacatggcaaacggaaattaaggttgcaaatggattgaaggtggcaagtcagctgatcttaaaatagattatcctggattctctgggcaagcctaacataatcataagggtctgtaaaagtagaaaagagtcagaaaggaaggtcasagtgattgtcacatgaggagctctttgaaggtggaggaaggggtctgtgaatca

SEQ ID NO: 197829 - DNA, 561 bp, Homo sapiens
tcccagggagttcaccaaggtgtctctactataactatggctgaactctgtatcttcccagatggtccaaccgtgaaatctcttcccagttttctggcacacagcaaatatactccctgctaggtgttgctgagtgttgccctgaacatgcatatgttttgagttgtatatgatgttagctataggatttttgtggatattctttattgagttgagaaagttcctctctattactagtttacctagagtttttattgtgaattggtgttagatttcatcaagtgtgttttatgcagctactgatatgatyatgtgatttttttccttcttgagcctgttgatgtgatggggtacattagtggattttaaattgttgaaccagctgtgcatatctgaaatacatcccacttggtcatgatttatacttatttctatatattgtgaaatttgatttgccaatattttattgaagatttttacatctatgttcaaaagctaactttttaaaacttttattttaggtttggggtacatgtgcaggtttgtaatataggtaaactc

SEQ ID NO: 197830 - DNA, 536 bp, Homo sapiens
gaaaactaaatttaatgctcactgataaaaatagcaaggatattttgycggacacactatcttccttcttcctcactgcctacccatgatcctgttcaccttctttaagagggcacctgttcctgagggtgctaggctcatcttctgctttaaggaattccttgtttgatataaggcaatctatggtcgtcttatcatctttgtgaagtgccaagaagacccgatttgggaaaagtctgctggggaaaagtttttatcccattcaaaataaacaaaagatgggaaattcaattttctgtttgtagtacttagagccccatactatctcagctgtgacacattcaaacaccatgactttgagtaaactgtggttgttttaacttctctgtactttaattcttcatgtaactggtgataataccaaaaacctatctcatgaggttgtaataaatattaaacatgtaaaacgcttagaaaagtacctggcagataccaaacccaatgtgtttaatactattactattacaattattatg

SEQ ID NO: 197831 - DNA, 563 bp, Homo sapiens
gaagagaaagtaacaaagttgtttgctccaggattatgggaactgattggcgtttttatatgaaaaatgaagactgttttccttgtttctaggctgattatatttactaaactgtaatgatacacaccaaagtattgttgtgtatcaaactgtaactggagtgtgtgtgtgtgtgtgtgtgtgtgtaacagggaraaagaaatagatgggcagagaaaaataatcatacatagctaattttaaaagagtgatactgctggttgggcagatgaaacaatctttcaataccaattgtcctgaaatctggttttaactgaatataactgaatggtattctcttgatagataacaaatattttcaagcatttttaatctagcttcctctgactgctatagtaactcacaaataactgatcagttcttgcctcttacttggaattgccatggaatttatcatctaaaatgggacacttttgagcacatgtatgagggtgctatttttaactagattaatacaataagcttaaactgcaacaaatccagaaaatcaagcaggctggctc

SEQ ID NO: 197832 - DNA, 537 bp, Homo sapiens
ccatttctgctctgctctatttctcggtagccagactaactgcaacaacagtgtgcttgctgttcttatcatactttaatatattagctattaaatatttataatacatgctcagtccccactggcattttctgagcattcccatattcacatatcagctcacagcagttgagcagttgggcgactcatttcacatgcatgttgctgaccacctcaggattccctccacactgactcatctgtggttctattcgtgatgccaattgttacaagaaaagcttaagactgtaatgttccccaccaaactgggaaggagccaagagaccaaagactgactcagacaagttcagcttaatgaatagatgagtttattaggacttacatttgggcactcctggatggtcacaggacagttgtagagatccacactgactcccatctcaaaactgcttttaagctaawtttctaggtgtttgcctactgtgtttgactgatgaggctgtttttttggtaggttctcatatattttctgggatg

SEQ ID NO: 197833 - DNA, 577 bp, Homo sapiens
  misc_feature (1)...(577): n = A,T,C or G
agaatacttctactccacatggtagagggcaaatctttatttatgtctcccttaactacactaagtatactgtaggagagataccagtaaccttctaaagccaggtctttcttatgtttttaagccagaataaagactttctaagagattttcacatatatcatttctcttgactaacacaatcactctatgagataatgttcacattttatctatgagtaaatcaaggctcaaacattttacctgatttatccacagtcacatagstttttagccacagagatggaattgaatgtcagtattatgactgcaagccctgtgttttccaatcacatcatagctaagactcatccagcctgacaccaagccagttctccaccaatgggaaatactggaagaaggtgcagacgcagtttgcaaagacttctgccactttttgtcaaagagatgattgcaaatttaatctggatttaacattaaggaattctatctcaattgtgttataaatctctttcccacacggccacttatgtgtcctnnnnnnnnnnnnnnnnnnnnnnnnnnnnnnnnnnnnnnn

SEQ ID NO: 197834 - DNA, 590 bp, Homo sapiens
gccaggaatgaattggaatattttcctccattattcaccccctccctgtactagaattatgccttgctgtccacaatcatgtgacttgcacacatataatttaggtggagtatacataccagcttcattractttggacttggctataagacatgctttgctcaatgggatataagatcatataatgctttccatgaccaagtggaagcttaaggatgcttatttcgttaggttaggctctttcccattcttgaccactggcatgagaataacagtcacagattggagctacttagcctggcttcaaaatgaaaatacagcttttgaaaaaagagaaagaaacattggttgttgtcaaccactgattactgatgttattgcttaccacagcaattatgcctgaagtaactactgtaagctggtgttttgcttatgatttataattatggatgcaatgataatcaggcaaaattatgattctgaagcgcaaggcatagtgcaatgcaaattcgcatactttttccagcctaaggctgttgtagagacttggtggcatgtgaggttaaaaaaaaaaagataaattatgagaa

SEQ ID NO: 197835 - DNA, 590 bp, Homo sapiens
gccaggaatgaattggaatattttcctccattattcaccccctccctgtactagaattatgccttgctgtccacaatcatgtgacttgcacacatataatttaggtggagtatacataccagcttcattgactttggacttggctataagacatgctttgctcaatgggatataagatcatataatgctttccatgaccaagtggaagcttaaggatgcttatttcgttaggttaggctctttcccattcttgaccactggcatgagaataacagtcacagattggagctacttagcctggcttcaaaatgaaaatacagcttttgaaaaaagagaaagaaacattggttgttgtcaaccactgattactgatgttattgcttaccacarcaattatgcctgaagtaactactgtaagctggtgttttgcttatgatttataattatggatgcaatgataatcaggcaaaattatgattctgaagcgcaaggcatagtgcaatgcaaattcgcatactttttccagcctaaggctgttgtagagacttggtggcatgtgaggttaaaaaaaaaaagataaattatgagaa

SEQ ID NO: 197836 - DNA, 538 bp, Homo sapiens
atcacagcagattcagggacaatgattgctaattgttggttttacatatcatttacttggataagatttcctagtgagagtccattgtttttatcattgcaatattaccagatttatttcctgtatttggatgcaaatttacatggttcttatttattcaggctttaaaaaatctcacaccaacgtggcacatgtatacacatgtaacaaacctgcacgttgtgcacatgtaccctagaacttaaagtataataaaaaaaatataataaaaaaaatcttgtcaacataatatatctttyattcagttgtagaaatgtgcgaccatgaggacaccattacctatgaatgacacgctgagactggaaacccaaaatgatggtaactgagaatggtgttaggactctatgttttcatcacactctcacctaagtgaggaccttaacaaaaagggggaatttttttaaacaaaattatgggaggccattatttttaactaagctcatgcactaggccccagcagaccacaccaaacagaaat

SEQ ID NO: 197837 - DNA, 557 bp, Homo sapiens
atgaggtagctttactgttattatttacaataggatttaatggagtgaaagattaagacctcaacagctctgaaagaaccttagcttacaatgggaacattgctcaattcaggcattgaatgagggcagcacattactgactagcggacaaaccaractgttagtctgccatctctgtttttttgccttttatgtctattttgttaaatggaattccagttgctcctttctaagactctgacatgtctagcaatgaaaaaatgttagctagttctgcagaggaagctcttgggagtttttgtgcattcttctttctattaatgtacaaagtctttaaactgcaatttttgtaggttcaggtaagactgtgtataatttattatatatcaggttgcttcagtagcctcttctgtgttgtacttattataatgttacttacctgcatagcacaggtgttgttttgacctctatgtccagaagtaggctagactccagatactgtgaaatgaagaaacttgtatcttctcatcattgcatttacctggtacatgtaagca

SEQ ID NO: 197838 - DNA, 582 bp, Homo sapiens
ctatgtgatatggtttggctgtgtccccacccaaatctcatcttgawttgtagctcccataattcccacatgttgtggaaaggacccggtaggagacaattgagtcataggggcagtctcccccatactgttctcatggtagtgaataactatcatgaaatctggtggttttgtaaggggaaacctctttcacttggtcctatttctctcttgtctgctgccatgtaagacatgtatttcaccttccaccatgattgtgaggcctccccagccacatggaactgtgagtccattaaacatctttttaaaaaatgaattacccagtctcatgtatgtctttatcagcagcatgaaaatggactaaaagactatggaagcatttattgaagggtgaagggggagtatgtacatgaattgggagcatatgaggaaatttaggaagacaactttgtctaatgtcatattcaatagtgtcaaacctgaatgtagaggcccggaattttgctcatttgggagagatttaattccagagtattagagaaaagtttcagaattaaataatgacagttccccttagatgtt

SEQ ID NO: 197839 - DNA, 602 bp, Homo sapiens
gtcatattttgggatagtgtcctcacacagtcattaaaccttaatatgaacatttcctttatgtaattatttatatttgattaacttgatttcgtaaaactgagaccagaagaatgaacgcccacaaataattgtaaagatattcacagaacctaagtcctgcttacaagagtataacatgagaaaacattatcccaacagttaacaggtggaaatggaagtttctgaagttatttatcttatttgaacttwagtctgttaatctgtaaaacgaagaggttgattaaataatatataagatttgttccaatttttaaatttgataagaaatatataccatgtaatattttttatcattttccccatattagcatcagttaataaatgtgaatgaagagggaattagagaaagagggagacaaagacagagacagagagaaatgagtgaaattgagaaaatgagaagataacatagatcaatagtgaaagtgcctgttgtagagttttaaatgaaaattattcaataagccctcatattaaagctaaaaaatgactggatatagttcctgagatttaaaagtaactctaaactaaatgggtaa

SEQ ID NO: 197840 - DNA, 590 bp, Homo sapiens
atctcattctttccaggttacttttgtggcactatgcatcagccctactttaataatactatttttacaggagccaaagaataaataaaaatttccccaatattccccaagtaatgagtgccaggagtcatgacttttaagcaggtaagacttggaaaatcagaataaacttttagaaatacatttaattcaattctataaatattaatcattcaaaatctggccacaatcataggaayacaaaagtaaaatcccagttcttttttccctaaaatgtcacaatgtaatagatctaacattgcatatatttctaatgtgatgaaatgttgatatatattttctatcgtgcaaactacagctctaaaatttttcaaagatagtacatgtattatgttttctataatacttacaccatcattattgttttaccttttatatctcatattctactttaattatggaatggtattattacatatccctgataaaaatattaaaatgtgctatgggaaaattaagaaaagacatattaaaccttgttatgtagtagcagggacctgggaaaactccttggaagaagtaaggttcat

SEQ ID NO: 197841 - DNA, 596 bp, Homo sapiens
caatgagaagacccacaggaaagatttttatctaaatattgttatggctcttgcttgatgttaattaataaattttccatcttttaaaatayatattttacataaaacacatgtgtatacacactcatatatacacacacatacatttttcttaattctataacaaagaaactgacaaaggagcttttctggtccaccccatcctttatactgaccatgcatacttcattcagcagctcagcagtgtgtcatgaaagatcctcagctgtcacttcattttcttatgttaaaattaatctgcaaacccagaccccatatcgtagataatcatggtctgaagctgttttctttacctggttttaatgtaagtattcagtgttaaattcttttttacataaatgcctatacaattttactgtaatttctatatcataacaatgtaaacacaggcatttgtacttcactttctcaccagtgcatgttacttttcatattctcattacaatccaccagtctttataaagttgtcatagaaattaaaatattatgcaatgactaccttgaataatgatcacgaatgacaattctgaaaatat

SEQ ID NO: 197842 - DNA, 597 bp, Homo sapiens
caggttattattgctataaactttcttctcagtactgcttttgctgtattccaaaagttttggtatatttacattttcatttgtttcaatacattttttaaatttccttctcaatttatggacctgctggatttcattcttcattctcctcatataatgtttcacattgatacgttaattcatagctacttgtggcaatagcaagcagtttcaagagatgaatacatagctcaaagccaggtgagtaggacatgagtgcagtctcattttaatgcttctctgggcctgacaataaaaagggtttgcattcctcagatgacagtgcttttcttttctccttagagaagagcagcatattgcttaaattcaggatcatattatttaattttcacttgtttgtatagtttccaaaattgctcttgattgatttttagttttactcctyctggttagaaaagatgcttgccatgattttcaattatttttcaatcttttaagacttgttttgtgaaataacataaaatccactacttgagaatgatccatgtgttgaggagaagaatgtgtattctgtagcctttggatgaaatgttctgt

SEQ ID NO: 197843 - DNA, 596 bp, Homo sapiens
caatgagaagacccacaggaaagatttttatctaaatattgttatggctcttgcttgatgttaattaataaattttccatcttttaaaatatatattttacataaaacacatgtgtatacacactcatatatacacacacatacatttttcttaattctataacaaagaaactgacaaaggagcttttctggtccaccccatcctttatactgaccatgcatacttcattcagcagctcagcagtgtgtcatgaaagatcctcagctgtcacttcattttcttatgttaaaattaatctgcaaacccagaccccatatcktagataatcatggtctgaagctgttttctttacctggttttaatgtaagtattcagtgttaaattcttttttacataaatgcctatacaattttactgtaatttctatatcataacaatgtaaacacaggcatttgtacttcactttctcaccagtgcatgttacttttcatattctcattacaatccaccagtctttataaagttgtcatagaaattaaaatattatgcaatgactaccttgaataatgatcacgaatgacaattctgaaaatat

SEQ ID NO: 197844 - DNA, 524 bp, Homo sapiens
aaaacttttgaattctataataaagaaaaggcttaggaaattctctcatccttttcatgaattcagatagccacttctaacagatattcaaataatgaaagtggtaaaaactcaatttctagctcataagcytgaagagactttagagttaaataaaggataaaatcccaagaataaaagtgtagaaaagctccttatcttcatcctgtttattcaacatataagatcactctttgatgtacacacaaatctatccccgggtgggtaaaaaaaataggctggatgttttacttctgtaatgggtgattactacacaaactaaaataaagaaggaactaaaactttttgtagaagatcagggaaagaacacttcacctaaagcacaaattcattcttgtgataaaatttgagtctctagttttatgctatgtgacggacatagagcagttacaaaaacaaacattttttgcatgtaactttatgtaagcttattttctttaaatatcagaagtgtaaagggaaat

SEQ ID NO: 197845 - DNA, 609 bp, Homo sapiens
caaccccatctctctcttgctcctgcctcagccatagggagtctctattccccctttgccttctgccatgatggcaagtttcctgaggcctccctagaagccaggcagattccaggatcatgcttcctgtaagccagcagaaaggtgagccaattaaacctcttttttaaaaaaataaattactcagtctcaggtatttttttgtagcaatgtgagaatggcctaatacaaatatagacccagtaaagtcaaagtgagcattttacctaacaatacaggttctttacattaaaaaaaaatgtaaacgtatctttcttttctaaggctgctcacatcctcttgctttcctagaacgtctgagttaggttactatagtttccttttactataggaaacacactacagtcaaaaaatcgagtgagtccatcccgctgcttttctttccataaataaagtagaattctagttctgccgaatatttaaggtactgtactatctgtcccaaccccacccccacctccccmccgatcttgcattctagtatctattctttcaaaggacaccactagatcaattacatgcatactttaggctcaatccttatagctt

SEQ ID NO: 197846 - DNA, 524 bp, Homo sapiens
tttgagaattacaatggtgatgagaaaagagtgcaaatttttatcactgtgtgcatgtgtgcgtgtgtgtacttaaatataattttcttatttgggagaggggataaatttattagcacatgcaatgattttgatttgccctctgaatcttcttaaattctcattggcctttccctcagtaagcaaatctacattcttctttccactgtgcgatgataccatatgccacactttccagggtggattctctaaatttaactaaaatgaaatatggaactagtgggcagaaaaagtttcagttggatgtctgcagctataagtrctcataaagaatctaagagaaaaatatttgtttaaagcattccttaacaaaaatgaaatacaataactagttaaaggaatagaagagttggaaacctggcaagactttttggttctcttaagttttgtatttgacaaaaaccactaagacaactgaacacatttgcttgctggtggacttaatgataagcctggtattatga

SEQ ID NO: 197847 - DNA, 498 bp, Homo sapiens
tctaaatttaactaaaatgaaatatggaactagtgggcagaaaaagtttcagttggatgtctgcagctataagtactcataaagaatctaagagaaaaatatttgtttaaagcattccttaacaaaaatgaaatacaataactagttaaaggaatagaagagttggaaacctggcaagactttttggttctcttaagttttgtatttgacaaaaaccactaagacaactgaacacatttgcttgctggtggacttaatgataagcctggtattatgacctccatatttatttgagaatactggtttgcatttggtttagattcccatttataagacttttctaaatgtcacaaagaggagtcatgacataaataaagcaacatgacaatatttgtagtgtgctttatattatgtttgctattccatcagctcttatttctggaaacacaggacagaatagcytaactcccagctgttgtggagcctctgtaagaactt

SEQ ID NO: 197848 - DNA, 653 bp, Homo sapiens
acagtccttatgcctcagaacctgtggagattacttaaagtagtgaccctaaacctgcttacaccaccttgcccacttctttccctgaaaaccacartaaagtctcttgaccttgtttttccacagcttcctggccaacctggcatttccccagggaagaagggaagacggaataaggttattaatatattcaagtgataatttttttttaaattttcttaaagtctcatttgaccttagtgcctataaataaatttatgttgttttttcatggcatggtatgtccattttgggaactaagcaacaagttatcttttcgacgtcagtcatcccttgatctgttggcctcaccagacttgaataataataaaatctgtattttaaaacagaaagatgccttgaaaactaacattggggacaaaaggaagaaaaacaaaataaaaatagctggaggttttcaatttgtgaaattcaccaatttaggatataagatgaaaaaaagatactttcccaaaaatgctttgcaaagaatagaaaagactatacatttatcttcattatatatctaaaataatttataaaaaagttcaataaattccaaatttcaggtcatcgaagattagttactcaaaataatacaattgctttcatca

SEQ ID NO: 197849 - DNA, 592 bp, Homo sapiens
atcctcatagcttagctttcacttatargtgaaaacatacagtatttggttttccattcctgagttacatcaggtttctgaaaatatataagatcatgtcatctttgcaaacagagacaattttactatttcctttctgatttggatgtctttgtatttctttttctttgctaattgctctggctaggacttgtagtactatatggagtgaaggtgatgagagtatgcattcttgtcttattcctgatcttaaaggataagctttcagcttttgaccattttgcatgatattagctgtgggcttttctctctctgtgctatgctgtgctgagtaggcttgggaaaggggtaacttgagtaatgtgaaactgtctttcctaccttcttcaatgtgtcttttattgtttctgtgctccaactaggtgctgtaatctctcacctggagtcctcagcactggtgaaggtactcttgtgtgtggatggctgttcaaattgatgtgtctctgaggggatgagccctggaaactcctattccagcatcttgttgatgtcctctctatttttccttgaaatttatttgttgaaggaattg

SEQ ID NO: 197850 - DNA, 594 bp, Homo sapiens
gaagcttccataaaaattcctggattatagggttctgagagtttttctttgktttttttttttttttttttttttttgagacagggtctccttctgtcactcaggctggagtgcagcggtgtaatcaagctcactgcagcctcaatctcccagactcaagtgatcttcctacctcagcttcctaagtagctgggactacagccacgcaccaccacatctggctaatttttttgatttttagtagagacaaggttttgctatgttgcccaggctggtctcgaactcctgagctcaagcagtactcctgccttggcctcccaaagtgctgggattacaggcatgagccaccaagcccagctgcttctgttaattaattaattagtttataaattattccattgggcgacatctttcaacttccaaactagaattggcagaggtcatttattataccctttattaataaactgggaaacatagtttccctgagttctgtgagctgctctagcaaattaaccaaacccaaggatgggattgtgggaaccccaatttatagctgttggatcagaagcacaggtcacaacctgagtttgt

SEQ ID NO: 197851 - DNA, 360 bp, Homo sapiens
ctcattgccttcagataacactgaagtattattttgtcccagagaccacacagggcagctttgtcttagtaatcctaagaagctgtttcaaacatttctttctggtataagatgtaattattgactgattcctcagcagaatttaagatgagtatctaagattttttttcactaaamtgcactcatctcagacaagtatagccaccacagggtgtttctttcttcatgtttctccttttttcccaaataaatgacctcatactggcttcccagtgccttctctttcacttcctcattgctagttctactgcttgtttgtttgggttttttgtttgtttgtttgtttctttgttttttgag

SEQ ID NO: 197852 - DNA, 408 bp, Homo sapiens
tttgttttttctttttgaagtgtcttgctctgtcactcakgctggagtgtaatgcctggatcatagttcgctgcagcctcgaactcctgggctcaagtgatcctcccacctcagcctccccacagggactacatgccaccacacctggataactttttttatttttagtagagacaaggtctcactgtgttacccaggctggtcttgaactactgagctgaagcaattgtacctcagcctcccaaatcccaaagcgttgggattacaggtgtaagacatcacacctgactcctccggacttcttttttctttttctttttcttttttttttttaaaaaaataatataattacataaatctgtatgtaatatatttagaaaatagtcattgtagaaatataaaaatggc

SEQ ID NO: 197853 - DNA, 548 bp, Homo sapiens
ttactctaaaatgttctattctatgcatacactacaatttatttattcaactgtctatgaacattttgctgatttttgctatatttttcaatgcttctctacacattcttgtgcatgttttttaaggaaaaatttgtgcaattttgtagatttataaccacaaagataattaaaggatatatatatatatacacacacacacagacatatatatatayacatatgtgtgtgtatatgtatatgtatatatatatatgtatgtatgtataaatatatctcttcagcttgagtaggtattggcaaaacctctaccagaattgtagtaccaatttataccaacagcaataggtgaaggattgtttactctttgtttttattttcccaagcctgcaatgtaagctctgtgaagatagagagaccttttactctattcactactatattttcagtcagttttttaattaagtaaatcaattggatattggcatgtaagcatttatttttttaacatggtagtgcaatcaatttatttacctttgtttgaacat

SEQ ID NO: 197854 - DNA, 548 bp, Homo sapiens
ttactctaaaatgttctattctatgcatacactacaatttatttattcaactgtctatgaacattttgctgatttttgctatatttttcaatgcttctctacacattcttgtgcatgttttttaaggaaaaatttgtgcaattttgtagatttataaccacaaagataattaaaggatatatatatatatacacacacacacagacatatatatatatacatatgtgtgtgtatatgtatatgtatatatatatatgtatgtatgtataaatatatctcttcagcttgagtaggtattggcaaaacctctaccagaattgtagtaccaatttataccaacagcaataggtgaaggattgtttactctttgtttttattttcccaagcctgcaatgtaagctctgtgaagatagagagaccttttactctattcactactatattttcagtcarttttttaattaagtaaatcaattggatattggcatgtaagcatttatttttttaacatggtagtgcaatcaatttatttacctttgtttgaacat

SEQ ID NO: 197855 - DNA, 486 bp, Homo sapiens
tcagtaaactatccctgcaatttttataagcaattgtttgggtgagaagtgagtataaattcagctgtcatttaccttcctttttaatgttggtacaaygagtcatgcatttgacattttctggattacttccattatagttatttctgtgtattaggtaccaatttggagtatcatctggagaaataaactattattgcagtctatacttaaattaagtattcttaggaaagagaaatatacagggaaagaaaagactcggatagaaatgcaagaatagagaaaatgggacctgggtatactaagggaaatggtccagcagaaagaatacctgtgagaagcactgaactacatagtttgtattacacatacctccaggaaattacaactactggtgtaagaacaaatcattaaaatcatattttctaatactgggtattttctgctttcttaatcaaaatggggttgtagagagtggggatggtg

SEQ ID NO: 197856 - DNA, 486 bp, Homo sapiens
tgaactttgtatgtaaaattctatggatttcaacaggtcacaggaaatctcattgtgctcctttgtccttcaaaacacaaagccaactctactataatattatttttcttaggatgaaacttggggttcacaattatctcaggattaaggatgaatttatttaagaaattatctgatgatcctaaccaatcttagtagatctagtttggttcttattgacctagattacctcgtactccctaaataagtcaactttaagagacatccagtagactttctaattttttaaaaaatgttagaatcattaccttatgcaaatcacatagacakgagaagtttaagaaagaggaggaatgttcctgatgtatctaaaaatcggtcttttttaaactaaatctcttagcactcatcctatgtagatgagtccaggaaatacatcaataactactaaattacaatttcccacagtgaagatatctgaggagc

SEQ ID NO: 197857 - DNA, 621 bp, Homo sapiens
aaggtttctggggcacagacacaagatctagacatgcaggaatgataaaatctagacatctggaaatagggtgcagggcattctagatggagggaagaggatgtgcatttgyttagatgtttgatagcaaagaggggaagaatagtgtggtaatggaaaaggagaattgaacaggtaagcaagaaggaatgtgggactagatgacaggtgtagagagtttcaatattaggctgaggattttggtcttaggtaaataaatcattgaaggcttggaagagatgagtggcaacaccagtactgttttaataaaaatacctaatcacttttatatagataggttgaagaagggagagatttggaggcaagaacaccagttaataagctaccacgatagtccagaaaacaggcaatgagaaaattgactagggtagttgtaacaataattgaaagggaatgaagtgtgaatgagaatagcacagagatgtcatagctatcaccgaacaactaattggacttgggaaatgaaatatggatagatgggtgttacatctgttatcccttgccataatctatgtaacaaaaattataaaactttggtgacatacaacaataagaatttgt

SEQ ID NO: 197858 - DNA, 609 bp, Homo sapiens
tgcatttgtttagatgtttgatagcaaagaggggaagaatagtgtggtaatggaaaaggagaattgaacaggtaagcaagaaggaatgtgggactagatgacaggtgtagagagtttcaatattaggctgaggattttggtcttaggkaaataaatcattgaaggcttggaagagatgagtggcaacaccagtactgttttaataaaaatacctaatcacttttatatagataggttgaagaagggagagatttggaggcaagaacaccagttaataagctaccacgatagtccagaaaacaggcaatgagaaaattgactagggtagttgtaacaataattgaaagggaatgaagtgtgaatgagaatagcacagagatgtcatagctatcaccgaacaactaattggacttgggaaatgaaatatggatagatgggtgttacatctgttatcccttgccataatctatgtaacaaaaattataaaactttggtgacatacaacaataagaatttgtttttgctcatgtgtctatgggttggctggataagtcagctccctgagttgggctgtggaaacgaggtgctcactcaggaatctgcttatct

SEQ ID NO: 197859 - DNA, 621 bp, Homo sapiens
aaggtttctggggcacagacacaagatctagacatgcaggaatgataaaatctagacatctggaaatagggtgcagggcattctagatggagggaagaggatgtgcatttgtttagatgtttgatagcaaagaggggaagaatagtgtggtaatggaaaaggagaattgaacaggtaagcaagaaggaatgtgggactagatgacaggtgtagagagtttcaatattaggctgaggattttggtcttaggtaaataaatcattgaaggcttggaagagatgagtggcaacaccagtactgttttaataaaaatacctaatcacttttatatagataggttgaagaagggagagatttggaggcaagaacaccagttaataagctaccacgatagtccagaaaacaggcaatgagaaaattgactagggtagttgtaacaataattgaaagggaatgaagtgtgaatgasaatagcacagagatgtcatagctatcaccgaacaactaattggacttgggaaatgaaatatggatagatgggtgttacatctgttatcccttgccataatctatgtaacaaaaattataaaactttggtgacatacaacaataagaatttgt

SEQ ID NO: 197860 - DNA, 498 bp, Homo sapiens
ctgtccactaagcaagacatatgatgttttgttcaattatttgaaggcctggaaatttatttcatgtttaagctatgaaggaaaagtgacatatagaagaaagagaattttaataccaaacyttcctgtaattcagctgttcacagcaatatcaaaagcactatattttttctcaagtatgatttgactgaaatgataaaatttcgtcattcagagatctcacatttctctttatgagtttcagaatgtgaagacaaaaaattgttaacctgctatctgttttcaagtcaaaactgattatcccaagtcattgccagtctcaataagaatgcttaacatgttttaaaaattctttttattcttttgaaacgtgcagggtaattttatttttaatccttctgtattcactcttgccaatcattctgaatgtgagtgataagtttgttttgtatacattttatttatagcataaaaagtaaatcaaagacattagtttca

SEQ ID NO: 197861 - DNA, 415 bp, Homo sapiens
ccattcatctcccaccaggccccacctccaacacgggattacaacttgacctgagattcgggcagggacacaaatccaaaccatatccagggcctccactgcctccaagccaaygtaattctctgctagggtgtccagaaaataaggcagccctttccccatattcagtcaaatattcctttctatagagcttccacatttcagattccatcctctcaccacactttttttttaataggaagaggagtaggtgtaaaccaaaaataaaattctaagctccccaaccaactgaatggacccttcttcttggccaagtggatttcaaagaaacctaaaaaactagttcaggccataacagaaagcggggtcagacttgcctcattataccctcttccctttggaattcaggctcaaa

SEQ ID NO: 197862 - DNA, 567 bp, Homo sapiens
gtttttgtttatccaggaatgtctttattttgctttcatttcttaaagatactatgttagtccgttttcacactgctataaagatactacccgaaactgggtaatttataaaggaaagaggtcaaattgactcacagttccacatggctaagggaggcctcaggaaactcacaatcatggtggaagatgaaagggaagcaaagcatatgtttacagggtggcaagggagagagagggtgcagtggaaactgccacttttaaaaccatcaaatcttgtggcsgggcctgtaatctcagcactctgagaggctgagatgggcagatcacctgaggtcaggagttcgagaccagcctggccaacatggcaaaaccccatctctactaaaaatacaaaaatttgctgagtgtggtggtgcgcacctatagtcccagctacttgggaggctgaggcagaagaatcacttggacccaggaggcagaggttgcagtgagctgagatcatgccactccactacagcctgggtgacagagcaagactccatctcaaaaaattaaataaataaataa

SEQ ID NO: 197863 - DNA, 547 bp, Homo sapiens
gtttttgtttatccaggaatgtctttattttgctttcatttcttaaagatactatgttagtccgttttcacactgctataaagatactacccgaaactgggtaatttataaaggaaagaggtcaaattgactcacagttccacatggctaagggaggcctcaggaaactcacaatcatggtggaagatgaaagggaagcaaagcatatgtttacagggtggcaagggagagagagggtgcagtggaaactgccacttttaaaaccatcaaatcttgtggcggggcctgtaatctcagcactctgagaggmtgagatgggcagatcacctgaggtcaggagttcgagaccagcctggccaacatggcaaaaccccatctctactaaaaatacaaaaatttgctgagtgtggtggtgcgcacctatagtcccagctacttgggaggctgaggcagaagaatcacttggacccaggaggcagaggttgcagtgagctgagatcatgccactccactacagcctgggtgacagagcaagactccatctcaa

SEQ ID NO: 197864 - DNA, 402 bp, Homo sapiens
ttcacaaaaatcttatgaggtaaagagggaaattatggttatgttaatatgaagtacaaagatctcttttccatgtcttcaacccaggtcttttgactcccagatcaaaattttgaattttatctctaattataaacatctcctctctcaatgcttttgattaagaaatgwcacgaattcacaatcaatggtgaaagccatgagtttgatggagtattatggccttaatttacagaggaataaattcaagtaaaaagagatgaagagaggcttgtttctaatcagccaacaattagatgtaaaacccgggtttattttatttatatcattcactcatgtagttattaatttggtgaatatttgttaatgacctactatgagccaggtatctggaggatgctg

SEQ ID NO: 197865 - DNA, 578 bp, Homo sapiens
acacttcattatttgatcaaagcaaggattttttgaacaagacctcaaaagcataggcaacaaaagtaagaatagaccaataggatttcctcaaactaaaaagcttctgcacagcaaagaaagcaatcaacagagtgaygagacaacctatagaatgggagaaaatatttacaaactatgtatctgataaggggttagtatccagaatatataagaaactcaaaaaactcaataacaaaaaaaaagtctgatggccaaaatatctgaatatacatttctcaaaagaagacatataaatggctaaagaatatatgaaaaagtgtcctacatcactaatcatcagagaaatgcaaatcaaagcagaatgagataacgcctcacttcagttagaatggctgttgtcaaaaataaaaaataacaaatgctggtgaggatatggagaaaggagaactcttatacaatgttggtgaaatgtaaattagtacagccattacaaacaacagtatggaggttcctttttatagaactaccatatgactcagcaatcccactattgggtatatatccaaaggaaatga

SEQ ID NO: 197866 - DNA, 572 bp, Homo sapiens
ttcatacaaatattatatgatgcgttaagtgtttttataaggattaatctgatagcagagtgccaaacattagagaagagaggaacaagtgataataattatgaagatactttacacctacgctttctattgcaatactctctaattcagatgcagcttttttggaaaagtgactttttctgaagtctttctttggtccagtccttttatgaacagtttttaaggctgtgacttagatgaaaatgtagaatgcatatttatgctgaagggaacatctaatatgtgatgcatcagaatctggattccaaaagatcccagctctgtgrcctggcaaggtggcttatgcttgtatcccagcactttgggaggttgaggtgggaggatcacttgagcccagaagttcaagaccagactgggcaacatagtgagaccctatctccacacacacacaaattaacagggcgtggtagtgtgtgcctgctgtcgtcctggctacttgagaggctgaggcaggaggatagcttgagcctgggaggtcgaggctgcagtgagctgtgattgtgccacactgc

SEQ ID NO: 197867 - DNA, 559 bp, Homo sapiens
tgcaaattatagagccccaccctagacctacagaatcagaatctctggggcaataatccattttagtcctccaggtgattctgataaatactgaggtttgaaaatcccccttctaatgtcctgcaatccttacacctatgctcaaacaggaaagacgagttagcagtgacacccagtggagccaagcgaaatttgcaacttttaaaaatgagcatacctgattcttttttcccctggtaggataaaactgtcatgatccttgttctttgcactaaaaatacaaggctgacttcttttcctgaaaactccttgctttagggtcttgtgcccattttggatatgcagatatattctttaattcagcaaatatttcttcactgctaagtaggtataaagaattatgacagaagtagtgcagaagatataaaacatatcaaattggccccagagcagtctaacagatatatctgyctttaacagcatcagctaccatttgagtgtttgatgtgtggcaggcactttgctaattgttctccagaattcactcagtgttttcatg

SEQ ID NO: 197868 - DNA, 484 bp, Homo sapiens
gaccaaacaccaaaatcttagtagggattgagtataatgatattatctctgaactctgttaattctgtcagtggtcttctgattatactttgcttggatgactaatgctttgtaattctttgtacctccccaccatagccatccttgcctaggcttgtctttccttctccttcaaacttttcctgcttcctatcactcaaggaatatttaccaaaatttacctgaattgtgtcttatcttgtcggggcccaaggtgctgataagttaatctgtaaataaatgcctaaaaggtaggcatgagtccaagctttaaaaaaagtggcactgaataatccgtaagaaaagctctgaatttggaattraacagtactctcataattttctctgttatctgaaattagttgttttaaatgactccctctttatataccctttttaggcaatggttgatcaacccctgttactggcttgtaaagtcaatgca

SEQ ID NO: 197869 - DNA, 551 bp, Homo sapiens
ctcagctcttgtcttctgtgtacccacaggcccaacaccacatgggagctgccaaagtctggggcttacgccgttacgccatctgaaacatggcccaagctgtaccttggaccattttagtcatgactggagctggagcagccgggatgcagggcaccaagtcctgagactgcacagaacagcaggcctctgggcctggcccaygaaaccatttttctctcttagacttctgggtctgtgatgggaggggcttccatgaagatctctgacatgccccggagacattttcccatttgtcttggctattaacatttggctcctgattacttatgcaaatttctgtaataggcttgaatttctccccagaaaatggggttttcttttctattgcatggtcaggctgcaaattttccaaacctttatgctctctctttcctttttaaacataggttctaatttcaaaccatctctttgtgagcacatgtaactgcacactttcagaaaaaaacgggtcacctcttgaatgctttgctgcttagaaatttcttcct

SEQ ID NO: 197870 - DNA, 550 bp, Homo sapiens
tttcagttaagaactacagagtagagagaaaattagtttttcttctctacaagaacaagaaacaaaatgaaatatattcccaatagtttcacaaaacaattaaatcataactaaatttataataaacaaattatttttgaagacattcgtaacaataaaggtaatgtattgttttatctttttaaattttttgagctgggaattgttgactgccaagtcattagggaatatctccaagactgcttttgtttgaaaactgttgacttgtttctctgaaagaaaagtacagccactattgtttactattgataggtttgtaggacttttcattctttaatttccttgtttgatataacaaatatttatttgaacactaacaatacacaaggcaaaatgcaagggatggagggaaaacaggacatataaatatgaaatatgtattttatatatatatgtgcatatcacttcatttggagtgatagagaagacatatgcrtgtatacaaataaagataactaatcatataaaacaacaagtaaaattccaaatt

SEQ ID NO: 197871 - DNA, 622 bp, Homo sapiens
gactgccaagtcattagggaatatctccaagactgcttttgtttgaaaactgttgacttgtttctctgaaagaaaagtacagccactattgtttactattgataggtttgtaggacttttcattctttaatttccttgtttgatataacaaatatttatttgaacactaacaatacacaaggcaaaatgcaagggatggagggaaaacaggacatataaatatgaaatatgtattttatatatatatgtgcatatcacttcatttggagtgatagagaagacatatgcatgtatacaaataaagataactaatcatataaaacaacaagtaaaattccaaattactcttgtaattgtttaggggagagaaaatcttctatcctctgaaggttcaataattgaatctatgaaataaactgacagtagacagtttagtargagaaaagctattttaattacacacaggagtcccacaaagtagaggacttgaagaggggccagatgatagaagtttttatagcatcctgagctaaagaaaggagtaggggttggtggtttatcgggggtggtgtctatacaagttgcaggggagtaagaggagggaatgcatggagaacaaagg

SEQ ID NO: 197872 - DNA, 622 bp, Homo sapiens
gactgccaagtcattagggaatatctccaagactgcttttgtttgaaaactgttgacttgtttctctgaaagaaaagtacagccactattgtttactattgataggtttgtaggacttttcattctttaatttccttgtttgatataacaaatatttatttgaacactaacaatacacaaggcaaaatgcaagggatggagggaaaacaggacatataaatatgaaatatgtattttatatatatatgtgcatatcacttcatttggagtgatagagaagacatatgcatgtatacaaataaagataactaatcatataaaacaacaagtaaaattccaaattactcttgtaattgtttaggggagagaaaatcttctatcctctgaaggttcaataattgaatctatgaaataaactgacagtagacagtttagtaagagaaaagctattttaattacacacaggagtcccacaaagtagaggacttgaagaggggccagatgayagaagtttttatagcatcctgagctaaagaaaggagtaggggttggtggtttatcgggggtggtgtctatacaagttgcaggggagtaagaggagggaatgcatggagaacaaagg

SEQ ID NO: 197873 - DNA, 566 bp, Homo sapiens
taagacatagtcaacagagattttagtcaagtcactttaactctcacacctgttttctagtctgcaaaatgaaaatattgaatgaagtcacctctaatgtatgtctctggctatagggaagaatcccatggctctgggttctgtgcttcatgcttcttcttatgccagtgagtaattgctacagtaaaaacactgctctgtcccaataaggagggtattgtttgtgtctggaacaactgtgtattttaaaaaggagatgggctaataaccctaccagcaaaatgtttagtgtctcatttacacatttttttccttattaggagctgascagataaaatgtttgagttatctagtaaagccacagaaaccttaggaggtggggaaaatgtcagccaaatctcattcatatttgctaaaagaatgcaaaccagttgggtcagataaggtatagttatttataaatcacctgggagcaagctattattttaattggagaaaatttattattcagctccttgaataatttgccaaatatggttacaagcacatctgtgaatgaatgaaat

SEQ ID NO: 197874 - DNA, 416 bp, Homo sapiens
ttgctcaataaaactgtggaactgaattgactggaagtcatactctttaaagcactggcgataatttcaataaactaagaccattttctaaagaaagccaaaataggcaaatgaaagaaacaaatatttatataggattaaaaaatgatgcaaaccatccaaagatctcatcaattgactgtaaagcaagagaagcaaaaagaaaaatcactcrggacctaaatttatttttattacttcaaatccaaattaatttcaaactcaaggctcatgcagtgttatggcatcatgagaaaaaagcataggctttgaatctgaattctatatccctgtattacatacaacactggaaatggaaatgatttatatggattatcattgcttatgatcataggggagcatggggatattttgaa

SEQ ID NO: 197875 - DNA, 562 bp, Homo sapiens
tttcagagtactcggacacaggaaacctggagcagtggaggactgcttcaacactttgattctagaaaaagcagaaaacaccttgtgtttttattaggaagatgttgcaaaaaatttgttcatcctagtgaaattttagggatcacttaaacacaccyagtgctcaaatcatacctattgtttagtgttcccaatcagtatcctgcaacactttcatcacagatgagattcccatctgcaactggatagaatactgatatgagttagaattacaggatgttaaatgtgctacagattcttcatttttacagatgatgaaattcgggctcagaatagagtggcctatccaaagttacacaaacaattaatggtaaatccaaggctagaatccatgtctagtggccatctgttagcaatataatggcattttccaaccaactcccataaagacgaaaattcccacccttaaaatcacttcttatttgttttacatttgtccccagaaagccccaagcaaagtaccaatatgcaagtcaggagaatggtgcattcttatagcatt

SEQ ID NO: 197876 - DNA, 562 bp, Homo sapiens
tttcagagtactcggacacaggaaacctggagcagtggaggactgcttcaacactttgattctagaaaaagcagaaaacaccttgtgtttttattaggaagatgttgcaaaaaatttgttcatcctagtgaaattttagggatcacttaaacacacccagtgctcaaatcatacctattgtttagtgttcccaatcagtatcctgcaacactttcatcacagatgagattcccatctgcaactggatagaatactgatatgagttagaattacaggatgttaaatgtgctmcagattcttcatttttacagatgatgaaattcgggctcagaatagagtggcctatccaaagttacacaaacaattaatggtaaatccaaggctagaatccatgtctagtggccatctgttagcaatataatggcattttccaaccaactcccataaagacgaaaattcccacccttaaaatcacttcttatttgttttacatttgtccccagaaagccccaagcaaagtaccaatatgcaagtcaggagaatggtgcattcttatagcatt

SEQ ID NO: 197877 - DNA, 568 bp, Homo sapiens
tataattataattctaccaggaaactataatttgagatgaaatttggtggtaacacagagtcaaaacctatcattggtttaygacattagatattcctgtctgttgctcattctgcacatatatcttctctcgccttctttattttgtgtatcagagaagaggagcttatagataaatttcccagaataggcttctgagtttagttctgggttacagtctttcaatgagaagaactcgatgaagaagagaaagcctaggaaaagcccttgtttttcttcaacagtggcaggctgtcagatagccaactctggagttcacctgactgggtgcttcaagcagctagggtagtgtgtggcaactctcctgctgttcttgaaattcacaagtttacaaggaagttcttcaaattcactacttctcttctgttggcagttgggatgatgaagatggtttcactaaagagtctttggtgttgcaagtagctgagatgagatgacctgcttctgcttcactgcctgtcatccattctatccagtgctgacagaacctccaatttactgtattaac

SEQ ID NO: 197878 - DNA, 568 bp, Homo sapiens
tataattataattctaccaggaaactataatttgagatgaaatttggtggtaacacagagtcaaaacctatcattggtttacgacattagatattcctgtctgttgctcattctgcacatatatcttctctcgccttctttattttgtgtatcagagaagaggagcttatagataaatttcccagaataggcttctgagtttagttctgggttacagtctttcaatgagaagaactygatgaagaagagaaagcctaggaaaagcccttgtttttcttcaacagtggcaggctgtcagatagccaactctggagttcacctgactgggtgcttcaagcagctagggtagtgtgtggcaactctcctgctgttcttgaaattcacaagtttacaaggaagttcttcaaattcactacttctcttctgttggcagttgggatgatgaagatggtttcactaaagagtctttggtgttgcaagtagctgagatgagatgacctgcttctgcttcactgcctgtcatccattctatccagtgctgacagaacctccaatttactgtattaac

SEQ ID NO: 197879 - DNA, 538 bp, Homo sapiens
gcaggctgtcagatagccaactctggagttcacctgactgggtgcttcaagcagctagggtagtgtgtggcaactctcctgctgttcttgaaattcacaagtttacaaggaagttcttcaaattcactacttctcttctgttggcagttgggatgatgaagatggtttcactaaagagtctttggtgttgcaagtagctgagatgagatgacctgcttctgcttcactgcctgtcatccattctatccagtgctgacagaacctccaatttactgtattaacactctttctaccacaaacacttcagtaacttttgctttcctgtcagaaccctgttttrattttcttcatttctataattgaaatattgagaaaaatattacttctaacagtaaccactagtaaaactaggttataattctaaattatggcagagtaaatattagaggagattggaaaatattggacaaaacacaagactatatactattatatacagatattgcatatatagtgttggagaaataaagtgttctga

SEQ ID NO: 197880 - DNA, 419 bp, Homo sapiens
cgacgggtgataaatatgtcaattcatatttgtaaggaaagtgtgggttatttgatagctggcacaggaataattggttaagtattgcgaaaataatcttatatttatacctggaattccatactaaaataattctaattaaataatatatattttaaaaaccaacacaaaatcataaaatgtaaaaaggaacatataaggaaatttatasataattttatgagtaaaaacagagacaaatttacttatacgttaagcacatttcattaagtctgtcagctcacaacaactctcttttctcttgtaagggcctttctggactgagttcacagacatagtaacttagccacttttttaaagaatgatatattcctcaagagatatgttttcaagggatcagtttctagaaaactgcttgg

SEQ ID NO: 197881 - DNA, 601 bp, Homo sapiens
aagtattttagtgttaaataaattttgccaatctcatgatatcaggtagcatatttaagatgatttgtagctcctgtaaaagttccttgctagtattgattaatgggtcrattttagccagcagaattttacttgcaattatttatttatttcttcattcactacttcaaaaccatactgtgtatcaggtaattgtttagaaatgaaaagatgaataaagtctacctcctgatatccaggaattactttacataaataaaggaaaataaatactccaatagttataggaaagtggcaagagctaaaacagaaataaataaatttcaataacacagcagaggaggaattatttaattttgttgagaagtgcctgtagctttcaaggcccagatgttcatttttatccagctagtaaggcaggcaaaagtcaatttgatattcagctaaacaaaaaaacctataaagtaactgtttttcataatttttggttttataactgttccaagacactttccttaacttttcttccttaattctttcaaatattcaatgtttactagattcctgatacttaaggtatccagaactaaacagggaggcg

SEQ ID NO: 197882 - DNA, 591 bp, Homo sapiens
ggggtttgcaattcgagatgagattttgatgggagcatagagccacatcatattattctgtacctggctcctttcaaatttcatgtcattctcacatttcaaaaaacaatcttgccttaccaaaagtcccacaaagtcttaactcatttcaggatttactcaaatatctaagtccaaagtcttttctgagacaaggcaaatcccttttacctattagcctctaatataaaaacaagttagttasttccaagatataataggggtaaagggattgggtaaatactgccattccaaaagggagaaattagccaaaacaaagaagctacaggccccatgaaaatctgaaaaattcagcagtgcattcattaaatcttgaagctccaaaataatctcctttgactccatgtctcacatccagggcacaatgatagaaggggtgggctcccaaggccttgggcagctcttcccctctggatttacagagtacaggccctgtggccatgttcttaggctggtgttgagtgtctgctgcttttccaggagcatggtgcaagctgtcagcagatcttccattctggggtctggaggaag

SEQ ID NO: 197883 - DNA, 370 bp, Homo sapiens
cctttacttcttaagcttccaattctctttttctggctgctctagaatgtatacttttcaaataatcttgtttattcctttcttttgtactgtcacctttcttttaaactagaaatatgtccaggtatggcttatgccaaaatctcttttcaagtttcttcctgtctttcccacctctccaatctaacattttgaaagttcagtctataaagactgtctgtaatttcctcacctctaatttagtaatttatttcattgcctcaactatcacaaattaatgggaaaaatctaaatttcatattcaattatctaaytggaaaaccaaaatttctttattttatattttacctaacccattctgagtcatctg

SEQ ID NO: 197884 - DNA, 608 bp, Homo sapiens
acttaccataagaataattaattttactcctagatatttccccaagagaaatgaaactatgtgtctgcacaaaggcttgtgtacaaatattcatttttttgagagaggaggatcttgctgtgttgcccaggctggagtgcagtggctatcaacaggcatgttcatagctcactgcagcttctaactcctggcctcaaaccattcccccacctcagcctcctgagtagctagtattacaggaatgtgccactgcacccactgtgtacaaacattcataataggtttacacataataaccgaaattttccaaaatcaaaatgccatcaagaaagaattaatcaacaaattgcacattcataaaatagaataatattaacagcaataaaaagtactgattgactagtaaaaattactatatattaatcattaaagacactaagctaagcaaaagaagtcaggcacacamaagtaagtacagggtaattttatgtgtataaaattttagaattgacaaaaatatatagtgatacaaagaaaaacatttttcatataatggaagttttcagcaatcatgcaaaaggacaacagagaaatatgagcataacaaa

SEQ ID NO: 197885 - DNA, 561 bp, Homo sapiens
tggagagagcagtcactcaaaagcccagttcccagattttgtcataatttgacctatctggcagttccctagggtcctccgctcacatagcttattcatatcttacatgacaaaattcacttcctgtgaygagttttttacgctatgcatttgctgaaacaagtagaaatgaatatttaacatcatagctaccggaaacaaggatacagagtaaacaagaaagtgattaaaacatttaaaaagaaaagctgaggaaacagatatctatagaaggctttgaaaagctccaacagattcctcagaaattagatgtccatgcacatgagcagggattcaaaaatacctaggaaagtcctggcatggtcctaatatttcatctgtctctgatcttgagagtttctgaaagtagaaattgaaatctaagacagagttataaactgcctaagtattgaaggagttctctaatatggactaagaacctattagtgaaggatgagagatttgttggttcaaggcatttaaggcatttatcttctcacaaccaacacctttagctcatat

SEQ ID NO: 197886 - DNA, 332 bp, Homo sapiens
gcccagatgttgtacttataaaattttacttatcaaattttaaattataaaaatttaaatttgattgtaaataagattttaaaatgaatgtattggaakgatgtttccccagatagaattattaaagagatatagtcataaaaaaatagaaattctggaattggactgtaaaataactgatatgaaaaattcactaatggagctcaatggcagatttgagcaaacagaagaaataatcttgaacttgaatataggtcaattgaggtcatacagtctgaagagcagaatgaagaaaaaataagagtattcgagacatatgagacaccattgag

SEQ ID NO: 197887 - DNA, 525 bp, Homo sapiens
attttttacatgcatagagtgtgttatgatcaagtcagtgtatctatctctttcagtaattatcatttctatgtgttgataacatttcaagcttargactctgaacccttccattgtgttgaccctcctttgctagtacaggcaaccctttctctggatgtgaaaaagttaggaagtgctttttgaacgaagacattcaatggcttctgctaagtgaattgtcctctatgggctgctgttctttctgatcagcacttcccatatcacttccccattgcttccaagctggaaaaaagtgttagacagcactgatacctatagtaatgtggaaaattaaaaaaaatacccaactgaattaagaatttgggtaagaaaatatctaggcagaattttgaaagtgtcaactggtttctatgaggtgtctagctatcacctgcctgtcatctgatatagggaaataaactaataagaaacacttcagttttcagtagaaactagaaaatacatttccaagtaaggacctgc

SEQ ID NO: 197888 - DNA, 525 bp, Homo sapiens
attttttacatgcatagagtgtgttatgatcaagtcagtgtatctatctctttcagtaattatcatttctatgtgttgataacatttcaagcttaggactctgaacccttccattgtgttgaccctcctttgctagtacaggcaaccctttctctggatgtgaaaaagttaggaagtgctttttgaacgaagacattcaatggcttctgctaagtgaattgtcctctatgggctgctgttctttctgatcagcacttcccatatcacttccccattgcttccaagctggaaaaaagtgttagacagcactgatacctataktaatgtggaaaattaaaaaaaatacccaactgaattaagaatttgggtaagaaaatatctaggcagaattttgaaagtgtcaactggtttctatgaggtgtctagctatcacctgcctgtcatctgatatagggaaataaactaataagaaacacttcagttttcagtagaaactagaaaatacatttccaagtaaggacctgc

SEQ ID NO: 197889 - DNA, 525 bp, Homo sapiens
attttttacatgcatagagtgtgttatgatcaagtcagtgtatctatctctttcagtaattatcatttctatgtgttgataacatttcaagcttaggactctgaacccttccattgtgttgaccctcctttgctagtacaggcaaccctttctctggatgtgaaaaagttaggaagtgctttttgaacgaagacattcaatggcttctgctaagtgaattgtcctctatgggctgctgttctttctgatcagcacttcccatatcacttccccattgcttccaagctggaaaaaagtgttagacagcactgatacctatagtaatgtggaaaattaaaaaaaatacccaactgaattaagaatttgggtaagaaaatatctaggcagaattttgaaagtgtcaactggtttctatgargtgtctagctatcacctgcctgtcatctgatatagggaaataaactaataagaaacacttcagttttcagtagaaactagaaaatacatttccaagtaaggacctgc

SEQ ID NO: 197890 - DNA, 433 bp, Homo sapiens
ttaaaggtcttcttttttgcatagaacagatttgaaaatagcctatgtaaagtagaatagcttctattattctgcattttaacatytttttccttcatgatactagttataatttttaatttttctgtttgcttctttttccatcccctaaactcccctctatatctcactcagactatataatacacgaatggagaaactgtgcttattttgctcactgttcattgtttaacatattatctagtacactgatatgttcaataattatttttgactaagtaccttaatgaatatttttaaaggagacattgtaaaattttaagcataaaaatatttggggggaaaagactatgcttaaaaagtgatctagcactagactatataaaggactaaaatatgaggttgaacataaatcatttagttgttattgcag

SEQ ID NO: 197891 - DNA, 545 bp, Homo sapiens
tacaataaggtaaattacctagtctttattttttttggctagtacaaagattgtattttatatttttgttgttgctatgaaagtgtgtcactcagatttccaagtgcatagctgattatcagccccagtgcagtgctacccattacatccaccgttgcttttcctgtctgctctgcayccactaccgagccagcaggctggaggcactagttctgtaccatttcttcctgaggctgaaattttccatgaggtaaaccttgctcaggacatccatggcctgcctgaaactttcagagcctcactagaatatgagactcttcctacccattttgttcttccttctttccttttgcaggtatctgacctgcattgggatttgaagattcttcctgcctaggcttatccacttcctgtttaccctacatgggacctttcccaatacatttcttacacttctagctctgcttcttggaggacccaagttgagatcgtatttaatcatttgatccgtcttaccatatgatatattgtgtgaagcatttcca

SEQ ID NO: 197892 - DNA, 545 bp, Homo sapiens
tacaataaggtaaattacctagtctttattttttttggctagtacaaagattgtattttatatttttgttgttgctatgaaagtgtgtcactcagatttccaagtgcatagctgattatcagccccagtgcagtgctacccattacatccaccgttgcttttcctgtctgctctgcacccaytaccgagccagcaggctggaggcactagttctgtaccatttcttcctgaggctgaaattttccatgaggtaaaccttgctcaggacatccatggcctgcctgaaactttcagagcctcactagaatatgagactcttcctacccattttgttcttccttctttccttttgcaggtatctgacctgcattgggatttgaagattcttcctgcctaggcttatccacttcctgtttaccctacatgggacctttcccaatacatttcttacacttctagctctgcttcttggaggacccaagttgagatcgtatttaatcatttgatccgtcttaccatatgatatattgtgtgaagcatttcca

SEQ ID NO: 197893 - DNA, 465 bp, Homo sapiens
tacccagtttacccaacctcattttttttaagagagtgcccttcccgttgtttgttatttgtacctttgtcaaaaatcagttgactgtagatgtgtaggtttaatttctgggccttctatcctattctattggttgatgtgtctgtttttatgccagtaccatgctgctttgattactataattttgtaatagattttgaaataccgtagactgatacctcaagctttgttccttttggtaaagataattttgtttatgcagggtcttttgtggttctatatacattttaggakatttttctatatttgtgacaaatattggaattttcataggaatttcggtgaatctgaacatcacgttagatagtagggacattttaacaatattaattattataattcatgaaaacaggacaggaaagatacatcctggctcaataaatgtaataattccatgagcaatag

SEQ ID NO: 197894 - DNA, 559 bp, Homo sapiens
gtggcatttccaggcacaggaccgaatcagatgaataagacctgaaatgaacccccagcaaattgcagccaccctacagaagagggacctgactattgaaagaaagtaaacaagcagaaaggaacaacaacagcatcaacaacaacaacaacaaaaaggcccscataaaaaccccatccaagggtcagcagcctcaaaaaccaaaactagacaaactcatgaagatgagaaagaatcaatgaaaaaatgctgaaaactcaaaaggccagagtgcctcctcttctccaaatgatcccaacatctctccatcaagggcacagaactggacagagaatcagatggacgaattgacagaagtaggattcagaagatgggtaataaaaaactatgatgagcttttttttttttttatgagctaaacaagcatgttctaacccaacatgaagaagctaagaaccttgataaaacattagaggaattgataactagaataaccagtgtagaaaggaacataaatgacctgatgaagctgaaaaacacagcaagagaactttgtgaa

SEQ ID NO: 197895 - DNA, 605 bp, Homo sapiens
atagtaaacagtaacaaacatgtaatatttatatatatatgagtgtgaatggtcaaattataccaattaaaagacagagactgttataaacagtctataaacaaacaagatttgactatatattacctataagaaatctactttaaatatagagaatcagaaaagtaaagagatggagaaaggcataccatgataacaacaatcaaaagaaagctgtagtatctayattaatttcaggaaaagcagacttcagaacaagaaatattgtcattgctaaagagcaacattacatactgataaagcacaaggagtgaatgtatacaaatcagaaaatattaggagtgcaggaaatcacaggatgaaatgcagaacgtgccaaaaaattgaaccatattacaaatacatgaaacaacctctctgaagcttcagggatgggggttactgacctaaattactttggaagtttagtggagtctttaaaactcaacaaaatgtactgcacagaaacattgtactttatttgatagaactgtttttcacatgggttgatgttgacaattgtaaaaccactctaacatgtattctggaaataaatatgtaaatgg

SEQ ID NO: 197896 - DNA, 548 bp, Homo sapiens
caggttcctggctttccatctgccccactgagagccctctctcattcattcgacatgactgactgctcttggtgtccctggcttgtggactgggtcaatgctcagtcctcagacttgtcttccagtcccatatttgtccttttggtggcttgtagtattccatgactttacatgtcaccggttctctgaagagtcctgaacatacatgcccagctagattctccatcctgaactcacctcaaacattacgtcatcacccatcctgcaattatagctgccaattccaccactaccctcatctgttctgccaacagccttctccgtgtattcaggtcttcaatcttgaggtcatgcttggtgctgctttctctctcccaccagcccaatccatcagggacatycataggccctatgatgagaatgtatctgaacatggaccactcttcgccgtttcacgactgccaccctgatccaggtcccctgtcctctctctgagttcattacatcagcttcccctctggaatccctgcttcttcttgtgccaccta

SEQ ID NO: 197897 - DNA, 415 bp, Homo sapiens
tttctcactatgtgagcctatgttgtgtaaagctgtgtttggcaaccacctaaaatcaaattatacatctccagggcctccctgtacacttccaataacactgttctaatatattgagtataaaatcaattttatgccactaagaacatttcaaayaggtatactgaagcagaaatgtttttcattgacagaaacattgcagttacacaccatgactttcatttttttaatggaggcccaatccagtgatcgccagtgtagacacattataccagaagagagatatcagtatctgtatcaattggcctattgatcaattatatatctatctcagttcatgagttcatgacttcctctgctattttaatcctaagttgaaggcaagagataaaactattttgaattatggctttga

SEQ ID NO: 197898 - DNA, 534 bp, Homo sapiens
tccaaactaccccatgcaccagtcatggggaatttatcccagattctcatcaccacgaatggcaactatccrtatcagtcattgtacagacactgcctcatatatatttatacatttacttagttatgtatgtcatatttcaaaagattatgatgatttaaaaataatatccaaacaacatgctttgtctatagagtttaatttgaacagaacaattggagaggataattatcaggagtgtttctgttaagacctaagctaagggctttcttttctttttcacttaatccaacctcatcataatcccaggaggaagttaccactacaatccttattctttggggaaactgagtccaagggaagtgacacctcaagtggctacacaggtagtgaatatcagagcttgagtttaaatccaggttgtggggaattctaaaaaaatgtccttaagaagcatttgggtgaaaggataacttgtggagtgctgagactttctcagatccaacataaggctccaaaaaccgtgaacatgtc

SEQ ID NO: 197899 - DNA, 524 bp, Homo sapiens
agatacaatattttgaaaatccattgtatgtctattagcaatagacaattcaaatttaaagaaatggctagcatttaaaatggaataaaaatatgtgtaagagaggaataaacctgacaaaagatgcataaattcygtacagcatgtgaaacaccacacagaaccagcctcctctgtggcacctgccagagtgaacacagcttatcacttgcctcctctgattccagatcttgcctgctcctcggaccctgagaattaatcaaggctctccagaaatgagcccctatgagcctctgaaggcctcactctggtcttcctggtccataccctttcaccttccgttagactccaggggctgccttaacaacataccacaaataaagtggcttcaaagaacagatcttcattttctcacagttcttgaggccaaaactctgaaatcagtgttggttcctgctgaggctgtgctgggaaccttctctaggtctgttgtagcctccggggagtgctggagacccttgacc

SEQ ID NO: 197900 - DNA, 524 bp, Homo sapiens
agatacaatattttgaaaatccattgtatgtctattagcaatagacaattcaaatttaaagaaatggctagcatttaaaatggaataaaaatatgtgtaagagaggaataaacctgacaaaagatgcataaattctgtacagcatgtgaaacaccacacagaaccagcctcctctgtggcacctgccagagtgaacacagcttrtcacttgcctcctctgattccagatcttgcctgctcctcggaccctgagaattaatcaaggctctccagaaatgagcccctatgagcctctgaaggcctcactctggtcttcctggtccataccctttcaccttccgttagactccaggggctgccttaacaacataccacaaataaagtggcttcaaagaacagatcttcattttctcacagttcttgaggccaaaactctgaaatcagtgttggttcctgctgaggctgtgctgggaaccttctctaggtctgttgtagcctccggggagtgctggagacccttgacc

SEQ ID NO: 197901 - DNA, 524 bp, Homo sapiens
agatacaatattttgaaaatccattgtatgtctattagcaatagacaattcaaatttaaagaaatggctagcatttaaaatggaataaaaatatgtgtaagagaggaataaacctgacaaaagatgcataaattctgtacagcatgtgaaacaccacacagaaccagcctcctctgtggcacctgccagagtgaacacagcttatcacttgcctcctctgattccagatcttgcctgctcctcggaccctgagaattaatcaaggctctccagaaatgagcccctatgagcctctgaaggcctcactctggtcttcctggtccataccctttcaccttccgttagactccaggggctgccttaacaacatacmacaaataaagtggcttcaaagaacagatcttcattttctcacagttcttgaggccaaaactctgaaatcagtgttggttcctgctgaggctgtgctgggaaccttctctaggtctgttgtagcctccggggagtgctggagacccttgacc

SEQ ID NO: 197902 - DNA, 319 bp, Homo sapiens
tgtctatccaaccccaaggcaacaattacacaaattagtttgctttgcttttaagcaacaagcagactatcaaaatattaatctgataaactacaaagtaaattagattaagcaaagtagctactttgtatttttatgttttaaatattgtcatgtgcttatcagagaagtaattcctatatagtaatttatttctgcattttaatgatgttaaaatcctctttacacttatcktttaaaaattttaatatttcttaaatgtatagaaataaattttaatttggcacgcaaattaaaactggcatttatactcaaagga

SEQ ID NO: 197903 - DNA, 439 bp, Homo sapiens
gtcacattgggaacaaagattagggagggaatgaagtrtaaaaaaatgcctgaacatagggcacctcagaccattttcccactttatgacaaaaattatttagatcttgtaggatggagaaatcgaaagtgccattctctggccatttagagccattatcaagtttgtactggggccaagtggtgttgcagaagaaaataagatgcttattaggctttagatcaggtgagagttgaagaggtttcaaatttttaagaacacaggctaaaggggaagaaggaggaatgtagggtggaaggttgcccatagtaaaaagataagtttagagaaaagaggggtagagacatggagggggggtggtacttgccacccagaggaggtggtacttgccaccaaggtggaggatcaaggcaggcatccttgaggtgattgaacacca

SEQ ID NO: 197904 - DNA, 435 bp, Homo sapiens
gaattctatggccatgagatccctgtggccagatcgtcctattcttcaagaaagtccagaaatttaggttttactctggtaccttttaaagtttaaatgttggtaccacaatttgccacagaaaagagaatgaagacaaaagaaaggaaaataaaataaaatgaagataatagaaaagaaaattatgtaaagaaaattcagcatacttagagttgcatttggccatcagctccaatctgccaggcctgggttacagcccttgccygaggccagggagggaccaggtatcctttatttgtcaaggtgtccactgtacattgcacagagcctgccacgtgggaggtgctcattaacacatgtggaatgcatgagtgcaagaaagatggtgaatatgacaatgagtaattgcagggtagaaattcaagcacgttcatc

SEQ ID NO: 197905 - DNA, 422 bp, Homo sapiens
gaattctatggccatgagatccctgtggccagatcgtcctattcttcaagaaagtccagaaatttaggttttactctggtaccttttaaagtttaaatgttggtaccacaatttgccacagaaaagagaatgaagacaaaagaaaggaaaataaaataaaatgaagataatagaaaagaaaattatgtaaagaaaattcagcatacttagagttgcatttggccatcagctccaatctgccaggcctgggttacagcccttgcctgaggccagggagggaccaggtatcctttatttgtcaaggtgtccactgtacattgcacagagcctgccacgtgggaggtgctcattaacacatgtggaatgcatgagtgcaagaaagatggtgartatgacaatgagtaattgcagggtagaaattc

SEQ ID NO: 197906 - DNA, 552 bp, Homo sapiens
agtttaccccacacagtttttgtgatagtgagggagttctcatgagacctgatagtttgtaagtggcagtttcccctgtgtgctgtctckctcctgctggcgtgtaagtcatgccttgcttcccctttgcttttcaccatgattgtaagtttcctgaggcctctccagccatgaggaactgggagtcagttaaatcccttttctttataaattacccagcctcgggcagttctttatagcagtgtgaaaatggactaatataaaaggtggcaatgtaatcatttattttaaacttgagcatacacttaccatataacctagtaaattcactcataggcatataccagtgagaaatggaaaattaaagaccacaagaagacatgcacataagtgcttacaagagttttatttaaaatcacaaaaacctggcaacaccctgagaatattcagccagtgaatggctaaagaaattataatacattcatatactactcagcatactaaaatacaaaaaactattgatacacaaaataccatggatgaatactaaat

SEQ ID NO: 197907 - DNA, 552 bp, Homo sapiens
agtttaccccacacagtttttgtgatagtgagggagttctcatgagacctgatagtttgtaagtggcagtttcccctgtgtgctgtctcgctcctgctggcgtgtaagtcatgccttgcttcccctttgcttttcaccatgattgtaagtttcctgaggcctctccagccatgaggaactgggagtcagttaaatcccttttctttataaattacccagcctcgggcagttctttatagcagtgtgaaaatggactaatataaaaggtggcaatgtaatcatttattttaaacttgagcatacacttaccatataacctagtaaattcactcataggcatataccagtgagaaatggaaaattaaagaccacaagaagacatgcacataagtgcttacaagagttttatttaaaatcacaaaaacctggcaacaccctgagaatattcagccagygaatggctaaagaaattataatacattcatatactactcagcatactaaaatacaaaaaactattgatacacaaaataccatggatgaatactaaat

SEQ ID NO: 197908 - DNA, 552 bp, Homo sapiens
agtttaccccacacagtttttgtgatagtgagggagttctcatgagacctgatagtttgtaagtggcagtttcccctgtgtgctgtctcgctcctgctggcgtgtaagtcatgccttgcttcccctttgcttttcaccatgattgtaagtttcctgaggcctctccagccatgaggaactgggagtcagttaaatcccttttctttataaattacccagcctcgggcagttctttatagcagtgtgaaaatggactaatataaaaggtggcaatgtaatcatttattttaaacttgagcatacacttaccatataacctagtaaattcactcataggcatataccagtgagaaatggaaaattaaagaccacaagaagacatgcacataagtgcttacaagagttttatttaaaatcacaaaaacctggcaacaccctgagaatattcagccagtgaatggctaaagaaattrtaatacattcatatactactcagcatactaaaatacaaaaaactattgatacacaaaataccatggatgaatactaaat

SEQ ID NO: 197909 - DNA, 526 bp, Homo sapiens
gctctcactctaagaacaagtgaggcaaagattaggaaacaaagaaaataaaaagaaagcaagaaaaaacaatccacatactttcttgagtttttgctccatttgtctgcatagcttgcatcattcacatgtccaaatcaaagttactttaactcaaaataaatcagtgagtgatttatgattgtttttgcatacagaaagaaacaaagcaatgtttttccaaaatatgtcttgttttcactttgttccacaatgcattatggtaatattgcaatatgtcttaagataatacctacattttgagcacctattttgaamactttatgtcacttaatcttcagaatcaccctatactttatgtattagtattgttatcccattttatagataaagaaatggaagctaaaatataccaactacttattcaaggtcaaaagcaaaaccaggattgtctcatttggaagactacaccttcatctactgcacgattttcccttccaaccattttagttaaaagaaaagaaca

SEQ ID NO: 197910 - DNA, 576 bp, Homo sapiens
taatgggctcctttgcacacccattaaataagagcaaatatatgaaaacagagtgtcttgaattttataggtggtggataatcgtgagttgatccctgtgatcttctcctggtagtttctgtacttggatgatggtcaagttctgataatattctgatgacagaagaatgggttttgagcctgcaaattcgcccacccacattgcccctctyatctacaggaaccttccatgctttttccaaaattgtgtcccaaataaagaacagtaaaaaaaaaaaagcgtttgttttttattttgttttttgtttttaaggacatccaaatattttatccaggaatcataatcaccatcagtgcaattaggtatatatttaagcttctggctgtgataaatgacatctgaggtcatttcaagatgagtcattccaagttgcctgcaaatacaaatctcaaggtgccacctggaagggctgtgctgtccaaactgagagatgtagttttaaaaggccagccaagctcccatttattaatgaatccacgcatccgtggatctccacaggggaataagtcacacag

SEQ ID NO: 197911 - DNA, 598 bp, Homo sapiens
gtgtctcactaacctcaccccagtctcagccctggaccacagggtctcttcgcacaagttctaccagagccaccagaaaagaggccttgtctcctccaggagctgaggtcagcaaacaatggcctgggagtcaaatttggcctccaaactgtttttataagcacggtgttcctggaacgcagccacacccatttgctcccatatggtctgtggctgagtttctgctccagtggcagagctgagtcactgcgatagagatcgcatggctcacaaaccctataatatgacccgtaaggagggagtgtgccgaccccgttctagaagtaggatctctcatcatcctggaaacctggagctacttggggccattttccaccccatmatgtagcgagaccccacccggaaagacacccaaccacagagaagcggtggtgagggacgacagatggagacagatttgggagaaggcagacccccttaatccagctcaactccaagatgatttcttaattacttgagtcaataaataaatgtccttcatcttttttttcttaaatcaatctaaagaattttctatcatttgcaaccacaggaaata

SEQ ID NO: 197912 - DNA, 595 bp, Homo sapiens
ttttcagtaaaaaagaatgagtatgtgctgggccctgtggctcacgcctgtaatcccagcactttgggaagctgaggcgggcagatcacttgtggtcaggagcttgagaccatcctggccaacatgatgaaaccctgtctctaccaaaaagtacaaaaattagtcggaggtgatggcacatacctatagtcccagttactcaggaggctgagatgggagaattgtttgaacccaagaggcagaggctgcagtgagttgagatcacgccactgcactccagcctgggccacagagcgagactccatctctaaataaataaataaataaataaataaataaataaataaatgcatacagaaatagggcagtggctgtacatgcttgggaatccaatcatgagcaaaggtgctgcagaagtatttttatcttaagaggcacttaagtagaacattcatttttctgggactggttctctattgcttaaaaataattatwttttagatgattcctcaaataattcaggagcaactggttattcatttctaacatttttcagtagtaaaatgttcactcaagcaaagaacacctatatttg

SEQ ID NO: 197913 - DNA, 535 bp, Homo sapiens
tgataattattcctgagtacagatttttgataactttagagaccatactattggactaggtagaagctttcaaaactaattaaaaagctgatgtgtttatgaaaattgctaactacatcaagtaaaactatagttaattacatgaaattgaactggtagagatctaaaatgatttttatgactctttttgcttgaaacattgatgattctctctatcttttgttttccagagtcaagaaacttattatatttgagctattaatagttacagcaatttggacaaagtatgctcttgtgagcaaaactgaaatatttacctttctctctctacctgaattctccagaaygcagaaactatcagggattatctttattttatggcaatatagttatctgtataagttcaataagaatatgttttcttttctaatagaacacaattgaaaatgctggttattttaccaaggctttgacctgaatgacatattttcagatatgaacaaattgctttgagaaattgaatttgacttacaga

SEQ ID NO: 197914 - DNA, 535 bp, Homo sapiens
tgataattattcctgagtacagatttttgataactttagagaccatactattggactaggtagaagctttcaaaactaattaaaaagctgatgtgtttatgaaaattgctaactacatcaagtaaaactatagttaattacatgaaattgaactggtagagatctaaaatgatttttatgactctttttgcttgaaacattgatgattctctctatcttttgttttccagagtcaagaaacttattatatttgagctattaatagttacagcaatttggacaaagtatgctcttgtgagcaaaactgaaatatttacctttctctctctacctgaattctccagaatrcagaaactatcagggattatctttattttatggcaatatagttatctgtataagttcaataagaatatgttttcttttctaatagaacacaattgaaaatgctggttattttaccaaggctttgacctgaatgacatattttcagatatgaacaaattgctttgagaaattgaatttgacttacaga

SEQ ID NO: 197915 - DNA, 535 bp, Homo sapiens
tgataattattcctgagtacagatttttgataactttagagaccatactattggactaggtagaagctttcaaaactaattaaaaagctgatgtgtttatgaaaattgctaactacatcaagtaaaactatagttaattacatgaaattgaactggtagagatctaaaatgatttttatgactctttttgcttgaaacattgatgattctctctatcttttgttttccagagtcaagaaacttattatatttgagctattaatagttacagcaatttggacaaagtatgctcttgtgagcaaaactgaaatatttacctttctctctctacctgaattctccagaatgcagaaactatcagggattatctttattttatggcaatatagttatctgtataagttcaataagaatatgtttwcttttctaatagaacacaattgaaaatgctggttattttaccaaggctttgacctgaatgacatattttcagatatgaacaaattgctttgagaaattgaatttgacttacaga

SEQ ID NO: 197916 - DNA, 535 bp, Homo sapiens
tgataattattcctgagtacagatttttgataactttagagaccatactattggactaggtagaagctttcaaaactaattaaaaagctgatgtgtttatgaaaattgctaactacatcaagtaaaactatagttaattacatgaaattgaactggtagagatctaaaatgatttttatgactctttttgcttgaaacattgatgattctctctatcttttgttttccagagtcaagaaacttattatatttgagctattaatagttacagcaatttggacaaagtatgctcttgtgagcaaaactgaaatatttacctttctctctctacctgaattctccagaatgcagaaactatcagggattatctttattttatggcaatatagttatctgtataagttcaataagaatatgttttcttttstaatagaacacaattgaaaatgctggttattttaccaaggctttgacctgaatgacatattttcagatatgaacaaattgctttgagaaattgaatttgacttacaga

SEQ ID NO: 197917 - DNA, 519 bp, Homo sapiens
cattcacacaccatacacagagagatacaaacaagtaatatttcagattagctcctagttgggatagaaatacttttttaaaatattaatcattgaatgtccctaatccaaaaatatatctgyaaaatgtatgtaggcagaagaccctaaatctttatacaactttaatgatacaggcccacatggcaattgcaaaaaatgaataagatttggcatcctgaaattgtccaagtatcctctagaggtaggtgtcagtagctactattatctatgatatccttgttttgcctcctaaggtgcagtgttagtctgttgtcacactgctagaaagaactatctgagactgggtaatttatgaagaaaagaggtttaattgactcacagttccacaggctgtacaggaaacatggttggggagacctcaggaaacttaacaatcatagaagggtgaaggggaagcaagtaccttcttcacatggtgaagtgagagagagagaatgagacagagagagagcaagc

SEQ ID NO: 197918 - DNA, 482 bp, Homo sapiens
gaattccacaaattagatagcctgtctatctagtattggtagattctatgaaatgaacacagaagaacattggaaagccatgcataaatattaatagtagttatttttagatggtggttgccatagcctgtttgtgctgctataacaaaatatctgaaactatgtaacataaamaacagaaatttgtttctcagagcttgggaggctaagaagtccaagatcaaagcactggcaggttcatcagtgtcagatgaagcctcctttctcatagatggcaccgtctaggtgtcttcacctggtggaaagaatggaaagagcacaggggacaaatgctgtgtcctcatatgactgaagagcagatgaacaaaaagggactaagctatttccctgcagccctttcatgagatactcatccactcatcaaagcagagccctcatgacttaatcatgtcccaaaaggtcccaactcttaataccacctg

SEQ ID NO: 197919 - DNA, 562 bp, Homo sapiens
tctcagaaatgagatacaattatctttgtctatggcctccgcaaaaaagtagtggaattaaaacttttgggagaataacacagttggaaatctccagttctccatgatttttttttcwtgaaatgaactgtaatttgaagttttcattttataacaattattctgaatctataggagggtggagagctaattaaataagcttttctgtagaaaaatttctccttggcctaaagccagtagatcagaaaaaaaaaatgaagaagcaaagaagagaaaatagtctggtgctgatgaattctaatgaacatttagggttcacaggtcaggctgcaatagcatggtatgccatacatcattttcttttttgctcaattgaacctgcagcaattggtgtcttttatgctttcttcaaatgtagacatttgtaggttatgaaatataggtagtaaaaaaaagtgtcaatttatattctataataggttgactaatgattgataataaaggatatgtagccacagtataagtatttttttccagaaacacaaggataggtggtagaagc

SEQ ID NO: 197920 - DNA, 546 bp, Homo sapiens
ttaccgctctcctatgtacatgttttatttcacatactgccttaaagttttgtcctgttatggaaggcagaaggtgttccaatagtgctgcacaaataatgagaaaacacacctttctacattagcttaacacacacacacacacacacacacaaaatccaatattttaatctgtgagaagaatcattagaaaagaggcaacttgttttttattcagttcctagtattgcttgccttgtaattaaattagaatcaatgaaataccatataaaatatttttattctcattgayagattcccagattcttgtgttttcattcatttattaattacttcataaaataagcatctattgactatggcagaatattcatgttaaaattcttcatttgtgtgttcatgaggtatgaacaggatatttcttacttatcatgatctacgtggtagtacctgatccaagtaatgtattggcaactaaatatttcctaagattttctgaaatctaaaaatagactctaactttgggatttaggatcacagataaat

SEQ ID NO: 197921 - DNA, 564 bp, Homo sapiens
aaaacaaaaagagatatctcaggtgtatcttgggatttaaaattgttcttaagggatatatgtacctagcatcccatgttggaactttaaaggcaattttctataaaccagtattaaatcttgcatcattatttcaacccatatagattattgattatatgcttaattggaataattctattttaagaaatgtggaaacaaatggttatagagcatgaaatctcctgacctgagacatgtttgaattttgattctaacacatactaaatgattgcaaatgacatacaaaacttcaatcactcagccatttaataaggcaatactaagaagaatattgagcaaagcagatacatcacttccatcatagatcttgttatctggagaaataattactagggataagagctctcataaagagaacatcgtatttgtcagccacatgtaagatayatcatctaatttaatcatgaaaacaaacccatgagatgtttactattatactttttaatagataagataaccaagaaattaaatcacacacacagaaaatataaaaacagggat

SEQ ID NO: 197922 - DNA, 569 bp, Homo sapiens
atcattgagttaaaaacaatgtaagtgttggaatgctaacacaacttgttgaattataatagatataaggataccagtgactatttttatcatttcaatgcaagtggccataaaattgtagtggaatcaggatttcagttcaatatggctcagataatatgcacaaccttttctatgtttctaagaatgtgattcctcagatactcaaagaataatgtttatagcaccaaagtctgtagagtttctctctataatggtcctcattattcaatgtataatttaaaatgaaatatcatgaagagactttattgcgcaaagtccaacattttgtatgtaataggaactgaggtagacaagcctttagttcaaggatttatgttaatttgactcaggagttggaytgcacttaatgtttatggtaactctcagggccatgggcttaaattcctctagggtccttgtttctatctcccctcctgtcactgagcttccctaagaactgcttctcagaaagagtctgcatctttcggccctgtcaactgtaatcaactgctattatactggaatcc

SEQ ID NO: 197923 - DNA, 545 bp, Homo sapiens
aaaatatttagcattgtacagtcaggcaggtgccacataacaacatttargtcaatgatagaccgtatatatgatggtggtctgatatgattatagtggagctgaaaaattcctattgtctattgacaaagtaggcatcataatgtcatagcacaatgcattactgacgtgtttgtggtgatattaaacaagcctattttatgtgaattattgataataatattgtgtactgtacacaataattgctaataaagtagaaatgaatatattattaacttgaagctagcttatagcaggaaaaagtattagcaagtacagtacacaatacctgataataaattactgttatttgtgtatttactacacttttaatattattttacagtatactccttttaattataaatataaaaagttagcaataaaatagtctcagcagattcttcaggacttactccagaagaatcattgttacaggagatgatagctttattttattgcccctgaagaccttccactgggacaagatgtggaggtggaagatg

SEQ ID NO: 197924 - DNA, 614 bp, Homo sapiens
attttgcttattgattttccagaaggccaaagaatgataacatctgtttattatgagagtgttttgagaaagtcagccgtagctttaggagaaaagcacccaggaaagcttcgccaagagcccttctccaccacgacaatgttcctgctcactcctctcttcaaacaaggtcaattttatgagaattttcatgggaaatcattatatttataccttaaagtcctgatttggctccttctgacttctttttgtttcctgatattaaaaacaatctctaaaggaaacccatttttctttagttaataatgtaatgaaccattgacatggttaaattctcaagacctgcaattcttttgagayggatggatgaaattaatggtactatcacctacaaaagtgtcttgaacttgatgaaacttataatgagaaataaattttacaattttactatttctcctttaattcaattttccacaaatttttgaagtcctcctgtgtaaatatcttccaaaataaaagcaaataacattagaaaatttgtgtaataaaagtaaagtcagttctcagaagaaataatataacataagcatataaagaagtagaatgaccccaga

SEQ ID NO: 197925 - DNA, 545 bp, Homo sapiens
aaaatatttagcattgtacagtcaggcaggtgccacataacaacatttaggtcaatgatagaccgtatatatgatggtggtctgatatgattatagtggagctgaaaaattcctattgtctattgacaaagtaggcatcataatgtcatagcacaatgcattactgacgtgtttgtggtgatattaaacaagcctattttatgtgaattattgataataatattgtgtactgtacacaataattgctaataaagtagaaatgaatatattattaacttgaagctagcttatagcaggaaaaagtattagcaagtacagtacacaatacctgataataaattactgttatttgtgtatttactacacttttaatattattttacagtatactccttttaattataaatataaaaagttagcaataaaatagtctcagcagattcttcargacttactccagaagaatcattgttacaggagatgatagctttattttattgcccctgaagaccttccactgggacaagatgtggaggtggaagatg

SEQ ID NO: 197926 - DNA, 433 bp, Homo sapiens
ttgaattctgtgcactctcagtctcaacagcacatggaagctgccaaggcttraggtttgcaccctgtgaagccatggcccaaggtctacactggcccctttcagacaaggctggaacaactgggatgaaggacaccaagtctctaggttgcactcagcatggagaaccttggcttggcccatgaaaccacttttttctcctcgacctccaggcctgtgatgggaggggctgccaccaaagtctctgacattccctggagacgttttctttactgtcttggggattaagatttggctcgtcattactgatgcaaatttctgtcgccagcttgagtttcttttcagaaagcgaggttttctttcctattgcaccatcatgctgcaaattttctgaacttttatgctctgtttcccttttaaaacagaatgcctt

SEQ ID NO: 197927 - DNA, 433 bp, Homo sapiens
ttgaattctgtgcactctcagtctcaacagcacatggaagctgccaaggcttaaggyttgcaccctgtgaagccatggcccaaggtctacactggcccctttcagacaaggctggaacaactgggatgaaggacaccaagtctctaggttgcactcagcatggagaaccttggcttggcccatgaaaccacttttttctcctcgacctccaggcctgtgatgggaggggctgccaccaaagtctctgacattccctggagacgttttctttactgtcttggggattaagatttggctcgtcattactgatgcaaatttctgtcgccagcttgagtttcttttcagaaagcgaggttttctttcctattgcaccatcatgctgcaaattttctgaacttttatgctctgtttcccttttaaaacagaatgcctt

SEQ ID NO: 197928 - DNA, 433 bp, Homo sapiens
ttgaattctgtgcactctcagtctcaacagcacatggaagctgccaaggcttaaggtttgcaccytgtgaagccatggcccaaggtctacactggcccctttcagacaaggctggaacaactgggatgaaggacaccaagtctctaggttgcactcagcatggagaaccttggcttggcccatgaaaccacttttttctcctcgacctccaggcctgtgatgggaggggctgccaccaaagtctctgacattccctggagacgttttctttactgtcttggggattaagatttggctcgtcattactgatgcaaatttctgtcgccagcttgagtttcttttcagaaagcgaggttttctttcctattgcaccatcatgctgcaaattttctgaacttttatgctctgtttcccttttaaaacagaatgcctt

SEQ ID NO: 197929 - DNA, 508 bp, Homo sapiens
tcctggggatggaaacttcttgtctctttctgcttctggtggcttctggtggctttggcctccttagtttgcagctttctcactccaacctctgcttttgtcttcataccacctgctcctcagtgtgccttttcctcttctgtcttatccaaggacacttgtcattggatttagggccaacacagcaattcagtatgatcttacctcraggcccttaacttaatctgcaaagattatttttaaagaaaatgtggcacatatacaccataggatactatgcaactgtaaaaaggatgagatcatgtcctttacagggacatggatgaagctggaagccgtcatcctcaggaaactaacacaggaacagaaaaccaaacactgcatgttctcactcataagtgggagttgaacaatgagaacacatggacacagggaggggaacaacacacaccggggcctgtcggggggttggtggggcgagaggaaggagagcatcaggacaaatagc

SEQ ID NO: 197930 - DNA, 555 bp, Homo sapiens
ttatggagtaaagtattggaacatagaaaaaaaatcggtatgaatttgtacttaaagacttgtctttttcaatactataaggatgctaacttattcgtgagtacagacatacctcattttattaagttttgctttattaccctttgcagataatgtggtttttatacattgaaggtttgtgacaatcctgcatcaagcaagtctattgaagccatttttccaacagcatgtgctcactttgttacaaattttagcaatatttttaaagtatgtgcattagtttttaagacatgatgctattgcacacctaatagactacactatagtataaacataatttktatatgaactagggaacaaaaaatatagtgtgactcgttttattgcaatattcactttattgcggtggtctggaacccaacctgcaatacttgtgaggttggcctgtaagtgaatttttagggatgtaaatgaaccaaaagtcacttagccatatatcatagccacctaggaatccttcgtatgtcattccagcctatgaataaatatctttat

SEQ ID NO: 197931 - DNA, 555 bp, Homo sapiens
ttatggagtaaagtattggaacatagaaaaaaaatcggtatgaatttgtacttaaagacttgtctttttcaatactataaggatgctaacttattcgtgagtacagacatacctcattttattaagttttgctttattaccctttgcagataatgtggtttttatacattgaaggtttgtgacaatcctgcatcaagcaagtctattgaagccatttttccaacagcatgtgctcactttgttacaaattttagcaatatttttaaagtatgtgcattagtttttaagacatgatgctattgcacacctaatagactacactatagtataaacataatttgtatatgaactagggaacaaaaaatatagtgtgactcgttttattgcaatattcactttattgcggtggtctggaacccaacctgcaatacttgtgaggttggcctgtaartgaatttttagggatgtaaatgaaccaaaagtcacttagccatatatcatagccacctaggaatccttcgtatgtcattccagcctatgaataaatatctttat

SEQ ID NO: 197932 - DNA, 587 bp, Homo sapiens
gatatcagctatctgaatataaaacacatcaggaaatccttttctctgtctttacaatttacctctacacctttatctttcagtaatacagtacaaaatgtatgtttgttgcaggaagtcaaggaccccgaatggaagaactggctgaagccatggcagaagaacataaattgtgaagatttttatggacatttattagttccccaaattaatacttttaaaatttcttatgcttgtctttactgtaatctctgaacataaattgtgaagatttcatggacatttatcacttccccaatcaatactcttgtgatttcctatgcctgtctttaatctcttartcccattgtcttcgtaagccgaggaggatgtatgtcacctcaggaccctgtgatgattgcattaactgcaccaattgtttgtagagcatgtgtgtttgaacaatatcaaatctgggcaccttaagaacaggataacagcaatgttcagggaacaagggagataaccttaaaagtctggctgcctgtgggctgggcagaacagagccatatttctcttcttttaaaagcaaataggagaaatatcac

SEQ ID NO: 197933 - DNA, 478 bp, Homo sapiens
gctggcattgagtgtcagcagyttttccaggcacatggtgcaagctgtcagtggatctaccattccaggttctggaggatggtggccctcttctcacagctccactaggcagtgccccagtagggactctgtgtgggggttctgaccctgcatttcccttctgtactgacatagcagaggttctccatgaggcccccacccctagagcaaacttctgcctgggcacacaggcatttctacaaatcttctgaaatctgggcaggggttcccaaacgtcaattcttgacttctttgcactcttgggctcaataccacatggaagctgctaaggattgaggcttgcaccctctgaagccacagcctgagctctacattggccccattcagccatggctggagtaggtagaacacagggcaccaagtctttaggctgcacacatcacagagaacctgggcctggcccatgaaaccacttttt

SEQ ID NO: 197934 - DNA, 533 bp, Homo sapiens
tattcttaaatacttaaatattctacttaaatatttcatttaagtagaaatatttattaaatccatgtcrtgaaccaaatatgccattagtttctgagataataaaacccagttctaggttgtaaatgaccacctaagatatagattgatatatagatacaggtatagttacagatatacatataggtatagacaaggatgaaagcagtgggggagaatatgaaataccaagcatgaagggtagtggggtaaagatttgaatccagtatggtgagggcaaaaactcagaccctgaagttgttttcacatggatgaggcaagacagaatgcactttccttaggaaaagacatgagattaatttttaaagcaagcagacctgcaggagaaaggggagtatggactgatgagagaacattgcaagccatgggatcaacatgatcaaaagcactgaggcaagaaacagccagggagaaaacaagagataaatccagagcttaggcaggagcccaattacggagaaacttataggata

SEQ ID NO: 197935 - DNA, 592 bp, Homo sapiens
aaaaacgcatccaaaagtaatcaacatcaagatcaaaggtagataaatccatgaagatgaggaaaaaccaacacaaaatggctgaaaattccaaaaaccagaatgcctcttctcctctaaatgatcacatctcttctccagcaagggcacaagactgaacggagaatgagtttgatgaactgacagaaataggcttcagaaattgggcaataacaaactcctcttagctaaaggagcatgttctaacccaatgcaaggaagctaagaaccttgataaaaggttacaggaactgctaactacaayaaccagtttagaaaagaacataaatgaactgatggagctgagaaacacagcatgagaactttgaagcatactcaagtatcaatagctgaatcaatcaagcagaagaaagaatattagaaattgaaaatcaacttaatgaaaaaaaatcatgaagagaatattagagaaaaaagaatgaaaaggagcaaacaaagcctccaggcaatatgggactatgtgaaaagaccaaacttacgtttcattggtgtgcctgaaagtgatgaggagaatggaaccaagttggaaaac

SEQ ID NO: 197936 - DNA, 532 bp, Homo sapiens
tgacttttatacaagagaataagaacaacccctgggaaaatgtgcaggttgtgaagtttgtttttgggcctcacaccttccctttcagaactcaattaaagtggactcaataatgcttactgaaatgtactagtatgtgtactgatgaatgtatgaatttttcttcctctcctaaatttactcttctttttctaatccttagcatctactttttaacctcaatttttggtaatttttgctacaaatagactgacaaggaatttcttctgctctgagtcacactttcattttgatagatttggcaaaagataaatctgagatccaaagaatgaaatagaaggtctttggccgwagtaatggtgaagagagaggtttggtagctgggtattctgttccttaaagcctcaaattcctccacagaggaggctttttattccacttatccttgaaaatatatctatatgtagaaataatggctagagaaagaaagggagtttgagtggaaatgtatgattcctattcatcagggtga

SEQ ID NO: 197937 - DNA, 480 bp, Homo sapiens
gtatattagcaaagtatgtttggtgtttcagtttgggctgtaatccagtagatggtgcttaaatgtaatggctgatagataagtccttactcagctgctcagcatctctgtattttcttgagtttgcagtcatgctccctctcactgttctgaaagtgtagactcctttcccattcaaatgctgtctacagattttggcttggcattcccaggcgagttcagactttttgttttctccccagctttggaggagcatgggtggaaaccttggcagtagcaatggcagagagaccatcacctttctctgggagctccatcctttctcttcttctctgtagggtacctgtggtgtggtagatatgcaagtaacacactcaggctgttttttaattccctagctgatgtcagcaaggccaggtacccrtaaagtggcagtggcagagaggctgtcagttgtctctaagaacttcatgtcagaga

SEQ ID NO: 197938 - DNA, 388 bp, Homo sapiens
cgctgccatcctctgactgcaggaaagacacatcacatttcggagccaggtccttcactgtctcatgcatgactttggcaaagtgaggatgtagcttgtagagggtcccatccacacccactgtcactttgagagcgtccagcccacggttttctcgtatcttgtccaccacagcrgccatgcctgcaccacagagctgggctgcccgccgggccaccacggtgcacacctccttaacaatgatgctgtcgtcacaggtgctctcaagccctaagtgttgcagcagggccaggcagtcactctcaatctgagacaagaacttggtttcaaagatgccccttgtcttgagtagctctgagatgtggcctcagaagagcagcccacgctt

SEQ ID NO: 197939 - DNA, 523 bp, Homo sapiens
ctttgcatccttcaatccaatcaagttgacacctaatattaaccatcacaatcagatacatgcaacttaaatctacaatgagataaaataaagttgatgttaatatttwaaaaaatctggtatatgcatacattggaatattattcagctataaaaaataataaaattgtgtcttttgcagcaacataggtggaactggaggccattatcttgggagaaacaagttagtcacagaaagaaatattacatattttcattcaaaagtgggaacttaataatgtatgaacatcaacctagagagtggaataacagaccatggaaactcagaagggtgagagtaagagagggtggataataataaattatacatgggaacaatgcacattattcaagtgatggatactctaaagccctgactgaccaccacacaaaatatgcatgtaacaaagttgcaggtgtacaccatacatttataaaaatacaaaaggaaaaaaatgcacaaattaccaaaatcataattgaa

SEQ ID NO: 197940 - DNA, 568 bp, Homo sapiens
taaaaaggacaaagttgcatcaaccttttttagtttaaattgaactaggaacagacaccacttattgctaaaatggaacatttacttccactttggattaaaaattataatagtaaacaaatcccaatcagtttgtttactgttcaggccaaagcattgaagttggttgccacattgaaaaaaatggcatctacaaggagaatgaagaaacgtttactgccagtgaaggccaatttcagcatttcagaattcatcatgaattgattaatatttaaytatctggtgaagctgctagagcagataaggatgctgctgtaaaacctacacccagattcagggattacttaatgcaagtggctatgacaaaaattatgaagatattccagaggaaagatgccagaaaaacttcatattaactaaacttttggagatattttatgacactgaaagtacaaaatataaattgttggaagttgagctcaacttagaaagcagaatgacaataagtagaggcgtggaaaacatatttactctgtatcatgttacactgtgagaagaagataaacac

SEQ ID NO: 197941 - DNA, 496 bp, Homo sapiens
caaagtcttcgagtcttaggaaatcccatgagggattataaattggatgaaactaatgaaacttcagtgtttttatatacttaaaactacattttctgccaggctctgraatatttaatcattgttgaaaggatagggatctacctgaaacagtcttcctagaaattaaatgaagggttggatcattctaagatggctgaatagtaacagttccagtctgcagctcccagcatgactgacccagaagatgggtgatttctgcatttccaactgaggtacatggttcatctcactgggactggttggacagtgggtgcggcccaccaagggtgagccaaagcaggagggagtgttgcctcacctgggaagtgcaaggggttgggggatttccctttcccagccaagggaagctgtaacagacggtacctggaaaattgggacactcccaccccaatactgcacttttccaaaggtcttagcacatggctcaccagga

SEQ ID NO: 197942 - DNA, 474 bp, Homo sapiens
cattcaagtcttgccaaagtcttcgagtcttaggaaatcccatgagggattataaattggatgaaactaatgaaacttcagtgtttttatatacttaaaactacattttctgccaggctctggaatatttaatcattgttgaaaggatagggatctacctgaaacagtcttcctagaaattaaatgaagggttggatcattctaagatggctgaatagtaacagttccagtctgcagctcccagcatgaytgacccagaagatgggtgatttctgcatttccaactgaggtacatggttcatctcactgggactggttggacagtgggtgcggcccaccaagggtgagccaaagcaggagggagtgttgcctcacctgggaagtgcaaggggttgggggatttccctttcccagccaagggaagctgtaacagacggtacctggaaaattgggacactcccaccccaatactgc

SEQ ID NO: 197943 - DNA, 444 bp, Homo sapiens
tttcttacattacattttacagaagacagatggccccagcatgtgttccctcttggaatatgatctaaattcctgattccaatgagtatgcatgtatatgtttgcatgtgratgtggatgtacatcaaatagaaatgtattctttgacaccacacatttttgtctcatgatggaagaaaaaatgttattattaaaaacaaataattacagagtaaataaagaattctgattttttatgaaattgcacatttcatagaaatgggagtgaagggctttccaaactttctgaagtagatttttgtaaatgttctttatccccaaattttagtgttggatagtcccttagaggtcatctagtgactaagcccttcgtaaggaaaggccttgatgccttagccgggaggttttaagtgtatgaacaaggtcacaaaagcagaggcagag

SEQ ID NO: 197944 - DNA, 559 bp, Homo sapiens
taagattaataatcaatcagctgatcttaaagtagagagattatctaggcgagtacaatgtaatcatgtggacccttaaaagtggaagaagaaggcaaaaatgtcagtgagaaagagatgcagcagaagataaatcaggaaagatgaggctccagaaggatcccattcagctgccacagtgttcacctgtaatctcagctgcctgggaggctaagggaagaggatgccttgagcccaggaacttgcaactgctggtgaagctactatcacgtcactgcacatgaacccggtaggtgaaggttgmagtgagctgagattgtgccacttgaaagaatgactttcaaggactggagaaagacgtctaggacctaaagatatatctgagctgacagccaacaaggaatctcagtcctgcaaccacatggaactgaattctgcaaataacctgtatgtccctggaacagcgtttaaaatggaaattggctctccctgccaatttgattttagccttgtgatatttagagcagacaaaccagtcaatcccactggatttctaacc

SEQ ID NO: 197945 - DNA, 584 bp, Homo sapiens
atgacatggaaaagtgaaacaatctcatatttatgacatttcagataatgctaaattaggatttatattttatgttatgtctcatatttcaaaactaaaatacaaattkaattccatttacttaaagtagaatacaaaatgatataatacaaaatgatataaattgataaagtaaaaaagtactttctaatatcaaatgttgaaaatcatttttaaaatcatattactcaaatttatcctctaattatatacacgccttctctttacattaaacaaaaacatatacatgtgattcaagtaaaattttgtgagtgatgattttataatagggtagaaggtgttgaaatgctaaagaatacatcttgtgcctaggaaaggaaaaataaataccaaggaaaatcagatggggtaagacggaactataaaacaagtaagaaaaagagattccaaaatttgtcaactgggacatgtgtttaatccctatagtccttttttttctgtattcataagatacataaatttcccctatttatcaaatatatgattctattaaaaatggactgaaagattctaggagactcaaa

SEQ ID NO: 197946 - DNA, 621 bp, Homo sapiens
acttttatctttttacattatgttttgatctacagtgatactttaagaatatacagaaaaaatggcttgtgtgactgatgtatcaattaccacaagggaatgaactttaatgttaccagaagttccaaacagtggaatgactgtgtgaaaagaaagggaggtttatacattggttctaaagaaagaaaataacgggagagmattcctaaggtacactaactgatgtcaggatctcatataatgtggaggtacagttggatatttcttgagattagtaagattttcttcatgccattcctgaatgaaagatggaatcagatcaagctgtcgtttttattaataatgggtgtatatctgaacactttctctttgacagggactcttttgtggccttactttatttttctgcattctagctttgacctaaatgtctccccttcatacttagcatcttttctgatgactgaatgggacctcgtaacagctcaattcactacgtgggaaatgttggccaattttggagggctttacgttactaaatacaatcctggaaactttaagcatttgaaaagtcttttaaaatgattacttactatttggataggatacaaaagtgccaca

SEQ ID NO: 197947 - DNA, 310 bp, Homo sapiens
ctctttggttaaatttattcctaagtattttatcttttttgatactattgtaaatgaattttttctcttgattttctttggattgtttattgctagtttagaaattcaactaaattttktatgctggtattatttcctggtccttattgaatttattatttctaacaatttttatggcatctttaatgttttctacctataagatcatgtcatctgcaaacagataatttaacttcatccctactgatttggatactttttttttttttttttacccttttctaattgctctggccattacttctggtgt

SEQ ID NO: 197948 - DNA, 546 bp, Homo sapiens
ttatatataatctcaagtattaacagcagaatcaaccaagttgagaaaagaatctcagagctctaagactggttctcttaaataactcagtcagataaaaataaaatttaaaaaatgaacaaaacctctaagaaatatgggattatgtaaagagcccaaatctgcaattcatttttgtccctgaaaggaaacagataaagcaagaaacttggaaaacatatttgaggacatagtctatgaaaatttcccaacctcaccagagaacattcaaattcagcaaatactcactcaggtacaacagtagaaacctcctgygagatactgtacaagacggccatcccctagacacatactcatcggattttcccaggttgaaatgaaagaaaatgttaaaggcagctagagggaagaggcagattatctacaaagagaatcccattaggctaacagtggacatttcagctgaaaccatacaagccagaagagattggggacctctattcagtattattaaagaaaacaaattccaacaaagaatttcatatc

SEQ ID NO: 197949 - DNA, 546 bp, Homo sapiens
ttatatataatctcaagtattaacagcagaatcaaccaagttgagaaaagaatctcagagctctaagactggttctcttaaataactcagtcagataaaaataaaatttaaaaaatgaacaaaacctctaagaaatatgggattatgtaaagagcccaaatctgcaattcatttttgtccctgaaaggaaacagataaagcaagaaacttggaaaacatatttgaggacatagtctatgaaaatttcccaacctcaccagagaacattcaaattcagcaaatactcactcaggtacaacagtagaaacctcctgcgagatactrtacaagacggccatcccctagacacatactcatcggattttcccaggttgaaatgaaagaaaatgttaaaggcagctagagggaagaggcagattatctacaaagagaatcccattaggctaacagtggacatttcagctgaaaccatacaagccagaagagattggggacctctattcagtattattaaagaaaacaaattccaacaaagaatttcatatc

SEQ ID NO: 197950 - DNA, 546 bp, Homo sapiens
ttatatataatctcaagtattaacagcagaatcaaccaagttgagaaaagaatctcagagctctaagactggttctcttaaataactcagtcagataaaaataaaatttaaaaaatgaacaaaacctctaagaaatatgggattatgtaaagagcccaaatctgcaattcatttttgtccctgaaaggaaacagataaagcaagaaacttggaaaacatatttgaggacatagtctatgaaaatttcccaacctcaccagagaacattcaaattcagcaaatactcactcaggtacaacagtagaaacctcctgcgagatactgtacaagacggccatcccctagacacatactcatcggattttcccaggttgaaatgaaagaaaatgttaaaggcagctagagggaagaggcagattatctayaaagagaatcccattaggctaacagtggacatttcagctgaaaccatacaagccagaagagattggggacctctattcagtattattaaagaaaacaaattccaacaaagaatttcatatc

SEQ ID NO: 197951 - DNA, 455 bp, Homo sapiens
gctaacagtggacatttcagctgaaaccatacaagccagaagagattggggacctctattcagtattattaaagaaaacaaattccaacaaagaatttcatatccagccaaattaaacatcataaatgaaagagaaataagatcctattcagaaaagcaaatgttaagggaattcattatcaccagacctgccttacaagacatgctgcaagaagttttaaatacagaatgcaaagattattcctagccaccacaaaaccacacttaagtatgaagacactattaagccagcacacaatcaaatctgcataataaccagctaacaacataaagacagaatcaaatttgcmcatatcaatattaaccttgaataggatgggctgaatgccacaattaaaatgcacagagtggcaagtttggtaaacaagaaagacctaactgtatgctgtcttcag

SEQ ID NO: 197952 - DNA, 610 bp, Homo sapiens
taagagaatggaaaccatgtacagacatttagcatgacacttctgcttacaccatttcaacaaataaaaagaaattattgttctgggagaaatacacattccaaatctttgtaaaatgaaacccttcaaaattaggaaatggaacaactctttttttttttttttttgagacagtcttgcttagtcatgttgctcagtgcaatggcgcgatctcggctcactgcaacctctgcctcccgggttcaagcgattctcctgcctcagcctcctgagtagctgggattacaggcacctgccatcatgcccagctaatttttgtatttttgtagagatgggtttcaccatgttggccaggctcatcttgacctcaggtgatctgcctgcctcggcttcccaaagtgctgggatgacaggcgtgaaccmccgcaccccaccagaaatggaacaactcttaatgagtgacatgagctaccagataaaggaacactatataaatttcagggtccagggtcctagaagtgcctggagctgagcccctgctccccaagtctgtacacatgcaccctgggtgctcaagccacaggccctgttgtaatgggaagagagaatt

SEQ ID NO: 197953 - DNA, 631 bp, Homo sapiens
acctcatctctgcaaaaagcacacaaaaaaattagttgggtgtggtggcatgcacctatattcccagctactctggaggctgaggtaggaggatcaattgagcatargaggtcgaggctgcaaacagctgttatcacacccctgcactctagcctggatggcacagcaagaccctgtctccaacaacaaaaacaaaaataaaaaacaaaaacaaaaccctaaataaaccttccatgaaataccacttcaccccagttaaaatggattatatccaaaagacaggtaataacaaatgctggcaaggatgtggagaaaagggaacccctgtacactgttgatgggaatgtaaattagtacaatcattatggagaacagtttggaggttcctcaaaaaactaaaaatggagctactatatgatccagtaatcccattgctgggtatatacccaaacaaaggaaatcggtatattgaagagagatttgcactcccgtgtttgtttcagcactgttcacgataaccaagatttagaagcaacctaagtgtctatcagcagattaatggatgaaaataaatggggtgcttatacaaaatggagtactattcagccataaagaagaatgaaatcctgtc

SEQ ID NO: 197954 - DNA, 439 bp, Homo sapiens
ttaggggtgttctgtcagctccagagcttcccgttttgcatacacggggagactttctctagcttctgtccttcctgttttgtgatttgtacatggatgaagatctctctcgatcatgctctggcaaagcatccttaccttgttaagagtgtatgtaraatccttttcatagtttaaatcggatttctgcagcaataggcagcctggctcagcagagagcctggagagattggagttacgaggtattcatttaagtcttatctatactatgctgatgtctgttatttgttgtgataagtcctcgcagtgtgaccagctttcagaaaatgatgcactcttgctaaaaggcacctttgagcaacattgttgagctgtatatttgtgcaaccctagtgggaggtaatctggcaatatatatcacaattgcaaatacatattc

SEQ ID NO: 197955 - DNA, 564 bp, Homo sapiens
ttgttttatgtgtacatttttaaagctctgtatttattttaygtaaacatccatctggttctatagctatgtttgcttcctttagtaacttgctaataatgtttagagaatgaagatgtctttatattcagcctcaggaacaaagtgaggaatacatctctttcctgcacattgcaggtccccagctgccttactgagagccttatataccatttcacggaagaatcggcacgtgataatcaaatcaaaacacatatctctatgatatgctcttacctcggcatgaaagaacatctccacctacagattaaatatactaacacacagtggaaacaagcttctattcagtttagcctaaattcatagagcatgagttataggttttggtcacttgagtgtgaaatacccttttttagctgctagtcaatcaaattagaacaagtataattttcaaaaactatccttgacacacccactgttttttctcctttcatctactttttctacatttcaatacatatgatatttacattgtgagattcctctaagagatgtttcaactaa

SEQ ID NO: 197956 - DNA, 564 bp, Homo sapiens
ttgttttatgtgtacatttttaaagctctgtatttattttatgtaaacatccatctggttctatagctatgtttgcttcctttagtaacttgctaataatgtttagagaatgaagatgtctttatattcagcctcaggaacaaagtgaggaatacatctctttcctgcacattgcaggtccccagctgccttactgagagccttatataccatttcacggaagaatcggyacgtgataatcaaatcaaaacacatatctctatgatatgctcttacctcggcatgaaagaacatctccacctacagattaaatatactaacacacagtggaaacaagcttctattcagtttagcctaaattcatagagcatgagttataggttttggtcacttgagtgtgaaatacccttttttagctgctagtcaatcaaattagaacaagtataattttcaaaaactatccttgacacacccactgttttttctcctttcatctactttttctacatttcaatacatatgatatttacattgtgagattcctctaagagatgtttcaactaa

SEQ ID NO: 197957 - DNA, 564 bp, Homo sapiens
ttgttttatgtgtacatttttaaagctctgtatttattttatgtaaacatccatctggttctatagctatgtttgcttcctttagtaacttgctaataatgtttagagaatgaagatgtctttatattcagcctcaggaacaaagtgaggaatacatctctttcctgcacattgcaggtccccagctgccttactgagagccttatataccatttcacggaagaatcggcacgtgataatcaaatcaaaacacatatytctatgatatgctcttacctcggcatgaaagaacatctccacctacagattaaatatactaacacacagtggaaacaagcttctattcagtttagcctaaattcatagagcatgagttataggttttggtcacttgagtgtgaaatacccttttttagctgctagtcaatcaaattagaacaagtataattttcaaaaactatccttgacacacccactgttttttctcctttcatctactttttctacatttcaatacatatgatatttacattgtgagattcctctaagagatgtttcaactaa

SEQ ID NO: 197958 - DNA, 564 bp, Homo sapiens
ttgttttatgtgtacatttttaaagctctgtatttattttatgtaaacatccatctggttctatagctatgtttgcttcctttagtaacttgctaataatgtttagagaatgaagatgtctttatattcagcctcaggaacaaagtgaggaatacatctctttcctgcacattgcaggtccccagctgccttactgagagccttatataccatttcacggaagaatcggcacgtgataatcaaatcaaaacacatatctctatgatatgctcttacctcggcatgaaagaacatctccacctacagattaaatatactaacacacagtggaaacaagcttctattcagtttagcctaaattcatagagcatgagwtataggttttggtcacttgagtgtgaaatacccttttttagctgctagtcaatcaaattagaacaagtataattttcaaaaactatccttgacacacccactgttttttctcctttcatctactttttctacatttcaatacatatgatatttacattgtgagattcctctaagagatgtttcaactaa

SEQ ID NO: 197959 - DNA, 628 bp, Homo sapiens
ttatttaatttcacataattttaatttgacagataactacctcactagaacaaataaaggcattgcaaagatatacataaatatggtggtaaattagtgggtgccttaatagaaatgcattctaagagcaggataaagaatgttattaaaagagtgaggttcatttataggtgtctcagcaaaagtgatccattataatttagttagcaagtttgacagagcaatgttattttgatatatgaaacaaatcttcaaagaatgttaaaattattatttgatctttgcctttacaaaatgtcttcttattttaacttacttagaataatgttaacatcttttcaagaagtacagcgtcattaaatactagaaaggaagatgatgataatgatgagtaacagttcagcatcttagaccaagtgtcactgtataatctcacartggtcggtgttgttggttgctactatttcctctctctactgtcaacatacaacattatgcagtgtcataaaagaagattcccgagcttaaccctaagtatacttgtgggaatctctggtaccgagatcctggaataccctctgttagcaagcagtcctctgtggaatcttgtgtactttaaggtgtgtgt

SEQ ID NO: 197960 - DNA, 634 bp, Homo sapiens
agattaagagcacaatgcttttggattaagggctttacaggccctttctttttttttttttttttttttgagacaaattcttgctctgtcatgcaggcttgartgcagcgggacaatcatagctcactgcagcctctacctcctaagcccaagcaaccctcctacctcagtcccccatgtagcttggactcagtgcatgccaccatgcccggctatttttttttttaatttggggggtgtcattatgttgcccaagatggacttgaactcctggcctcaaacaatcctcctgcctcagcctcccaaagtgctgggattacaggtatgagccacctcacctgacccatgccctttaatcttgttctaattaatgtgcacctagaaaaagaaaagcaagtattcttctaggttttccattatattcttttcttcctttcctttaataagcatcgtgtttatatataaatggcttacatttttccatgtccatatatgagtcacacatgatgaaatgcttgatgacttactcctttttaaactaggtgcactgtgggacaccttttatctcagtgcctaaattaccattgccatataataacagcactcaaattaagaaccgtttccactaaaattc

SEQ ID NO: 197961 - DNA, 591 bp, Homo sapiens
aagcttggacataaggtatttcactccatttgccttctctcttacagaaaaggtcaagctgcaggatagtattgtaatttatacttccctcaggtggccatttttctccatcagagagagaatattggggacaggatgtagtgcagaaaaaaatgagccacctcttttacaggatttgcaggtcaaattggtatcaaaggcttaggatgcatttcaagggtaagcctgttgatgactgagtgtttcccatctaaaagacaaaactgcccatgattttggtttgtttgtttctccccctgcccaaaaacccacaacagtccctggaccctgctgatcagaatagttgcactcaccaatgcagcagcagaaacacctcttgcccaasaaccctggaccctctgattggaatagttgcactcaccgatgcagcagcagaaacactagttttcctcctagatcacaaggaggaccaaggaatgttggatttagtggcccttgccaatgcattctcaaaaacctgcacccttgcctgtcttcctagaccacaaagaggaccaagaaaaatcagatttagtggcccttactgacgca

SEQ ID NO: 197962 - DNA, 515 bp, Homo sapiens
ctggctggtaaggcaggtagcccatttccttttagcttgatgaaagcctgatcatcttccaaagctgatattacacacctgggatcatgctggtttccctaaccctctctcagttacctctagtccctcttttcatcttctgktcaggccatcagtggcacagctttgactgtgaagtcaccctttccttagaccattcagaattcacaagaagacctgcaccctactatttaccttataaggatatccaagaatttttgggctctggcttcaccatacagaaaaattggatgacttgggaaaactaaaatctagcgagagaaaaaaacaattacattgtggaaccacatttactttattttgaaaaccttctaagttggtgtggggtgaagaaaagcacatcctgaatgctctaaatcctcatttcctcctccttttctggtgagaatctagctcagcatgttccagttgattcaatggaagaacatctccagaaactcttatttttaaataaa

SEQ ID NO: 197963 - DNA, 605 bp, Homo sapiens
cacttgatttaaaagtttcctttgttcgatataattcatgaaaagatcaacctaaatattactccatatacaacacagtaagagttaaaacccaagaagtttccaaatcttcactcaaattctctcctaacaggatgtccacaggaacatacaggtatacaattttcacatttatattaggcagctctatgccaagtacctaccaggcccttttcaccttttctcagcaaagaatgaatcacagtttttccactatctccctgccatctcataagagaagtagcaatgcaactagagaataaatcaagtcttagatcatcatttctgaaargctgctaatctctaacttaaaccgttcctataacctctgaaatgctagctcatttgctcttcactctgtggaaaaataagttcttttggatgaaaaattatggtcattatgtgattatgctcaaatagttcagctgattaatactagcctcaagtgaatccataattataggcttaatccttccttatagggctatttaacctgaccatgctctttggccacaggtgacagtgccaaccactgagctagaaaaaaagtgagtatcactgggcaa

SEQ ID NO: 197964 - DNA, 544 bp, Homo sapiens
tgcataattatttcaaacatgaaaatggaatataattatactcaatattgaatgtataatgagtctgtgttaaacaattctattactcaccttasctttttccttttccatatggttcagtaatttgctttctaaagaacgtatgcatagtgggagtaaacaagacaccaagaggtaccttctcctcttccttattaatgacatcattaagtttgcttatttatagtctcgatcatctaacctcatgccctacatgaataaggggatttgtttagttgttaatcctcacagtgtgtggttagcagcataaaccagtgacagatagtaacttgatactatcttttttatttttaaaataaaacatggcaagattgcagtttgtgctggtttatgtcaaccttaaatgtgataaagtttctttatcagcaaaatttggaaaatgtaaatctcatgtatttatttttataggaaatttacatttgaattatataagttagatttctacaaggtatttagaaacacagcccttgtttaaaaaatatac

SEQ ID NO: 197965 - DNA, 544 bp, Homo sapiens
tgcataattatttcaaacatgaaaatggaatataattatactcaatattgaatgtataatgagtctgtgttaaacaattctattactcaccttagctttttccttttccatatggttcagtaatttgctttctaaagaacgtatgcatagtgggagtaaacaagacaccaagaggtaccttctcctcttccttattaatgacatcattaagtttgcttatttatagtctcgatcatctaacctcatgccctacatgaataaggggatttgtttagttgttaatcctcacagtgtgtggttagcagcataaaccagtgacagatagtaayttgatactatcttttttatttttaaaataaaacatggcaagattgcagtttgtgctggtttatgtcaaccttaaatgtgataaagtttctttatcagcaaaatttggaaaatgtaaatctcatgtatttatttttataggaaatttacatttgaattatataagttagatttctacaaggtatttagaaacacagcccttgtttaaaaaatatac

SEQ ID NO: 197966 - DNA, 586 bp, Homo sapiens
cttcatgtgggcacacaatctactgtttcttccttcttcactgccactcctcagtctccccatcctcacctcctctgatttctaaatgttggggcaacccagggtccattctctgcctttttctcttctttctacaacctccacctccaagagacttcataaaagcccatggcttcaaatatcactatatgtcagtggccgtcaaatttacatctccaacctgacttgtttattgagctctgacttttattcccaacaatctcatggttatctccatttggatgtcccataggtatctcaaatgttctataaccaaaacttgattctcctcttcatctctaatcctcattctcacacaaacctactctatattattccccatctctacaaatggctccactaaccacccagttaactcaagcaaaaaaactccagcaggcatactttaattcctctctgtcctttatctcctatttccaatctgttaacaattcccctgggatctaaactcyaaaacatatcctgaacttctatacttttcaccagctccctgctaccaccctggtaatcaaggcatcatcttttc

SEQ ID NO: 197967 - DNA, 575 bp, Homo sapiens
agatctcaatcctcaggaagtttctaaatggttttcctatttggggaagggattaaattgggactgacaaaattttagattgtatgaagactccctcattttgcccagacgctcggtaatttgcctgaagccatgtaatctgtgggacaggactcaaatctgtagcttcctttgaccaatgagaattatgattaatatcagaaaagaataatctaatttttcatttttaggaatgggactcaactttcagttatacttggtataatgtaccaagcaaagaggcagtggcatattcacatcaaagaagcacatatggaatgctagtgtcatgtcccaacagtaaaagccaaacagaacacaagaaaaagtagtttctatgcagtatcaacagcagctaatccttgagtgttgactgtgtgttagaaaatgttttttacctgcactaactcgtgtccttamtacactatatgaagcaagtgctgccacctccacattccagatgagggtgacatgcagacagattaaggaacttgcctaaggttccttagccagtaagtggtggagctgaaatttaa

SEQ ID NO: 197968 - DNA, 586 bp, Homo sapiens
atcacctacatttagagcacatcgtctttgcaatccaagaacctttcttgttttacacagaagtctattttaaattcttttaggaccttgtctatatttaaaggaaacatgtaaatccttttgttcaataattagctatgatgatctatcacacccatctctgtgtgacgatgaagtagagcaaatccaaagacaagacacaggtttccggctgggtgcagtggcccacacctgtaatctcagcattttcggagcccatggcaggaggatcacttgaagccaagagcctggatgacataataatacttcatctctaccaaacaaatttaaaaaatagcctggcatgctgatatgcacctctagtctcagctactcggtaggctgagccgggaggatcacttaagcctgggakgtcaaggctgcagtgagccacgattgtgccactgcactccagcctaggtgacaaagcaagaccctgtctgcaataaatatatgaaaatttttttaaatgttgtttttaaagacacaggtttccctctagcatgtagagtatggcagaaagagtaaagacgtagccaagtgacta

SEQ ID NO: 197969 - DNA, 524 bp, Homo sapiens
aagacttacctgcaattttaagagagagtaaaccaaattctagttttacgtaaatgtaatatttgacagaggctcattcataagcagctactttaaaattatcttatgaataggaccatcaaacctgaacaaatttgccaaaaatttaacacattataattcttccttttagacttatcatttgcaggtaattataaaccaaagcaactaaaattcactttctacaaaccttcagcaattgtctatatctattcacatttattttttactaccttttttcatactttagaacaaccagacattttaccttargataatactactttcgcctctccttttatcaactaaaacatattgcattatcttgatttacaatcatagctctctgccacagttgcttttagtaacatttcaatcaccaatacgaattttaaccttaaccaaagtaaccaacttccatttcacagagataatggagacatagataattgagacattttcatcatacccaagcattttagaag

SEQ ID NO: 197970 - DNA, 587 bp, Homo sapiens
cttttgtaatatattctgattttgaacaacctacagtagacatttgtaaaatatattgttaatttaaatttttttttaaaaaatgaaactytccaaatgtgctccatgggagttaggctgatacaactagaaactacagaatgatttggccttggatttcactcattaagagagagctgccaacttgtcctcaccaacagggcagtgagtttgcttcacttttgtttggctatcagtacagaagtcaaggctgtctgtagtctttgtacaactcaggatagttctttcatttgaggacaaggctgtcatctgattctttcctggaatctggaggtgataaaatagatatggactaacaagaaagcaagtaatgaaaagaaattgagaaatgcattttaatgatgattcttatagactaattcatagttattgttagttggcatatagacctttttggctggctaaatgatagatgtgataaactttaaattttttctaattccagaatgttttatatcttttgaggtatgttatttcaaactggatgatcctgtaacatttggtttaaatttttttgaggtcttttc

SEQ ID NO: 197971 - DNA, 587 bp, Homo sapiens
cttttgtaatatattctgattttgaacaacctacagtagacatttgtaaaatatattgttaatttaaatttttttttaaaaaatgaaactttccaaatgtgctccatgggagttaggctgatacaactagaaactacagaatgatttggccttggatttcactcattaagagagagctgccaacttgtcctcaccaacagggcagtgagtttgcttcacttttgtttggctatcagtacagaagtcaaggctgtctgtagtctttgtacaactcaggatagttctttcrtttgaggacaaggctgtcatctgattctttcctggaatctggaggtgataaaatagatatggactaacaagaaagcaagtaatgaaaagaaattgagaaatgcattttaatgatgattcttatagactaattcatagttattgttagttggcatatagacctttttggctggctaaatgatagatgtgataaactttaaattttttctaattccagaatgttttatatcttttgaggtatgttatttcaaactggatgatcctgtaacatttggtttaaatttttttgaggtcttttc

SEQ ID NO: 197972 - DNA, 569 bp, Homo sapiens
cctccaattgatgcctgaaatcttgaatagtactgagccctgtatataccactatatatatcatgttttttcctgtacacacatacttgtgataaaatttaatttataaattaggtacaataagagattagcaaaaataataaaatagaacaatgataacaatatactttaataaattttgtgaatatagtctcttctctcacacacacaaaatgtcttattgtagtatattctcccttgtgttctgtcaatgcaacaacgcagatggctactaagttattaacacgtgggtagtataggcagtgtggatatgctggaaaaagggatgattcacccttagagtgagatgacacaagatttcatcatgctactcagartggtacacaatttaaaacttatgaattgtttatttctgaaattttccatttaatatttttggattgctgttgactgtgggtgactgaaactgggcaaaatgaaaccatggataaccaagaactactatatagacattattattcttaatttctaggtaggaaagggaactgatttagacagagagagtgtga

SEQ ID NO: 197973 - DNA, 441 bp, Homo sapiens
ggaagttgtcagtgaacttgaagttagattaaaaattatcaaatctgaagaaagaggttttaaaaaggctaaagaaatgaatagaccctgaggggcctgtgagacaatataaaaaatatctcatataattgaagttggcatgtcagaaatagaggaaagtgaaaataaggtagaaaatatttgaaaaaataattgcttaaaatttcccagattaggtaatagatataaatttttagattttaaaagtttagttaaatccaaacagaataaataaaaaaagaaagccatgcctagggccaacatagwcaaatgactgaaaactaaatattaacactgaattttgaaataactaggaagaaaatgacacattcattatctacaagaaataaaaactaaaatgaccatagatgtctcatcagaaattgtgaagactagaaggca

SEQ ID NO: 197974 - DNA, 596 bp, Homo sapiens
agtgtacactgtacccagtgtgtagacttttatttcccatccccatcccactctttcccctgagtttgcaaagtccactgtatcattcttatgcctttgcatcctcatagcttagctcccacttatgaatgagaacacacgatgtttggttttccactcctgtggtgcttcatttagaataatggtctccaattccatcaagtttgctgtgaatgccattattttgtttcttgttatgcctgagtagtattccatggtgtgtgtgtgtgtgtgtgtgtgtgtcacaatttatttatctccttgttgattaatgggcctttgggcctgttccatattgttgcaattgcgaatggtgctgctattaacatgcgtgtgcaagtatctttttcaaataatgacttcctttcctcttagtagatcaatcccaggagtgggattaatggatcaattgtagttctacttttagttctttaaggaatctccacacwgttttccatagtggttgtactagtttagattcccaccagtagtgtataagtgttccatttcaccacaaccacaccaacatctattatttttgatgtttttgacttgat

SEQ ID NO: 197975 - DNA, 412 bp, Homo sapiens
tctttttactgttttgacttaaattctgtgttatctgatataagtatagctactcctggtaacttttagttttcctttgtttggaatatcttttttatctctttaaatttatatgtgtctttacaggtgagtttcttataggaagcatatcattaggtaatgtttttgtttatttttctttcagccagactatatcttttaggtgtaaaatttaagctgtttayattcatgattattactgataggtggacttatttctatattttgttaattgttttctggttgttttgtattttctttgttcttctctttctctgttgttttcattgtggcttggggttttctgaagtagtaacatttgagttccttttcctcatgtgtgtttgctctatcagtgaattttatactttca

SEQ ID NO: 197976 - DNA, 626 bp, Homo sapiens
aagtttgaaacttccaagccacattagtgcttatttatttctatacctactagaatagaacttctttaagagattatataatcaaatttggaaatatatttagagaagagaaaatattatatactcgtaaaatgaaggcctttctatgttagagacacataaacataaaaatatacaggagaggaaatttataacttcaattctaaaattttagtcctttgtcaagcataaacacagaaatacaaacttaccaattcatatatatacttccacttcctggtaggcatgtaactctcaattgatctgatctcaagataaacaaagagacaaactaaaaagattaacaaaccatgttctctgtctttctgccgacagatacaagatctctgtaaaccttcaatcaatttacataaaaagccaaatgattagataataaagccaaaagacgctagcaccagaaatcaagtaaaaaatcaggacccaaaattaattatttatcacccaacaaaagagtcagtagcatraaaagagctgagttcactgttgagttctagaccttcaggagcacaaaaaaagagttgccaagaggcttcatttacttgaggtgagttcattgtgttatgaag

SEQ ID NO: 197977 - DNA, 519 bp, Homo sapiens
tttaataatcactaaagaatttgcagttttacttcatgtcatgctcattgccatggttaaaactgccctaccaaactgagttgcccatgctcagctgcagaaggcctaggattttttgttcattcagcctccaatcttctagtactatacctttgtacataactgtaaaaatacaaaagagaagaattaagcagaaagacatcttttcctctttgcccatytacatcaccattgatgtagaggcacagttatcagtgaagataatttatggtttttaggttttatgacacgaggtatttcttgccattttgcaaaagtacattcataatttaattatctatcagtcagaaagcggcatggcccttttattaggtagatagaacgaatgccatagccaaagagtttggtgtctactgtaaagtcaatatggggtagccttaaatcagttaggttagagtgccaaaatatatgtgtatatattttgtggcccggatataagataatttctcagctttacac

SEQ ID NO: 197978 - DNA, 616 bp, Homo sapiens
agatcaagcaaataattgcccatacctggatggaagaatttaataggaagattatagttgattccaaaagttaataactatagcatctggtttccctttttaacatttaaatgacaatgaggacgcagtttttgagtaggaaaatcatactgctgcaaataaactcagtgttcatggagagaaagagaatgagaatgagtcagcataccatagactaaaatctttttatcttttgtggacaggttaaatataaatgggcagaagataggtttgaatctttcactaacgtacttcaactttgaccccaagagacccatctcgatcacattaaggaaaagaaacttccatgatgggaaacttagctccccaataaggacaatggccaagccctctgcttttgtgcagtatctctgatatctttggttgctctgaatgagagaatacagctgctgtgagacattttcaattcatttttattcacatctccataaaacaatctgcataggatatgtttttaaatattgctgggtggaacttgggacattattttctaagccwggtcaggaaaatcaagcacaaaaaccccaaaacttccagcactgagggtcaggattgc

SEQ ID NO: 197979 - DNA, 481 bp, Homo sapiens
tgatacttaggcaattttatggaccgaatgcttatatccccccagaatgtttatgttgaagccctaatccccaatttgatgatacttggaaggtgaggactttgggaggtaattaaattaagtaatgacagtgagatccttatgataggaataaagcccttataacaagaggaagagacacatgatttctcactgcattcacctacatgmaccaagggaagaccatgtgagcaaataacatgaagacgcctgtctgcaaatcaggaggaagtcctcatcagacattgaacctgtcagcaccttgattttggacttctcagtttccagaattttgagaaatatgtgtttgctctttaagccaccagtctgcaatattttgttctagaggccccagctgacaaagacaggcaagaatcttccctttatgggacactgctttctcagaagcaatgtttatatgaaaattgagttataagatatt

SEQ ID NO: 197980 - DNA, 581 bp, Homo sapiens
aggaggaacacccaccccttctgttggttccacttacgtctgtagccagcagctcctctgcatcatctatgctggccaccaggatctccccctggctaatgaacgggtagtcgtaagggttggtcgtaataagcagcagctctgaaatgacaaatagttccaggaggttatgcagatrcaaagaaaaaacccacccagtggacttgagctcctgcaccctgggctggaacttttaccgctggatcctaaattgaacttagaattaaaaatcttttagacagttccacaatactcaggctgtcatggaaaatatagtccagggaagacttttcagtctcccacacaatggagatgaaggaccctagagagaacctttaaattcccttgccttgcacgctaatggtgcatatcagtgtcggctgggagaagttaatagggaaaactggctgagtgcgggtcaggacgagagccaacccaggtggtttggtataatcatagccttttctaaaatctgttgaaaagcagcagcctgtttccaagctggagaccacaagggctgagcaaatacagcgcaaagagca

SEQ ID NO: 197981 - DNA, 633 bp, Homo sapiens
gactctatgtaccaaaattggtgctattatgccgtatgattatggaattaaattaacctgagtcttaagcactgtatgtctttcggcattatttttttttaaacataaaagctgggacacatcaagtagtccaacctcagagaaaccgcgtagatttgataccttcctccttaccttcttcagcatcattttatagaaaaatcagtggttttcaaagtatggtccctggaccagcagcatcacatcatctggttactcgctagaaacacaaattcctggcccacatcccagactttctgaactgaaaactccagaggttgggacctagcaatctgcattataacaaatcctacaggtgattctgatatacttttaagtttgagaaccactgagacgcactcttagagactggtaacatttatcttgtggatataccagggtttcttcttaataattcccttacttataaacactcaagtttactttaaagcactcagaagaagcatgttatcctatttaaataattgatgtttatgatgatcagatgttatttttgaacaaaatatataactaaaagttgatacactggaaaagagagagagaatwtcagtacaaatacaaagaaaagaattc

SEQ ID NO: 197982 - DNA, 495 bp, Homo sapiens
tgttctccagaaaaaagaaacagaaccaatcaaatgtatgtgtgcatgcatgtgtgtgtgtgcatgtgtgtgtttgtgtgtgtgtgtgtacatacagagagagagagacagaaacagaaagacagagagagatttattttaaggaactggctcatgaaattgtgaagactgcaactgtgaaatcttaagggcatgccagcaggctggaaattacagcaagagttgatgttggagtctcaagtttgaagkccataaaatcaggcagaatttctatgttgcagtctggaggcaaaattcctttcttttctgggaatcttgatcttttatcttacggcctttaacagattggatgaggcccacccacattatgaagggtaatttacttaacatccactgttcactgcaacatctacactggtatttgtctaaacaactgagcaccatagcctagccaatctgacacataaaattaaccatcacatcttcatgttcaga

SEQ ID NO: 197983 - DNA, 533 bp, Homo sapiens
ctccaaaatactcagcaaaatactagtaaaccaaaaccagcagcacaacaaaaagcycatctaccactatgatgtggtttggccgtgtccacacccaaatctcatcttgaattgtagctccaataattcccatgtgttgtgggagggaccctgtgagggatacttgaatcatgggtggcagtggggaggggggtcctttcctgtgctgttctcaggatagtgaatgagtctcatgacatctgatggtttttataaaggggacttctcctgcacatactctctcttgcctgctaccatgtaagatgtgactgctcctcattctcctgctgccatgtaagacatgactttgctcctcatttgccttccaacatgtttgtgaggcctcccaagccatgtggaactgtgagtcaattattaattatttacaaaatttcctttatcaattacccagtctcaggtatgtctttattagcagggtgagaacagactaatccagtaaattgatactggtagaatggtgtgctgctgcaaac

SEQ ID NO: 197984 - DNA, 388 bp, Homo sapiens
ctcaatgactaaaaccagggtaaaagactgaatcttacatgtaayattttgggcatgatcatagttactggggcctgagaacagcctcagaatagattcagaattgagtcatttcttacttggttctcactaaatattaggcaataatgttgtgtacatttaaaataaagtcaatgattttatatgcaaagcagtttctattctaagttttaaattcagatgcactaaagtagaaacttttttttctgggatttaaaatagcatgtaaagtagctcttgattacaaagggctgttctgagggcatgatgtgtattcactcatttagtcttcgcaactttacacaacagtttccattattatcccatgttacagatgagaaaactgagg

SEQ ID NO: 197985 - DNA, 388 bp, Homo sapiens
ctcaatgactaaaaccagggtaaaagactgaatcttacatgtaatatwttgggcatgatcatagttactggggcctgagaacagcctcagaatagattcagaattgagtcatttcttacttggttctcactaaatattaggcaataatgttgtgtacatttaaaataaagtcaatgattttatatgcaaagcagtttctattctaagttttaaattcagatgcactaaagtagaaacttttttttctgggatttaaaatagcatgtaaagtagctcttgattacaaagggctgttctgagggcatgatgtgtattcactcatttagtcttcgcaactttacacaacagtttccattattatcccatgttacagatgagaaaactgagg

SEQ ID NO: 197986 - DNA, 567 bp, Homo sapiens
ttgggaccttgtgtgcttctagtccaagggtgtgtttattacgttaaaaacaagatagattaatatttatacattctacaatttgcaattaaataaaatgaaattttttacacagaatattttaatgcctataggtttttaatcctttatttcattacattactaaaatttctgactgacaaaacatatagtaagtgttcattggggcatctgtggaagtagagttatatttgggatctgactaatatacctaatgaccaaggctggattgtacatgagtccaattccttaccctggtttttggcagtgagaaaagggagggagacaaatccccytaaaccacagcttgccaagcctcctcttcctggtatcttactcttgctgcctgctgagctttctatggatgagggtaatttttcccagtaggaggaaacccaggatattctgccatatcagcagcatgagatttcatgagaatgcatcattcactagaaagacatttcacactcatgccagcagttgtaccatctttgctactcccatagaaggctctgtttacttgtgtta

SEQ ID NO: 197987 - DNA, 566 bp, Homo sapiens
tgcttctagtccaagggtgtgtttattacgttaaaaacaagatagattaatatttatacattctacaatttgcaattaaataaaatgaaattttttacacagaatattttaatgcctataggtttttaatcctttatttcattacattactaaaatttctgactgacaaaacatatagtaagtgttcattggggcatctgtggaagtagagttatatttgggatctgactaatatacctaatgaccaaggctggattgtacatgagtccaattccttaccctggtttttggcagtgagaaaagggagggagacaaatccccctaaamcacagcttgccaagcctcctcttcctggtatcttactcttgctgcctgctgagctttctatggatgagggtaatttttcccagtaggaggaaacccaggatattctgccatatcagcagcatgagatttcatgagaatgcatcattcactagaaagacatttcacactcatgccagcagttgtaccatctttgctactcccatagaaggctctgtttacttgtgttataacccagattt

SEQ ID NO: 197988 - DNA, 566 bp, Homo sapiens
tgcttctagtccaagggtgtgtttattacgttaaaaacaagatagattaatatttatacattctacaatttgcaattaaataaaatgaaattttttacacagaatattttaatgcctataggtttttaatcctttatttcattacattactaaaatttctgactgacaaaacatatagtaagtgttcattggggcatctgtggaagtagagttatatttgggatctgactaatatacctaatgaccaaggctggattgtacatgagtccaattccttaccctggtttttggcagtgagaaaagggagggagacaaatccccctaaaccacagcttgccaagcctcctcttcctggtatcttactcttgctgcctgctgagctttctatggmtgagggtaatttttcccagtaggaggaaacccaggatattctgccatatcagcagcatgagatttcatgagaatgcatcattcactagaaagacatttcacactcatgccagcagttgtaccatctttgctactcccatagaaggctctgtttacttgtgttataacccagattt

SEQ ID NO: 197989 - DNA, 566 bp, Homo sapiens
tgcttctagtccaagggtgtgtttattacgttaaaaacaagatagattaatatttatacattctacaatttgcaattaaataaaatgaaattttttacacagaatattttaatgcctataggtttttaatcctttatttcattacattactaaaatttctgactgacaaaacatatagtaagtgttcattggggcatctgtggaagtagagttatatttgggatctgactaatatacctaatgaccaaggctggattgtacatgagtccaattccttaccctggtttttggcagtgagaaaagggagggagacaaatccccctaaaccacagcttgccaagcctcctcttcctggtatcttactcttgctgcctgctgagctttctatggatgagggtaayttttcccagtaggaggaaacccaggatattctgccatatcagcagcatgagatttcatgagaatgcatcattcactagaaagacatttcacactcatgccagcagttgtaccatctttgctactcccatagaaggctctgtttacttgtgttataacccagattt

SEQ ID NO: 197990 - DNA, 599 bp, Homo sapiens
gaagttggcttaatggctatmaaatacaaacaggcaaaacccaagttactttcatgcaaataagcattaaggaaaagaatatgggaatgtttacataatgtgtcatggcaaatatttttcaaatttacataagaaactgtacataaatgaggtaatttacaagaaatgttttacaggttacaataggatataattaattatgaataaaatttgtagcacatcatacatttttacatcacagattcagtgttagaagaattcagacatgataaaacttagacttgacaagaataatgtaatagacggaataaggcaacttagactgaaatggcatgtgtaagtaaaattaatccccaaattaaaggattccttagatgggacataataacttcttctaagtatgatttggtcaataactgggcatttagataaacgccattcaattttagttaaaaacttagatttagctgtagtttaaataaaaagtaaaagcacacggtgtataaaaaataataaaaaccaccttagtatcacttatatcctaatactattaattatatttgggacaagcagactagaatattggtgttattctataa

SEQ ID NO: 197991 - DNA, 599 bp, Homo sapiens
gaagttggcttaatggctatamaatacaaacaggcaaaacccaagttactttcatgcaaataagcattaaggaaaagaatatgggaatgtttacataatgtgtcatggcaaatatttttcaaatttacataagaaactgtacataaatgaggtaatttacaagaaatgttttacaggttacaataggatataattaattatgaataaaatttgtagcacatcatacatttttacatcacagattcagtgttagaagaattcagacatgataaaacttagacttgacaagaataatgtaatagacggaataaggcaacttagactgaaatggcatgtgtaagtaaaattaatccccaaattaaaggattccttagatgggacataataacttcttctaagtatgatttggtcaataactgggcatttagataaacgccattcaattttagttaaaaacttagatttagctgtagtttaaataaaaagtaaaagcacacggtgtataaaaaataataaaaaccaccttagtatcacttatatcctaatactattaattatatttgggacaagcagactagaatattggtgttattctataa

SEQ ID NO: 197992 - DNA, 623 bp, Homo sapiens
gaaagacaaaaaataccacatagtaataacagtactagtacttgtaatgtacagtcaaaatataatgcatcacagcttactttttaatttattatgagactttttttgtcacagtcttcaacaggctgaacctttttcatgtctggatcatgtaagtgtggtgccattttttcctttaacagacagtaaaatgtcactggtaaatcattaccctcatcgcctcaaataactcaaagtatgcctgtcaaaatgcaggaaagaattcacatgattacaaataggcttatcatcacccatctcaggaaacagtaagtagtgccaastagacgagcacaccagactaattttaagccaggaaaggagtcagctttcaccaggttgaacatgttgtttgttggacatgacaacagtcctccaaattccatattgcacaggtggtgcctttgatttttctcatagtgattatagagacaaattgagtcatcaacagtttccaaaacagcctttcttatgatcaaacatgcatatttgttagaaatcttggcaaatttgaagtgtccagaaatgtacagttatttggactccctgagtttatttttttagccaactagcattccagtcat

SEQ ID NO: 197993 - DNA, 509 bp, Homo sapiens
tcaggactgtctgttcattaccaatagaagattggggtgttgacaatatgccacattattaccaagttcataaattcatcagcccatattcagtgtcagatctaacataaaccctttctgaaagagttcattatgttctctctcaagttacatggttttttttgtttgtttttttaaattttcactcactgaggggccttactagtcctagtgtcctgaacttagaaacctagatgtctgtcatctttgccttttcttgtttcataactcccaacctccagtcaatcatctatgttgtatggattcagcactatgcatagctctcaaattttgcaacatttttttttwaaatcttcaaatatccccttcatttctcactgagattatagaatttgcttccaaatggatctttgcgtacaatccaggacaagtgatttttctaatgtacaaatctgattaaatcaccgctcctgctgtttaaaacctctatgccttccatctgttctcta

SEQ ID NO: 197994 - DNA, 510 bp, Homo sapiens
atgagtaaatataataggcttcccttctcctcttgagttttctaaattatatttgaaggttaaagcagaaattttaacatctgatttggtagagagaatacttgagcaatcatattataaaaggaaaaaggtaaggagctataaagggaaataaggtttctacacttcacttgaactggcaaaattacaccacaagtacactaggataggtttgatatcgatattgacttagtctgcttatgctgttatatcacagtacctgagactgagtaatttagaataaactgaaatttattttctcacagttctggaaactgggaagtcctagatcaaggcattggcatctggtatctgctgaggaccatcttgttgcatgaagcctctttcataagggccttaataacattaatcgaggaagaactttcatgacttaattacctcttaaagactttactacctaataccrtcacattggcaacgcctgaatttggaagggacacatttaaacca

SEQ ID NO: 197995 - DNA, 408 bp, Homo sapiens
aggctctcctcttatccagggtcactagtttcactggatgagagcgcttttaccatgattacaccatttcaaaagcatttaaaggcaatgaaagtttccccawcacaatttaacatgaaacagacaaaaattcctaaggaaataatctgtcatctctaaaaatgacccagttacaaacaaagtaagcaaaactgttgtaatataacttaccaacagtggctctaatcagaggagaggagtcaccaatattatttaaacattcacttttaataaagtctgttacaccatttgggaagttctgaaagtgtgctttcacattattcttcaagataagaccactcaatgatcttgtgggttcatctgtaataaaatagtaatagtaatgagttttgaagtagtcttaatttc

SEQ ID NO: 197996 - DNA, 510 bp, Homo sapiens
gggaatcatttcttttctcagcaaamgagaagattctgagagccgtcatgtaggtttacattctagatgagtcggaaggaaagcgacacctttatctagggggaaaggatgattgattctaaattgggaagaaaggatttaaggaagggagcctacactaagagaatatcctaatacggttttaaaagcgtgtatcttcttcagttgtcctgcaatgcccttttaagctggcttacacataaagaaaccagaaagatgaatatattacacatcataaaattagaggctaataagcataataagaaaattatgtccattgcaaaatagccaactagaaaccaggggctgccaagtgttttctttaagtgcacaggaatattttccagtctaagtgatataataaagtcctgccttggttatactcaaataacaaaatccagtattgaatttggtgatatctaaagacctagatccactgtccctccagggccggatgaaagaaaagaattc

SEQ ID NO: 197997 - DNA, 509 bp, Homo sapiens
gggaatcatttcttttctcagcaaaagagaagattctgagagccgtcatgtaggtttacattctagatgagtcggaaggaaagcgacacctttatctagggggaaaggatgattgattctaaattgggaagaaaggatttaaggaagggagcctacactaagagaatatcctaatacggttttaaaagcgtgtatcttcttcagttgtcctgcaatgcccttttaagctggcttacacataaagaaaccagaaagatgaatatattacacatcataaaattagaggctaataagcataataagaaaattatgtccattgcaaaatagccaactagaaaccaggggctgccaagtgttttctttaagtgcacaggaatattttccagyctaagtgatataataaagtcctgccttggttatactcaaataacaaaatccagtattgaatttggtgatatctaaagacctagatccactgtccctccagggccggatgaaagaaaagaatt

SEQ ID NO: 197998 - DNA, 571 bp, Homo sapiens
gaacagctcatatcttagaaagcgaagtcttgcatacttgtgtgcatgtatgtgcatatccatctttacctacaatggcatagactctgttaggtgctggtgtgtatacagtacatctgtaaataagacaaatatctccgtgcttgagatggtgtttacagtatagaggagggaggcagacattaaatacatgcttaaatataaagttataaattattataagtattgcaaaggaaaataataggcttccatgagatagaataatagcagtgacttaatttggattagggagtcaggaaaggccttttaagataagtgatgtttaaaactggaacttgaagagtgagtaagaaattaatagggcaagagcgttacwggctttggggatcatgagtatgaaggcccagagggtataaaagaacttacattctggaaagtaaaaaatgcttactaaacctgagtaagggaaaatggtagtgagaaatgaagttgaattgatacacaagggactaggttacattaggttggtgcaaaagtaattgtagtttttaccgttacttttaatggcaaa

SEQ ID NO: 197999 - DNA, 581 bp, Homo sapiens
gatagaagccataaacaaagaatgggtgcagaaccatctggtttcatggagccactgtaccagttccgaattgcccaacctaggactttttttttttttttttttctgggcgagaataaaccctggtgtctttagcaattgctactttgaattttctgttaaatatagccaagtataatcttttctgatacagatgcacayttgggaagcttttaaaaataccccaatgcccaggcagcatcccagaccaattaaatcagaaactctagggatggaactcaagcatcagcaaatttttaaagcttcccaggtgatttccatgtgcagcccaggttgagaatcgctattctaggcaggtaggcctcatatgttgcatgttcaacaatctcctgggagatgcagtggtgcttgttaaaaatttggatttcctatccttacctccccagaggttttggttcttcaggtccgaggacatcccacccacatgattctgatacaggaaatctagtttcaaatttgaagaaacactgctttaggcaataggaaatctttagaagttttaaagcaaagaagtgacaaga

SEQ ID NO: 198000 - DNA, 639 bp, Homo sapiens
ctgaacttttgatttaaaaaaaagattcatagtttcaggcagctgaataaatagaagctattgaatttatagcatatttaaagcattgaatatcaggaattgaatggcttcagtttaaagctgtgatcaagtcatttgaacagagagatttgacgatggttcaatgctagaaccatggccagccataaactctatggggacctcccaatattagcaatctttgagttactcctctgcaaaataagggacttggattttataggaacagtttaatacagtgagaaagtctggatataggagacaggaggcttagattgcattcattgtggtctaaagaacattattacttagttttgtgaccttgagcaaatcatgtaacctccatttctttaattacatatctgtaaaatgagtatgatgacccaagggggctaatttgggagtctaaataaaacctaatacaagacattactgctaagtacatccagccctccatatctgtgcgttccatattcatggatttggcatctgtggattcaatcaacrgcagatcaataatattctgagggaaaaaaaattccactaagttccaaaaagccaaacttgaatgtgccgctactatgttgaatttacgtgaat

SEQ ID NO: 198001 - DNA, 425 bp, Homo sapiens
agaattcaagatagtcatcttcaagaggctcaggagttgcaagagaacacagacagttaaataaattctgaaaaataatacataagtaaattaagaatgtaaacaaagtaatagaagtatttctttaaagaacaaaacaaaaattctggaactgaagaatacagctgaaataaaatattcaatgtaagtgttcaaaagcatatttaatcaagcagaagaaagaattagtgaactgggaggggtggaaccaagatggccaaataggaacagctctagtctacagctcccagcatgagcgacacagaagatgggtgatttctgcatttccaactgaggtactgggttcgtctcactggggagtgtcagaaagtgggtgyaggacagtgggtgcagtgcaccgagtgtgagccaaagaagggtgaggg

SEQ ID NO: 198002 - DNA, 637 bp, Homo sapiens
aaaaactttttattaaaaaacatttaaaccttcagaaaagttayaaaaatagtaaaatgaactctcatatgcctttatgtagattcattaacttttaacgttttgccacaattgtattttttatattcatacatatattttgattattactattattactgaaccattccagagtgagttacagacatctttatctctaagtacttgttagtatattgtctaacaacaaggacattctcctacataaccatgacacaatgatcagattcaggaaatttggcattgatacaatactgttatctaatatacagtttgaaatacaaattttttcacgttgtctcaatactatcctttgtggcaaatgttatataattcttcacaccaatgctccaatccagtatcacaccactgcatttgactgtcatgagactttagtcaatttcacggtgatacattctttacttcacctgtctttcatgatgtttgtcaaagagtacaggccagttgtttttcatgcaccctaatcttttattcaataatctatcttgaagagcatttcaagcagttcataaatcatcctatttgttttttaacagtcacatagcattccactaaatggatgaggcataatttacct

SEQ ID NO: 198003 - DNA, 637 bp, Homo sapiens
aaaaactttttattaaaaaacatttaaaccttcagaaaagttacaaaaatagtaaaatgaactctcatatgcctttatgtagattcattaacttttaacgttttgccacaattgtattttttatattcatacatatattttgattattactattattactgaaccattccagagtgagttacagacatctttatcyctaagtacttgttagtatattgtctaacaacaaggacattctcctacataaccatgacacaatgatcagattcaggaaatttggcattgatacaatactgttatctaatatacagtttgaaatacaaattttttcacgttgtctcaatactatcctttgtggcaaatgttatataattcttcacaccaatgctccaatccagtatcacaccactgcatttgactgtcatgagactttagtcaatttcacggtgatacattctttacttcacctgtctttcatgatgtttgtcaaagagtacaggccagttgtttttcatgcaccctaatcttttattcaataatctatcttgaagagcatttcaagcagttcataaatcatcctatttgttttttaacagtcacatagcattccactaaatggatgaggcataatttacct

SEQ ID NO: 198004 - DNA, 439 bp, Homo sapiens
agattttctaacatttccccctgtatcctagggattattttatacccctcctagaaagaatgccccattttggagataactgtcataaagctaaatgtttmagaacttaggttctgaaatcagatcatgttctacatcctgagtctcatatttttactgagtctcagttttttcatctgtaaaatggggatagtagcattcatctgtaaagtgtggatagtactattatcttctttatagggttatgataaggattaaataagatcgtgtgtacagggtacttagcacatttagtgcaggattaatattagaaaataatattcaattttcctacaaggatcattttttattttcatattcagaaaaaaagcaaaacccttataaaaaacaagacatgactctaaaatccaaaaagcaaggattgtgccttctatttctc

SEQ ID NO: 198005 - DNA, 439 bp, Homo sapiens
agattttctaacatttccccctgtatcctagggattattttatacccctcctagaaagaatgccccattttggagataactgtcataaagctaaatgtttcagaacttagrttctgaaatcagatcatgttctacatcctgagtctcatatttttactgagtctcagttttttcatctgtaaaatggggatagtagcattcatctgtaaagtgtggatagtactattatcttctttatagggttatgataaggattaaataagatcgtgtgtacagggtacttagcacatttagtgcaggattaatattagaaaataatattcaattttcctacaaggatcattttttattttcatattcagaaaaaaagcaaaacccttataaaaaacaagacatgactctaaaatccaaaaagcaaggattgtgccttctatttctc

SEQ ID NO: 198006 - DNA, 439 bp, Homo sapiens
agattttctaacatttccccctgtatcctagggattattttatacccctcctagaaagaatgccccattttggagataactgtcataaagctaaatgtttcagaacttaggttctgaaatcagatcatgttctacatcctgagtctcatatttttactgagtctcagttttttcatctgtaaaatggggatagtagcattcatctgtaaagtgtggatagtactattatcttctttatagggttatkataaggattaaataagatcgtgtgtacagggtacttagcacatttagtgcaggattaatattagaaaataatattcaattttcctacaaggatcattttttattttcatattcagaaaaaaagcaaaacccttataaaaaacaagacatgactctaaaatccaaaaagcaaggattgtgccttctatttctc

SEQ ID NO: 198007 - DNA, 439 bp, Homo sapiens
agattttctaacatttccccctgtatcctagggattattttatacccctcctagaaagaatgccccattttggagataactgtcataaagctaaatgtttcagaacttaggttctgaaatcagatcatgttctacatcctgagtctcatatttttactgagtctcagttttttcatctgtaaaatggggatagtagcattcatctgtaaagtgtggatagtactattatcttctttatagggttatgataaggattaaataagatcgtgtgtacagrgtacttagcacatttagtgcaggattaatattagaaaataatattcaattttcctacaaggatcattttttattttcatattcagaaaaaaagcaaaacccttataaaaaacaagacatgactctaaaatccaaaaagcaaggattgtgccttctatttctc

SEQ ID NO: 198008 - DNA, 532 bp, Homo sapiens
ggctgggtatcattttatgggaaaggactttagccatgtccagaattgaggttcagacctgtacctacatgtctgacggcctgagcgattgtctaggggaagccaattagcagaggggaaagaggctgctaagagaaaagccaccacgaatgaatgggagtctggaagagcaccattaggcagcaagtgtagtgaggctgcagctggacactccccattcgagcttccccttgcatggttcaggggtccagaaggagagcaggacagaggggaatgtatctgggagctccagctcttactccgaaaggacttcctgtgaaagagccagaaccagtcaggaaggtaagcagtggagatgtgctgtcagggactrtgagaaaatgcctcgtagaagcagtgtggaagggggcctacagagcttctgccctgacactaaccctaggtgaatccagagccagagagggagtgagcaggagcagaagccagagaccactgagaggagaccagcagctctgatgacacatcagctgtc

SEQ ID NO: 198009 - DNA, 602 bp, Homo sapiens
aagttttctggaaaatcccaaaatagtacatttctaaataacccatgagtcaaagaggaagtctcaagggaaattagaaaatactttggactgaaagaaaatgaaaatataacatacgaaaatttgtggagttcagctaagtctgtgcttagaaggaaatttgtagtgttaaatgcttatattagaaaagaaaaaggttctaaatcaataatctaagcttccatcttaggaaacccgtaaaagaaaacaaattaaatacaaaagaagcaaaaggaaaaaagctattaaastaataaatgagtttagcaacatcacaggatacaaggtcaataaacaaagataagagcagaagtcaatgaaatggaaaacagaaaaaaatagaggaaaatcagtgaaaccaaaagctggctgtttagaaagttcaataaacttgataaacatttagccagactgaccaagaataaaaaaagaaaagacatcaaaaacaggtattcaaacaaacacatgtacatgaatgtttatagctattcacatgtactattcacaataccaaaagggggcaacgacctaaatgtccattaactgatgaatggataaacaaa

SEQ ID NO: 198010 - DNA, 642 bp, Homo sapiens
tctgtcctcaattaagaagtaataactttatattaccttaaaatattagaagaaaagccattttacaaagacttccttccctttggcaaactattctgcagaatcctaataagctttcacagaagattgcttattattcttattttatttactttacgtttctaagccaagaaaaattatgtgggtcttaagtagttttccataacagaaaagtgttgggagataattattttttttaaaaaagtgaataattaacatttaaaatttatatcaatggatttttgtgaaccagcacttaaagttttttttgggtaatctagaaatatgttgtccaaaaatcctcatcttttttgttgcatttcctattaatayaaaaaagaatatgtaattaaaaattgaaattatttcacacctaagagacatatatcgtcttggaagcagtaaaaagtcatagatagaataaaaataaaataatcataaaaattttggtgagagtttcaaatagaacagccgtaaatagtacatgataaacatgtaaaaagattttatccataacgtgccatccaaaaacacctttcaagtctctcctgattgaccctgaatgaaaatctcattttaggtgacaaaaaaagggtcattaat

SEQ ID NO: 198011 - DNA, 642 bp, Homo sapiens
tctgtcctcaattaagaagtaataactttatattaccttaaaatattagaagaaaagccattttacaaagacttccttccctttggcaaactattctgcagaatcctaataagctttcacagaagattgcttattattcttattttatttactttacgtttctaagccaagaaaaattatgtgggtcttaagtagttttccataacagaaaagtgttgggagataattattttttttaaaaaagtgaataattaacatttaaaatttatatcaatggatttttgtgaaccagcacttaaagttttttttgggtaatctagaaatatgttgtccaaaaatcctcatcttttttgttgcatttcctattaatacaaaaaagaatatgtaattaaaaattgaaattatttcacacctaagagacatatatcrtcttggaagcagtaaaaagtcatagatagaataaaaataaaataatcataaaaattttggtgagagtttcaaatagaacagccgtaaatagtacatgataaacatgtaaaaagattttatccataacgtgccatccaaaaacacctttcaagtctctcctgattgaccctgaatgaaaatctcattttaggtgacaaaaaaagggtcattaat

SEQ ID NO: 198012 - DNA, 456 bp, Homo sapiens
atattctaggtatttgtcctagagttcagtttgggtaggctatactagaaagggtggattaatttagtttctgattagacctggtggaacacttcaggtgactcagaagttcctgatagtgggtctgaggaagaaatgtggacaggcaggttgaatgttaggggaatatggaaacaggcaataagtagatgatggtatttggcgtgtaggagatccagccatgcgtgsaagacggccatttcagcatgttggcaaaatggcagagttgacctaatggatagcagcccacattataaagtagaaacaagtttcagggccagtatttttaggccctgggaaaataggccggaggtttacggtgagtgtcttgttcctagagaaactttgttaccttgtacagtaaatggcaaagcatctgatttctgggaagtgagtttcaagagagagaggttagat

SEQ ID NO: 198013 - DNA, 458 bp, Homo sapiens
atattctaggtatttgtcctagagttcagtttgggtaggctatactagaaagggtggattaatttagtttctgattagacctggtggaacacttcaggtgactcagaagttcctgatagtgggtctgaggaagaaatgtggacaggcaggttgaatgttaggggaatatggaaacaggcaataagtagatgatggtatttggcgtgtaggagatccagccatgcgtgcaagacrgccatttcagcatgttggcaaaatggcagagttgacctaatggatagcagcccacattataaagtagaaacaagtttcagggccagtatttttaggccctgggaaaataggccggaggtttacggtgagtgtcttgttcctagagaaactttgttaccttgtacagtaaatggcaaagcatctgatttctgggaagtgagtttcaagagagagaggttagatta

SEQ ID NO: 198014 - DNA, 313 bp, Homo sapiens
aaccacgggagggattctgagtggaggtggctctgacctttgacaaatctattggtgcttggtaccagcttgggctatctttatggctcaaaccaayaggacaattggctgaggcctaggaacccctgcctccagagaatccctgatgtcccaaaatttggttgagatctaaagttgttttttgttgttgttgttgctgtacaactccttttctggaattttacttgcttccaacaaggaaggcaagttttcctgcttccatgatggtggaaggcaggtaactaactcctttctgaagtttcagctcacttcc

SEQ ID NO: 198015 - DNA, 564 bp, Homo sapiens
gctgttacatagatgttgcctctatgagtacagcgtacattttaaaacttagtctcatttagtgtgagttggccaagcctggatgttttcactttatttctttattctttgtgtgaccctggtgggttgatggagrcagtgggatgaatttcagtttcactcttataaacatagctgtgcaaagctgatattctttagagctgattgtcttgtataagagtgactcccttgtatggggttaggaaacaaaaatcctctgattggaaatccaagtgtaattgatttgctaattgtcttacatagttttagatatgaccttccacaatgttatgtaatggtaaagtcatggggagtttcttttgggttgacttttagggctgttttgattctgcaatctaatcatcccagaagaaatgttgagttaatgtagaagtcagtatgatctgtggaagaaaacataagtaacattctccaagataatcttcagttctcgtgaaacatttaaaattgagggagctggctattcagagggtgagcaccacctgaaaatcaacttaatgaaag

SEQ ID NO: 198016 - DNA, 564 bp, Homo sapiens
gctgttacatagatgttgcctctatgagtacagcgtacattttaaaacttagtctcatttagtgtgagttggccaagcctggatgttttcactttatttctttattctttgtgtgaccctggtgggttgatggaggsagtgggatgaatttcagtttcactcttataaacatagctgtgcaaagctgatattctttagagctgattgtcttgtataagagtgactcccttgtatggggttaggaaacaaaaatcctctgattggaaatccaagtgtaattgatttgctaattgtcttacatagttttagatatgaccttccacaatgttatgtaatggtaaagtcatggggagtttcttttgggttgacttttagggctgttttgattctgcaatctaatcatcccagaagaaatgttgagttaatgtagaagtcagtatgatctgtggaagaaaacataagtaacattctccaagataatcttcagttctcgtgaaacatttaaaattgagggagctggctattcagagggtgagcaccacctgaaaatcaacttaatgaaag

SEQ ID NO: 198017 - DNA, 564 bp, Homo sapiens
gctgttacatagatgttgcctctatgagtacagcgtacattttaaaacttagtctcatttagtgtgagttggccaagcctggatgttttcactttatttctttattctttgtgtgaccctggtgggttgatggaggcagtgggatgaatttcagtttcactcttataaacatagctgtgcaaagctgatattctttagagctgattgtcttgtataagagtgactcccttgtatggggttaggaaacaaaaatcctctgattggaaayccaagtgtaattgatttgctaattgtcttacatagttttagatatgaccttccacaatgttatgtaatggtaaagtcatggggagtttcttttgggttgacttttagggctgttttgattctgcaatctaatcatcccagaagaaatgttgagttaatgtagaagtcagtatgatctgtggaagaaaacataagtaacattctccaagataatcttcagttctcgtgaaacatttaaaattgagggagctggctattcagagggtgagcaccacctgaaaatcaacttaatgaaag

SEQ ID NO: 198018 - DNA, 648 bp, Homo sapiens
cccaaccatatgttttccataccagcatctatacaggcaccaaamatcatggatgttcttatagccttgtgcctcacggcgtgaattgctcattgatcatttgaactcgtaacaatggaaacatcagttttaccaggcctcctgggcacttgtctgacctttctgatttgtcaaatggaattgcttcgtttgtaaaatgtttcataggagacaggacaacaatctctgtttgatgaaggtgaatgtacccaagataatttctagggttttaatggaagagttttgtgacagctggtttagcatctcatgtaaaataaattcaaggccttttgtctcactgaaagtaaggtcacattattaagagagaagatcctcctctaccaaagtcacagggattgactattcagttgaaccccagaggggctaatctgtccctgataaagttgagttggatgagtatcatgcattgcatgtgtttgcccatgatgagatatatgcagaagaaacaagaacaataatataggccaatatttaatgaggacttaccttgtaccagataatgttttcaattgtcacatgtattagatcctttaattctcacaaggatgatatggaggatacaggaccatttacattatttgtgtgatc

SEQ ID NO: 198019 - DNA, 532 bp, Homo sapiens
ctactatggcagaccatccacatccacttgtgaagaaaacattcatcttgttcatttcctaattgaaaagcctaggttattaacagcrgaaacagtagctaacaccacagacatctcaactggttcagcctacacaattcttactgaaaaatttaagttgagcacactttctagttgatgggtgccaaaaccgtcgtacctagatcagctgcagacaaaagcagaactttcaatgaaaattttaaacaagcgggatcaaaatcctaaaacatttcttagaagagttgtgacaggagatgaaacatggctttaccagcatgtaccatcctgaagacaaagtacaatcaaagcaatggctaccaagagcaggaagtggtccaatcaaagcaaaagcagactggtcaagagcaaaggtcattgcaacagttttttgggctgctcaaggcattttgcttgttgactttctgaacgtccaaataagaatagcatctgctaatttagtacagtgttttgagaaagccaaatttttagc

SEQ ID NO: 198020 - DNA, 532 bp, Homo sapiens
ctactatggcagaccatccacatccacttgtgaagaaaacattcatcttgttcatttcctaattgaaaagcctaggttattaacagcggaaacagtagctaacaccacagacatctcaactggttcagcctacacaattcttactgaaaaatttaagttgagcamactttctagttgatgggtgccaaaaccgtcgtacctagatcagctgcagacaaaagcagaactttcaatgaaaattttaaacaagcgggatcaaaatcctaaaacatttcttagaagagttgtgacaggagatgaaacatggctttaccagcatgtaccatcctgaagacaaagtacaatcaaagcaatggctaccaagagcaggaagtggtccaatcaaagcaaaagcagactggtcaagagcaaaggtcattgcaacagttttttgggctgctcaaggcattttgcttgttgactttctgaacgtccaaataagaatagcatctgctaatttagtacagtgttttgagaaagccaaatttttagc

SEQ ID NO: 198021 - DNA, 595 bp, Homo sapiens
tgttgcgtctatcagaaacatttgctcctgatggaatgttgagggtgagtgcatcatattggctgagccaaagtcatgtgaccctgtcctggctgcaggagagactatctggccttttcagcaggtgtagtgagagccagactctaccaccaacactccaatatcaggggtgtccccaaacagaggaaggccaaagaaataacaaatgtccataygaatatcaaaaattaaattggctctctttttttttttttttttttttttttttttggagatggagtctcactctgtcacccaggctggagtgcagtggcacaatcttggctcattgcaacctcgcctcccgggtttaagcaattctcctgtctcagcctcccaattagctgggactataggtgcatgccaccaccacccagctaatttttctattattagtagaaacgaggtttcatcatattggccaggctggtctccatctcctgacctcttgatccacctgcctcagcctcccaaagtgctgggattacaggtgtgagccaccatgcccagcctaaattagctcttctaagtctgacatatttatccattcctgatg

SEQ ID NO: 198022 - DNA, 654 bp, Homo sapiens
caagttgcactgggggctgaccaagtttaaagtgaggtttgaacttgaaacacaagagcttcaaaccttcacttgcagagttgatttttctaatttaaaacagataagagatgtcatatttgctgatacaaatatgattctaaagcagaatgtgatttttgtgtgtgttgctgcatttttattgtatttttattatcccaggaggtacctggcttctcagtgcttttttttttttttaatctcactattttctataactgcccttttttttttctggctgtttccaagggcagctaaagtcttatttattctgaaggatttggttgaatcaaaggacaccatgggctttttgggacgttctgtccaaaactgtttcattccctcagaaagtttttacttcctcatgagccaaccctgtttgtgggtctagacccagatgttcaggaattgcaaaggtataattcaagtttctctccagaaactggttcctagtctaaaggcctgaggtccagggagctgggttctcagagactgacatttagtcacagccctttcctcatcwaagaatatgaatgacttgagaaatatgtcacaggaatcagaggtggaaatgtcacaggaatcagaggtggaactgaaaacctcagctgtact

SEQ ID NO: 198023 - DNA, 654 bp, Homo sapiens
caagttgcactgggggctgaccaagtttaaagtgaggtttgaacttgaaacacaagagcttcaaaccttcacttgcagagttgatttttctaatttaaaacagataagagatgtcatatttgctgatacaaatatgattctaaagcagaatgtgatttttgtgtgtgttgctgcatttttattgtatttttattatcccaggaggtacctggcttctcagtgcttttttttttttttaatctcactattttctataactgcccttttttttttctggctgtttccaagggcagctaaagtcttatttattctgaaggatttggttgaatcaaaggacaccatgggctttttgggacgttctgtccaaaactgtttcattccctcagaaagtttttacttcctcatgagccaaccctgtttgtgggtctagacccagatgttcaggaattgcaaaggtataattcaagtttctctccagaaactggttcctagtctaaaggcctgaggtccagggagctgggttctcagagactgacatttagtcacagccctttcctcatcaaagaatwtgaatgacttgagaaatatgtcacaggaatcagaggtggaaatgtcacaggaatcagaggtggaactgaaaacctcagctgtact

SEQ ID NO: 198024 - DNA, 638 bp, Homo sapiens
gcgggtggtggcagtgcccaagggtgccagcgtcagctgcctctccctggcatgactttggccaagtcttcctcttgccttccttccttcatttcctgcccaatttctaagccttcttctcctgccttcccatccattccaagagcttcccttttctgctatgttaatcagagctaattcctgctgaggggtctggtccatataggtgactaatcatttgacagacagaggtccctgagaaaagcaaataagctctcattttgattcctcaagaaggaaggctgcttggggcagagcascctggacttagtcacttagcgaacatttatggagcacctactgtgtgcaggcactgccctagtgccaggacaggaaaggaacaggtacatctctgtccccaaggaacttaccacctagctaatggaagcagctctcaaacaactaattatgcaattaatttttctgtggattgctccatcatcattgggttataccaaattactgataaatatttgaatcctgcagtgggtaaagtaccatgcaatgtacaatgggcataccgaaaaagatgaaacagtctgtgcctcccttccgagttcacagtttagctgacaacacaggtacacactcatgccact

SEQ ID NO: 198025 - DNA, 515 bp, Homo sapiens
  misc_feature (1)...(515): n = A,T,C or G
cttatcccccatctccaaaataaaaaagaaaaakgtgtgtgcttagagatgttcctggaagcatgagctgtaatactgaaccaatagaagacgaactaacagattgcagggcatccgtttggcaaaaaacttatgcagttatctaaatgatagttatgaagacaatatgtataacacattatattctgagtgaaaagaacagaaggtgatttcaaaactgcattgggataatagtaatataggaaatagtgagatgaacaaagatttcaaaggaacaaaaataaagaaaaattttgctttttatattggtaggcgtatgggtgaaattccaattttaattttaatttcatagttataaaattgttcataaaaaaaggtcccccatagacagttgggctttgggacaaactaacagaaacagagtaggaagaaaattcatcttccttcaatcccctttctctgcttaaaacaaaacaaaaaagagctttgtcatgttcaggtgtgcaacgaattcn

SEQ ID NO: 198026 - DNA, 400 bp, Homo sapiens
ctccactgacttgccggtggctgagcctctccgcagcttccggccaagttggactgcagctcgcggtttcctggcttctaggtatcttccctccgctcgtttgtctgtcccgcgattcccgtgctttgggctgcagcggagttaaccgaggcggccgcccaacctctgctcctctgcggagcccgcgggtgggcggagccctcgctggaaccgagctgtcccgacccaccccaaaatccgatagttkattcgttcattcatgtagcaaatgtttatggagcaccgcccctctaaggctcagtgccgggaggcgaaggtggacatggtggatactgtgagctggaaggaaaggttttctaaagggagctcgaggtagggccgaaaagaagtgaagaatttt

SEQ ID NO: 198027 - DNA, 553 bp, Homo sapiens
agatctcttgcactcaggagttcaagaccagtctggagcagggaaacatggtgaaaccccatctctaaaaaaaatacaaaaaatttgccggygatggtgacacgcacctgtagccccagctgctcaggaggctgaggtgggaggatggcttgagcccaggaggcggaggttgcggtgagcagagatcacaccactgtactccaatctggggccagagcaagaccctatctcagtcaatcaatcaagattttgtgtaaatataatcattattccacaattttaaaaaatcagcttcaaacacagaaatatgaaaatcagaattaggaaggctggtggtcagtcttcacttaaaaataagtttataaagagtccattatctgttagagatatgtattgaagcattttccaataaagtgaatactgggatttgctttaaaatcatctgaggtagggggagcctagaattaactgttaaagctaagtgatgggagttcactaaattattctatttttctgtttgaaatcctccatcatgaaatgtttcattttgttt

SEQ ID NO: 198028 - DNA, 574 bp, Homo sapiens
gacagggtgcaagtttcagctccccacgtggtctccactaacactgcaaggtcagggagagcacctgtaatggctgggatgcaagtcctggctcctacttggccttctctgttaccacccagctggggatgttgggacccctcgttactgcctagtcaggaggaggtctagtctccccattcagcctttgtggcatgggtgggtggagctgcatactttcctgtggcgtttggctgcagtagggtatttattgcctaggaattttctgtcttgccaggccgcccttttcctggtcctttggctacagatagcaggttttgttgagggtttttttttgtagtggctgttggcatttccrgactgccagcttctccagtacccattctgggataatgagacaaaaagaaagcctaggagagtcgccactgtcctcagtcctgatgtccctggcccgcctgccttcttttctccacctttcagagtcttctcatgtttgtcttgtacgtgatgtcccaggtttttagttgtacttagcaggaagtacaggaaaaaatatacctactccatcttccca

SEQ ID NO: 198029 - DNA, 564 bp, Homo sapiens
tcacactgtcattatgaaatatatgaataggtcttataaacttcgtttgtcttattatactcaaaaactccttcctacagagcatagagtctgaaaccacaccagagatcctccaaataccagaaaggggtggggataatgaatctattttactaagaataataattggttacatttactgagtacttcacctgtgccaggtactattctatatctaactgtgaacacatgtttttcttcataaaaatggttgacatcagtactgttgttatttctcctttaaaaataaggttatggaggcacagcarttgtaacttgcccacagtcacacacagattccctggtagagagcagccaagtgtagctttttgtttgtgccatctgtgtatctataaggatgagcagagctccagaatggtactggtgtgggtgactccttcttcaatgctggtggtcattaaatgggaatttctcaaggacctcctcaagctctgcctccttcttgactagatataggaaggtcaacctgaacaaagtgttcaaatctcagtctgtgtgacccta

SEQ ID NO: 198030 - DNA, 571 bp, Homo sapiens
cagattgtatgaccataacacatcttgctcatttattttatrtctattaaggctgtttccattttttttgttattgtaagcaatatgaaactgaacattgttgaacatctcttctgacgtgaatgagcttgagtttcttcagagcagttatttggcataatttttcatgtcataggttacaagaaaatattattgtatgatatacaaggataaactgaaaatggtttgttctttttccaattttagcaccattatatttattttttaaattagtttgtatagatatctttatattatggatattaatctcttgtcaattaaatatatttcaaaatttttctctcattctcagatttttttccatgtgctaatggaatacattttaattttaatgtagtcccatttattttgctttctaaatcttcaaaatgttagcctactctgatatcataaagatattttcctttatagccttaaaagaagccaaatcttataagaattctttatggaatcattaatatagaaggcaagaatacattgcttacagagatattttcactggtgttttgca

SEQ ID NO: 198031 - DNA, 571 bp, Homo sapiens
cagattgtatgaccataacacatcttgctcatttattttatatctattaaggctgtttccattttttttgttattgtaagcaatatgaaactgaacattgttgaacatctcttctgacgtgaatgagcttgagtttcttcagagcagttatttggcataatttttcatgtcataggttacaagaaaatattattgtatgatatacaaggataaactgaaaatggtttgttctttttccaattttagcaccattatatttattttttaaattagtttktatagatatctttatattatggatattaatctcttgtcaattaaatatatttcaaaatttttctctcattctcagatttttttccatgtgctaatggaatacattttaattttaatgtagtcccatttattttgctttctaaatcttcaaaatgttagcctactctgatatcataaagatattttcctttatagccttaaaagaagccaaatcttataagaattctttatggaatcattaatatagaaggcaagaatacattgcttacagagatattttcactggtgttttgca

SEQ ID NO: 198032 - DNA, 601 bp, Homo sapiens
atttagttcagctcttcttcctggatttcctttggcctctccctcttcgtcctwattcattcataactctccttctgtaaatctgctgtctttccctttgttttttcacaattatctgatgctttctggtcctctgtttctcatctgaggtttgtgcctgtggaacatttaccaaactgcaatcaattctctggtagatcatggtaccctccactgcgagattataaattgtttcattcctgggtcttgtggttattatgactatctcagtttcaaaaacttcaattgctgtctataacctaatttatcaaatttaaatttgactgcttgatttcacctaaagccttaccctggctgttcccttgtattcaaccttctttaatcatgccagtattctcagtttataatgaataatacatgcttatttattccttggcttattctatttttcttttcttttacctggaacattctctttttctagtccactgatgcagaatttgcaatttataaatcattagatgaaagtcagtatcacaaagtaatgttccatttgactctaacaatatcttccacatcttggtatacctacaggcattat

SEQ ID NO: 198033 - DNA, 489 bp, Homo sapiens
ttcttggtattgatttattccactgtgcttcaaaggtatggttgacatgcttttcrttgtttaaaaaaagtattgagacttgctttacgttcaagcatgtggacagccttggacacgttctgtgtacaaatgagaaaaatctatattccatggttgatgggtgtagtattttgtagatgtctattatgtccaattgctcaagtgtcaaataaatccagaatttctttgttagttttctgccttgataatctgtataacattgtcaatgaggtgttgaaatcccccattattattgcatggccatctacattttttgtaggtctagaaatgcatgttttataatatgggggctcaaatattgggtgcatatatatttatgatagttaagttttatttttgaattgaatcctttatcattatgtaatgtcattctttatccttttttactgttgtaagtttaaagtctgttttctttgttgtaagaatagt

SEQ ID NO: 198034 - DNA, 442 bp, Homo sapiens
aggtatggttgacatgcttttcattgtttaaaaaaagtattgagacttgctttacgttcaagcatgtggacagccttggacacgttctgtgtacaaatgagaaaaatstatattccatggttgatgggtgtagtattttgtagatgtctattatgtccaattgctcaagtgtcaaataaatccagaatttctttgttagttttctgccttgataatctgtataacattgtcaatgaggtgttgaaatcccccattattattgcatggccatctacattttttgtaggtctagaaatgcatgttttataatatgggggctcaaatattgggtgcatatatatttatgatagttaagttttatttttgaattgaatcctttatcattatgtaatgtcattctttatccttttttactgttgtaagtttaaagtctgttttcttt

SEQ ID NO: 198035 - DNA, 572 bp, Homo sapiens
tcttggtaaaattggtagaacaaatgcaacacaaggctgtggtcaccctttaagatctggggaacaaatttccatggtgccwaatcacatatttaatctaataatttttcccacaatttctgtatagtaagaagtcctatatttttcttggctatttttggtaatggtaactaagatgagattcactgggcagcttgtttcaaagggaatgccagtcaccaatagtaagctctcttagcaattggtgaccttgttggcctgatagaatggaaagggtaattcagaatgagggaaggggtgtaaatgaatgaaccacaggtggtagatctagcatttaggttcacttctctattccatgttttgtatccagtgaaatgatatactcaaagtcaataaatcacccagaaaattgtgtaaagaaacattgtctctgtaataatgtattttgtacataatatagctttggaaaatatctaaatgccaagttatataagacagtagatttatttctgtctcaacctgaaaattagagagagaagagaaagaaagggagggatttgtaaaacataagc

SEQ ID NO: 198036 - DNA, 572 bp, Homo sapiens
tcttggtaaaattggtagaacaaatgcaacacaaggctgtggtcaccctttaagatctggggaacaaatttccatggtgccaaatcacatatttaatctaataatttttcccacaatttctgtatagtaagaagtcctatatttttcttggctatttttggtaatggtaactaagatgagattcactgggcagcttgtttcaaagggaatgccagtcaccaatagtaagctctcttagcaattggtgaccttgttggcctgatagaatggaaagggtaattcagaatgagggaaggggtgtaaatgaatgaaccacaggtggtagatctagcatttaggttcacttctctattccatgttttgtatccagtgaaatgatataytcaaagtcaataaatcacccagaaaattgtgtaaagaaacattgtctctgtaataatgtattttgtacataatatagctttggaaaatatctaaatgccaagttatataagacagtagatttatttctgtctcaacctgaaaattagagagagaagagaaagaaagggagggatttgtaaaacataagc

SEQ ID NO: 198037 - DNA, 633 bp, Homo sapiens
atgacttttaataattgagtaaggtatatatatcctgtgatcaagatttggagcatgtttgtttctctctgcctggttcctctagaatttggaaactatctctgagtattcttaacttatggcaatatagttgcatcagtgcaataataacccaatattttttagaaagcggacacaattggagaaagtggttattttaccaaggctttgactggaagggtatgcttccctttaaagagtcaatctcgacttacagagctggtaaaagccccattttagactggccccataaacccatctacacagtccctgtacagagtccatgacctgtggtcagtagagaatgtcactttctaacaagcctaggagctacaagtttttcttgggactttaagagamgaggatcacccaactcacaagtatttgaggatagaaactcatggctgagctctactttaaaaggtcttatccgagattccttgtggaacagagttccatcagagccaatccaaaaggcctatgtagaaacaattattcttgctgtactttgtgcaaattatcaggccaagaacaagactaaagtctattttgcaaacaactcagtactaccataatttgtttttttaacaaaaa

SEQ ID NO: 198038 - DNA, 609 bp, Homo sapiens
accctttcacattatagtcctttaaatatttaaggacattttacgtggctctcttttcctctctagttaaacaattttagtgttttttgtttgtttgtttgtttgtttgttttgtggggctcaggggtgagggcatttgtggtttttcattttcctcctcaccctggttactaaatatgccagaaaacctactcaatattctaagtataccattgattatctgagctgatattgacactgagaagtaaacctcattttcccaagagtatgctgccatgccaagaggcaatgaactcagcaatcttcttttatttgccaygtatctaataacggtgcctaactgagaagttgttaaataattgaactgccttaggtcactttattgccatgccaagctttgtcctcagttattactggtaagctgcacctccatgcttgtgcacttaaaattttctgacagattttaggactgtgcatttattattatatttcatgcactgtttaactcttttcttgcttcccttcactgtttgttcaatcctttgttgtaattgcatcagtacttaaccacagatacttgccttaattaggccactctctctatctgga

SEQ ID NO: 198039 - DNA, 571 bp, Homo sapiens
aagacatgtacaagtttatacacttcaatacttcaggtcgtttctgaaaccccacctggagtaaagaggagtcayagatttgttgttgttatttttatttgtctctcttgcttcttgttatagtgtttcctacttggtttatataaagctggaatacttaggtgaaattcattgaaattaatgtatttacagtttttggaaaagtgatttttagtgacgatttttattttttttatatttcattgtcatttttgtgagacaatcccaatagtaaaatgccaaatgtacttttgtaggagagaatattgaagcaaagctcacaccaactaagtaattgctaatcgtcttccatgaggtaaactcagtaaagtagtatttttgttacccaagagtttcctgtcactgtgtgcttccctggcgcacatttggaggatgtggaggtgtctctggtcactgtggggggtgcatggcaacatattcaacttatgtgcatggcatttgaggttggggcatggaaaaatactgaggcactgtctgtatgtattttgtgcatgagaatgaaactccttgt

SEQ ID NO: 198040 - DNA, 428 bp, Homo sapiens
gatcatatcacttagctctgcttctttttgatgataagaacaccaaaaatctagtccctcagaatatttcccaaaaacaatataagattatctaatatacctacaggttgtacatcagattcatttattctacattactgcacctttacaacttttgcccttcrtttacctattttcttcccaccaatataaccacctttttgaatgtattaaacttataaaaatagatttcaaatatgagtgggaccatgaagtatttttctctgtgtgtctgtcttatttcacttaggaaacctaccatttacatgtctcctaaatttagtacagaaataaagtgctagtcaagaatgtgtctctgttttgttagattaatttttttccaagttatcctctttatcaatttttactttttgtaccatagaagagtg

SEQ ID NO: 198041 - DNA, 529 bp, Homo sapiens
tcgcaaaacataggtgacaatcaaaaaggagtgctgggttggagccctaaggtgagtaattttatcatctcagatcacttggaaaaaagcagcgagtccaaaagaagctggtrataagctttctctctgctaaaccctaatcttctgcatgaaatatgtggaggcagaagagagacagtttattatagtctacgtggcatagagtgaaggaataagagaatatttctgataagtattttcaaaatttggagaatcattcctatccaaatcgttcatttaagggactaaaatacaaataagatatttcttgccacataatcctcagctagccaggctctaaaaaggacaacactggacacctcgacagtggtaaaaagcagggtttactccactcttgaataactaagaactggtgctaaccttagacagcagcttatctatttggttgaggttcagctttgtttcattgaacaaatctcttgggttattttcagctgtgccagtcatttaatttgttttctgaatcaaa

SEQ ID NO: 198042 - DNA, 402 bp, Homo sapiens
agtaactgccttcaacttgaactagtcttgaaatattgttgtattcacgatttatatcatttattttgatggaggataacttgttttttatttttggagatcatgaaatctgtattaacaaggacttaagtctttagttaactataaatatttatagaawgaaagaaaaagaccatttatgttaatatatatgttaatattttaagctgtttatgaaatataaacatcaagaataaatcacagctgaatcagtcagtgcccccagtgtaaaacggatggacactgaaaggggtacttgtagagaatttaataaaagaactatatacagaagcataagccagggtcaagggagacagtgacagatgaggaagctcccagggaccagcacagctggaagttgct

SEQ ID NO: 198043 - DNA, 402 bp, Homo sapiens
agtaactgccttcaacttgaactagtcttgaaatattgttgtattcacgatttatatcatttattttgatggaggataacttgttttttatttttggagatcatgaaatctgtattaacaaggacttaagtctttagttaactataaatatttatagaaagaaagaaaaagaccatttatrttaatatatatgttaatattttaagctgtttatgaaatataaacatcaagaataaatcacagctgaatcagtcagtgcccccagtgtaaaacggatggacactgaaaggggtacttgtagagaatttaataaaagaactatatacagaagcataagccagggtcaagggagacagtgacagatgaggaagctcccagggaccagcacagctggaagttgct

SEQ ID NO: 198044 - DNA, 649 bp, Homo sapiens
ttcataaatagggtgatataggaaaatgttttgaaatcagatttatattaaaattctggcttctgacacaaataactcatgaaaaataatcaccataataagcagttgctttatcatcattataattaacttcagagtgttgttctgaagactgaatgggctgacttaggtagcagcactctaaacaagatctagcctaaagtaaacacttaatagatgctaacctccatttaatattcaaatataataatatatctatagtgtctttttggttacaaagtttacagtatcatcttatttgatacttacaacaatcccttgatgtggcaagaatagattgtattatgcccattttgcagatgaagaaactgaagctcacaatggctagtaacagaagctggaaaatggaagaggcaatatttaaagccaagtcaactgactccaatctcattagaggctaaaatttgcagtgcttttaatggaaaatttactttaaaaaaatagacttttttttyctcaagcaataaaatctgagtactgatttcatgtttttgaattgaaccttatttttcactgaaagcctccatgctgactgagagaggaaaagggaggaggtacaagtgctgttacttagttcttgtattgtgtg

SEQ ID NO: 198045 - DNA, 574 bp, Homo sapiens
tctttaattctatttccatatctcatggtaggaatattaaaaatacattttttgatattgtattgccagtgttcaaatggcagtaactgtaactaaaacatacatgcttgtctaacccacaccattaacaatcattgctttatttgcagaatgacatgaattacatagcatccagtggacctctgttcaaagatggcaaaaagagaattgattacatcttggtttatagaaagacaaatatacaatatgataaaagaaacacatttgaaaagaacctcagagcagaaggcttgatgttggagaaggaggtaggtgctttactattattagttatgtgataaaatgtgttggaacagatataatcacttatggtttagaaagaaaaatatgtatcacatsactttataaaatacatagtttttttctaacaaatgttaaataaatacatgcacatagccctattaaatatgtattcactttttaatctatataattctgtacaatttaagtattttcaaagggcatgactatttttgcaattttaaaaactgaataaggaatgattatagttatg

SEQ ID NO: 198046 - DNA, 618 bp, Homo sapiens
gccctggatgaaggagtcattcaaatagatgtatgcttacactttacgttttaaaaagtttttctcatctttatcattccttcacaaaaaccttttcaccaaatttggaagattcactaaaagagactggaaaaaaagtcacggtcttctcttttctctgatcagtgacagatttccagctgggtgatatatttttaaacaaatggttatttgaatgaatcaatagtcactttaaaaaaattatatacatttttcccaagcatagataatatgtgtaaccttggttggtctgaattcaaagacctatagatatttgagatatattatgtttacttctggcattgtcaattttcattttaataatcctttgtctttaatttgaaacaaatgtattttaaataggaaaagtcctttggaatttgcactgacatgaaagcatcttaagctattttcccatgttgatttgcaaaatactagtgtctcagtaagctattgrgaaaaatcaatccttgatccagaagtttggaaattcagcatactttatctcctgcttggatattttttagcaaatgcatgcatattaaagtgtcttagaagtcctctaatgagaaaccaaaa

SEQ ID NO: 198047 - DNA, 589 bp, Homo sapiens
ttccaatattagggaacactggacacattgcaggttcatttttagaactgatcaacagccaaggaaaatgcargatgagtgaactgatctatctttatacataaacacaaggcgtttaacctgcctgaacagttcaaattgttgctaataaaattttagatctgctctgtgaggcaacctgcctgtcacgttggctgttgctcaagtagctcccaccctcgatgcatgtttaggaaatgtgacagctgtgctctttgcctggctgcttccatttatgaaaacatgggggtaaatggcagtcacccccataggccatttactgtgaatcttcttttctaggcacagccaagactaaatgcccccaacagaatcgaataacagtcattcagggcctacctcaaataggtttaatttgctttttacaaaaaaaggcctcaggaaattaaaaaatttgcctaattggaattctaaaaaacatagttttttttttcttaaaacaatacccattttatgtgattttaacatatccacttctgatggtagcttctctagggaagcaagacaaaaatatccaattacaccaagtaaa

SEQ ID NO: 198048 - DNA, 554 bp, Homo sapiens
tggtggtgggggatgggaagacagggtagtagttaaagggtacaggatttctttttgaggtgatgaacatgttctaaaatttgctgtggagatggttgcataaatctgtaaacatattaaaagtcattaaattgtacacttgaaatgggtgaactgtatggtgtgtgaaatatatcttaataaagctattttaaaaaaacactaaaaaagctcccaaagcctaaggtacactttatactactaagagattcaggctcttcagataaaatttactacttccagattagaatacttctgtgcccaagggagaatcatcaatgaggctattcttagaacacaaagctttccttcctaaaatactggaaaggagcaacaccttgaacaccacaggaaacccataaatatctaatttgcaccactgcatgataaaagcagcttgcttcttccactcattagcaacactcaaaaatatattctagctctttgcctgctgaaagggatatttacrtttgctctttgtatcaactaaataagccctgtttatgcctacagtt

SEQ ID NO: 198049 - DNA, 599 bp, Homo sapiens
tgaaacacactcttttagagactacttctgaggattcagctggggcaaactgctgctaccagctgtcttatatacacaggaaaggggtggggctatctgccccagctgtttcaaagccctttccctatggcccctcctgatttcagcctcacagctccctcctcttctatatactgattgatttcaaatttgaatcctttctgggggttttatgggaaaaaagttttatrtattactgtagccatcttcagctctctttctagtctttggttatctttattctgtttttcctatcaatataatctcacagactgtgttcccatgttagttttcttttgctgcatagcaaattacaaaagttttagtgtcttgaaacaatgcctacttatgatcacattttttgtaggtcataaatctgggtgctgggctaaagttaaggatgaaatttaggtgttgatcatctggaaagttaggtgttctcatctggaagcttgactagggaagaacccatttctgagctcatctgggttattggcagggccctgtggctgactgccctggactgaggccccgttatcttcctggctattggctgggag

SEQ ID NO: 198050 - DNA, 579 bp, Homo sapiens
tgactagggatcttaattgcctctgcaaatctctttacttttgccacataacataacctaattatgagaataacagtccatcacactcacagattcccgtagcactcaaggggaagggatgacgcaaggtatggttattaggtgtcagaaatctggggaccattttagaattctgcctaccataggtccctaggaagttgattgactctaagatgagattccatgttagacggtccttagtgagggccatcaagatgaacagttgtggccaaaaggaaggacaaagccctgagtggaggcataagtcaggctacrgaatagtcacaataaggcttcagtcaactccacgggtagctcatggctggctggcattttagaattgtacctagttgggggaagaggttgtgtttgtataggctgtcttatgctagtcattggatatgagatctcctgggaggctcatctgtacagctgaaagtttttaattcacaaccttcacaacagctgggggaaagaatttttagtcctaacatggagttctgggctgtagagtacttcagtcatagcataatcccacct

SEQ ID NO: 198051 - DNA, 525 bp, Homo sapiens
ggttcctcccttgcgggtatcctggcattgctaagctartgttctacattctgctaatgtgactgacaacggtggaatttcccagtgcccaggaaggaaaagaatatcctcaaacattccaacatctcccaattctctttcccattcagtgtctctattgctgtataaatggcctcatttttaacagaagtatgacaaacacaacaatagcatcattttacagaagcactaaaacacatttttaaaatgcatttcatttcaaagccactctaatttaagccttttggagtctttattcttcttctctccagaagcagcctctgtccctgaatgccaccaggagagctgaggaatgtggatagcatctgccagggacaagatgcggcctcccaagtctttagcgattcacaggttgtaaatgtactttgattgtgcaactgtgcttttacaccagaaatttgtaaatgggcatttgcaactttcaaatggttagcgtttaatatcactccatttatcatatagcca

SEQ ID NO: 198052 - DNA, 560 bp, Homo sapiens
gtactttgattgtgcaactgtgcttttacaccagaaatttgtaaatgggcatttgcaactttcaaatggttagcgtttaatatcactccatttatcatatagccacaaatgccaacatcacatttctttttaaccataccattgttgataggcacagttcagaattttttcttagtgtttccttatgtctaaatataaggagtaaacatarttttgcttacttataccttccctaacatcaattttaaataaatccttcagttaccgatgagtgtttttagcctatttcaaattaccccgaaacacttcccacataatggacatacttactttacagaacatgcagttttaaatcgattttgcatgtgatttggtcaagctgacagctatgagcaaaatgctacacaggagttgcttgtggctattcttatgaccaaatatctactacacacagcctaaggtatcataaggattatagctctaactgccagtttcagcttttaaaatatctcagggcagaaggacaagctgacctaatgagaaggtcatttgaatagatt

SEQ ID NO: 198053 - DNA, 560 bp, Homo sapiens
gtactttgattgtgcaactgtgcttttacaccagaaatttgtaaatgggcatttgcaactttcaaatggttagcgtttaatatcactccatttatcatatagccacaaatgccaacatcacatttctttttaaccataccattgttgataggcacagttcagaattttttcttagtgtttccttatgtctaaatataaggagtaaacatagttttgcttacttataccttccctaacatcaattttaaataaatccttcagttaccratgagtgtttttagcctatttcaaattaccccgaaacacttcccacataatggacatacttactttacagaacatgcagttttaaatcgattttgcatgtgatttggtcaagctgacagctatgagcaaaatgctacacaggagttgcttgtggctattcttatgaccaaatatctactacacacagcctaaggtatcataaggattatagctctaactgccagtttcagcttttaaaatatctcagggcagaaggacaagctgacctaatgagaaggtcatttgaatagatt

SEQ ID NO: 198054 - DNA, 609 bp, Homo sapiens
tatcccctgagcacaatctcttttggacatctgggattttggttttgttgaattaaaattgccccatgattctaatgtgtttttagacagtggttgcttcttaattattttgaacttaaaatggtgaacttatgaagtgcttagatatggtttaaaaacctgaacaaaaatatactgagaaaaatttcatatttgtacacttctcattcaatattgtttcttgcctccaaatcgcttccataaaatattgcagatktcaatttctgtttgagttgttcatcattccttcaaactatagctgacctttccataaatttgtttttggataaaaatgatgacctagaagatattttaccaagtgaacccttgccaaaacctgataagtggggtccaaaatacccaatcctataaaatgcaagctcacaattttacgaggttaatggaatgaggtgggggtgagcctgttcagctagctgccacagttctggggtttgtctgaggatcccagtcagcctccatcccagttgcagtgtaatgccacctggtgttggttgtcctttctaagtgccattgacattgatccagcttcccagggaagactgggaattc

SEQ ID NO: 198055 - DNA, 609 bp, Homo sapiens
tatcccctgagcacaatctcttttggacatctgggattttggttttgttgaattaaaattgccccatgattctaatgtgtttttagacagtggttgcttcttaattattttgaacttaaaatggtgaacttatgaagtgcttagatatggtttaaaaacctgaacaaaaatatactgagaaaaatttcatatttgtacacttctcattcaatattgtttcttgcctccaaatcgcttccataaaatattgcagatttcaatttctgtttgagttgttcatcattccttcaaactatagctgacctttccataaatttgtttttggataaaaatgatgacctagaagatattttaccaagtgaacccttgccaaaacctgataagtggggtccaaaatacccaatcctataaaatgcaagctcacaattttacgaggttaatggaatgaggtgggggtgagcctgttcagctagctgccacagttctggggtttgtctgaggatcccagtcagcctcyatcccagttgcagtgtaatgccacctggtgttggttgtcctttctaagtgccattgacattgatccagcttcccagggaagactgggaattc

SEQ ID NO: 198056 - DNA, 560 bp, Homo sapiens
aatccacattcccatctgcagccccactctctgtccccatagctttgccttctctggtcattttatgtaagtgyaatcctacaatatgtggtcttttatgtctggtttctttcatttagcataatgtgccaagctcatttctgccttcatccttggggtacatttgggttctttctctatcttctccctttctttccacctacccaaatttctcattgttgttttcatgctgctgttttgaggtacaatttaagacatagcacttttataacattatcttagacttctttacagtccaccatttttacctttattactctaaatctccactgggacctctaggcttgagttcttccttagctgctccgtgcagctatcatatttccttaccaagaaaaatgaaagctctttatgaaaagcaatagacacatttggaaacaaaatacatgttccttgaaaaaaatgatgaattgagtatgtctacttatacttgatacttttctttactgaggacagtgaccaagaagatccataggtaggtaggaggggaggatccagat

SEQ ID NO: 198057 - DNA, 618 bp, Homo sapiens
ttctatagcccctacaaacattttaaaaggaaggtattatgaacaaatttatgtaaataaattttggaatctagaagagatttttctttaaacatatagattatcaaagctgacataagaaaaaatgaaaaaaatgaataatcctatctacaaaataagttgagtcctttgaaaaattttatcacagacaaaattccatatggctttattgataaactccaccagcatttaagaaacacagaatagtatcttacatctattctaagagagaataaaaaaagagggaccacaacccaaagtgatttcwaatttgttcagcaaaaccttgttaccaaaacttcacaggacattgcatgaaagaaaaactgtatgaatctcttttaagaacatagatgcatgaaaccacaaacaccacaaatagccaaagcaaccttgagaaagaacagagctggaggcatcacacttgctgatttcaaattatatcccaagctttctaaacaaaacagtgtgatacatgcataaaaacagacacatagatggatggaacagaattgagaccccagaaataaacccacacatatatagtcatctaatttttgacaagggcaccaagaaaac

SEQ ID NO: 198058 - DNA, 609 bp, Homo sapiens
ccttcctctctcctttcttttcttcctttcttcctcctactctttctaattcccttccttcctcccttctctcattcttccctctcgattactgatagatgtatggaggaaagatcaggagggaacagttgacaaaggatccctggcttgtggggaagggggacactgaacataaggatggtacagagaagtgttgacagacatttacttcccaagttgcctctgtgagaccttctcactgaattccctcagatggagttgaaaagcacttgactacatccccttgctacctgggagactgggaaggtagttttcttgctcccacagatatgatacttctgcaatacactttgggggagaggcatcagtagaggagggggttaacgtagaaactatttctttatttttttttctaccactaataatccagaatgaggcctgtcatataagatgaggaacyaaggacaaaaggtaagccctgattcttaatttctctgtctgtctctgtgggtttaagttaacccttattagtgagtccacatcatattgctttctaattaaaacatatatatgtctaatgagtttacagaataataaggcatttgtaat

SEQ ID NO: 198059 - DNA, 533 bp, Homo sapiens
aatgatgttgtaactggatccaatcacttacttactcccttagtgaactttatcctgaatctgtttgccacttctctgctggtccctgcctgtgtaaacaccatgactctgggttctgctcagcagactgaagggaacacaactatgatgattctctatgctgtacttggagaaggctggttagtcataagttttaaagcaggtcagtatggtggatttccagtctgccagcctcctttgcagtgggttgggaccgagtgacggcttctggcaaatgaactgtgagtggaagygacatgtatacttctgagtctgagtggttaacagccagttaggtgcctctcctatctgtctcttttcttgttgaggtaaagccacatgttccaggtggtctagctataagatagacaatgcctatctgtcactgagaattcgggggttatttgttttgttgtttgtttttgtaaagacaaggtcttgctatgtttcccaggctggtcttgaactcctggcttcaagtgatcctcctacct

SEQ ID NO: 198060 - DNA, 655 bp, Homo sapiens
gtgggttatgtctacctgctggctgttgtgaataatgctgctatgaacattggtgtacaaatatttgtgttcctgttttcagtgcttttgagtatatgtccagaagtggaactgctagatggtaattctctttaaaagttttgaggaacygccatagtgctttctatagcagttgttccattttatattcctactaccagcttattttatgttttctttttttggaagcagtcatcttaatgggtatgaggtggcatctcatgatttgtatttagtttaagtgcaggtttccttagggaaaaccaaaatattatcagttactaatattctagagtcaatgagtttgtaagaatttttttttttctcaaaatgacagctctctctagaatgagacagtcaacaggtattactggagggaaagtattcgtgtatggtaaaaatggccctgagcttggagtcagaggcctatctccaacacctcactatgaatcaatacaatccacaagtgcttcagtttctttatctgaaagatgtacgtagtaccatacagcaatggctcgcaaactttagtgcatgtctgagtcacctgtggagcctgttaaaacacatattgctgcaccctccctcagtttctgattccatgggtgttgggtgg

SEQ ID NO: 198061 - DNA, 655 bp, Homo sapiens
gtgggttatgtctacctgctggctgttgtgaataatgctgctatgaacattggtgtacaaatatttgtgttcctgttttcagtgcttttgagtatatgtccagaagtggaactgctagatggtaattctctttaaaagttttgaggaaccgccatagtgctttctatagcagttgttccattttatattcctactaccagcttattttatgttttctttttttggaagcagycatcttaatgggtatgaggtggcatctcatgatttgtatttagtttaagtgcaggtttccttagggaaaaccaaaatattatcagttactaatattctagagtcaatgagtttgtaagaatttttttttttctcaaaatgacagctctctctagaatgagacagtcaacaggtattactggagggaaagtattcgtgtatggtaaaaatggccctgagcttggagtcagaggcctatctccaacacctcactatgaatcaatacaatccacaagtgcttcagtttctttatctgaaagatgtacgtagtaccatacagcaatggctcgcaaactttagtgcatgtctgagtcacctgtggagcctgttaaaacacatattgctgcaccctccctcagtttctgattccatgggtgttgggtgg

SEQ ID NO: 198062 - DNA, 655 bp, Homo sapiens
gtgggttatgtctacctgctggctgttgtgaataatgctgctatgaacattggtgtacaaatatttgtgttcctgttttcagtgcttttgagtatatgtccagaagtggaactgctagatggtaattctctttaaaagttttgaggaaccgccatagtgctttctatagcagttgttccattttatattcctactaccagcttattttatgttttctttttttggaagcagtcatcttaatgggtatgaggtggcatctcatgatttgtatttagtttaagtgcaggtttccttagggaaaaccaaaatattatcagttactaatattctagagtcaatgagtttgtaagaatttttttttttctcaaaatgacagctctctctagaatgagacagtcaacaggtattactggagggaaagtattcgtgtatggtaaaaatggccctgagcttggagtcagaggcctatctccaacacctcactatgaatcaatacaatccacaagtgcttcagtttctttatctgaaagatgtacgtagtaccatacagcaatggctcgyaaactttagtgcatgtctgagtcacctgtggagcctgttaaaacacatattgctgcaccctccctcagtttctgattccatgggtgttgggtgg

SEQ ID NO: 198063 - DNA, 615 bp, Homo sapiens
gtcagttcacttccattctaagctccaggtttgagggagggagaggagaattttgcaagcactgaaaattaaatgtgtgtgtatgatatgtcatccttatattcaacatgactctccccagtgacacagctgcagtgcacacagtaaaacatcctgattcatcaggcttgcatctcactgtgtataagtcctctctttacctttgcaagtgagagttgtcccagagtttcatataaaacagtgctgtatcacccaagaacgttctggcctcttttacatgacttgagtggagtctgagtggtactgtaaagctgagtttatagcacggatgagtcaggagaaggagaggtctggatgtcagctggagccagcatcagaaccaaagagaaaggcagaaggtggagaccacagtttaggggtcacagaggtttaggagtcatgaattgctacccacrtcagggcaccccgggggaatcacagcatcctaagaaagtcaagaacaaggccgacagtccaatctgactgtcttacaggacaaacactgatataaagccagggctgcatcatttggctagagccagaccagagatatgtgcctttactttgatagttcgg

SEQ ID NO: 198064 - DNA, 470 bp, Homo sapiens
tacctcactcagctaaggctggtttccagctggaactataagctgggttgttttcttttatattacttatacttttaattacggaaattttaacaatatacaaaagtagaccagtaatataatatccattactataacccagtagagtaayctccatacctatatatccatatgggtatgtaatatctatatatctgttaaccagattcgacagttataatggacccatctttctgcccatccctgctcagaaaaattcttcagaacgtccactacatttctgtctattaaaacctgcagctggccagaagcgggggctaatgcctgtaatcccagcactttgggaggctgaggtgggcagacggtttaagcccagcagttcgagaccagcctgggcaacatggcaaaacctcattgctacaaaaaatcaaaagttagctaggcatggtggtgcacacctgtaaccccat

SEQ ID NO: 198065 - DNA, 592 bp, Homo sapiens
acataagagtaaacttttgtgaccttgggttaggtaaagccttcttagatacaacagcaaagaaacaagaaatgaaaagaaaaataaactgaacttcattaaaattaaaaacttgtgctacaaacaacactatcaagaaaatgaaaagacaacccacagaatggtcaaaaatattttattattgagttgtaacaaaatccagcctagatagaacactatataaagaaaacttacaactcaataataaaaagacaagtaacacaatttaaaaatagacaaaggacctgagtagacatttytccagagaatacatacaaatggccaataaacacatggaaagatgctcaacatcattagccattaaatagatgaagatcagtcacaatgagatgtcacttcatacccattaagataactattaaaaaaattaaaaataggccaggcccaggggctcatgcctatcatcccagcactttggaaggctgaggcaggcgaatcacctgaggtcaggagtttgagaccagcctggccactatagtgaaaccatgtctctactaaaaataaaaaaattagccaggtgtggtggcacaca

SEQ ID NO: 198066 - DNA, 592 bp, Homo sapiens
acataagagtaaacttttgtgaccttgggttaggtaaagccttcttagatacaacagcaaagaaacaagaaatgaaaagaaaaataaactgaacttcattaaaattaaaaacttgtgctacaaacaacactatcaagaaaatgaaaagacaacccacagaatggtcaaaaatattttattattgagttgtaacaaaatccagcctagatagaacactatataaagaaaacttacaactcaataataaaaagacaagtaacacaatttaaaaatagacaaaggacctgagtagacatttctccagagaatacatacaaatggccaataaacacatggaaagatgctcaacatcattagccattaaatagatgaagatcagtcacaatgagatgtcacttcatacccattaagataactattaaaaaaaytaaaaataggccaggcccaggggctcatgcctatcatcccagcactttggaaggctgaggcaggcgaatcacctgaggtcaggagtttgagaccagcctggccactatagtgaaaccatgtctctactaaaaataaaaaaattagccaggtgtggtggcacaca

SEQ ID NO: 198067 - DNA, 510 bp, Homo sapiens
gtaacattcctattcacttctgataggcaaaatattagagataatacaatcagggtgacttccttgctactgctcaaaccatatcccaaaagtaatcctgaactccatatggaatcttggaacacagttggaaattaaactaaagagtaaatgtttttcagtccccaccagttcagggtactatagaggggtgatttcttaaggaatattattataaacatatcatrttggggaattgagatgttaaagttttagcaaaattgaaattgttaggtttggcatattctattttgagtaaggaaacaaaaccctctgttccccaataaatggctcctctttttataattctgttactaaacctacaagcaaaaggcagttaagccaacaacaagtaggaagtcttcactcctaatgagtcagtcttggggaccaatatgcccttcaggaatgctattatttcattctcctagggaaatagagatgtcatgggtcaaatgttgactgccgaaa

SEQ ID NO: 198068 - DNA, 647 bp, Homo sapiens
ccctggttggggtataaggctgaatgcgccccttctttctcttccctttttgcataccatgttaatataaacaaaaaaggcttcttccctttgcttctcggttgaactctgtaagtgggggagtaagtttgatgggtgcattatcacttagtttcwcaagcagcagggaaactaatctgcagctacagtaggaccagactgtgagcccagattctcagactcccgggccagtgctcccccaacctctgacatgctgcagaaggatgcttgcttggctctgttccttttgagagttaaaaaattggcctactattattttgtgaattgtgtgtacattatgttttacataaaatttagagggaaagaggtaatgttgcataaatatgtactttctgttaagttcacctagtttttaaagtatgctatttgccagtgcttgcaaaggttgtgatagttgtatcaacgaggaagcactgataatttacctgattccatctataggatctttcatttaatttacctgatgccatctataggttctttcatttacagtgattggccagttctctctacaatacgcaaagtgcagagctagcccccttcaaaaccgatactcgattttaaagctgataactaagatatggtgt

SEQ ID NO: 198069 - DNA, 620 bp, Homo sapiens
cctctttttataattctgttactaaacctacaagcaaaaggcagttaagccaacaacaagtaggaagtcttcactcctaatgagtcagtcttggggaccaatatgcccttcaggaatgctattatttcattctcctagggaaatagagatgtcatgggtcaaatgttgactgccgaaactcatcagaattttttgttgttttttcttttcttttttttttttttttttttttttgatacagggtctcactctgtcacccaggctccagtgcagtggcgacctcctgtgctcaagcaatcctcctgcctcagcctcccaagtagctgagactacaggtgtgtgtcaccatacctggctcatttttgtattttttgtagatatggagtcccactatgtcgcccaggctcatcagtatttttgacaaatgaccacatgtactaaatttttctgcagtatttttcaatatggaaataattgcatkcttactaagaagatgtaaaaatcatacagagaactttcatataccctttattcagtttcactaattttttccatattggcatattttctttttcttctaccaatattcactttatcgtcggtttcttttcttaaccatt

SEQ ID NO: 198070 - DNA, 585 bp, Homo sapiens
ataaaacattgattctcataatagtaagccataacggccagtctaatgtttaactataaagcgcaatagctagtgttagctgagtaaagattgattataaaatggaaactcacactgtaaccagttttagagaaaaagtaagaagaaataatgttggaaactaaccatttgtgtgtgtgtgtgtgtgtgtgwgagagagagagagagagagttaggtataggtatatgtctattaattatagtgctttcagaatttactgatagattgtgaggggtccctattaagcatctaagttgatatgttgagttgtttttgggaattaagtgggggaattcaagctagagatgtaaattaaagttaacaaaatataggttatatttatggccctgagactggatgagatctcccaaaggtgtgaagacagtaacagagtttacatgctaaggcttgtgagaatttcaaattttatagattgagaaaataataagtaaaaattaaattctaaaaaaatacaatgaaaaatatgagtaagagctcatgagcatgttttaccttctttccggactcactatgtgacaatgata

SEQ ID NO: 198071 - DNA, 478 bp, Homo sapiens
cagcggtacattgctttaacaacattaaattgcaaggtctatgtctcataagagagcaggttaggactagtctccacaggtccagtggcaatatccttagtatcataaacaatacactcagaycattaagacatactggaaacaacattttggttgccactatttccactgatgtgtaccagagacatatgaagacacttttacacaagttgcataataaaaccaaagcaatgaataaactttgaacatttgtgactaaatgatacctacattgtatttaattatattatgcatatatactgcatttgactctcactccaaatatgttagaaacttttcatattaaaatataaagctctattttcattcaatagatgatccttagttaattcaatgagtcccattcattgatgaattgtttgccttcattttgtgttaatttttttgtcatttttttcttctcatgagttttgttacc

SEQ ID NO: 198072 - DNA, 535 bp, Homo sapiens
cctctaagcactagtttcttcatcagtaaaatgggcgtaataatggctacctactcatgacttagtacattaagatactgacaaacttcatttgtagcaattgttaaagatatttctaatgacaacataatgcctgctgcagtgaaaattcaagatgaatccctcagctgagtgctgtgctgctgaggaagatcacacagccatcctaagtagcttcctagaaaagtgtaatataagccaaaactggcactcagtatcatcaggatatcttctgtgtttttctagaaaaatcagtttatattctcaaaataaatactgtattatgactgtcttcacaaaactgctgtactactcctcctggctctactctcaagtatgacattgttcaaatgatattgagagaatagaaatccatacacactatcttyctcattttcctgttaccaactggtaagtctccctgctcctcagcctttctttcttaatccctactacaaaataggaattgttcattcccctatcaaaggtcagtttt

SEQ ID NO: 198073 - DNA, 564 bp, Homo sapiens
tggggaaaaatagccggggggggggcgggggtcattccattacttgaaatgaaagacaccattctaaagaaatttcaaatttctttacattattaatacattattaaccctatacatgtttagcaatatctttctcaaagttagtaaaaggaatgcaccattattttgtgagaggggctgtggaaaacagttcttgcttattggacatatctgatggggagaggtcagaggtgttaatgtaaccagagcatgtgcttctcttatacagtgggatccacgagggggatagatgactggttgtctggtgaatgcagtgttacttttattaggccataaaaaggaaagtttcaaggccaactaattgtattgtttgtcatagcagtgtccctgtaaaaggagcatattttccaacctcggcctgggaagatgcaacatgaactgtcacwaaaattaaggaaacatctctaaatcaaactaatttagactaaatttagactacatttagtcatcaggtagtttatggtgaccccattctctgcatgtgctgaaaaactatggctgtcc

SEQ ID NO: 198074 - DNA, 609 bp, Homo sapiens
aagtggtttattttccatgtatttatgtagttttgagagtccttactggtattgatttctatttgtattccattgtggytggagagtatggctggtatcattgtgatgttttttaattcatgaggacttgctttatggttaagcatgtggtcaatcttacagtatgttccatatgcagatgagaagaatgtatattctgtggttgctgggtgcggtattctgttagaagtctattaggtctagttggtcaagtgttgaatttacctccagaatttctttgttagttttctgtctcaatgagctgtcaaatgctgtaagtggggtgttgaattccaccactattattgtgtggctgcgttaagtctttttttttttaggtccagaagtaattgttttgtgaatctgggtgctccaatgttgggtaaacatatatttacgacagtgaaatcttcttgttgaacggaaccctttattgttatgtaatgcccttttttgtcctttttcactgtttttggtttaaagtatattttatatgatgcaagaatagtgacatttactcctttttgttttccatttgaatgatagacctttctccatccctttactttg

SEQ ID NO: 198075 - DNA, 609 bp, Homo sapiens
aagtggtttattttccatgtatttatgtagttttgagagtccttactggtattgatttctatttgtattccattgtggctggagagtatggctggtatcattgtgatgttttttaattcatgaggacttgctttatggttaagcatgtggtcaatcttacagtatgttccatatgcagatgagaagaatgtatattctgtggttgytgggtgcggtattctgttagaagtctattaggtctagttggtcaagtgttgaatttacctccagaatttctttgttagttttctgtctcaatgagctgtcaaatgctgtaagtggggtgttgaattccaccactattattgtgtggctgcgttaagtctttttttttttaggtccagaagtaattgttttgtgaatctgggtgctccaatgttgggtaaacatatatttacgacagtgaaatcttcttgttgaacggaaccctttattgttatgtaatgcccttttttgtcctttttcactgtttttggtttaaagtatattttatatgatgcaagaatagtgacatttactcctttttgttttccatttgaatgatagacctttctccatccctttactttg

SEQ ID NO: 198076 - DNA, 609 bp, Homo sapiens
aagtggtttattttccatgtatttatgtagttttgagagtccttactggtattgatttctatttgtattccattgtggctggagagtatggctggtatcattgtgatgttttttaattcatgaggacttgctttatggttaagcatgtggtcaatcttacagtatgttccatatgcagatgagaagaatgtatattctgtggttgctgggtgcrgtattctgttagaagtctattaggtctagttggtcaagtgttgaatttacctccagaatttctttgttagttttctgtctcaatgagctgtcaaatgctgtaagtggggtgttgaattccaccactattattgtgtggctgcgttaagtctttttttttttaggtccagaagtaattgttttgtgaatctgggtgctccaatgttgggtaaacatatatttacgacagtgaaatcttcttgttgaacggaaccctttattgttatgtaatgcccttttttgtcctttttcactgtttttggtttaaagtatattttatatgatgcaagaatagtgacatttactcctttttgttttccatttgaatgatagacctttctccatccctttactttg

SEQ ID NO: 198077 - DNA, 541 bp, Homo sapiens
gaaataaaaatgcataccttgtagcaaagaagatatgaagtatttgatttttttacttgtgatttaaaatctcatctctttctttaaaaccacagtcttggctgggtgtggtggcccatgcttataatctcagcacttggaggtggaaaatgtctgtatatttaacaagctcaacaatttcatataccaggcacctgttgactgcttaaagatggcctacttgctctscatggtgttcacagcaagcatcctggaccctatttgcttgtttctcgtctattctctcttaccttgtttaacaaaatcaggaactgaagagtgggccagtctgaaacaagatcagaaataggctggtcagtgtggcctccttggcttcagctatcctaatcagatccaaggactgcagctggagactgggccacgccctctaggcctgctcactgccagcacagtatttgtatgacccagatacaacctctgcttacagggtgacttattttctttgtattttcttttccatatgcttgagctcatattatat

SEQ ID NO: 198078 - DNA, 592 bp, Homo sapiens
gttatgctttggtttcaggccccctaaatatactgacccctgtcaaacaaagccttagaaggtatactcatgattttctgtttttttttctaaaagagcaccccaaatattttatgagctttagtccccatgaaacctagatctgcctgtgcacttatttgatggactaggtattctggagaattttttgaagatccatgttcaccacccccaaaaagataacaatcctgttgaagaaataacatatatacataccaaagaatcatctgttagtatgtgaaaggtatagtgtttggagtcaaagacataatctccaaatcccagctctgccatctacattctgtatgtaattataggacaaatatattaactgctggatccctttaaatcatgcaaaagacagacataaatcactggattgttcagaggattaataaaaacaaatatgcgaaaacaaaatgtcttgcatttaccatgtccacataaatgttatttgartcatcgtatctcaggttttatgagactttaaagaagatctattcaacattcaatatttggaccctctctataatatccccaagtcatggctgcc

SEQ ID NO: 198079 - DNA, 596 bp, Homo sapiens
tctccaaatcccagctctgccatctacattctgtatgtaattataggacaaatatattaactgctggatccctttaaatcatgcaaaagacagacataaatcactggattgttcagaggattaataaaaacaaatatgcgaaaacaaaatgtcttgcatttaccatgtccacataaatgttatttgagtcatcgtatctcaggttttatgagactttaaagaagatctattcaacattcaatatttggaccctctctataatatccccaagtcatggctgcctatcttctgcttggctatatccagtgataaagactaaggcagtccacttcatataattaattacttaaatatatggcataagagtttctggtttttatttttattgtttttgttttattttggtattcaggtatagatgtctgattaatgacatyaaaatatatatatatattatatatatatactaacattgaggagtgaggtattggctagaaattccctttcagctctctcccacatgctaaggtactatcacaaaaccaatgaaacagtgggttccccagcacacattatagcctgagaatggaaagttg

SEQ ID NO: 198080 - DNA, 622 bp, Homo sapiens
attcatccatgttctggcaaatgaaagaatcctctcctttttaaagctgaataatattctattatactattacacattacatatgtataagagtttattttttaacttttattttaaattcaggggtacgtgtacaggatgcgcaggtttgttatataggtaaacatgtgtcatgggatttgttttacagattatttcatcaccctcttattaagcctagtatccattagttgctttttatcctctccctcctctcaccctccaccctccaatagccccagtgtgtgttgttcccctctatgtgtccatgtgttctcatcatttagctcccactcaaaagtgagaacgttgtacttgattttctgtttctgcattagtttgctaaggataatggcctctagctgcatccatgcccttgcaaaggatatgatctcatgcttttttayggctgcatggtattccatgggttatatgtaccacattttctttatctagtctaaccttgatgggcatttaggttgattccctatctttgttgttgtgaatattgctacaatgaacatatgtgtgcatgtgtctttacaacatatggatcatatgttcctttgtatacatacccagt

SEQ ID NO: 198081 - DNA, 618 bp, Homo sapiens
aaaagcaatcacagaaagccccaaggttgccctgagggcagttgttttttttctggtgctaccatccattgggagattaaatcctgtgacagttgaaggtggaaatgctgatagtggaaattcttcattagtccacacaactttaaggggctagattgttcccagctcacaaatgctcttaactttcaaaagatgcaaatgcaaattttctttggcccatgcaactccagtttagactcataggttttccacataaaaatatccaattatgagctcattattaaagatcaccaaataaacaaggaaataagctgccatgaagaagagttaccagaaataattgctaatacatttaaaccccaaaagacttaagattagaattacccatagttgtaaaagagatatttaaagaaataggaggaaatcataaaaataagcaaatgacaataagctatcaaatattrtcagatacaattgaaaagattcatttaattaaaaggtctatcattttgatatgtgtatgtctctaagtagcctcaagatatagtaaggaaaaaggtaaattggacttgattgtacaagtcaaacacttttgtacatcacaggacattgtgaaga

SEQ ID NO: 198082 - DNA, 447 bp, Homo sapiens
actgcctcctctgtaaaacatgctccctttcagagggatgaagcaatacaatctttggaagaaattggggaagtttatatcaaggttgaaaaatgatgstctattgaatattattaatatggagaagtagagaagaaattttaaagagaacaaataagaaaaaggaaaggtgttgagggtctgcaggcagagagtatgagaaaagaccatatattttgtatatattttacttgtctaaatccatctttaagcttagtaaaatgagccctaattaaattaatgatcatttattatattgacaatatatgacaaatatatattcatataaaacataagcaaggctaaatattttagggtaaaagtgagtgagtcatggcttagaaaaaaaatttttagtgattaaatattaaaaacaacaggacccttattgattgatactaccttgtt

SEQ ID NO: 198083 - DNA, 397 bp, Homo sapiens
ggatgtttaggcatgtctctcagtttaaattaaaagccacaaatgattacgcctagtaagaaaggcatgtcataagctgagaaatgctgaaagttaggcctcttgtgctagttagccaagttgtgaatgcaaaaaaaaagttattaaagaaaactaaaaatgctactccagggaacacgcaaataacaaaaaaaaaagtgaaacagtctttatggcttatayggaaaaagttttacaagtctgaatagaatttcaaactagccacaacattcccttaaactaaagcctaatccagagcaagactgtctctttaattctatgaaggctgcaagcggtgagaaagctgcaggaaaaaatgtttgaagctagcagaggttgcttcatgtggtttgaggaa

SEQ ID NO: 198084 - DNA, 551 bp, Homo sapiens
attacgcctagtaagaaaggcatgtcataagctgagaaatgctgaaagttaggcctcttgtgctagttagccaagttgtgaatgcaaaaaaaaagttattaaagaaaactaaaaatgctactccagggaacacgcaaataacaaaaaaaaaagtgaaacagtctttatggcttatacggaaaaagttttacaagtctgaatagaatttcaaactagccacaacattcccttaaactaaagcctaatccagagcaagactgtctmtttaattctatgaaggctgcaagcggtgagaaagctgcaggaaaaaatgtttgaagctagcagaggttgcttcatgtggtttgaggaaagaaaccatccccataacacaaaagtgcaaggtgaagcagcaactgctaatgaagaagctaaagcaagttatccagaagaactaattaagataactgatgaaggtgactacattaaacaacagattttcaatgtagaggaagagcctcatattgggaaaagaagccatgtagaactttcatagctggagaggacaggtc

SEQ ID NO: 198085 - DNA, 551 bp, Homo sapiens
attacgcctagtaagaaaggcatgtcataagctgagaaatgctgaaagttaggcctcttgtgctagttagccaagttgtgaatgcaaaaaaaaagttattaaagaaaactaaaaatgctactccagggaacacgcaaataacaaaaaaaaaagtgaaacagtctttatggcttatacggaaaaagttttacaagtctgaatagaatttcaaactagccacaacattcccttaaactaaagcctaatccagagcaagactgtctctttaattctatgaaggctgcaagcggtgagaaagctgcaggaaaaaatgtttgaagctagcagaggttgcttcatgtggtttgaggaaagaaaccatccccataacacaaaagtgcaaggtgaagcagcaactgctaatgaagaagctaaagcaagttatccagaagaactaattaagataactgatgaaggtgrctacattaaacaacagattttcaatgtagaggaagagcctcatattgggaaaagaagccatgtagaactttcatagctggagaggacaggtc

SEQ ID NO: 198086 - DNA, 595 bp, Homo sapiens
taccttggccactcttttcaggtttcctggctgcacttcctcgcgaacacctagtccagctctcttcctttctctctacattctctcctttagactacctatctagttagtcgcttacttcaagtacaatttgtcccttgatgacccctagatgtatattttcagccttaatctccctcttaagcatcaaacttatatattcaattgcttatctgacatgatcatattgatgtctaacaggyttcccaaacttaacaggtctaacacaattaacgatttttgcaaacctcccccaacaaaacaaaacacaacaaaaaaatacctgtttctttcttactctttcttgtcttggaaaagactatcaggagtcattgttgattctcttgtttcttctccctctatttctgatccatcatcaaatcctgttgactctatttccttgttcatttccttcctctcctctgtaactaccacagcccaagctattgccatctttcacctagtctcctgcaatagcctcataactcatcttacagtgtccagttttgccccactcttctctaatctccacccagtagtcaaagtaagtctcata

SEQ ID NO: 198087 - DNA, 595 bp, Homo sapiens
taccttggccactcttttcaggtttcctggctgcacttcctcgcgaacacctagtccagctctcttcctttctctctacattctctcctttagactacctatctagttagtcgcttacttcaagtacaatttgtcccttgatgacccctagatgtatattttcagccttaatctccctcttaagcatcaaacttatatattcaattgcttatctgacatgatcatattgatgtctaacaggtttcccaaacttaacaggtctaacacaattaacgatttttgcaaacctcccccaacaaaacaaaacacaacaaaaaaatacctgtttctttcttactctttcttgtcttggaaaagactatcaggagtcattgttgattctcttgtttcttctccctctatttctgatccatcatcaaatcctgttgactctatttccttgttcatttccttcctctcctctgtaactaccacagcccaagctattgccatctttcacctagwctcctgcaatagcctcataactcatcttacagtgtccagttttgccccactcttctctaatctccacccagtagtcaaagtaagtctcata

SEQ ID NO: 198088 - DNA, 588 bp, Homo sapiens
acttgttacaatacttagacattctgaaaacaaaagaaattatacaatttacttgtttagtatatgttggcctgtgcctttgtcagctattaactctgagctcagctggaaaggcgatcaagcctactccacttcatgaaaccagaattgctgattgctgttcaagctttgtcattgataagtgatgctctaagaagcaagagggagagakaggatggagagtgtgacagtaaggagctcttgatgaagagctgcctgagtattctcttatttacattcaaacaaatccaaaatctatttgctcaggcatgttgatttccatagctcttatttccaagttcttcttatttccaagttattactaaacatgtattaagttcccacagtgcatgaactcaaagcatgtaaaaaaaaaaaggcctcttctgtggagaaatagtaatgcttttacactgttggtgggagcataaattagttcaaccattgtggaagacagtgtggtgattcctcaaggatctagaaccagaaataccatttgacccagcaatcccattactgggtaaatatacccaaaggattataaatcat

SEQ ID NO: 198089 - DNA, 588 bp, Homo sapiens
acttgttacaatacttagacattctgaaaacaaaagaaattatacaatttacttgtttagtatatgttggcctgtgcctttgtcagctattaactctgagctcagctggaaaggcgatcaagcctactccacttcatgaaaccagaattgctgattgctgttcaagctttgtcattgataagtgatgctctaagaagcaagagggagagagwggatggagagtgtgacagtaaggagctcttgatgaagagctgcctgagtattctcttatttacattcaaacaaatccaaaatctatttgctcaggcatgttgatttccatagctcttatttccaagttcttcttatttccaagttattactaaacatgtattaagttcccacagtgcatgaactcaaagcatgtaaaaaaaaaaaggcctcttctgtggagaaatagtaatgcttttacactgttggtgggagcataaattagttcaaccattgtggaagacagtgtggtgattcctcaaggatctagaaccagaaataccatttgacccagcaatcccattactgggtaaatatacccaaaggattataaatcat

SEQ ID NO: 198090 - DNA, 367 bp, Homo sapiens
aggctgtaagttctgtggggaaggagttagggaagtggtgggaaatgcaggatcgtgcctcgtggtaatgcaaagtgcacagatgctgaccgtgcgatccccagctaacccagggtcttatttcactaatccctgtctttggcagtaaagttttccaaatttgaaaaagaaaagccwctgtgattggtacagatgataaggaacatttgagatctctttctgatgaaaccatgtccatatatatggccatgatatatgttgggacaaaagacatacactaagtatttaaaacactggctgtaatttgagcaatcttaggcatttacactaaatttggcatagtacctgtatttgtcataatatgagc

SEQ ID NO: 198091 - DNA, 378 bp, Homo sapiens
aatagtggagattaggctgtaagttctgtggggaaggagttagggaagtggtgggaaatgcaggatcgtgcctcgtggtaatgcaaagtgcacagatgctgaccgtgcgatccccagctaacccagggtcttatttcactaatccctgtctttggcagtaaagttttccaaatttgaaaaagaaaagccactgtgattggtacagatgataagraacatttgagatctctttctgatgaaaccatgtccatatatatggccatgatatatgttgggacaaaagacatacactaagtatttaaaacactggctgtaatttgagcaatcttaggcatttacactaaatttggcatagtacctgtatttgtcataatatga

SEQ ID NO: 198092 - DNA, 599 bp, Homo sapiens
ctagaaaacttcccagagataggcgaaagcaatggttctcaaagtattgaccccaccaacaacatcaacatcacctgggaagtcattagaaatgcaaatccttaggtcacatttcagacttagtgaattagaaactctgggagtagacatgttttaataagcccttcaggctattctgctgctgctcaaatttgagaaccacttatctagaagaagcaaacatttgccaaaggaaatagtggagattaggctgtaagttctgtggggaaggagttagggaagtggtgggaaatgcaggatcgtgcctcgtggtaatgcaaagtgcacagatgctgaccgtgcgatccccagctaacccagggtcttatttcactaatccctgtctttggcagtaaagttttccaaatttgaaaaagaaaagccactgtgattggtacagatgataaggaacatttgagatctctttctgatgaaaccatgtccatatatatggccatgatatatgttgggwcaaaagacatacactaagtatttaaaacactggctgtaatttgagcaatcttaggcatttacactaaatttggcatagtacctgtatt

SEQ ID NO: 198093 - DNA, 622 bp, Homo sapiens
acatgttttaataagcccttcaggctattctgctgctgctcaaatttgagaaccacttatctagaagaagcaaacatttgccaaaggaaatagtggagattaggctgtaagttctgtggggaaggagttagggaagtggtgggaaatgcaggatcgtgcctcgtggtaatgcaaagtgcacagatgctgaccgtgcgatccccagctaacccagggtcttatttcactaatccctgtctttggcagtaaagttttccaaatttgaaaaagaaaagccactgtgattggtacagatgataaggaacatttgagatctctttctgatgaaaccatgtccatatatatggccatgatatatgttgggacaaaagacatacactaagtatttaaaacactggctgtaatttgagcaatcttaggcatttacactaaatttggcatagtacctgtatttgtcataatatgagctctggacctacaactaagagactcctgtcagggcctacttaattctagaagagcctctaaaattagccatacaatttaataatatttcaaagggttatctwgtctcattgacataatgagagcaaatcaaaaaaaggctacagcataaatgtat

SEQ ID NO: 198094 - DNA, 347 bp, Homo sapiens
ggctgaggtgcagtggcatgatctcagctcactgcaacctctgcctcccaggttcaagcagttctcctgcctcagcctcccgagtagctgggactacaggcacccaccaccatgccctgctaatgtttgttttttcagtacagaaggggtttcaccatgttggcctggctcccaacctcaagtgatccatccacctcagcctcccaaagtgtcgaaattataggtgtgagccgccamacccagccaaaggcagaattatcttgtttcaactctgatgacttattagcagaaaaactttgggcaaattaattttgtgcttctcttatctataaagtaagaaaaattat

SEQ ID NO: 198095 - DNA, 580 bp, Homo sapiens
agatctttccatgctggcatatacatgactggtatatatataaatctatgtaattattctacagtacaaatatactgcagttcaactaacaatggatgtgtaggttgagtgtagttttgttaactatcaaatctttgtatttgcatctttaggcaagtggggcttatttctctagaaaagacatctagaggtagaatcactggcactagaaagactgcacgttaaatttttgttagattctgaaatttttctctgcaaaaggctgaatcaacttaatatggtttggctatgtccccacccaaatctcatctcgaagtgtaatacaaattataatccccacctggcaggggaaggacctggtgggaggtgattggatcatgggggctgtttcccccatgctgttctcatgatagtgagttctcatgaggtctgatggttttataagtggcagtttaccctctttctctttctttctctctctcacctgctgccatgtaagacatgcctgcttcacctgtaatcccaacatatmaagggagggaggtaattgaattatgggagcagattcccccatgctgtt

SEQ ID NO: 198096 - DNA, 442 bp, Homo sapiens
ctggatctctgatatttgaaggtggaagaagataggtaacccagctttgggggagagagagagaaagaaaaaaaagttcttccttttctctgcctttgtgttctatctgggtgctcagtttattggatggtgcctrctcacatcagtgagggcagatcttccttactcaatccactgattcaaagttcaatctcttccagaaatagcctcacagacatacccagaaataatcctttaccagctctctgggtatcccttcaccagtcaagttgacacctaaaattaaccatcacatcacaattgtaattaatttatatttagtagtctaatcattgtcatgattgctaaaatgtaagctccatgattgtagaaacagtgtttagttgagggagtgtgttattttcttatctccagtgttttgtcataataaacactgaaacat

SEQ ID NO: 198097 - DNA, 588 bp, Homo sapiens
tatgacaggttatataccttgaatggcttttctgtttaagacacagaaaatgttttcctaggaatcattttaaatgcactgttaacacacaaaaaaagttaaaaacaacaacaacaaataagcaatccaaacatcttaaaaattaggtgaaacagtaagtctgagtggttgccaaggctgactttgccctgaggatttctgctgaaatatggagaggagaactcaagtttctgatgtaatagtggcttagtacacaggaagcagtagaaaaattccaatgaaagcctagtaaaaggttcctttaaaaagcagatacctaaatgacattaaagggaaaagtaaattttcctggcttgattttgacactggatgaaagaaaaaatayatatactctgaggatctgagacctcaacttggccttcaaatgggttttgccccaaatttgcactttctggtccagaaatcttggttaagaattacatttaaaatgtttttgagttggttgtgtcactcagaagagactggcagaaataaatgtaaatcttctctggtaatgtcaatttcaatactgaccaaatatctcacaca

SEQ ID NO: 198098 - DNA, 553 bp, Homo sapiens
agcttcatacatcatgcccagacaagcagccaacatcaggcaaattcaacacaaagkgaggatcttaacagaataatggggcatgaaaatgtttcaggaaaaagagccatattcagaaattcagtaagataggattggaagttcagttctgggactgattagtctctcagataaacttactagtgaagggtacatttttggttctatagaaagtgtgtatcaagaaacagaagtagagtatcaagcaaggatacagtgaccaagttaaaaaaaaaagttactgtctgtgttcaggatcaagacaggcatttactgtgccagaaaaaggtacaaggtcggagacaaactagaaacaacactaacatgatgctgagctcagtaattgcatattttaaagccaaattaggtagcgttatagatatcttccttatgtctaggtaactgtagaccttcaagggtacaaatccaggaagatccagatgggcatattttgtagagagagccaaactgacttattgaatgctactaaaattaaagcaattttaaaatttaa

SEQ ID NO: 198099 - DNA, 555 bp, Homo sapiens
atacatcatgcccagacaagcagccaacatcaggcaaattcaacacaaagggaggatcttaacagaataatrgggcatgaaaatgtttcaggaaaaagagccatattcagaaattcagtaagataggattggaagttcagttctgggactgattagtctctcagataaacttactagtgaagggtacatttttggttctatagaaagtgtgtatcaagaaacagaagtagagtatcaagcaaggatacagtgaccaagttaaaaaaaaaagttactgtctgtgttcaggatcaagacaggcatttactgtgccagaaaaaggtacaaggtcggagacaaactagaaacaacactaacatgatgctgagctcagtaattgcatattttaaagccaaattaggtagcgttatagatatcttccttatgtctaggtaactgtagaccttcaagggtacaaatccaggaagatccagatgggcatattttgtagagagagccaaactgacttattgaatgctactaaaattaaagcaattttaaaatttaacataagca

SEQ ID NO: 198100 - DNA, 542 bp, Homo sapiens
agacaagcagccaacatcaggcaaattcaacacaaagggaggatcttaacagaataatggggcatgaaaatgtttcaggaaaaagagccatattcagaaattcagtaagataggattggaagttcagttctgggactgattagtctctcagataaacttactagtgaagggtacatttttggttctatagaaagtgtgtatcaagaaacagaagtagagtatcaagcaaggatacagtgaccaagttaaaaaaaaaagttactgtctgtgttcaggatcaagacaggcatttactgtgccagaaaaaggtacaaggtcggagacaaactagaaacaacactaacatgatgctgagctcagtaattgcatattttaaagccaaattaggtagcgttatagatatcttccttatgtctaggtaactgtagaccttcaagggtacaaatccaggaagatccagatgggcatattttgtagagagagccaaactgacttattgaatgctastaaaattaaagcaattttaaaatttaacataagca

SEQ ID NO: 198101 - DNA, 556 bp, Homo sapiens
tgagtgagtaaaattttttgacagactgctgaggaggcagaagaactcattgagggatcctctattgagcaacaaagtcacctgctggtaagtaccaacccctagaaaaattaacctctgaccccacggacgttaggctggagttaatcagttttattgggaatcatacagtgggaatcagtatgtattagtctaggtttcctctctctcacacacacactcatgtatgtacacacacacccacacacacaggtatgtgtatatgtatacacacacacaaattatatatatgtaatgtaatatctatttatttctctcatatatatctacatagatttgtatacatgtgtatgtatacatacatatataataaaatacattttattaactttcagtttaatggaatatatatcacatatatayatggaaggagagagagagagttggcttgtgcagttaatgaagctgagaagttcaagatctgcagcttgtgattgtactggtatagtaccagccccggtccaaagatctgagaaacaggaaaggtgatggtgcc

SEQ ID NO: 198102 - DNA, 498 bp, Homo sapiens
tttagtgggaggaactacctttccagtatgtgactgcattcaccaacctggaagctctctaaacccatagttcaagatttttctaaagcttccattatgyggatatgattgattaaatcattggccattggtgattaactgaattcccagctcctctcctctccttggaggtgagggattgggactaaacttccaccctctaatcacatgattaatttctctggcaaggagcccacatcctcccacagtcacctcactagcacaaattcaggtatgggttaaagcaatttgtcatgaataataaaagacactcttctcacccctatcacttaagaattccaaggttttaggagctccgtgccaggagctcaggatgaggaccaaatatgtatttattactgtatcacaatatcacaatgacaaatggatagtgcagaattcatgtggtacaacttcatcatttggtggcaaaggtcagggcaggcttccaagaagtga

SEQ ID NO: 198103 - DNA, 461 bp, Homo sapiens
gtgctgtcagttttttggtttttaagttattttgttatgtatttatatgctaatgatgattatgttaattatatcttcattatattatttactttgttaatatagaatagccattcatatttatattttctatcaaaaatttgtattgtttaacataaaattgctgcattttttgtgttgttagcttgttatattttttccaatctgtcattttcaagctttctgtattatttttatttgaagtgcttcttatgaactaccaatcttacagattcttcctttttatgcaaacctatgtctctagattttatttggtgagtagagcctatttttattcataagcattactctaatattacaacttatttctgcttcatttcaaaatatgcaatatttcaytatgcttttattttctctcactaaatacatcaagttgatttcttggcagggttcattcaatg

SEQ ID NO: 198104 - DNA, 522 bp, Homo sapiens
acaatttcttatgaaagaagtatttgtacaaactgactgcaaaaaaagtaatcatagactgatgacaacacataaaaaaagcaaaaaaaaaaaaactgagatgaaaagctccacgtgcaagtatagtcagtctcatttcttcgcaagtataacagcacatttaatgggatgaaataaagtgttgacattctcatattgttttaaaatactgagaataacatggtaataggccctttaagtatatgtaaacttataatatcatgtttttaatatcactttaatatatactcattttattttgttctcatcagggctctattatatatgcagtgcaaatatatacaacctccttttacagatagtaaaactgaagaccyccaaaatgtagtaatgtctctcagttcatggtgtgttaacatgactttaagacctgaaacaggatttgatttctaaatccattttctttctatcatgccgggcataattttctcctagtagactctagaggcactaaaaacctaa

SEQ ID NO: 198105 - DNA, 384 bp, Homo sapiens
cacaggggtacagtttagcagttttgactacatttatgcaagrcttgaacaagtaaatatactatagataatgagaaccagttttgcccttgtaagagaagttaacaaaaaataagcaaatagaaaaagcaacgaagagctctgaggtggtttgtcagagtgggagatatcagaataaactcatgattattttaaaagatagattatagatagatagattagatatatagataataggtagataaagtaaacgtagattgtgtgtatacataggttagtataaatatatacactccctaccatgttggctgagaggctttaaattagtgaaacctcaggagaaatgaacacaccatttgttctctgaagactgttttccagggc

SEQ ID NO: 198106 - DNA, 323 bp, Homo sapiens
tacaaacatcaccaaggagttcctgagaatgcttctgtgtaatttttatgtgaagatgattccgtttccaacgaaaccttcaaagaggtctgcatgtccccttgcagattccagagaaagagagtttcaaaactgcgctctcaaaaggagtgttcaactctgtgagttgaatgcagtcatcacagaaaagtttctgagaatgcttctgtctagatgttatgtgaagatatacccgtttcgaacgaagtccacagagtggtccgaatatccacttgtagatcctgcaaaaagrgtgtttccaacctgaactttcaaaggaaggt

SEQ ID NO: 198107 - DNA, 271 bp, Homo sapiens
agagagtttcaaaactgcgctctcaaaaggagtgttcaactctgtgagttgaatgcagtcatcacagaaaagtttctgagaatgcttctgtctagatgttatgtgaagatatacccgtttcgaacgaagtccacagagtggtccgaatatccacttgtagatcctgcaaaaagggtgtttccaacctgaactttcaaaggaaggttcaattctgggatttgaatgcaaacatcacaagaagwttctgagactgcttctgtttacttagctg

SEQ ID NO: 198108 - DNA, 247 bp, Homo sapiens
gtccacttgcagaccctacgaaaagcatgtttctcatctgctctatgaaaagcaacgtgaaactctgtgagttgaacacaaacatcacagagaagtttctgagaatgcttctgtttagtttttatgtgaagatattcccgtttccaaagacatcttcaaagaggaccacatatccacttgcagattccacraaaagagagattcaaaactgctctatccataggagggttcaacgctgtgagttgaa

SEQ ID NO: 198109 - DNA, 315 bp, Homo sapiens
aaagcttctctctcaaaaggaaagttcaactctgtgagttgaaagcaaacatcacaaagaagtttctgagaatgcttctgtttagcttttctgtgaagattatcccgtttccaacgaaatcttcaaagaggcccaaacatccactgcagatgccacagraagagtgtttggaaactgctgtttgaaaaggaaccttcaactctgtgagttgaatgcagtcatcacaaacaagtttctgacaatgcttctctctagtttttacgtgacgataattcgttttccaccacaggcctgaaagttctccaaatgtccact

SEQ ID NO: 198110 - DNA, 575 bp, Homo sapiens
aaagcttctctctcaaaaggaaagttcaactctgtgagttgaaagcaaacatcacaaagaagtttctgagaatgcttctgtttagcttttctgtgaagattatcccgtttccaacgaaatcttcaaagaggcccaaacatccactgcagatgccacagaaagagtgtttggaaactgctgtttgaaaaggaaccttcaactctgtgagttgaatgcagtcatcacaaacaagtttctgacaatgcttctctctagtttttacgtgacgataattcgttttccaccacaggcctgaaagytctccaaatgtccacttgcagaccctacgaaaagcatgtttctcatctgctctatgaaaagcaacgtgaaactctgtgagttgaacacaaacatcacagagaagtttctgagaatgcttctgtttagttttaatgtgaagatattcccgtttccaaagacatcttcaaagaggaccacatatccacttgcagattccacaaaaagagagattcaaaactgctctatccataggaggtttcaacgctttgagttgaatgcaaccgtcacagagaagt

SEQ ID NO: 198111 - DNA, 250 bp, Homo sapiens
cttccctttactgccataggcctcaaagcgctccaaacctccactagccgattctacaagaagagtgtttccaaactgctctgtcaataggaatgctccactcygtgaggtgaatgcaatcatcacaaagtagtttctgagaaggcttctatctagtatttatgtggagatatttccttttccaccacaaacctcacagccctcccaatgtccacttgcagattctagaaaaagagtgtttcatagctgc

SEQ ID NO: 198112 - DNA, 547 bp, Homo sapiens
tctgtgagttgaaagcaaacatcacaaagaagtttctgagaatgcttctgtttagcttttctgtgaagattatcccgtttccaacgaaatcttcaaagaggcccaaacatccacttgcagatgccacagaaagagtgtttggaaactgctgtttgaaaaggaaccttcaactctgtgagttgaatgcagtcttcacaaacaagtttctgacaatgcttctctctagtttttacgtgaygataattcgttttccaccacaggcctgaaagctctccaaatgtccacttgcagaccctacgaaaagcatgtttctcatctgctctatgaaaagcaacgtgaaactctgtgagttgaacacaaacatcacagagaagtttctgagaatgcttctgtttagttttaatgtgaagatattcccgtttccaaagacatcttcaaagaggaccacatatccacttgcagattccacaaaaagagagattcaaaactgctctatccataggagtgttcaacgctttgagttgaatgcaatcgtcacagagaagtt

SEQ ID NO: 198113 - DNA, 547 bp, Homo sapiens
tctgtgagttgaaagcaaacatcacaaagaagtttctgagaatgcttctgtttagcttttctgtgaagattatcccgtttccaacgaaatcttcaaagaggcccaaacatccacttgcagatgccacagaaagagtgtttggaaactgctgtttgaaaaggaaccttcaactctgtgagttgaatgcagtcttcacaaacaagtttctgacaatgcttctctctagtttttacgtgatgataattcrttttccaccacaggcctgaaagctctccaaatgtccacttgcagaccctacgaaaagcatgtttctcatctgctctatgaaaagcaacgtgaaactctgtgagttgaacacaaacatcacagagaagtttctgagaatgcttctgtttagttttaatgtgaagatattcccgtttccaaagacatcttcaaagaggaccacatatccacttgcagattccacaaaaagagagattcaaaactgctctatccataggagtgttcaacgctttgagttgaatgcaatcgtcacagagaagtt

SEQ ID NO: 198114 - DNA, 547 bp, Homo sapiens
tctgtgagttgaaagcaaacatcacaaagaagtttctgagaatgcttctgtttagcttttctgtgaagattatcccgtttccaacgaaatcttcaaagaggcccaaacatccacttgcagatgccacagaaagagtgtttggaaactgctgtttgaaaaggaaccttcaactctgtgagttgaatgcagtcttcacaaacaagtttctgacaatgcttctctctagtttttacgtgatgataattcgttttccaccacaggcctgaaakctctccaaatgtccacttgcagaccctacgaaaagcatgtttctcatctgctctatgaaaagcaacgtgaaactctgtgagttgaacacaaacatcacagagaagtttctgagaatgcttctgtttagttttaatgtgaagatattcccgtttccaaagacatcttcaaagaggaccacatatccacttgcagattccacaaaaagagagattcaaaactgctctatccataggagtgttcaacgctttgagttgaatgcaatcgtcacagagaagtt

SEQ ID NO: 198115 - DNA, 547 bp, Homo sapiens
tctgtgagttgaaagcaaacatcacaaagaagtttctgagaatgcttctgtttagcttttctgtgaagattatcccgtttccaacgaaatcttcaaagaggcccaaacatccacttgcagatgccacagaaagagtgtttggaaactgctgtttgaaaaggaaccttcaactctgtgagttgaatgcagtcttcacaaacaagtttctgacaatgcttctctctagtttttacgtgatgataattcgttttccaccacaggcctgaaagctctccaaatgtccacttgcagaccctacgaaaagcatgtttctcatctgctctatgaaaagcaacgtgaaactctgtgagttgaacacaaacatcacagagaagtttctgagaatgcttctgtttagttttwatgtgaagatattcccgtttccaaagacatcttcaaagaggaccacatatccacttgcagattccacaaaaagagagattcaaaactgctctatccataggagtgttcaacgctttgagttgaatgcaatcgtcacagagaagtt

SEQ ID NO: 198116 - DNA, 552 bp, Homo sapiens
ctgtgacgattgcattcaactcaaagcgttgaaccctcctatggatagagcagttttgaatctctctttttgtggaatctgcaagtggatatgtggtcctctttgaagatgtctttggaaacgggaatatcttcacatwaaaactaaacagaagcattctcagaaacttctctgtgatgtttgtgttcaactcacagagtttcacgttgcttttcatagagcagatgagaaacatgcttttcgtagggtctgcaagtggacatttggagagctttcaggcctgtggtggaaaacgaattatcgtcacgtaaaaactagagagaagcattgtcagaaacttgtttgtgatgactgcattcaactcacagagttgaaggttccttttcaaacagcagtttccaaacactctttctgtggcatctgcaagtggatgtttgggcctctttgaagatttcgttggaaacgggataatcttcacagaaaagctaaacagaagcattctcagaaacttctttgtgatgtttgctttcaactcacagagttgaactttcc

SEQ ID NO: 198117 - DNA, 552 bp, Homo sapiens
ctgtgacgattgcattcaactcaaagcgttgaaccctcctatggatagagcagttttgaatctctctttttgtggaatctgcaagtggatatgtggtcctctttgaagatgtctttggaaacgggaatatcttcacattaaaactaaacagaagcattctcagaaacttctctstgatgtttgtgttcaactcacagagtttcacgttgcttttcatagagcagatgagaaacatgcttttcgtagggtctgcaagtggacatttggagagctttcaggcctgtggtggaaaacgaattatcgtcacgtaaaaactagagagaagcattgtcagaaacttgtttgtgatgactgcattcaactcacagagttgaaggttccttttcaaacagcagtttccaaacactctttctgtggcatctgcaagtggatgtttgggcctctttgaagatttcgttggaaacgggataatcttcacagaaaagctaaacagaagcattctcagaaacttctttgtgatgtttgctttcaactcacagagttgaactttcc

SEQ ID NO: 198118 - DNA, 423 bp, Homo sapiens
gaattcctcagagaggtccaaatatgcacttgcagattctgcagaaagtgtgtttctaaactgctacatcscaaggaatgttcagctctgtgagttccactcaatcatcccaaagaattttctgagaaagcttctgtcttctttctataggaagttatttcctttactacggtaggcctcaaagaagtgcaattatccccttgcagtttctacaaaaagagtgtttcaaacctgaactatcaaagaaaggttccacactgtgagttgaatgcagacatcacgaagaaggttctgagaatgcttctgtttagttctgtgcggtttatcccgtttccaacgaaatcctcagagaggaccaaatatccacttgcagtttctacaagaagagtgtttcaaagctgaactatcaaagaaaggttcagc

SEQ ID NO: 198119 - DNA, 400 bp, Homo sapiens
atgcacttgcagattctgcagaaagtgtgtttctaaactgctacatcgcaaggaatgttcagctctgtgagttccactcaatcatcccaaagaattttctgagaaagcttctgtcttctttctataggaagttatttcctttactacggtaggcctcaaagaagtgmaattatccccttgcagtttctacaaaaagagtgtttcaaacctgaactatcaaagaaaggttccacactgtgagttgaatgcagacatcacgaagaaggttctgagaatgcttctgtttagttctgtgcggtttatcccgtttccaacgaaatcctcagagaggaccaaatatccacttgcagtttctacaagaagagtgtttcaaagctgaactatcaaagaaaggttcagc

SEQ ID NO: 198120 - DNA, 400 bp, Homo sapiens
atgcacttgcagattctgcagaaagtgtgtttctaaactgctacatcgcaaggaatgttcagctctgtgagttccactcaatcatcccaaagaattttctgagaaagcttctgtcttctttctataggaagttatttcctttactacggtaggcctcaaagaagtgcaattatccccttgcagtttctacaaaaagagtgtttcaaacctgaactatcaaagaaaggttccacactgtgagttgaatgcagacatcacgaagaaggttctgagaatgcttctgtttagttctgtgcggtttatccygtttccaacgaaatcctcagagaggaccaaatatccacttgcagtttctacaagaagagtgtttcaaagctgaactatcaaagaaaggttcagc

SEQ ID NO: 198121 - DNA, 422 bp, Homo sapiens
gaattcctcagagaggtccaaatatgcacttgcagattctgcagaaagtgtgtttctaaactgctacatcgcaaggaatgttcagctctgtgagttccactcaatcatcccaaagaattttctgagaaagcttctgtcttctttctataggaagttatttcctttactacggtaggcctcaaagaagtgcaattatccccttgcagtttctacaaaaagagtgtttcaaacctgaactatcaaagaaaggttccacactgtgagttgaatgcagacatcacgaagaaggttctgagaatgcttctgtttagttctgtgcggtttatcccgtttccaacgaaatcctcagagaggaccaaayatccacttgcagtttctacaagaagagtgtttcaaagctgaactatcaaagaaaggttcag

SEQ ID NO: 198122 - DNA, 409 bp, Homo sapiens
ggtccaaatatgcacttgcagattctgcagaaagtgtgtttctaaactgctacatcgcaaggaatgttcagctctgtgagttccactcaatcatcccaaagaattttctgagaaagcttctgtcttctttctataggaagttatttcctttactacggtaggcctcaaagaagtgcaattatccccttgcagtttctacaaaaagagtgtttcaaacctgaactatcaaagaaaggttccacactgtgagttgaatgcagacatcacgaagaaggttctgagaatgcttctgtttagttctgtgcggtttatcccgtttccaacgaaatcctcagagaggaccaaatatccacttgcagtttctacaagaagagtgtttcaaagctgmactatcaaagaaaggttcagc

SEQ ID NO: 198123 - DNA, 425 bp, Homo sapiens
  misc_feature (1)...(425): n = A,T,C or G
agaattcatatcagaagagtgaacgcagggacatctgtgtgcggaatgactgtgctgctcgaacctgccaatcgctcctggcacgagctgggtaacaaatgcctgttacctcggaatgctggcggkggggggggagggctcctggcaccaccccgactgcgaagccctgccaaggccccctcctgcccgctgtgggtcccgcccccttccctgagttgggggtccgtggaattggattattcattaattagcagtgattagaaaatttgggtgtctctcagccagggccaacccggtcttctccacctccctaatctcaatccctactcccctcccgtcctccccccacgttttccggattaactcggggtttctactgagggcaggcagccagttgatggtgatggggggcggctcangaatgc

SEQ ID NO: 198124 - DNA, 434 bp, Homo sapiens
  misc_feature (1)...(434): n = A,T,C or G
aacgcagggacatctgtgtgcggaatgactgtgctgctcgaacctgccaatcgctcctggcacgagctgggtaacaaatgcctgttacctcggaatgctggcggtkgggggggagggctcctggcaccaccccgactgcgaagccctgccaaggccccctcctgcccgctgtgggtcccgcccccttccctgagttgggggtccgtggaattggattattcattaattagcagtgattagaaaatttgggtgtctctcagccagggccaacccggtcttctccacctccctaatctcaatccctactcccctcccgtcctccccccacgttttccggattaactcggggtttctactgagggcaggcagccagttgatggtgatggggggcggctcangaatgcaggaaaaggggtctctagaggaaagaattc

SEQ ID NO: 198125 - DNA, 552 bp, Homo sapiens
agcttctctctcaaaaggaaagttcaactctgtgagttgaaagcaaacatcacaaagaagtttctgagaatgcttctgtttagcttttctgtgaagagtatcccgtttccaacgaaatcttcaaagaggcccaaacatccacttgcagatgccacagaaagagtgtttggaaactgctgtttgaaaaggaaccttcaactctgtgagttgaatgcagtcatcacaaacaagtttctgacaatgcttctctctagtttttacgtgacgataattcgttttccaccacaggcctgaaatctctccaaatgtccacttgcagaccctacgaaaagcatgtttctcatctgctstatgaaaagcaacgtgaaactctgtgagttgaacacaaacatcacagagaagtttctgagaatgcttctgtttagttttaatgtgaagatattcccgtttccaaagacattttcaaagaggaccacatatccacttgcagattccacaaaaagagagattcaaaactgctctacccataggagggttcaacgctgtgagttg

SEQ ID NO: 198126 - DNA, 555 bp, Homo sapiens
acagaagcattctcagaaccttcttcgtgatgtttgcattcaactcacagtgytgaacctttctttgatagttcaggtttgaaacggtctttctgtagaaactgcaagtagatatttggacctctctgaggatttcgttggaaacgggataaaccgcacagaactaaaacagaagcattctcagaaccctcttcgtgatgtttgcattcaactcacagtgctgaacctttctttgatagttcagctttgaaacactcttcttgtagaaactgcaagtggatatttggtcctctctgaggatttcgttggaaacgggataaaccgcacagaactaaacagaagcattctcagaaccttcttcgtgatgtctgcattcaactcacagtgtggaacctttctttgatagttcaggtttgaaacactctttttgtagaaactgcaaggggataatggcacttctttgaggcataccgtagtaaaggaaataacttcctatagaaagaagacagaagctttctcagaaaattctttgggatgattgagtggaactcacag

SEQ ID NO: 198127 - DNA, 608 bp, Homo sapiens
tgcattcaactcacagtgttgaacctttctttgatagtkcaggtttgaaacggtctttctgtagaaactgcaagtagatatttggacctctctgaggatttcgttggaaacgggataaaccgcacagaactaaaacagaagcattctcagaaccctcttcgtgatgtttgcattcaactcacagtgctgaacctttctttgatagttcagctttgaaacactcttcttgtagaaactgcaagtggatatttggtcctctctgaggatttcgttggaaacgggataaaccgcacagaactaaacagaagcattctcagaaccttcttcgtgatgtctgcattcaactcacagtgtggaacctttctttgatagttcaggtttgaaacactctttttgtagaaactgcaaggggataatggcacttctttgaggcataccgtagtaaaggaaataacttcctatagaaagaagacagaagctttctcagaaaattctttgggatgattgagtggaactcacagagctgaacattccttgcgatgtagcagtttagaaacacactttatgcagaatctgcaagtgcatatttggacctctctgaggaattc

SEQ ID NO: 198128 - DNA, 609 bp, Homo sapiens
ttgcattcaactcacagtgttgaacctttctttgatagttcagstttgaaacggtctttctgtagaaactgcaagtagatatttggacctctctgaggatttcgttggaaacgggataaaccgcacagaactaaaacagaagcattctcagaaccctcttcgtgatgtttgcattcaactcacagtgctgaacctttctttgatagttcagctttgaaacactcttcttgtagaaactgcaagtggatatttggtcctctctgaggatttcgttggaaacgggataaaccgcacagaactaaacagaagcattctcagaaccttcttcgtgatgtctgcattcaactcacagtgtggaacctttctttgatagttcaggtttgaaacactctttttgtagaaactgcaaggggataatggcacttctttgaggcataccgtagtaaaggaaataacttcctatagaaagaagacagaagctttctcagaaaattctttgggatgattgagtggaactcacagagctgaacattccttgcgatgtagcagtttagaaacacactttatgcagaatctgcaagtgcatatttggacctctctgaggaattc

SEQ ID NO: 198129 - DNA, 446 bp, Homo sapiens
gcattctcagaaccctcttcgtgatgtttgcattcaactcacagtgctgaacctttctttgatagtkcagctttgaaacactcttcttgtagaaactgcaagtggatatttggtcctctctgaggatttcgttggaaacgggataaaccgcacagaactaaacagaagcattctcagaaccttcttcgtgatgtctgcattcaactcacagtgtggaacctttctttgatagttcaggtttgaaacactctttttgtagaaactgcaaggggataatggcacttctttgaggcataccgtagtaaaggaaataacttcctatagaaagaagacagaagctttctcagaaaattctttgggatgattgagtggaactcacagagctgaacattccttgcgatgtagcagtttagaaacacactttatgcagaatctgcaagtgcata

SEQ ID NO: 198130 - DNA, 588 bp, Homo sapiens
ttgcattcaactcacagtgttgaacctttctttgatagttcaggtttgaaacggtctttctgtagaaactgcaagtagatatttggacctctctgaggatttcgttggaaacgggataaaccgcacagaactaaaacagaagcattctcagaaccctcttcgtgatgtttgcattcaactcacagtgctgaacctttctttgatagttcagctttgaaacactcttcttgtagaaactgcaagtggatatttggtcctctctgaggatttcgttggaaacgggataaaccgcacagaactaaacagaagcattctcagaaccttcttcgtgatgtctgcattcaactcacagtgtggaacctttctttgatagttcaggtttgaaacactctttttgtagaaactgcaaggggataatkgcacttctttgaggcataccgtagtaaaggaaataacttcctatagaaagaagacagaagctttctcagaaaattctttgggatgattgagtggaactcacagagctgaacattccttgcgatgtagcagtttagaaacacactttatgcagaatctgcaagtgcatat

SEQ ID NO: 198131 - DNA, 439 bp, Homo sapiens
gcattcaactcacagtgctgaacctttctttgatagttcagctttgaaacactcttcttgtagaaactgcaagtggatatttggtcctctctgaggatttcgttggaaacgggataaaccgcacagaactaaacagaagcattctcagaaccttcttcgtgatgtctgcattcaactcacagtgtggaacctttctttgatagttcaggtttgaaacactctttttgtagaaactgcaaggggataatggcacttctttgaggcmtaccgtagtaaaggaaataacttcctatagaaagaagacagaagctttctcagaaaattctttgggatgattgagtggaactcacagagctgaacattccttgcgatgtagcagtttagaaacacactttatgcagaatctgcaagtgcatatttggacctctctgaggaattc

SEQ ID NO: 198132 - DNA, 609 bp, Homo sapiens
ttgcattcaactcacagtgttgaacctttctttgatagttcaggtttgaaacggtctttctgtagaaactgcaagtagatatttggacctctctgaggatttcgttggaaacgggataaaccgcacagaactaaaacagaagcattctcagaaccctcttcgtgatgtttgcattcaactcacagtgctgaacctttctttgatagttcagctttgaaacactcttcttgtagaaactgcaagtggatatttggtcctctctgaggatttcgttggaaacgggataaaccgcacagaactaaacagaagcattctcagaaccttcttcgtgatgtctgcattcaactcacagtgtggaacctttctttgatagttcaggtttgaaacactctttttgtagaaactgcaaggggataatggcacttctttgaggcataccgtagtaaaggaaataacttcctatagaaagaagacagaagctttctcagaaaattctttgggatgattgagtggaactcacagagctgaacattccttgcgatgkagcagtttagaaacacactttatgcagaatctgcaagtgcatatttggacctctctgaggaattc

SEQ ID NO: 198133 - DNA, 479 bp, Homo sapiens
atttggacctctctgaggaattcgttggaaacgggataatttcagctgactaaacagaagcagtctcagaatcttctttgtgatgtttgcattcaaatcccagagttgaacttycctttcaaagttcacgtttgaaacactctttttgcaggatctacaagtggatatttggaccactctgtgtccttcgttcgaaacgggtatatcttcacatgacatctagacagaagcattctcagaagcttctctgtgatgactgcattcaactcacggagttgaacactccttttgagagcgcagttttgaaactctctttctgtggcatctgcaaggggacatgtagacctctttgaagatttcgttggaaacggaatcatcttcacataaaaactatacagatgcattctcaggaactttttggtgatgtttgtattcaactcccagagttgaactttcctttggaaagagcagctatgaaa

SEQ ID NO: 198134 - DNA, 344 bp, Homo sapiens
atgtttgcattcaaatcccagagttgaactttcctttcaaagttcacgtttgaaacactctttttgcaggatctacaagtggatatttggaccactctgtgtccttcgttcgaaacgggtatawcttcacatgacatctagacagaagcattctcagaagcttctctgtgatgactgcattcaactcacggagttgaacactccttttgagagcgcagttttgaaactctctttctgtggcatctgcaaggggacatgtagacctctttgaagatttcgttggaaacggaatcatcttcacataaaaactatacagatgcattctcaggaactttttggtgatg

SEQ ID NO: 198135 - DNA, 525 bp, Homo sapiens
aacagaagcagtctcagaatcttctttgtgatgtttgcattcaaatcccagagttgaactttcctttcaaagttcacgtttgaaacactctttttgcaggatctacaagtggatatttggaccactctgtgtccttcgttcgaaacgggtatatcttcacatgacatctagacagaagcattctcagaagcttctctgtgatgactgcattcaactcacggagttgaacactscttttgagagcgcagttttgaaactctctttctgtggcatctgcaaggggacatgtagacctctttgaagatttcgttggaaacggaatcatcttcacataaaaactatacagatgcattctcaggaactttttggtgatgtttgtattcaactcccagagttgaactttcctttggaaagagcagctatgaaacactctttttctagaatctgcaagtggacgtttggagggctttgtggtttgtggtggaaaaggaaatatcttcacctaaatactagatagaagcattc

SEQ ID NO: 198136 - DNA, 232 bp, Homo sapiens
ctgtgatgactgcattcaactcacggagttgaacactcctyttgagagcgcagttttgaaactctctttctgtggcatctgcaaggggacatgtagacctctttgaagatttcgttggaaacggaatcatcttcacataaaaactatacagatgcattctcaggaactttttggtgatgtttgtattcaactcccagagttgaactttcctttggaaagagcagctatgaaa

SEQ ID NO: 198137 - DNA, 386 bp, Homo sapiens
agacagaagcattctcagaagcttctctgtgatgactgcattcaactcacggagttgaacactccttttgagagcgyagttttgaaactctctttctgtggcatctgcaaggggacatgtagacctctttgaagatttcgttggaaacggaatcatcttcacataaaaactatacagatgcattctcaggaactttttggtgatgtttgtattcaactcccagagttgaactttcctttggaaagagcagctatgaaacactctttttctagaatctgcaagtggacgtttggagggctttgtggtttgtggtggaaaaggaaatatcttcacctaaatactagatagaagcattctcagaaactgctttgtgatgattgcattca

SEQ ID NO: 198138 - DNA, 225 bp, Homo sapiens
ctgtgatgactgcattcaactcacggagttgaacactccttttgagagcgcagttttgraactctctttctgtggcatctgcaaggggacatgtagacctctttgaagatttcgttggaaacggaatcatcttcacataaaaactatacagatgcattctcaggaactttttggtgatgtttgtattcaactcccagagttgaactttcctttggaaagagcagc

SEQ ID NO: 198139 - DNA, 230 bp, Homo sapiens
ctgtgatgactgcattcaactcacggagttgaacactccttttgagagcgcagttttgaaactcyctttctgtggcatctgcaaggggacatgtagacctctttgaagatttcgttggaaacggaatcatcttcacataaaaactatacagatgcattctcaggaactttttggtgatgtttgtattcaactcccagagttgaactttcctttggaaagagcagctatga

SEQ ID NO: 198140 - DNA, 609 bp, Homo sapiens
tttgaaacactctttttgcaggatctacaagtggatatttggaccactctgtgtccttcgttcgaaacgggtatatcttcacatgacatctagacagaagcattctcagaagcttctctgtgatgactgcattcaactcacggagttgaacactccttttgagagcgcagttttgaaactctcyttctgtggcatctgcaaggggacatgtagacctctttgaagatttcgttggaaacggaatcatcttcacataaaaactatacagatgcattctcaggaactttttggtgatgtttgtattcaactcccagagttgaactttcctttggaaagagcagctatgaaacactctttttctagaatctgcaagtggacgtttggagggctttgtggtttgtggtggaaaaggaaatatcttcacctaaatactagatagaagcattctcagaaactgctttgtgatgattgcattcacctcacagagttgaacattcctattgatagagcagtttggaaacactcttgttgtggaatgtgcaagtggagatttggagcgctttgaggcctatggtagtaaagggaatagcttcatagaaaaactagaca

SEQ ID NO: 198141 - DNA, 521 bp, Homo sapiens
acaagtggatatttggaccactctgtgtccttcgttcgaaacgggtatatcttcacatgacatctagacagaagcattctcagaagcttctctgtgatgactgcattcaactcacggagttgaacactccttttgagagcgcagttttgaaactctctttctgtggcatctgcaaggggacatgtagacctctttgaagatttcgttggaaacggaatcatcytcacataaaaactatacagatgcattctcaggaactttttggtgatgtttgtattcaactcccagagttgaactttcctttggaaagagcagctatgaaacactctttttctagaatctgcaagtggacgtttggagggctttgtggtttgtggtggaaaaggaaatatcttcacctaaatactagatagaagcattctcagaaactgctttgtgatgattgcattcacctcacagagttgaacattcctattgatagagcagtttggaaacactcttgttgtggaatgtgcaagtgg

SEQ ID NO: 198142 - DNA, 525 bp, Homo sapiens
aacagaagcagtctcagaatcttctttgtgatgtttgcattcaaatcccagagttgaactttcctttcaaagttcacgtttgaaacactctttttgcaggatctacaagtggatatttggaccactctgtgtccttcgttcgaaacgggtatatcttcacatgacatctagacagaagcattctcagaagcttctctgtgatgactgcattcaactcacggagttgaacactccttttgagagcgcagttttgaaactctctttctgtggcatctgcaaggggacatgtagacctctttgaagatttcgttggaaacggaatcatcttcacataraaactatacagatgcattctcaggaactttttggtgatgtttgtattcaactcccagagttgaactttcctttggaaagagcagctatgaaacactctttttctagaatctgcaagtggacgtttggagggctttgtggtttgtggtggaaaaggaaatatcttcacctaaatactagatagaagcattc

SEQ ID NO: 198143 - DNA, 609 bp, Homo sapiens
tttgaaacactctttttgcaggatctacaagtggatatttggaccactctgtgtccttcgttcgaaacgggtatatcttcacatgacatctagacagaagcattctcagaagcttctctgtgatgactgcattcaactcacggagttgaacactccttttgagagcgcagttttgaaactctctttctgtggcatctgcaaggggacatgtagacctctttgaagatttcgttggaaacggaatcatcttcacataaaawctatacagatgcattctcaggaactttttggtgatgtttgtattcaactcccagagttgaactttcctttggaaagagcagctatgaaacactctttttctagaatctgcaagtggacgtttggagggctttgtggtttgtggtggaaaaggaaatatcttcacctaaatactagatagaagcattctcagaaactgctttgtgatgattgcattcacctcacagagttgaacattcctattgatagagcagtttggaaacactcttgttgtggaatgtgcaagtggagatttggagcgctttgaggcctatggtagtaaagggaatagcttcatagaaaaactagaca

SEQ ID NO: 198144 - DNA, 543 bp, Homo sapiens
gaattcgttggaaacgggataatttcagctgactaaacagaagcagtctcagaatcttctttgtgatgtttgcattcaaatcccagagttgaactttcctttcaaagttcacgtttgaaacactctttttgcaggatctacaagtggatatttggaccactctgtgtccttcgttcgaaacgggtatatcttcacatgacatctagacagaagcattctcagaagcttctctgtgatgactgcattcaactcacggagttgaacactccttttgagagcgcagttttgaaactctctttctgtggcatctgcaaggggacatgtagacctctttgaagatttcgttggaaacggaatcatcttcacataaaaastatacagatgcattctcaggaactttttggtgatgtttgtattcaactcccagagttgaactttcctttggaaagagcagctatgaaacactctttttctagaatctgcaagtggacgtttggagggctttgtggtttgtggtggaaaaggaaatatcttcacctaaat

SEQ ID NO: 198145 - DNA, 216 bp, Homo sapiens
attcaactcacggagttgaacactccttttgagagcgcagttttgaaactctctttctgtggcatctgcaaggggacatgtagacctctttgaagatttcgttggaaacggaatcatcttcacataaaaactatacagatgcattctcaggaactttttggtgaygtttgtattcaactcccagagttgaactttcctttggaaagagcagctatg

SEQ ID NO: 198146 - DNA, 216 bp, Homo sapiens
attcaactcacggagttgaacactccttttgagagcgcagttttgaaactctctttctgtggcatctgcaaggggacatgtagacctctttgaagatttcgttggaaacggaatcatcttcacataaaaactatacagatgcattctcaggaactttttggtgatgtttgtattcaactcccagagttgaamtttcctttggaaagagcagctatg

SEQ ID NO: 198147 - DNA, 525 bp, Homo sapiens
aacagaagcagtctcagaatcttctttgtgatgtttgcattcaaatcccagagttgaactttcctttcaaagttcacgtttgaaacactctttttgcaggatctacaagtggatatttggaccactctgtgtccttcgttcgaaacgggtatatcttcacatgacatctagacagaagcattctcagaagcttctctgtgatgactgcattcaactcacggagttgaacactccttttgagagcgcagttttgaaactctctttctgtggcatctgcaaggggacatgtagacctctttgaagatttcgttggaaacggaatcatcttcacataaaaactatacagatgcattctcaggaactttttggtgatgtttgtattcaactcccagagttgaactttcctttggaaagagcagctatgaaacactctttttctagaatctgcaagtggasgtttggagggctttgtggtttgtggtggaaaaggaaatatcttcacctaaatactagatagaagcattc

SEQ ID NO: 198148 - DNA, 521 bp, Homo sapiens
acaagtggatatttggaccactctgtgtccttcgttcgaaacgggtatatcttcacatgacatctagacagaagcattctcagaagcttctctgtgatgactgcattcaactcacggagttgaacactccttttgagagcgcagttttgaaactctctttctgtggcatctgcaaggggacatgtagacctctttgaagatttcgttggaaacggaatcatcttcacataaaaactatacagatgcattctcaggaactttttggtgatgtttgtattcaactcccagagttgaactttcctttggaaagagcagctatgaaacactctttttctagaatctgcaagtggacgtttggagggctttgtggtttgtggtggaaaaggaaatatcttcacctaaatactasatagaagcattctcagaaactgctttgtgatgattgcattcacctcacagagttgaacattcctattgatagagcagtttggaaacactcttgttgtggaatgtgcaagtgg

SEQ ID NO: 198149 - DNA, 521 bp, Homo sapiens
acaagtggatatttggaccactctgtgtccttcgttcgaaacgggtatatcttcacatgacatctagacagaagcattctcagaagcttctctgtgatgactgcattcaactcacggagttgaacactccttttgagagcgcagttttgaaactctctttctgtggcatctgcaaggggacatgtagacctctttgaagatttcgttggaaacggaatcatcttcacataaaaactatacagatgcattctcaggaactttttggtgatgtttgtattcaactcccagagttgaactttcctttggaaagagcagctatgaaacactctttttctagaatctgcaagtggacgtttggagggctttgtggtttgtggtggaaaaggaaatatcttcacctaaatactagatagaagcattctcagaaactgctttgtgatgattgcattcacctcacagagttgamcattcctattgatagagcagtttggaaacactcttgttgtggaatgtgcaagtgg

SEQ ID NO: 198150 - DNA, 531 bp, Homo sapiens
tttggagggctttgtggtttgtggtggaaaaggaaatatcttcacctaaatactagatagaagcattctcagaaactgctttgtgatgattgcattcacctcacagagttgaacattcctattgatagagcagtttggaaacactcttgttgtggaatgtgcaagtggagatttggagcgctttgaggcctatggtagtaaagggaatagcttcatagaaaaactagacagaagcattctcagaaaatactttgtgatgattgagttkaactcacagagctgaacattcctttggatggagcaggtttgagacacactttttgtagaatctacaagtggatatttggacctctctgaggatttcgttggaaacgcgataactgcacctaactaaacggaagcattctcagaaacttcttggtgatgtttgcattcaaatcccagagttgaaccttcctgtgatagttcaggtttgaatcactctttttgtaggatctgcaagtggatatttggaccactctgtggccttcg

SEQ ID NO: 198151 - DNA, 531 bp, Homo sapiens
ttgtggtttgtggtggaaaaggaaatatcttcacctaaatactagatagaagcattctcagaaactgctttgtgatgattgcattcacctcacagagttgaacattcctattgatagagcagtttggaaacactcttgttgtggaatgtgcaagtggagatttggagcgctttgaggcctatggtagtaaagggaatagcttcatagaaaaactagacagaagcattctcagaaaatactttgtgatgattgagtttaactcacagagctgaacattcctttggatggagcaggtttgagacacacyttttgtagaatctacaagtggatatttggacctctctgaggatttcgttggaaacgcgataactgcacctaactaaacggaagcattctcagaaacttcttggtgatgtttgcattcaaatcccagagttgaaccttcctgtgatagttcaggtttgaatcactctttttgtaggatctgcaagtggatatttggaccactctgtggccttcgttcgaaacggg

SEQ ID NO: 198152 - DNA, 531 bp, Homo sapiens
tttggagggctttgtggtttgtggtggaaaaggaaatatcttcacctaaatactagatagaagcattctcagaaactgctttgtgatgattgcattcacctcacagagttgaacattcctattgatagagcagtttggaaacactcttgttgtggaatgtgcaagtggagatttggagcgctttgaggcctatggtagtaaagggaatagcttcatagaaaaactagacagaagcattctcagaaaatactttgtgatgattgagtttaactcacagagctgaacattcctttggatggagcaggtttgagacacactttttgtagaatctacaagtggatatttggacctctctgaggatttcgttggaaacgcgataactgcacctaactaaacggaagcattctcagaaacttcttggtgatgtttgcattcaaatcccagagttgaaccttcctktgatagttcaggtttgaatcactctttttgtaggatctgcaagtggatatttggaccactctgtggccttcg

SEQ ID NO: 198153 - DNA, 531 bp, Homo sapiens
ttgtggtttgtggtggaaaaggaaatatcttcacctaaatactagatagaagcattctcagaaactgctttgtgatgattgcattcacctcacagagttgaacattcctattgatagagcagtttggaaacactcttgttgtggaatgtgcaagtggagatttggagcgctttgaggcctatggtagtaaagggaatagcttcatagaaaaactagacagaagcattctcagaaaatactttgtgatgattgagtttaactcacagagctgaacattcctttggatggagcaggtttgagacacactttttgtagaatctacaagtggatatttggacctctctgaggatttcgttggaaacgcgataactgcacctaactaaacggaagcattctcagaaacttcttggtgatgtttgcattcaaatcccagagttgaaccttcctgtgatagttcaggtttgaawcactctttttgtaggatctgcaagtggatatttggaccactctgtggccttcgttcgaaacggg

SEQ ID NO: 198154 - DNA, 451 bp, Homo sapiens
gaattcgttggaaaccggataatttcagctgactaatcagaagcagtctcagaatcttctttgtgatgtttgcattcaaatcccagagttgaactttcctttcaaagttcacgtttgaaacactctttttgcaggatctacaagtggatatttggaccactctgtgtccttcgttcgaaamgggtatatcttcacatgacatctagacagaagcattctcagaagcttctctgtgatgactgcattcaactcacggagttgaacactccttttgagagcgcagttttgaaactctctttctgtggcatctgcaaggggacatgtagacctctttgaagatttcgttggaaacggaatcatcttcacataaaaactatacagatgcattctcaggaactttttggtgatgtttgtattcaactcccagagttgaactttcctttggaaagag

SEQ ID NO: 198155 - DNA, 213 bp, Homo sapiens
cttctctgtgatgactgcattcaactcacggagttgaacamtccttttgagagcgcagttttgaaactctctttctgtggcatctgcaaggggacatgtagacctctttgaagatttcgttggaaacggaatcatcttcacataaaaactatacagatgcattctcaggaactttttggtgatgtttgtattcaactcccagagttgaacttt

SEQ ID NO: 198156 - DNA, 212 bp, Homo sapiens
ttctctgtgatgactgcattcaactcacggagttgaacactccttttgagagcrcagttttgaaactctctttctgtggcatctgcaaggggacatgtagacctctttgaagatttcgttggaaacggaatcatcttcacataaaaactatacagatgcattctcaggaactttttggtgatgtttgtattcaactcccagagttgaacttt

SEQ ID NO: 198157 - DNA, 225 bp, Homo sapiens
ttctctgtgatgactgcattcaactcacggagttgaacactccttttgagagcgcagttttgraactctctttctgtggcatctgcaaggggacatgtagacctctttgaagatttcgttggaaacggaatcatcttcacataaaaactatacagatgcattctcaggaactttttggtgatgtttgtattcaactcccagagttgaactttcctttggaaagag

SEQ ID NO: 198158 - DNA, 451 bp, Homo sapiens
gaattcgttggaaaccggataatttcagctgactaatcagaagcagtctcagaatcttctttgtgatgtttgcattcaaatcccagagttgaactttcctttcaaagttcacgtttgaaacactctttttgcaggatctacaagtggatatttggaccactctgtgtccttcgttcgaaacgggtatatcttcacatgacatctagacagaagcattctcagaagcttctctgtgatgactgcattcaactcacggagttgaacactccttttgagagcgcagttttgaaactytctttctgtggcatctgcaaggggacatgtagacctctttgaagatttcgttggaaacggaatcatcttcacataaaaactatacagatgcattctcaggaactttttggtgatgtttgtattcaactcccagagttgaactttcctttggaaagag

SEQ ID NO: 198159 - DNA, 225 bp, Homo sapiens
ttctctgtgatgactgcattcaactcacggagttgaacactccttttgagagcgcagttttgaaactcyctttctgtggcatctgcaaggggacatgtagacctctttgaagatttcgttggaaacggaatcatcttcacataaaaactatacagatgcattctcaggaactttttggtgatgtttgtattcaactcccagagttgaactttcctttggaaagag

SEQ ID NO: 198160 - DNA, 225 bp, Homo sapiens
ttctctgtgatgactgcattcaactcacggagttgaacactccttttgagagcgcagttttgaaactctctttctgtggcatcygcaaggggacatgtagacctctttgaagatttcgttggaaacggaatcatcttcacataaaaactatacagatgcattctcaggaactttttggtgatgtttgtattcaactcccagagttgaactttcctttggaaagag

SEQ ID NO: 198161 - DNA, 225 bp, Homo sapiens
ttctctgtgatgactgcattcaactcacggagttgaacactccttttgagagcgcagttttgaaactctctttctgtggcatctscaaggggacatgtagacctctttgaagatttcgttggaaacggaatcatcttcacataaaaactatacagatgcattctcaggaactttttggtgatgtttgtattcaactcccagagttgaactttcctttggaaagag

SEQ ID NO: 198162 - DNA, 228 bp, Homo sapiens
agcttctctgtgatgactgcattcaactcacggagttgaacactccttttgagagcgcagttttgaaactctctttctgtggcatctgcaaggggacatgtagacctcyttgaagatttcgttggaaacggaatcatcttcacataaaaactatacagatgcattctcaggaactttttggtgatgtttgtattcaactcccagagttgaactttcctttggaaagag

SEQ ID NO: 198163 - DNA, 218 bp, Homo sapiens
cattcaactcacggagttgaacactccttttgagagcgcagttttgaaactctctttctgtggcatctgcaaggggacatgtagacctcttkgaagatttcgttggaaacggaatcatcttcacataaaaactatacagatgcattctcaggaactttttggtgatgtttgtattcaactcccagagttgaactttcctttggaaagagcagctatga

SEQ ID NO: 198164 - DNA, 256 bp, Homo sapiens
tctgtgatgactgcattcaactcacggagttgaacactccttttgagagcgcagttttgaaactctctttctgtggcatctgcaaggggacatgtagacctctttgaakatttcgttggaaacggaatcatcttcacataaaaactatacagatgcattctcaggaactttttggtgatgtttgtattcaactcccagagttgaactttcctttggaaagagcagctatgaaacactctttttctagaatctgcaa

SEQ ID NO: 198165 - DNA, 463 bp, Homo sapiens
tatttggtcctctctgaggaattcgttggaaaccggataatttcagctgactaatcagaagcagtctcagaatcttctttgtgatgtttgcattcaaatcccagagttgaactttcctttcaaagttcacgtttgaaacactctttttgcaggatctacaagtggatatttggaccactctgtgtccttcgttcgaaacgggtatatcttcacatgacatctagacagaagcattctcagaagcttctctgtgatgactgcattcaactcacggagttgaacactccttttgagagcgcagttttgaaactctctttctgtggcatctgcaaggggacatgtagacctctttgaagatttcgttggaaacsgaatcatcttcacataaaaactatacagatgcattctcaggaactttttggtgatgtttgtattcaactcccagagttgaactttcctttgg

SEQ ID NO: 198166 - DNA, 228 bp, Homo sapiens
agcttctctgtgatgactgcattcaactcacggagttgaacactccttttgagagcgcagttttgaaactctctttctgtggcatctgcaaggggacatgtagacctctttgaagatttcgttggaaacggaatcatcttcrcataaaaactatacagatgcattctcaggaactttttggtgatgtttgtattcaactcccagagttgaactttcctttggaaagag

SEQ ID NO: 198167 - DNA, 225 bp, Homo sapiens
ttctctgtgatgactgcattcaactcacggagttgaacactccttttgagagcgcagttttgaaactctctttctgtggcatctgcaaggggacatgtagacctctttgaagatttcgttggaaacggaatcatcttcacatmaaaactatacagatgcattctcaggaactttttggtgatgtttgtattcaactcccagagttgaactttcctttggaaagag

SEQ ID NO: 198168 - DNA, 225 bp, Homo sapiens
ttctctgtgatgactgcattcaactcacggagttgaacactccttttgagagcgcagttttgaaactctctttctgtggcatctgcaaggggacatgtagacctctttgaagatttcgttggaaacggaatcatcttcacataaaaactatacagatgcattcwcaggaactttttggtgatgtttgtattcaactcccagagttgaactttcctttggaaagag

SEQ ID NO: 198169 - DNA, 228 bp, Homo sapiens
agcttctctgtgatgactgcattcaactcacggagttgaacactccttttgagagcgcagttttgaaactctctttctgtggcatctgcaaggggacatgtagacctctttgaagatttcgttggaaacggaatcatcttcacataaaaactatacagatgcattctcaggaactttttrgtgatgtttgtattcaactcccagagttgaactttcctttggaaagag

SEQ ID NO: 198170 - DNA, 228 bp, Homo sapiens
agcttctctgtgatgactgcattcaactcacggagttgaacactccttttgagagcgcagttttgaaactctctttctgtggcatctgcaaggggacatgtagacctctttgaagatttcgttggaaacggaatcatcttcacataaaaactatacagatgcattctcaggaactttttgktgatgtttgtattcaactcccagagttgaactttcctttggaaagag

SEQ ID NO: 198171 - DNA, 466 bp, Homo sapiens
tttgtggtttgtggtggaaaaggaaatatcttcacctaaatactagatagaagcattctcagaaactgctttgtgatgattgcattcacctcacagagttgaacattcctattgatagagcagtttggaaacactcttgttgtggaatgtgcaagtggagatttggagcgctttgaggcctatggtagtaaagggaatagcttcatagaaaaactagacagaagcattctcagaaaatactttgtgatgattgagtttaactcacagagctgaacattcctttggatggagcaggtttgagacacactttttgtagaatctacaagtggatatttggacctctctgaggatttcgttggaaacgcgataactgcacctaactaaacggaagcattctcagaaacttcttggtgatgtttgcattcmaatcccagagttgaaccttcctgtgatagttcaggtttga

SEQ ID NO: 198172 - DNA, 434 bp, Homo sapiens
gcattctcagaaccctcttcgtgatgtttgcattcaactcacagtgctgaacctttctttgatagtkcagctttgaaacactcttcttgtagaaactgcaagtggatatttggtcctctctgaagatttcgttggaaacgggataaaccgcacagaactaaacagaagcattctcagaaccttcttcgtgatgtctgcattcaactcacagtgtggaacctttctttgatagttcaggtttgaaacactctttttgtagaaactgcaaggggataattgcacttctttgaggcctaccgtagtaaaggaaataacttcctatagaaagaagacagaagctttctcagaaaattctttgggatgattgagtggaactcacagagctgaacattccttgcgatgtagcagtttagaaacacactttctgcagaatc

SEQ ID NO: 198173 - DNA, 587 bp, Homo sapiens
tgcattcaactcacagtgttgaacctttctttgatagttcaggtttgaaacggtctttctgtagaaactgcaagtagatatttggacctctctgaggatttcgttggaaacgggataaaccgcacagaactaaaacagaagcattctcagaaccctcttcgtgatgtttgcattcaactcacagtgctgaacctttctttgatagttcagctttgaaacactcttcttgtagaaactgcaagtggatatttggtcctctctgargatttcgttggaaacgggataaaccgcacagaactaaacagaagcattctcagaaccttcttcgtgatgtctgcattcaactcacagtgtggaacctttctttgatagttcaggtttgaaacactctttttgtagaaactgcaaggggataattgcacttctttgaggcctaccgtagtaaaggaaataacttcctatagaaagaagacagaagctttctcagaaaattctttgggatgattgagtggaactcacagagctgaacattccttgcgatgtagcagtttagaaacacactttctgcagaatctgcaagtgcatat

SEQ ID NO: 198174 - DNA, 434 bp, Homo sapiens
gcattctcagaaccctcttcgtgatgtttgcattcaactcacagtgctgaacctttctttgatagttcagctttgaaacactcttcttgtagaaactgcaagtggatatttggtcctctctgaagatttcgttggaaacgggataaaccgcacagaactaaacagaagcattctcagaaccttcttcgtgatgtctgcattcaactcacagtgtggaacctttctttgatagttcaggtttgaaacactctttttgtagaaactgcaaggggataattgcacttctttgaggcctaccgtagtaaaggaaataacttcctataraaagaagacagaagctttctcagaaaattctttgggatgattgagtggaactcacagagctgaacattccttgcgatgtagcagtttagaaacacactttctgcagaatc

SEQ ID NO: 198175 - DNA, 550 bp, Homo sapiens
tgagtggaactcacagagctgaacattccttgcgatgtagcagtttagaaacacactttctgcagaatctgcaagtgcatatttggacctctctgaggaattcgttggaaacgggataatttcagctgactaaacagaagcagtctcagaatcttctttgtgatgtttgcattcaaatcccagagttgaactttcctttcaaagttcacgtttgaaacactctttttgcaggatctacaagtggatatttggaccactctgtgtccttcgttcgaaacgggtatatcttcacatgacatctagacagaagcatyctcagaagcttctctgtgatgactgcattcaactcacggagttgaacactccttttgagagcgcagttttgaaactctctttctgtggcatctgcaaggggacatgtagacctctttgaagatttcgttggaaacggaatcatcttcacataaaaactatacagatgcattctcaggaactttttggtgatgtttgtattcaactcccagagttgaactttcctttggaaagagca

SEQ ID NO: 198176 - DNA, 227 bp, Homo sapiens
tctgtgatgactgcattcaactcacggrgttgaacactccttttgagagcgcagttttgaaactctctttctgtggcatctgcaaggggacatgtagacctctttgaagatttcgttggaaacggaatcatcttcacataaaaactatacagatgcattctcaggaactttttggtgatgtttgtattcaactcccagagttgaactttcctttggaaagagcagct

SEQ ID NO: 198177 - DNA, 227 bp, Homo sapiens
tctgtgatgactgcattcaactcacggagttgaacactccttttgrgagcgcagttttgaaactctctttctgtggcatctgcaaggggacatgtagacctctttgaagatttcgttggaaacggaatcatcttcacataaaaactatacagatgcattctcaggaactttttggtgatgtttgtattcaactcccagagttgaactttcctttggaaagagcagct

SEQ ID NO: 198178 - DNA, 230 bp, Homo sapiens
agcttctctgtgatgactgcattcaactcacggagttgaacactccttttgagagcgcagttttgaaactctctttctgtggcatctgmaaggggacatgtagacctctttgaagatttcgttggaaacggaatcatcttcacataaaaactatacagatgcattctcaggaactttttggtgatgtttgtattcaactcccagagttgaactttcctttggaaagagca

SEQ ID NO: 198179 - DNA, 230 bp, Homo sapiens
agcttctctgtgatgactgcattcaactcacggagttgaacactccttttgagagcgcagttttgaaactctctttctgtggcatctgcaaggggacatgtrgacctctttgaagatttcgttggaaacggaatcatcttcacataaaaactatacagatgcattctcaggaactttttggtgatgtttgtattcaactcccagagttgaactttcctttggaaagagca

SEQ ID NO: 198180 - DNA, 230 bp, Homo sapiens
agcttctctgtgatgactgcattcaactcacggagttgaacactccttttgagagcgcagttttgaaactctctttctgtggcatctgcaaggggacatgtagacctctttgmagatttcgttggaaacggaatcatcttcacataaaaactatacagatgcattctcaggaactttttggtgatgtttgtattcaactcccagagttgaactttcctttggaaagagca

SEQ ID NO: 198181 - DNA, 312 bp, Homo sapiens
tcccagaattgaaccttcctttgaaagttcaggttggaaacactctttttgcaggatctacaagtrgatattcggaccactctgtggacttcgttcgaaacgggtatatcttcacataacatctagacagaaggatctcagaaacttttctgtgatgactgcattcaactcacagagttcaacactccttttgagagcgcagttttgaaactctctttctctggaatctgcaaggggacatgcagacctctttgaaggtttcgttggaaacggagtcatcttcacataaaaattacacagaagcattctcag

SEQ ID NO: 198182 - DNA, 312 bp, Homo sapiens
tcccagaattgaaccttcctttgaaagttcaggttggaaacactctttttgcaggatctacaagtagatattcggaccactctgtggacttcgttcgaaacgggtatatcttcacataacatctagacagaaggatctcagaaacttttctgtgatgactgcattcaactcacagagttcaacactccttttgagagcgcagttttgaaactctctttctctggaatctgcaaggggacatgcagacctctttgaaggtttcgttggaaacggartcatcttcacataaaaattacacagaagcattctcag

SEQ ID NO: 198183 - DNA, 382 bp, Homo sapiens
acatctgtgtgcggaatgactgtgctgctcgaacctgccaatcgctcctggcacgagctgggtaacaaatgcctgttacctcggaatgctggcggtggggggggagggctcctggcaccaccccgactgcgaagccctgccaaggccccctcctgcccgctgtgggtcccgcccccttccctgagttgggggtccgtggaattggattattcattaattagcagtgattagaaaatttgggtgtctctcagccagggccaacccggtcttctccacctccctaatctcaatccctactcccctcccgtcctccccccacgttttccggattaactcggggtttctactgagggcasgcagccagttgatggtgatggggggc

SEQ ID NO: 198184 - DNA, 563 bp, Homo sapiens
tctctgtgacggttgcattcaactcaaagcgttgaaacctcctatggatagagcagttttgaatctctctttttgtggaatctgcaagtggatatgtggtcctctttgaagatgtctttggaaacgggaatatcttcacatwaaaactaaacagaagcattctcagaaacttctctgtgatgtttgtgttcaactcacagagtttcacgttgcttttcatagagcagatgagaaacatgcttttcgtagggtctgcaagtggacatttggagagctttcaggcctgtggtggaaaacgaattatcgtcacgtaaaaactagagagaagcattgtcagaaacttgtttgtgatgactgcattcaactcacagagttgaaggttccttttcaaacagcagtttccaaacactctttctgtggcatctgcaagtgggtgtttgggcctctttgaagatttcgttggaaacgggataatcttcacagaaaagctaaacagaagcattctcagaaacttctttgtgatgtttgctttcaactcacagagttgaactttccttttgaga

SEQ ID NO: 198185 - DNA, 251 bp, Homo sapiens
agagagtttcaaaactgcgctctcaaaaggagtgttcaactctgtgagttgaatgcagtcatcacagaaaagtttctgagaatgcttctgtctagatgttatgtgaagatatacccgtttcgaacgaagtccacagagtggtccgaatatccacttgtagatcctgcawaaagagtgtttccaacctgaactttcaaaggaaggttcaattctgggatttgaatgcaaacatcacaagaagattctgagac

SEQ ID NO: 198186 - DNA, 459 bp, Homo sapiens
tatctctcccagctgggcacatggctcatacctatagtcctagcatgttgggaggccaaagcaggtggatcacttgagcccaggagttcaagatcagcctgggcaacatggtgaaagcccatctctgtaaaaaatmcaaaaaaaaaaaaattagctaagtgtggtggcgtgtgcctctagtcccagctacttgggaggattgcttgagcccgggaggtggagattgcagtgagccgagatcatgccattgcactccagcctgggtgacagatggagaccctgactcaaaaaaaaaaaaaaaaaaaaaaaaggaaagtatctgtgtccatacccatgaaagaggagaatggcactcctcctgagagagctaagttgagacccactgatcatcggtatttctgggtcatttctagagatgataaaagcagacagcagacagataagcacaggttcagtatg

SEQ ID NO: 198187 - DNA, 448 bp, Homo sapiens
aaactgaatgatgccatgatggacaaagacattagtaaggctgccctgaaatcggctgtgggggctccagtctaagatgttataatagcctaactagaggctatgggcctttttcctataacagacttcttagcaaaagtgaaatccattattttcccggcattgttctttagcacaggaaagaatatttgagaaggtgacattgcttgcattgcccagtttgaggctacctacagctaagaatrttaaggcaaagtttcctttgccatgatgtagtcatacttgtttttgtgaaggtaaatagtaaggcttagagcctttgtaacttacagtcagtggtagaatagtggagtgatatgtagcattatctagcaccttattccaatctgtgcaattattgacagaccccactggggataaattctatccctcctagccaagcagtcac

SEQ ID NO: 198188 - DNA, 586 bp, Homo sapiens
tatttatcagatgaagtgacagcattaagatacttcaatagtaaagtatacaaggacaatccagtagtacaacatgtaaaacacagaaatgtttccatctgaatataaactatcctactaataaatttatgaagagaaataaagctatagatataacactttgcaagttaaagatcagaaataataaagtccaaactttaattatttttawctgtatgcttaaaagaatctagctttccacagtttcatattctgcacagcctctgccagagatatttttggtgactgatggcattggggtttcatcagcagctgtaacctggactgtctttcaaaaagttctgtatactttcttcagtcgcatgttaacttatttccaagactctgatgtttctaaccttttaaagatttcagagaattaatgggacacatgagattttcacagtcctggccctgcagtcatccaattggagaatgagccaatcctctttcgcaagggcagttatcccagacaagttcatgttccaagaagccagatcagtgtttccggagaccgtggcagatacttggtggcattggggtaagg

SEQ ID NO: 198189 - DNA, 620 bp, Homo sapiens
tgcccattgccttgtaaataaagtcatatatctctccattatgctcttagtcattcacttgaaaataattgaggatatgcacagagcttctgcccatcaaaggtggcaacttgcatggtccaacagatgggttttttgtcttaacccttcattgtctcttatctttgaattgtgttaatagatctgattaagcaaaaagaaaaaaaatgaagtaaatattttccatcattaaaattgtttttgcttgctttgcttgtcgcatgggaaggctttggatctgttttttttcccctgtgtctctcagtcaagatgcgatgaacaatgatgttggtgaacctcaccattgcactgctgaccggagtcagcctggcttcatcttccctctcaacttcagagtgagtgacagagctggagggaatggcattgagagtctggctgctcttccactaaytggaaggaaacagtatgcagatctgagtacttcagaccagcctagatgactcagtagattggctttcagggaaaaaaatatttctcagtacttataataactatgttatacattatgggcataaatgcaactcctcttggagcaggcactgaaattaacccacaaagtt

SEQ ID NO: 198190 - DNA, 529 bp, Homo sapiens
aaattcggggccaaaagagaaatcataatgaaaattcaaaaatacttagaacaaaataacaataaaaatatcatgcaagaaattttgtgggaggcagttaaatttcagaataattagagagaaatatatagttttaagttcttatggtagaaaagaagatatcttgmaagctaataaattaggcatctatcttaatttagaaaaaatgaaaaaaacttaaggaatgaataatgaaacaaataataaaggttagagtagacatgatgaaaaagaaaaaaatacatcattacaaaggatttagaactataaaagttacttcattgaaaaaggcgaataaaatgaacagaagtctggcaagattaagtaaaaacattggaggccatatagtaaatataagttatcatattaataatgtaaataaactaacaggtttttattgaattaggcttcgtctgtatgcgtatctgctgcctcccgatacattatctattcttaacctgcagaattgaatgcaactttttaaacaaag

SEQ ID NO: 198191 - DNA, 529 bp, Homo sapiens
aaattcggggccaaaagagaaatcataatgaaaattcaaaaatacttagaacaaaataacaataaaaatatcatgcaagaaattttgtgggaggcagttaaatttcagaataattagagagaaatatatagttttaagttcttatggtagaaaagaagatatcttgcaagctaataaattaggcatctatcttaatttagaaaaaatgaaaaaaacttaaggaatgaataatgaaacaaataataaaggttagagtagacatgatgaaaaagaaaaaaatacatcattacaaaggatttagaactataaaagttasttcattgaaaaaggcgaataaaatgaacagaagtctggcaagattaagtaaaaacattggaggccatatagtaaatataagttatcatattaataatgtaaataaactaacaggtttttattgaattaggcttcgtctgtatgcgtatctgctgcctcccgatacattatctattcttaacctgcagaattgaatgcaactttttaaacaaag

SEQ ID NO: 198192 - DNA, 505 bp, Homo sapiens
ttctcaaaataaaagaataaactcatccaccttctcttatagccagtgcaccaccaatcagaggcctcaaagacctagtgatggagaaaggaagggcctgagagctccttcttctctaatacagcaataaggccaagttcctcagaaatgacaagtttccaagaatagagcattggcatctaatgttcaatggtgggggccayagttttcttgcttttcttatcagatcagctcctgaaagattagcagttactctggttccccagcacgcctaatgattctgtgggctactcaatatattttcaataaactctctttcttagtaagccagagtcagattttgttgcttgcaatatagaaccttggctgatgcaggaataataatcactgctttatttcattgagtagttgataagtctattacatggacttaactttccaaatgtaacagaaaatatataatttataagtctgaaaaggcattacggtcaatatataattgact

SEQ ID NO: 198193 - DNA, 621 bp, Homo sapiens
ccatgctcctcagtgcccaaagtctggaggaagccaaggtggcagggagctggtgtgttagtgacacctcaagcatgtgcatacctggccaggtggcaatagctcccaggtttggcctcatctttgctccaaaattcaatcagtgctgggagcagtgagaggctgggcagtggcagtaggtacttctgagcctgtgggggcagtggggtaagtgttttctggggccccgagagcacagggatgcccccatctgcagctgtggctgggtggctgcagctgcactcaggggaggtgctttttccgggccctcccatggctgcccatggaccaatcagcatgcacttccttccttttaggccataaaaaccccccacccagccagacttggacagactagggwctaccagctgcaacttggaaggaggcaggaatcccacctcttcccacctcctgctggctctgtgaagcactgagccccagcagtacttcttccactgcagccaacatcttcacagtggccactctagatgggccacctctgccatcaaaattttctcttaaaggtcactgagaaataaacaatagcataacagagagtgaatgtgatttccacaactctct

SEQ ID NO: 198194 - DNA, 554 bp, Homo sapiens
gagagtactccaaactgaattcattctgcctttaagttatgcaaacgtggacaaaatatatcacattctactgaaattgttttttatttatacttctattgcttagaaagggtgtatcaatggaaaataaagctttacgactttacaggagccactgaatgggatgaaggttaaatttttyttcagagttatgaaggtttaagtggtaggaaaaaggatgctcttaaagtcatgtcttcttttttctaaggtgttgcattggactgaagcctcttcagaacactgaggatataccaattcattttagaagcctccaaggtgagcagtgaaagccatcaaagttaaagttagcatcatttaagacaaagtgaattaacagcaccactcagagtggagtgtgaatgtatttgtatgtctggcatagcctaaggtttatttatttatttatttattttttaccatggagagaggtcaagaggtcaagaggtcaaggtattttaagatgaccaaatctctttaagattcttcaggaaaaaaaaaaaaaaaagcagtac

SEQ ID NO: 198195 - DNA, 554 bp, Homo sapiens
gagagtactccaaactgaattcattctgcctttaagttatgcaaacgtggacaaaatatatcacattctactgaaattgttttttatttatacttctattgcttagaaagggtgtatcaatggaaaataaagctttacgactttacaggagccactgaatgggatgaaggttaaatttttcttcagagttatgaaggtttaagtggtaggaaaaaggatgctcttaaagtcatgtcttcttttttytaaggtgttgcattggactgaagcctcttcagaacactgaggatataccaattcattttagaagcctccaaggtgagcagtgaaagccatcaaagttaaagttagcatcatttaagacaaagtgaattaacagcaccactcagagtggagtgtgaatgtatttgtatgtctggcatagcctaaggtttatttatttatttatttattttttaccatggagagaggtcaagaggtcaagaggtcaaggtattttaagatgaccaaatctctttaagattcttcaggaaaaaaaaaaaaaaaagcagtac

SEQ ID NO: 198196 - DNA, 522 bp, Homo sapiens
gaataattcagtcaagcctgaaataaacaccgtgatcaagtgtggcttttattgtccaatttattcactcacttattcagtatttgttgtttgtcagcaccatataacccactatactaggtacttgccttatctaatcttttagtcataattaatcattattttatctaaacatttacctcatttttcctagaacacttttcataatttgggtctatcactgtaagttgtatataactgtgtcctcaagtagattgtggcatttgaaaaaaaatgtgttctcatcttgtgttccattcaagcaatgtcaagaatacaatagaggttctataaatggtgggtggatggatggatggatggatggatgaacagatggatggacagatggagacagacatgaataagaatttgtttctgtcytcagaatcttatagtctaataatgcagatcaaggacaagcatgcagttaatgagaaatattttccactattaaaaccatcatgttctctcttttcagtttat

SEQ ID NO: 198197 - DNA, 396 bp, Homo sapiens
gtcatcattaatccaacaacaaaacagaagtatgtctttgcctttacatgtaatgggattgacatcatttcctacgtttctattcagtagtctcatttgattgacatttccccaggagtgttaccatgttttcttctttccattcagtagttcagcacatctttattgactgttgcatgccatgacctttgatctggccaaccagatgaaagagatttcaaattttcaacggcattgtctacatggactcttgtttctccatgacttattttgagaaaaataagtgagacttttctttcttttgtatacattggagatgcatatctttgcatttcattggagcaaagtgattcagtaatacaaaaggtagtttktctgttaaactcaggggattgt

SEQ ID NO: 198198 - DNA, 490 bp, Homo sapiens
cctctttttcagcctttctgattttctttccatagcgtctctgaaattttttctgtgtcatgcaaactccgtttgggtgttttatgyctctgcaaaggccagagctggttttctacttaatattcaataagcatgtttgaagatcacctctttcaggaaaagcccatgaaactcaccactgctcagctgatgatgacttacttaagattcttgttgccctgcatttggattcttgatgtaagctagctgaagcaggactctgtgggccttattatcacacagtgccttaagcatagcattgtgatagatgtaaaaattacccactttccaaacctttagggatacttagaaaaaatgtatactgttactaataaatgtgtgttgtattataaatatggtgacagctgaaagtgggctttccaatgaaattaagatatattggaatttaaaattagtggtacacttaaactttactatattttttgttcaa

SEQ ID NO: 198199 - DNA, 494 bp, Homo sapiens
ttgtcttccattctggcaatcagtcatttatcattcctaaacctctagtaccccctttgcattaccttgcataaattgggtgatttctcaatttcctctttttcagcctttctgattttctttccatagcgtctctgaaattttttctgtgtcatgcaaactccgtttgggtgttttatgtctctgcaaaggccagagctggttttctacttaatattcaataagcatgtttgaagatcacctctttcaggaaaagcccatgaaactcaccactgctcagctgatgatgacttacttaagaytcttgttgccctgcatttggattcttgatgtaagctagctgaagcaggactctgtgggccttattatcacacagtgccttaagcatagcattgtgatagatgtaaaaattacccactttccaaacctttagggatacttagaaaaaatgtatactgttactaataaatgtgtgttgtattataaatatggtg

SEQ ID NO: 198200 - DNA, 628 bp, Homo sapiens
aatcacaacttactggagcagaaagccaccagcaacaacttcacaggaaccagtgccaggctaggaaaacctgaagtgtaattaatgaattgcgaattcatgagctggaggctccatgaggacaactctgagagataaaaaccataggggacccagccttcaggagcycccatgcacttttgttagttttaccttctgatgctccaccaggttctcagggtgagtatcagaggaaaaattctctaatgcttccagcagggggagaaaaaaaattttaaatcagcccgagcattctgttcttcctaaggaaggttgccctcaagtgaaactatttaaccagagcctaacctgctgaggcttcctcagagcctaactgacctggggaaaggaaaatacctaactcttgcctattctagccaacactgttccacctaaggtggggctgagaagcacatgtgaagatcacagtccaaaggcacaggttcagggaaacactaagacctaatcaatcataggattacagaatgcttccctccaccctgcactttaccaccaaattactaaagacttatttacagccatccctttcgcacgatatgtcatggcccacagtcaaaaaaatatttca

SEQ ID NO: 198201 - DNA, 552 bp, Homo sapiens
gatgttgtcactggggtgccagccaaagtttggaccacagcttcttattcgtggtccttaaaggcctgtcgtttgaagaagagttaataacatcagctttaattgtaaaggcaaatggtcacaaagtaaaataattattagatccktagcttcttaacattatttctttctggataatgttttcactaagaccatattattctaatataggtctgatttgtttttattgaacccttactttccaacctttactcctttacctcaatgagtcttttaattctaagaggaaacactccagaagcaacatgaattcagttaaaaagtactgagcctctgctacctctcagacagtgtaaggtatggcaggcaatgtcctcattcttgcggaagtgatggtctagtggggaagagtgaggccttaaacaaataaatgaacaagaaaaacttcacacagcgatgtgttcagctgagacacagaatacatgacatgttagaaaatgaacaaatggctgtttttatgaatggtcaaagaagccacctctagaaagttaa

SEQ ID NO: 198202 - DNA, 576 bp, Homo sapiens
cattcaagaaggaagcaattaatggaagaaaattatgagtgattaatgggagataattatgagactactcagaattattgaatattgactagagtaagaagaaaagtcaatgatattcttaataagacratgaaagtccaattgggagaggtgaggagagaatgagaggtgaccatgcacagtgagcaaagagagacaactcttaaggggtgaattcaaaggcaaccagaggagatctgtagacaaagataattttgttattatagtcacaatctttttattttggaataattttacatttatagaaaaactaaagagattgttcttggagattgtgttttaagacaggtaatttttaaagaagagggataaattgatgagcaaaagagataaatccagcagataataaattcttcgatgaagtgatccacaggggagacattcctgatacaaatagagaggtttttcactgactagaaatagacaaagaatggaaggcagaatacatgcagatgatggggagctggtagacttgataatagaaggatgagtagttccctattaattataaggaat

SEQ ID NO: 198203 - DNA, 576 bp, Homo sapiens
cattcaagaaggaagcaattaatggaagaaaattatgagtgattaatgggagataattatgagactactcagaattattgaatattgactagagtaagaagaaaagtcaatgatattcttaataagacaatgaaagtccaattgggagaggtgaggagagaatgagaggtgaccatgcacagtgagcaaagagagacaactcttaaggggtgaattcaaaggcaaccagaggagatctgtagacaaagataattttgytattatagtcacaatctttttattttggaataattttacatttatagaaaaactaaagagattgttcttggagattgtgttttaagacaggtaatttttaaagaagagggataaattgatgagcaaaagagataaatccagcagataataaattcttcgatgaagtgatccacaggggagacattcctgatacaaatagagaggtttttcactgactagaaatagacaaagaatggaaggcagaatacatgcagatgatggggagctggtagacttgataatagaaggatgagtagttccctattaattataaggaat

SEQ ID NO: 198204 - DNA, 518 bp, Homo sapiens
tattttgttgacggtggattgccactgcccaggatcagtgtgacagggcttaataggacacggtgatgagttcagatgtagggacagagagcaggaagggaaacagcttctgggtgagggagacttaggtggtacctgaggtaggatggagagtgacacatgatgggattgctgattgccagagtgtggaaacttcaaggctctgaatttgacctggaaagaacacagattcacctgaggctgaagagaaatcacttgactattctagactactactcccatccatctycattgcacttgtggtagccaggagtatgctgggtgggaggaactgcttacgccactgtcttcatattttagatggagttatcaccacaagaatgatatttctgcctcttatttcttctctatattttcagccttttcctctggaatagaaatactcacaggtccacatttctttacatagtaagataatccattaaatgactaaagaacggtggaattgttcttcttat

SEQ ID NO: 198205 - DNA, 525 bp, Homo sapiens
ttctacatctgcaaaatgggaataattgtagaagtaattgtagttaggaactagcaatcttctttgtgaagcattaagcacaatgtctggcatataggaagtgttataaacattaaattgtataatttttgttggatatatgaattattcatatataaggcctccttgtataccacttaaaaggtaaggttacattaaatatcagtaagatctcattatagctgacaaagtttccatatttatttctataatcatcctataatacatgaaattctaatrgttaataccagccatattgttactttatttattattgttggatatattatttctagaggaaaagaaattttacagactgagttaataatagcggtggacaactgttttgtaattggtaggacctctataataatatagaaacaaggctgataaggtggctgatgtgttgggctaccatatcagtaacttatattctgatcttgactttacattttttgtcttatcttaatgcacgttcataagtta

SEQ ID NO: 198206 - DNA, 617 bp, Homo sapiens
taatcagagtaatttaatgacattaggggagggagaaaaagtagatgaatgtgttcaayttctacctgctaatgtatgtttttaacaaacccatttataaactcattttaaaattactgatatttttcccaccaatcccggagaataacctctacaggaccatggaagttgacaatagtgtgatccactctatcatcactcaatgccaaacacatagcaaacacataaaggcttatttgttcaacaataaaaagtgaatgaattaagttgaaagagtatgtaatttgaaataaaagaattagagttcaagtcctaagtcttttggatactataattttaagcaaatattattattaggtgaaacttaatcttatacattaaacatgagatcactaacaagttttgtgttccaaaaaaaaattaagactgaaactgttgccatataaatgaattagggggaaaatcaaatgggaatcaggatgctttttaattaaataaaactttaataactaaacctgactcgtctacatataactcctgagtccagcatagcctgagttgagagaacaaaaatacagcaacagaaacccccatggcatcctgtttggataacagca

SEQ ID NO: 198207 - DNA, 611 bp, Homo sapiens
cttgcaaaaacatgtatgctactattgcttattttattgtgtaagttggcccatgaattgttctgtcatgttttatgtgttttttcttaaacaaatcccctttaaaaatgtttaaatagatatcttttaaataacttacttttcatgtgtgatggttaatactgagtgccaacttgattggattaaaggatgcaaagtcttgttctggggtgtgtctgtgaggatgttgccgaaggagattaacatttaagtcagtgaactgggagargccagacctaccctcaatctgggtgggcaccatctaatcagctgccagtgcacctaggataaaaagcaggcagaagaacataaaaggactagattttctgagtcttctggccttcatctttctcctgtgctggatgtgatcttgtgagtcaattctccttaataaactccctttcatatatacatatatactattacttctgtacctctagagaactctgactaatacattatgttttatttatttttctagaattacattgttgggattttgatctttcaagattttcacttttgggattttgacatttgaaattctgtctttgggatttatgattgattcc

SEQ ID NO: 198208 - DNA, 611 bp, Homo sapiens
cttgcaaaaacatgtatgctactattgcttattttattgtgtaagttggcccatgaattgttctgtcatgttttatgtgttttttcttaaacaaatcccctttaaaaatgtttaaatagatatcttttaaataacttacttttcatgtgtgatggttaatactgagtgccaacttgattggattaaaggatgcaaagtcttgttctggggtgtgtctgtgaggatgttgccgaaggagattaacatttaagtcagtgaactgggagaggccagacctaccctcaatcygggtgggcaccatctaatcagctgccagtgcacctaggataaaaagcaggcagaagaacataaaaggactagattttctgagtcttctggccttcatctttctcctgtgctggatgtgatcttgtgagtcaattctccttaataaactccctttcatatatacatatatactattacttctgtacctctagagaactctgactaatacattatgttttatttatttttctagaattacattgttgggattttgatctttcaagattttcacttttgggattttgacatttgaaattctgtctttgggatttatgattgattcc

SEQ ID NO: 198209 - DNA, 369 bp, Homo sapiens
gcctgttgggggtgagggagctaggggagggatagcattaggagaaatacctaaagttgatgacaggttgatgggtgcagcaaaccaccatggcacgtgtatacctatgtaacaaacctgcacgttctgcacacgtaccccagaacttaaagtataataaaactcagttgctaattttaattgctgtggattattactgtctaaaacaaaagtattagcaatgaatataacaacaatattgtgagtagaaaaggaattgggaatgtattgtgtaagatctttacagtacawtgtgaaacattaattttctattgttgtgtgatagtttactggtctaccttcaatttactaaatatatatattgtaaac

SEQ ID NO: 198210 - DNA, 446 bp, Homo sapiens
aaaacaccaaaagcaatggcaacagaagctaaaattgacaaatgggatctaattaaactaaagagcttctgcacagcaaaagaaactaccaaatattgttctttaaagaaattagtaaaatttataaatccccattcagacagaccaagaagttagattttattataagtgtaacaggagtctattgaaaagttgtaatgaggaaagtgaattaataatatttgcattttcaaatgatttattttttggctgctctgtgaaaaataaattrgatgtgggtaggagttaaaacctagaaattagtaaattagtaaagacagacaaacaaacaaagttatgtattatactagtgcagtggcagcaaagttctggagatttcatgcatagtgtgtagtagaaattaaaagacttgctcaggtactgggtgtggagagaaagacagagcc

SEQ ID NO: 198211 - DNA, 531 bp, Homo sapiens
tgacattcttattgattgtatagctatatgtgttaatagagtttcttacagtttctgattatattctggttgattcctcagaattttgcagaaatgcaataacatcatctgccaaatatattcttatttatatactgyatgcataattagactacttgttaataccagaatattttaaatacttaaaaaataatttgtgttttcgtgatgctgatattgtcgagattatgtttttaaagtttttatttaccagcaagttgttccttaaaaatgtcacaaactattgcaatattcaccctgattttaggtagagtgtctgtatgtctgcgtttgttttcattaatggatttataacagcaactctcttttttttagcacttactaagttatatacttttctcctttgcaaactgtaattctgctaaggggttaacatccgaaatacagaaggagctcatacaactgaatagcaaaaaatccaaataacccatataaaaatgagcaaaggacctgaagagacgtttttcaaaa

SEQ ID NO: 198212 - DNA, 531 bp, Homo sapiens
tgacattcttattgattgtatagctatatgtgttaatagagtttcttacagtttctgattatattctggttgattcctcagaattttgcagaaatgcaataacatcatctgccaaatatattcttatttatatactgtatgcataattagactacttgttaataccagaatattttaaatacttaaaaaataatttgtgttttcgtgatgctgatattgtcgagattatgtttttaaagtttttatttaccagcaagttgttccttaaaaatgtcacaaactattgcaatattcaccctgattttaggtagagtgtctgtatgtstgcgtttgttttcattaatggatttataacagcaactctcttttttttagcacttactaagttatatacttttctcctttgcaaactgtaattctgctaaggggttaacatccgaaatacagaaggagctcatacaactgaatagcaaaaaatccaaataacccatataaaaatgagcaaaggacctgaagagacgtttttcaaaa

SEQ ID NO: 198213 - DNA, 426 bp, Homo sapiens
aggtgacaaaaacaaaaataaatacatggaactayaccaaatttaaaagcttctgcacaatgaatgaaacaataagcacaatgtaaaggcaacctacagactggaaaaatatttgcaaaccatatatctgataaggggttaatatttaaaacatacgagtaacacatacaactcaatagcaaaagaagacagaactcaatttaaatatgggcaacagacttaaatagacatttatccaaagaagacacacagatggccaatacgtttatgaaaagctgctcaacaccaccaaccatcaggataatgcaaatcaaactacagtaagatatcacatgaatatcacatgtgataggttggttattattgaatataaaaaagataagtgttggtgaggatgtggagaaaagggaacccttgtgcactgtt

SEQ ID NO: 198214 - DNA, 598 bp, Homo sapiens
agtgtctcataattaagtagttcagcttttttaaatttccaaaaaaacattaacagaattccatctggaaacttaaaattatactcaaacatctctaaatttctcacagagaaaaataaacatcacaaaatgaaagcaggtcataaattattcaacacaatggaaagcatttatggtctaacaacaaagaaaaaggactgtgatttaacccctctgattacagattccaggcaactattacaatctctaaaggccaggaaatcctagggttcctttgcaagtaatttataagtcattgtgttctatttcaaactgcagcacaaatgaagagaaaaaagaaccttcagtaaaatgrcaataataaagtgacacacttttcaattaattttaggtatccaaggtaacctgatcatgactaaacggtaaaatttcaaatgaatcaccacagcaaaatgcagaatgttaaattacatgaaatgctttacaatattaagtagttatttagctaactctagaatttctaaaagaacatccaaaaatgtattataaaaataattttctatttccaaacgttttatataatgttacacgtttatat

SEQ ID NO: 198215 - DNA, 660 bp, Homo sapiens
gtagatgaatagattttttgaaaaaaatgagccaacaatccattacctttaagaaatacacttcacctgtagacatgcrtaaattaaaaataaaaggatggaaaaagtccatgcaaatggaagccaaaatacagtagcagaagacaaaatcgatttcaagacataaactgtttaaaaaaaaaagccgcaaagattatcatataataataaaggggccaattcagcaagataatttaaaaattttaagtatatatacacccaatactggagcactcaggtgtacaaagcaaatattattagagctaaaaagagaaatagaccccaatacagtaagagctggggacttcaacacaccactggcagcatcggacaaaacattcagacagaaaatcaacaatgaaacattagacttaatctgcaatataagccaaatggacctaatagatacttacagaaaatttcatccaacaactacagaatacacgtttttcttaacatatagatcattctcaaggatagaccatatgttaggctacaagtcataaaaaatccaaaaaattgaagttatatcaaatgtcttcttttaccacaatgcaataaaactacaaagaaaaataagaggattgttgaaaactatacaaacacatggaaattaaacaa

SEQ ID NO: 198216 - DNA, 660 bp, Homo sapiens
gtagatgaatagattttttgaaaaaaatgagccaacaatccattacctttaagaaatacacttcacctgtagacatgcataaattaaaaataaaaggatggaaaaagtccatgcaaatggaagccaaaatacagtagcagaagacaaaatcgatttcaagacataaactgtttaaaaaaaaaagccgcaaagattatcatataataataaaggggccaattcagcaagataatttaamaattttaagtatatatacacccaatactggagcactcaggtgtacaaagcaaatattattagagctaaaaagagaaatagaccccaatacagtaagagctggggacttcaacacaccactggcagcatcggacaaaacattcagacagaaaatcaacaatgaaacattagacttaatctgcaatataagccaaatggacctaatagatacttacagaaaatttcatccaacaactacagaatacacgtttttcttaacatatagatcattctcaaggatagaccatatgttaggctacaagtcataaaaaatccaaaaaattgaagttatatcaaatgtcttcttttaccacaatgcaataaaactacaaagaaaaataagaggattgttgaaaactatacaaacacatggaaattaaacaa

SEQ ID NO: 198217 - DNA, 660 bp, Homo sapiens
gtagatgaatagattttttgaaaaaaatgagccaacaatccattacctttaagaaatacacttcacctgtagacatgcataaattaaaaataaaaggatggaaaaagtccatgcaaatggaagccaaaatacagtagcagaagacaaaatcgatttcaagacataaactgtttaaaaaaaaaagccgcaaagattatcatataataataaaggggccaattcagcaagataatttaaaaattttaagtatatatacacccaatactggagcactcaggtgtacaaagcaaatattattagagctaaaaagagaaatagaccccaatacagtaagagctggggacttcaacacmccactggcagcatcggacaaaacattcagacagaaaatcaacaatgaaacattagacttaatctgcaatataagccaaatggacctaatagatacttacagaaaatttcatccaacaactacagaatacacgtttttcttaacatatagatcattctcaaggatagaccatatgttaggctacaagtcataaaaaatccaaaaaattgaagttatatcaaatgtcttcttttaccacaatgcaataaaactacaaagaaaaataagaggattgttgaaaactatacaaacacatggaaattaaacaa

SEQ ID NO: 198218 - DNA, 625 bp, Homo sapiens
tgggtagtatgaacattttaacaatattgattcttctattccaggatcatggcatatatttccatatttttgatcctcttcaattttttgcatcagtattttatagttttcaatgtaragatcttctctcctttggttaactcctagctattgcattttatgtgtagctattgacagtggggttactttcttgatttctttctcagattgtttcttgctggcatacagaaatgctactgattttttgtatgttcattttgcatcctgcaactttactgaatttatcagttctgataggttttttgcagtgtcttggggttttttcaaatataatatcatgtaatctgcaaacaagaataatttcacttcttccttttcaatttgaatgccctttatttctttctcttgtctaattgctctaggtaggacatctggtactattttgaataacagtggtgaatgtgagcatctttgtcttgttccagatcttagagaaaaggctttcaggttttcacatccagtatgatatagctgtgggtctattgtttacagctttttattgtgttgtggtatgttccagtttttgagggtttttatcatgaagggatgttgaattttatcaaat

SEQ ID NO: 198219 - DNA, 549 bp, Homo sapiens
ttaagtgaaataagtcaagaacacaacgactcatgtgggagctaaaataactgaatctcatggaagtagaaagtagtatggttatcagaggttgggaagagtaagggctagaagggatgaagaaaaattggtkaataggcaccagatacagttagattgaaggaatgagctttagtgttcaatggcacagtagggtgattgtatactatgcatacatactccatgtaatgtactataaatttttgtaatatttaactatatatttcaaaatagataagaaaatctggaatgttcccaacacaaacaagtgatacatgtttgatgtgatggatatcctaattaccctgatttgattattgcaagtcgtatgtatcaaaaatatttgtaccccgtaaatatatagaacaactattatgtatcaacaaactaccatttacattaaaaaaattcacaataaaatagaaaccaaaaatttagcttgggatttcaaatatttgaatatagacatctggatctaaatactaaagagttaaataccaaagggttaaa

SEQ ID NO: 198220 - DNA, 442 bp, Homo sapiens
aacaggtgaaaattgggttgttagaagaagattcctgttgaggagatgtattttgactagtgtgaaatatattcatattaaatatggtgattgggtaaattacaaaggcatatcctaaaattcaattcacttaaggtgagacttgttttgaattcataatcatttttacagctatgtctgctaaattaatggcattcattaaaaaaaatgtgaataaacccaagtttcttagaaaagatacccattacaggataatcttgttaatgtaaggaaaaaagtatgaaatcaccattttctacaccatctttcaaatacaaaatagaccataacttatacattactgtggtaatattttatttcttgccactaattgtgtgtttcgtcaatgtgggggaaggkttccctatgtaaacctaaatggctgaaggatttttctcagtaa

SEQ ID NO: 198221 - DNA, 507 bp, Homo sapiens
gttacttgacagatgtcaatcatagtcaagcagaactcattgtggaacattccatggaaagagaagcggaaaaattcttttaaataattaactttctttatggatattatgttttccagttgcatagtaccaaatcctaataagcccatccaaataggttgtttgtcctaaaactgtctcctgatgtttgacctaatagcaatgtaaatattatttgcatctgtgcatacagactttcactcaccttcattgctagttacaaagtatcctactctggcaaaaaaaaaaaaaaaattaaaaattaaaaaataatatcaagtttagattgcagctctaaatgtgtcagtttgtatgaaatagmactccaaggcatcttgatgagtcttcagtgggtgcttgttgataatctgcattgtgcttgttaatttgccatgtaggatgtctttgaacccaagagtcaaaattatattattatctattctccagttcaattttgcagacactgaa

SEQ ID NO: 198222 - DNA, 603 bp, Homo sapiens
tagatgactctaaatatatgggatttaccaggtcacattacctaagtagcagggatctttaagctacagtctagtcctgctgcaccactccttgtttgagccctactcaaaattagcagttttgggttgaagcagtgttctcctgtgagatgtgtgttaccgctaaaatctgaagacatttaataaatgatgtgcctcttagtgatatcagaaaaaattattccwcaaatgatagtgacaaagctttttttccttcttcaaattgtagaataacttggacaattatatataatggcttaaatcaaatatattttttatattttagtgataatataccacttacctatatatttccttgaccattataacaggaaaacaatatcaacagatagaacgtcttcgctttcatagtctaccttttcctttctgtagagaagccttaaagatacagtaaatgctcttggaactctcatcaaaccttaactgcagtaaaataattattcatttcttccccaagattcccattcatgcctggatagcttgtgtgtaaaggtgtcaaccaaccttcaccttcctactaaccacttaagagtgtaaagagct

SEQ ID NO: 198223 - DNA, 603 bp, Homo sapiens
tagatgactctaaatatatgggatttaccaggtcacattacctaagtagcagggatctttaagctacagtctagtcctgctgcaccactccttgtttgagccctactcaaaattagcagttttgggttgaagcagtgttctcctgtgagatgtgtgttaccgctaaaatctgaagacatttaataaatgatgtgcctcttagtgatatcagaaaaaattattcctcaaatgatagtgacaaagctttttttccttcttcaaatygtagaataacttggacaattatatataatggcttaaatcaaatatattttttatattttagtgataatataccacttacctatatatttccttgaccattataacaggaaaacaatatcaacagatagaacgtcttcgctttcatagtctaccttttcctttctgtagagaagccttaaagatacagtaaatgctcttggaactctcatcaaaccttaactgcagtaaaataattattcatttcttccccaagattcccattcatgcctggatagcttgtgtgtaaaggtgtcaaccaaccttcaccttcctactaaccacttaagagtgtaaagagct

SEQ ID NO: 198224 - DNA, 623 bp, Homo sapiens
cccaggcagcacagctcacagttccaggagataattcttccttctgcctgagaagaggagagagaagggtaataagaactttgtcttgcaacttgtataccagctcagccatagtaggatagggcaccaggcagaggtgggaggccttcattccaggtatttgctcccaggacacaaacctagactcactgtgggccagaagaaaacccactgccttgaaggggaggacccagacctggcagcattcatcacctgttgactaaagaacttatgaaccccgaatcatcagcagcggtaaccaggtatattcatgatgggccttgggtgggacactgagacttcctggcttcaggtgtgatccatgacattggcagctgaggtagagagagagatggaggtataaagtttgttcaagagataataacaagaaacttcccaaacttagagaaagataccaacattcaagtacgagawggttatagaacaccaagcaggttttaacaaaagaagactatcttaagacatttaaaactcaaactcccaaaggtcaaggataaggaaataattttaaaagcaaaaagagaaaagaagtcaataacatataatgaaagtccaatacatct

SEQ ID NO: 198225 - DNA, 505 bp, Homo sapiens
aatataatgtaattttaggttagttacatattattgctcatttcatgaaaatgaagaagaagtagtccctttatttttctttttcttttttttaagataggatctcactgtgtcatccaggctgcaacgcaatggtgcaatcataactcactgcaatctccaactcctgggctcaagagatcctcccaccttagcatcgcaagtagctaggactacaggtgtgcaccgcctgcccacctaatttttaaaaattttggtagagacggggtctcacatcaaacccaggctggtcttgaactcctggcctcaagcaatcctcccaccttggcctcccgaagtgctgggattacaggcatragccagcctgactagcgtgaaatatttccttttccactcacataataagctaccaagagaatgttatagttaaggtagttcattttccatttctaaccaattaatataatttatattccataaattcaattgcaatatatcatgtgat

SEQ ID NO: 198226 - DNA, 651 bp, Homo sapiens
aactccaatttttggccaggcgcagtggctcacacctgtaattccagccctttgggaggccaaggcgggccgatcatgaggtcaggagttcaagaccagcctcgccaacatagtgaaacctggtctctactaaaaatacaaaaaattagccaggcgtggtggtgggcacctgtaatcacagctacttgggaggctgaggcaagagaatcgcttgaacccaggaggtggaggttgccttgagccgagatcaggccattgcactccagccctggcaacagtgtgagactctgtctcaaaaaaaaaaaaaaaaaaaaaaggtccaatttttgttttatattatacttcaactggaacacaaraaaaagttatctaactacaatttcacatttaatattctattgagctgtgctccttatactggacttttacacaaaatagcattttcacaagccttagctatctaagagcatatgtaaatttttaaaatttttaatcaaagatttgcaccctcaattttctaaatttcataagaaaatagaataatgtcctttaattttttgtattcgaagttgtatcacctgtctgtgtcaggccctatgtcaaattgcaaaaagccttatgcttattaatttaataaccttttatctctat

SEQ ID NO: 198227 - DNA, 522 bp, Homo sapiens
atggttagtgatggggtagaggcccatatgctcatgagagatttgagaaatataaagtcattgtctttgtttaaaaggatggtgtgcaggtggtaaatactgagaggtgatctgacaagtgttcattcaaactctgcaaccttgattgagactgtgctagatataaaaatacatatgccctaacagggaggataggcaamcaaacaattaattttaaaattgtgaatttacaaactgtgggttattatatgctacagaagccacacagagaaagagttatttgctctgtttcagaaaatagaatagaggagatgtgggaaggcaagatagtccttatagaaaagtggtcgttttattacctgcaaccgttctgacccgcttgtcattctatgtcttcctatgtcagtcatgagctctatttgttctcatgtgcaaatcccagcctcactaggatgcactccagttatccattaagcacggagattcccatgagcaatgggacaaaatgactattggacttct

SEQ ID NO: 198228 - DNA, 522 bp, Homo sapiens
atggttagtgatggggtagaggcccatatgctcatgagagatttgagaaatataaagtcattgtctttgtttaaaaggatggtgtgcaggtggtaaatactgagaggtgatctgacaagtgttcattcaaactctgcaaccttgattgagactgtgctagatataaaaatacatatgccctaacagggaggataggcaaacaaacaattaattttaaaattgtgaatttacaaactgtgggttattatatgctacagaagccacacagagaaagagttatttgctctgtttcagaaaatagaatagaggagatgtgggaaggcaagatagtccttatagaaaagtggtcgttttattacctgcaaccgttctgacccgcttgtcattctatgtcttcctaygtcagtcatgagctctatttgttctcatgtgcaaatcccagcctcactaggatgcactccagttatccattaagcacggagattcccatgagcaatgggacaaaatgactattggacttct

SEQ ID NO: 198229 - DNA, 564 bp, Homo sapiens
acttcttttatgtgctaattgaatgaagacgctgtgtttttgttgttgcttttctgtgtctgtgtgtttgcttttttttttttttttatactttaagttctagggtacatgtgcacaacgtgcaggtttgttacatatgtatacatgtgccatgttggtgtgctgcacccattaactcatcatttacattaggtatatctcctaatgctttccctcccccctcatcccaccccaggacagaacccggtgtgtgatgtaacccttccttttaactgtgtggagargttctccggagtattactgtttcccaccgtgtagtggatacatcctatttgaagtgctgcataatgtttactattactttatcttccgtccaaagctttctgctgcctctgggctgtcagatccaactgcccatttgttggtctgctcttgcaagttactgaagagtctcaacattagtgtgtcaaaaactgaaatcagagtcattatctgtaaaccttgctcatatatttatatctaaattgaaatataggtgcatatacatacatgcatgtgttatac

SEQ ID NO: 198230 - DNA, 609 bp, Homo sapiens
taatctccagaaactcatttcttttaatacttaaatgaaacaattaacactcattttaaaaaaaccttattggcttgtaaattcttatctattaaaaagatgatctgatattttacacatcagtatcatgagaaaaaaagaataaatattttatatctatttttaagtccataatttagacatgtgatactaatatacaagctgcaactagtttttccacagaataaaaagaaaatcaacacatacttcttgattgacctgaagaaaaagagagtttttattaaagtattttatcaaaatattattgctgttaagtctttgctacagtattaaaaccatgcttcttaaaactctagggaaatataatgcagaagggctttagtatatttcatagcagaagctgagtttgtctttagagttgtagctacagttgttatttgcatagtatgttctggtttgaggttttccrtttttacttctaatattttatcctttgtttgctgtaggtcagcttgatttctaggcagttgctctgattttctggtatttaacagatataaaatgtcttgttatctcttcaaattcatgaattccaacatttgtctacat

SEQ ID NO: 198231 - DNA, 488 bp, Homo sapiens
ttgtttgagcatctttattacgtaaaatacatttcacttggcatagtagtcagataacagaagtttggsagatataaacactatccctaaggaacatactcatctggaggaaaaagaaacatacataaataaatttagttctgtaaaaagcagaaattagtaaatgccaaaatggaggtattgataaaatgtgtgagagtctggagaaaggacagatagatcccagctgaaagaaaaaagaacagatatatgagagccatggtatttcagcctagccccaaagaatggtgatatttgcacaaatgtaattgcagagaagggaaccaaggtggaggtaacaatgtcaccaacagcaaagacaaagctaatcatggaaaagagaagagaactacatccttagagtacattgtggcaaatgtttcacattcaccgttagcttgaaataatagcttcaattctagttccctcagcaacataaagaggaattc

SEQ ID NO: 198232 - DNA, 488 bp, Homo sapiens
ttgtttgagcatctttattacgtaaaatacatttcacttggcatagtagtcagataacagaagtttgggagatataaacactatccctaaggaacataytcatctggaggaaaaagaaacatacataaataaatttagttctgtaaaaagcagaaattagtaaatgccaaaatggaggtattgataaaatgtgtgagagtctggagaaaggacagatagatcccagctgaaagaaaaaagaacagatatatgagagccatggtatttcagcctagccccaaagaatggtgatatttgcacaaatgtaattgcagagaagggaaccaaggtggaggtaacaatgtcaccaacagcaaagacaaagctaatcatggaaaagagaagagaactacatccttagagtacattgtggcaaatgtttcacattcaccgttagcttgaaataatagcttcaattctagttccctcagcaacataaagaggaattc

SEQ ID NO: 198233 - DNA, 488 bp, Homo sapiens
ttgtttgagcatctttattacgtaaaatacatttcacttggcatagtagtcagataacagaagtttgggagatataaacactatccctaaggaacatactcatctggaggaaaaagaaacatacataaataaatttagttctgtaaaaagcagaaattagtaaatgccaaaatggaggtattgataaaatgtgtgagagtctggagaaaggacagatagatcccagctgaaagaaaaaagaacagatatatgagagccatggtatttcagcctagccccaaagaatggtgatatttgcacaaatgtaattgcagagaagggaaccaaggtggaggtaacaatgtcaccaacagcaaagacaaagctaatcatggaaaagagaagagaactacatccttagagtacattgtggcaaatgtttcacattcaccrttagcttgaaataatagcttcaattctagttccctcagcaacataaagaggaattc

SEQ ID NO: 198234 - DNA, 520 bp, Homo sapiens
atgaataacaggcaggcttggagagtagccaggagtgacaagaatggctagaagcgtggataacacatagttaactccattcttaaaacaaaatgctttccataactcactaaatgtgtggtgacataataaaaagctagttttgttgtgctttcaatattgttcaagttagaaccaaataaggatttattttaaggcaaaggcaaccatgtgtaaccacttcaatttttcctgaaatcaatactgcataatttctgcattttaacaaattcttaaggatgctcaaaagtaaatgcagaataaaacatcaagttaaaatatgtgtggttgcataagaaayttatggaaatttttatactattcttcaaaacaaacaccctacaaatgcgtcctgtagtatatttttcaatagatgttaatctgaatgtggtagacacatatcaaagggaaattttagtataaaacaaacaaacaaaaaatgccactaaattttttcttctctttttttgcctaatgtgta

SEQ ID NO: 198235 - DNA, 617 bp, Homo sapiens
ttcattaaaaaacagattttcaatgtagatgaacagccttctactggtagatgccacatgagacattcatagctatagaggagaaatcaatgcctggctttgaagcttcaaaggacaggttgagtttcttgtcagggactagtacagttggtgactttaagctgaagccactgatcttttaccattctgaaaatcctgaagccccacagaagtatgctatgtctactctacctgctccctaccaatgaaacaacaaaccctggatgacagcaaatgtttacagcatgatttgctgaatatcttaagcccgctgttgacaattactgctcagtaaaaaagattmttttcaaaatattactgatcattgacaatctacctggtcatccaagagctctgaaaaagatgtgcaaagagattaatgtttacattcctggtaacacagcatccattctgcagccaatggatcaaggagtaatctaaactttcaagtcttatgatcgaagaaatacatcttgtaaggctatagctgccatagatagtgatttctctgatgaatctgggcaaagtaattgaaaacttggaaagaattcaccattctagatgccattaaagacatt

SEQ ID NO: 198236 - DNA, 627 bp, Homo sapiens
atacctgcatttaaagatcaaaaattcaagtagctacccaaactgatcatagcaatataaccacagcctatgggcttagaaaagtatagaagggcagaaaatggtcaataatatgtgacaactgtattattagttttttctttttgtctcttctactcacataccaagagactgactaactgggtaaatttattggttttctcttaataccatgttactgatggccttatatgactgcagttaatactaagaatgcatagtccatcacttgcaaatttatttcagttgcttagagaaactacttgactactaacrttagttttattgaaattggaatgtttctgtaataggtaatcagaagtctgtactaatatgaattcatgatatctaaataaggtaatataaagccaagtttattaaaaaagcaaatgtttgatataatcgtttactactaattaggttttcctgccctgaaatataataaatgattgcattttaagaatatccagtaaatgcacaaaaattaaaatgtgtcagcaaagagtatttatgaaatcctgttagtgcagaattgcaagcatttcaaatttgtcaaatttaataaagaagacaacagaaacattacag

SEQ ID NO: 198237 - DNA, 543 bp, Homo sapiens
gattttccctaacatttcaccctataacaaatatgtcatttatcctaatttatttaaataggaaatcgtctgaaatcatatatacatagtcattattttctaatacakatattttcttcatctagatgtttgaaattacatattaaacaatggtttcttgccctcaattaatttttaaaggaaggcatgaatgccgtagccctattgatgggtgttacttttggctttttcatgttcacctgtatgaccctggaaaattgttttgcctccctgtgcccctgtttcttcaatcaagtaatctctagataagaaaagtacctcagtcatagggtttttatgaaatttaaatgagataaaagtgtgtgaggcacatggaatagtggccagcacagtgtttgtcaaaatagaactgatattagtattagcattacttaatagtacacttaaatttcatttgttaccaacggaacacaaatattcaataaacacacataaacatagattatagttttagaaataaagcttcataaactagaaggagca

SEQ ID NO: 198238 - DNA, 532 bp, Homo sapiens
aattaaggcactgaaatgtcaagtgatttatctaagaaaaacaatgttaagcctcctactcgagggcactgatttttccagagtagtggagacagccagggctgtggagcaagctgaatgatgtgcctaagacacaatgtctctgatctttgcacagagagaatgatctttcataaaaaatatgcattttatgtcaacaagaaaataatttctgatgaaaataatatttgatgggctactttaaaaaacattttattcacttcttgcctatttttaggttcttttatatttatattaagataaaataatctgtgagagttcgtcttatcaatgccactggaaaacagacattcagcagaaagacaataggtatgtattacaactaaagaaactatagttaaattmtctgtaaatatcagtgaaagtgattactattaaaacgtatacaaaaagctatttctttttcttaaaagatgcaacatataaatacccattttcagaatggcttacatttaaatagttggcaggatag

SEQ ID NO: 198239 - DNA, 602 bp, Homo sapiens
taaattagggtttctgaaagtgaaatccttctatcatagaacatgcactttttcagtttcttaaatatcctacattgcttttcagaaatgtaattaatacttctattaaaatgtgttaatatttctatttctcatgtatttctgcaaattttaaagatattgtaataattgcacactcttcccagcctctgtatctatcattctattctctatttccatgagatctagtttttaatgttcttatataagctatcatgtggtttttgtcattctgtgcctgagttatttcacttaatatattgaattccagttccatgcatgttgctgcaaatgacaagatttcctttttttaaaatgactgaattatctttgaacttcctgtatctacaggtaactatatttcttgcaagacttggaaatttttcaactattgttttgttaaataggttttctatgtctttgcccatctctcctccttctggaccatacaaaatrtaacgatttaatccttttgttttgagacagagtctcactctgtcacccaggctggagtgcaggggtgtgatcttggtccactgtgacctctgcctcccaggttccca

SEQ ID NO: 198240 - DNA, 404 bp, Homo sapiens
ggtggcaggcccctgtagtcacagctagttgggacgctgaggcaggagaagggcgtgaacccatgaggcggagctcgcagtgagcctagatcgcaccacygcactccaggctgggccacagtgccagactccgcctcaaaaaacaaacaaacaaaaaacaaaaacaaaaacaaacaaaaaatttatgttttggttttctctatagcacaagattatttattaatatatgattacagttcggaataagtctagtctaacagccctctccttcagcaaaacctgctgcctttccccaccttccttgatacatagaatctacatccctttgttactaattatttattgtgttacattaaaagcaggtaatctgtgatagaaagaagtctccaaattctctgctctca

SEQ ID NO: 198241 - DNA, 404 bp, Homo sapiens
ggtggcaggcccctgtagtcacagctagttgggacgctgaggcaggagaagggcgtgaacccatgaggcggagctcgcagtgagcctagatcgcaccactgcactccaggctgggccacagtgccagactccgcctcaaaaaacaaacaaacaaaaaacaaaaacaaaaacaaacaaaaaatttatgttttggttttctctatagcacaagattatttattaatatatgattacagttcggaataagtctagtctaasagccctctccttcagcaaaacctgctgcctttccccaccttccttgatacatagaatctacatccctttgttactaattatttattgtgttacattaaaagcaggtaatctgtgatagaaagaagtctccaaattctctgctctca

SEQ ID NO: 198242 - DNA, 350 bp, Homo sapiens
taagttttctttactgactgattagctctgtggcactaggtcgttccttaccactggactttcattaactcacctatccaatgggagataaagttcttaggtcatagggctctgctgaggtttttatatgtatatatgtgtgtgtaggtgtgtatgtatctacatacacatataacstaaaaaaatcaggtatgtttattagttattttattaaaactattaaaatatagaattggcttgctgaattcatggacccaccagttacactgagacatcttttaggtatactcaacttgttcctagtgtgtgactctgtttcctgatgtgcctttgatggtcatatttaattg

SEQ ID NO: 198243 - DNA, 350 bp, Homo sapiens
taagttttctttactgactgattagctctgtggcactaggtcgttccttaccactggactttcattaactcacctatccaatgggagataaagttcttaggtcatagggctctgctgaggtttttatatgtatatatgtgtgtgtaggtgtgtatgtatctacatacacatataacctaaaaaaatcaggtatgtttattagttattttattaaaactattaaaatatagaattggcttgctraattcatggacccaccagttacactgagacatcttttaggtatactcaacttgttcctagtgtgtgactctgtttcctgatgtgcctttgatggtcatatttaattg

SEQ ID NO: 198244 - DNA, 513 bp, Homo sapiens
ttcagttaattataagttcaacccttaaaaaataaattttctgtgtttcctaagtatgcttttccttttaatgtgattaattaatggttaatttamtatgattcattgatgtactttggagtgtggttattacatccttcaaaaatactgtttgcttatattttctagtttaaaaattcactataatccaaacaaaaaagaaagatctagttatgatatagatcagcattcaaatacttcgtatttatatttatggcttttgcttttaatctcctttctgtgaaattagcaggctgtgatttataacaattgaagaccagtgaagtgtactggaaagaactaaagccttggaaccaaatgaactcaaatggcgctctaccacaaaacaatatactgacaatttcatgatccttgatactccatctacaaaatggaaataccattacttaccttctagagttgttgagataattaaatgatatatttgtaatgcatatattaataagtatatga

SEQ ID NO: 198245 - DNA, 508 bp, Homo sapiens
agaaagatgtgattattcaacacacatgtaaggaagaagtgacagctggttagagaaaataaatttgattagcaattggccaaatctagactagcagtagactaccacaatatattatgagatcttatcacatgatatttgatacttgaataaatattaaaagaaagcaacatatttttaaaaatacataatagtgaatttttagtaaagtatgctaatggaaagaagacaaacattttatattctagggcagatgtcgccaacccccaggccacagaccactatccatctgtggcctgttaggaaccgggacacacagaaggaggtgagctgtgagcaaatgagcaaagcttcatctgtgtttacagccactcccmattgttcccattaccacccaagctacatcttctgtcagatcagtggtggcattagactctcataggactgcagacactattatgaactgtgcatgtgagggatctaggttgcatactccttatgagaattc

SEQ ID NO: 198246 - DNA, 508 bp, Homo sapiens
agaaagatgtgattattcaacacacatgtaaggaagaagtgacagctggttagagaaaataaatttgattagcaattggccaaatctagactagcagtagactaccacaatatattatgagatcttatcacatgatatttgatacttgaataaatattaaaagaaagcaacatatttttaaaaatacataatagtgaatttttagtaaagtatgctaatggaaagaagacaaacattttatattctagggcagatgtcgccaacccccaggccacagaccactatccatctgtggcctgttaggaaccgggacacacagaaggaggtgagctgtgagcaaatgagcaaagcttcatctgtgtttacagccactcccaattgttcccattaccacccaagctacatcttctgtcagatcagtggyggcattagactctcataggactgcagacactattatgaactgtgcatgtgagggatctaggttgcatactccttatgagaattc

SEQ ID NO: 198247 - DNA, 368 bp, Homo sapiens
tatgcatgattctggggtgctacaaagggtatagagtatggagttagaacattacacgtcaacaagaatatgggttttgaacccagacctcagtttgaatctgagttccagcactgccccgttgcttggccgtgagttacttcacctccwttagcctctgtctcccctccactacaataacacctgcctggtggggagtgaggatattgtgcgaatcagaagtaataacaggtcgttggcacctaagagactctcagtaaccagcagtcatcaccaccgtcgtcgtctttttttttggccattacagttgggattagactaaccctccctaagcagctattgagcctcacactccctggacaaagaca

SEQ ID NO: 198248 - DNA, 368 bp, Homo sapiens
tatgcatgattctggggtgctacaaagggtatagagtatggagttagaacattacacgtcaacaagaatatgggttttgaacccagacctcagtttgaatctgagttccagcactgccccgttgcttggccgtgagttacttcacctcctttagcctctgtctcccctccactacaataacacctgcctggtggggagtgaggatattgtgcgaatcagaagtaataacaggtcgttggcacctaagagactctcagtaaccagcagtcatcaccaccgtcgtcgtctttttttttggccattacagttgggattagactaaccctccctaagcagctattragcctcacactccctggacaaagaca

SEQ ID NO: 198249 - DNA, 493 bp, Homo sapiens
aaagacaggcatgaaagatagaggaaaagagctctctgcctatatttgttatggttgaaaattcagatgtttctcctctgtttccacttaggctgagttacaaggtaatttgctcaggaagacgaatataatggtggtggggggttagggcagggggaggtccgctcagggtttccaccaagggtgcaggtttaacagaagccagaatgggaggatcatgtacatagactacagtgagaatggtaccccagttcctccctccagcaacatcagcctgcaccagtctgagacagggcacggtggggaatgaggggccargatgggctttcatcgttaacacacatccatcagagcacaattcttcttggagcaaaagatacagcacagtagaaaaagcccaatcagccacattctaatccccttctcacccacggagctgtgtgatcctggcaaatcatgtgtcctctcagagcttcttccttcaaacatagac

SEQ ID NO: 198250 - DNA, 449 bp, Homo sapiens
tactcaggaaaaagaattgattgattttgaagttaaatgttggcatytgctgttattcaaaacctggaccttggcgacagtcatccaccatgctttcagcattgccaccagtgtgcagcaaatgaagacaagctgttgtcaaatgagaaatgcaaaatagtcaatctgtttgtctgtttaatgtaactgggaacataagctgctaaaagtggtaccattcggcactgtcagatgggagacactctccaacaaacaaaagcctaatgacccattttactcggcactccggagttgcttctgacggtaccttccatatgcacccaaacatgcttttatctgaaactgcaaatggcacgattttccatccaacacaagcgtgtaatctgtgtgtgtgtgtgaatgtgtgtgtgttgggagagagggggtgggaggcgtccccactcccagca

SEQ ID NO: 198251 - DNA, 613 bp, Homo sapiens
ggaggtccaggaaggctaagtaattgagtcgaaaacacctaggtagtaagcagcagagtccagatgcaaagttctgtgcagggcacccaccacctctacagaaaggggaggaggcacaggcgacagtcagaygggcactcctggaaaggtaataatgaaggaaaggtgaagggggactgtatttgttttctgcagtttctattacaaatggccacaaacttggtggcttaaaacaacacaaatctattctcttacagttctggaggccagaagtccttaagcaaggtgtcagcaggatcatgctccttctgaagggtctaggggagtatctgctcttgcctctttgagcttctggtggtttctggcaatcattggtgctctgtggcttatagacacgtgctccaatctctgcctccatcttcacctggcattctcccctgttccttcttctctccccttctcttataaagactgtttttcttggaattagagcctaacccaatccgggatggtctcaacttgagacccttaatttcattatctctgccaagactctttttacaaataaggtcactttcacaggttctgggcaacatgtcttttcttggggtgg

SEQ ID NO: 198252 - DNA, 613 bp, Homo sapiens
ggaggtccaggaaggctaagtaattgagtcgaaaacacctaggtagtaagcagcagagtccagatgcaaagttctgtgcagggcacccaccacctctacagaaaggggaggaggcacaggcgacagtcagacgkgcactcctggaaaggtaataatgaaggaaaggtgaagggggactgtatttgttttctgcagtttctattacaaatggccacaaacttggtggcttaaaacaacacaaatctattctcttacagttctggaggccagaagtccttaagcaaggtgtcagcaggatcatgctccttctgaagggtctaggggagtatctgctcttgcctctttgagcttctggtggtttctggcaatcattggtgctctgtggcttatagacacgtgctccaatctctgcctccatcttcacctggcattctcccctgttccttcttctctccccttctcttataaagactgtttttcttggaattagagcctaacccaatccgggatggtctcaacttgagacccttaatttcattatctctgccaagactctttttacaaataaggtcactttcacaggttctgggcaacatgtcttttcttggggtgg

SEQ ID NO: 198253 - DNA, 491 bp, Homo sapiens
cttttacgtctaagtttgtgatmcctctcaaattaatttttgtgtgtgctgttaggaagagtttcattttttccctcttcatttattgttcccacttcacttgttcagcactttcctagctgaatagccttggtacctttgtgaaaaaacagttggccatatttagaaaccacagacttgtccatctatatagttttgccctctccagaatgtcatataaatggactcatacagtatatagccttttgggtctggttactttcacttagcaaaatatatttgagattcagtcacattgttgcatatatcagtagttaattcctttttactgctgaataatgtcccattgtatggctgtaaaattttatccaaatacttgctgatgggcctttggattgcttttagttttggcaattatgagtagagatgctttaaacatccatggaaaggtttttgtgtgatcataaattttcatttctcttgggtaaata

SEQ ID NO: 198254 - DNA, 465 bp, Homo sapiens
agttttagcttttacgtctaagtttgtgatccctctcaaattaatttttgtgtgtgctgttaggaagagtttcattttttccctcttcatttattgttcccacttcacttgttcagcamtttcctagctgaatagccttggtacctttgtgaaaaaacagttggccatatttagaaaccacagacttgtccatctatatagttttgccctctccagaatgtcatataaatggactcatacagtatatagccttttgggtctggttactttcacttagcaaaatatatttgagattcagtcacattgttgcatatatcagtagttaattcctttttactgctgaataatgtcccattgtatggctgtaaaattttatccaaatacttgctgatgggcctttggattgcttttagttttggcaattatgagtagagatgctttaaacatccatggaaaggtttttgt

SEQ ID NO: 198255 - DNA, 589 bp, Homo sapiens
tagccatagggtttcagttttgaaagaggttctactgctagtaaaatgctatcaagcagcattgcatgctacagagaaacctttttgaagaaagagtcaaccaatgtagcaaacttctttgttgccttattttaagaaactggcactgactgcccagccttcagctgctaccaccctcatcagtcagcagtcatcaacaaacattgagttaggaccttccaccattaaagatgatgacttcctgaagggccagatgatggttagcatttttttttttagcagtaaagtattttaattttatttatttatttttgagacagagtcctgctctctcgcccaggctggagtgcagtggcgtgatctcgactcactgcaatctctgcttcctgggttcaagcgattctcctgcctcagcctcccatagtagctgggattayagatgtgcgccaccacatctggctatgttttgtatttttagtagagatggggttttgccatgttggccaggcttgtctcagattcctgggctcaagtgatccatccgccttggcctcccaaagtactgggattacaggcgtgagccactgtg

SEQ ID NO: 198256 - DNA, 483 bp, Homo sapiens
ccttacgacacacacacacacacacacacacacacactctcactcactcagataactaagtgtggtgatggacgtgttaattaacttggttgtggtaatcatttcatagtgtatatggatatcaagtaatgaagttttgcaccttgaatgtatataatcttttttggcaattatacttctgtaaagctggacggaaactacaacaacaaaaaacctaagttagagtgtgtcattcctttgctctaaaccttgtaaggtcctgtgctttacttagaagccaaaatggtatcaatggcttgcttatttttcattkcttctttggcctcacctcccactactctcccctccttccctatgtttgggccactctagcttcttgccatttcttgaatatgccaagcatgcttttgccttagatgcctttgtactgaccattccttctacccagaaagctttttacctagtgtatctgtatagctctct

SEQ ID NO: 198257 - DNA, 483 bp, Homo sapiens
ccttacgacacacacacacacacacacacacacacactctcactcactcagataactaagtgtggtgatggacgtgttaattaacttggttgtggtaatcatttcatagtgtatatggatatcaagtaatgaagttttgcaccttgaatgtatataatcttttttggcaattatacttctgtaaagctggacggaaactacaacaacaaaaaacctaagttagagtgtgtcattcctttgctctaaaccttgtaaggtcctgtgctttacttagaagccaaaatggtatcaatggcttgcttatttttcattgcttctttggcctcacctcccactactctcccctccttccctatgtttgggccactctagcttcttgccatttcttgaatatgcmaagcatgcttttgccttagatgcctttgtactgaccattccttctacccagaaagctttttacctagtgtatctgtatagctctct

SEQ ID NO: 198258 - DNA, 536 bp, Homo sapiens
tggcggctttgtggaatagaaaggcgggaaaggtggggaaaagattgagaaatcggatggttgccgtgtctgtgtagaaagaagtagacatgggagacttttcattttgttctgcactaagaaaaattcctctgccttgggatcctgttgatctgtgaccttacccccaaccctgtgctctctgaaacatgtgctgtgtccactcagggttaaatggattaagggcggtgcaagatgtgctttgttaaacagatgcttgaaggcagcatgctcgttaagagtcatcaccaatccctaatctcaagtaatcagggacacaaacactgcggaaggccgcagggtcctctgcctaggaaaaccagagacctttgttcacttgtttatctgctgaccttccctccactattgtcccatgaccctgccaaatccccctctgtgagaaacacccaagamttatcaataaaaaaataagttgaaaaaaaaaaaaaaaaaaaaaaaagaatggactttcccaggccagctgtggtggctcacga

SEQ ID NO: 198259 - DNA, 402 bp, Homo sapiens
aaaaaaaaaaaaaaagaatggactttcccaggccagctgtggtggctcacgactgtaatcccagcactgtggcaggccaaggcgggcrgatcacctgagatcaggagttcaggaccagcctgaccaacacggaaaaaccccgtctttactaaagataaaaaaaaattagctgggcgtggtggtgcatgcctgtagtcccagctacttgggaggctgaggcaggggaattgcttgaacccaggaggcggaggttgttgtgagctgaaattgcgccattgcactccagcctgggcaacaagagggaaactccatcaaaaaaaaaaaaaaaaaaggactttctcaaaaaaaatgtatttaaatgtctgcaccaataattccagcatgtgtatgaataaatatgat

SEQ ID NO: 198260 - DNA, 402 bp, Homo sapiens
aaaaaaaaaaaaaaagaatggactttcccaggccagctgtggtggctcacgactgtaatcccagcactgtggcaggccaaggcgggcggatcacctgagatcaggagttcargaccagcctgaccaacacggaaaaaccccgtctttactaaagataaaaaaaaattagctgggcgtggtggtgcatgcctgtagtcccagctacttgggaggctgaggcaggggaattgcttgaacccaggaggcggaggttgttgtgagctgaaattgcgccattgcactccagcctgggcaacaagagggaaactccatcaaaaaaaaaaaaaaaaaaggactttctcaaaaaaaatgtatttaaatgtctgcaccaataattccagcatgtgtatgaataaatatgat

SEQ ID NO: 198261 - DNA, 402 bp, Homo sapiens
aaaaaaaaaaaaaaagaatggactttcccaggccagctgtggtggctcacgactgtaatcccagcactgtggcaggccaaggcgggcggatcacctgagatcaggagttcaggaccagcctgaccaacacggaaaaaccccgtctytactaaagataaaaaaaaattagctgggcgtggtggtgcatgcctgtagtcccagctacttgggaggctgaggcaggggaattgcttgaacccaggaggcggaggttgttgtgagctgaaattgcgccattgcactccagcctgggcaacaagagggaaactccatcaaaaaaaaaaaaaaaaaaggactttctcaaaaaaaatgtatttaaatgtctgcaccaataattccagcatgtgtatgaataaatatgat

SEQ ID NO: 198262 - DNA, 402 bp, Homo sapiens
aaaaaaaaaaaaaaagaatggactttcccaggccagctgtggtggctcacgactgtaatcccagcactgtggcaggccaaggcgggcggatcacctgagatcaggagttcaggaccagcctgaccaacacggaaaaaccccgtctttactaaagataaaaaaaaattagctgggcgtggtggtgcatgcctgtagtcccagctacttgggaggctgaggcaggggaattgcttgaacccaggaggcggaggttgttgtgagctgaaattgcrccattgcactccagcctgggcaacaagagggaaactccatcaaaaaaaaaaaaaaaaaaggactttctcaaaaaaaatgtatttaaatgtctgcaccaataattccagcatgtgtatgaataaatatgat

SEQ ID NO: 198263 - DNA, 434 bp, Homo sapiens
gctgtgcattggaaggtagagacgctcttgtaattattccttctccacccaccaccagcacccccaacaccatcacactggcctcaagtgggtacactgctcactgtttaacatcctgccgtagcatgggcatgcagtctttctcacaatgccccaggacagggctgcaacatttagataagactttagtaaaggcttttggacaaccacagggacacacacacagagaatcaggtatgcagattacaacttgaattactggaatggtagatcacattccatatgagtttttggcctatgctctatgatatggtttggatgtgtccccacccaaatctcatcttgaattgtagctcccatatgttgtggcagggacccagtgggagataattgaatcytgggggcagtttgtattttcatggtggtgaataagt

SEQ ID NO: 198264 - DNA, 447 bp, Homo sapiens
tcaaatacacagagataaagaaggaaacagtggttaccattggtgggagagggagagaggaaatgaggaagatgtaggtcaaaagatgtacaatagcagataggtaggatgaacaaatctaaagatctaatgtacaacatgaagactaaataaaattgaattgtgttaaggatatttgttaagtagattttatctgctgttgtcacatcaaaaaacaagttatgtgagatgatagatatactaatctgcttcactctagaaccattatatttcctacratgtatctatatgtactccataacattatgttgtaaacctcaaatatatacaataaaatacatttaaaaaaaaaaataggccaggcgcggtggctcatgcctgtaatcccagcactttgggaggccgaggcgggcggatcacgaggccaggagatcgagaccacggtta

SEQ ID NO: 198265 - DNA, 595 bp, Homo sapiens
attcaacgtacaaattcagtggcatttctataacctcacaatgaactatttgtaaaaagaaatgcagaaaacaatccccaaccttatacacaaatgctaccaaaaaaaaaaaaacaaaaaagaataagtttaaccaaggagctgaaagacctgtatgctgaaaattataaggcattgactaaataaattaaagaggacacaaataaatggaaagatacaccacattcatgaattgaaataattaatattcttaaagtgtccatcctacctaaagcaatgcctatcaaaattctagtgacattatttcacataaatagaaaaaatcaatcttaaactttccatgaaaacaaaaaacaacccaagtgaccaaaacaatcttgaataaaaagaacaaagctggaagcctttcactacctgacttcaaaatatactattatacaaacctattattgccaaaatatcaaggtactgtcataaaaacagacacatagatcaacgaaacaaattacagatcacagagataaatccytacatttatggttaattgttttttttaaaaagtttccaggaatacataatggggaaaaaaagagcc

SEQ ID NO: 198266 - DNA, 590 bp, Homo sapiens
ttataatgaacagaaatttacttctcacaattctggaggctgggaaatccaagatcaggtgccagcacctggctagggccttcttgctgtgtcataacatggcagaaaacatcacgtggcagaagggcaaaggtgagggcagagaaaaggggaccaaacttgcccttttatrtcaatctcacttctgtgatagtggcattaatgcattcataagggcacagcctcttaataccgttacaatggcaatgaaatttcaagatgagttttggaggagcaaacatttaaaccatagcagtcatgctccttctgtaggctcataggggagtaatatgttcattgactcttcctacttgtctcactgttggcattccttggcttgtggctacatcactctgtgctccaacttcacattgccttctctctgtttatgtgtatgtcttttcttctgtatgtatattttataaagatacatgtgattgcatttagaacccactcaaataatccaagagaggctcctcttccccagatctttaacctaagcatgtcttttgtcatttaaggcaataatcacacttttccatgtaattttc

SEQ ID NO: 198267 - DNA, 403 bp, Homo sapiens
ctttctcttgatttctctcagttcatccagtcattcattcaagttctatttattgagcacctactatgtgctggcactcttctagccstggggttatgttggtgaacaaggcaagtgttgataaacaaggaagtctttcctcacagggattacattctagtggggagtggggtgggtgcccggtaggggagaaatgctaatatcaagtagtgtgaatgctaagaagtaagtaagatgggagagtgcaacagagagtgacagggcgagggatggctactttggatagtgaggtcaggaaaggcttcactgaagaggtgctgttagaagttactggaagatgcttcttaggaactgatatttaggtctgggctctccagaccttgactcttagtccctctcaaga

SEQ ID NO: 198268 - DNA, 403 bp, Homo sapiens
ctttctcttgatttctctcagttcatccagtcattcattcaagttctatttattgagcacctactatgtgctggcactcttctagccgtggggttatgttggtgaacaaggcaagtgttgataaacaaggaagtctttcctcacagggattacattctagtggggagtggggtgggtgccyggtaggggagaaatgctaatatcaagtagtgtgaatgctaagaagtaagtaagatgggagagtgcaacagagagtgacagggcgagggatggctactttggatagtgaggtcaggaaaggcttcactgaagaggtgctgttagaagttactggaagatgcttcttaggaactgatatttaggtctgggctctccagaccttgactcttagtccctctcaaga

SEQ ID NO: 198269 - DNA, 411 bp, Homo sapiens
gctgtttttactcaaaattgcttcaataactycacattacatatgggatcaagtccccaaagcctatagcatgggatacagggccctgcctagcttgcagcctcaatctcatctcattccattccatacatcccggggcttgctctccccacaactcaatcgctttgtgagcctctcatctgaaaagttctccagctcccctgacacacacacctcacaattgctggcaaaaccctcctacttttcaaataacctcaggggtacttcctccgtaagacattttcggtccctttgcctcccgccctcttctttcatcccatcatctcctcccagtacagacttctactatagcccattatcattaatttgaaatgtctgtgcatccctctttcattacactgtgggctgtct

SEQ ID NO: 198270 - DNA, 537 bp, Homo sapiens
tttccagtacagaacctctatgggttcagctatctggaagttccctgtgttagagatgtgtgaaccaaagcaactccaccttgagtaggagctgggtaaaatgaggctgagacctactgggctgcattcccagacggttaaggcattytaagccacaggatgagataggaggtcagcacaaaatacaggtcataaagaccttctaataaaacaggttacagtaaaggagctggctaaaactcaccaaaactgcgatggccatgagagtgacctctggttgtcctcactgctacactcccatcagcgccatgacagtttacaaatcccatggcactgtcaggaagtcaccctatatggtctaaaaaggggaggcatgaataatccaccccttgtttagcatatcatcaacatataaccataaaaatgagcaaccagcagcccttggggctgttctgtctatggagtagccattctttcattcctttactttcttaataaacttgctttcactttactctatagactcgccctgaattc

SEQ ID NO: 198271 - DNA, 555 bp, Homo sapiens
ttgttgctaatggctaaggaacaggtggagaagattacagccaagacataaaagggaactttctgggtatgatgaaaagagactatatgatgattgtggtggtagttacataactgtattaacatttatcaaactgttgtcttaaaatggtgaatttatggtatgttaattatacctcatcaaagctgaccaaaaacaaacaaaaggtcagacactatggctgaggcctacaatcccagcacttttggaggctgaggcaggaggactgcttgaggtcagyagttcaagaccaccctgggcaatacagggagaccccatttctacaaaaaataagttagccatgtatagtggtacgcttctgtggtcctagctacttgggaagctgaggcaggaggattgcctgagcctgggaggtcaaagctgcagcaagccatgatcatgccactgcactacagcctgggaaacagagcaagaccctatctcaaaacaaaaaaaaaaaaacaaacaaaacccaattacttgcaggccctgcctcttgtccacccaatgctggta

SEQ ID NO: 198272 - DNA, 576 bp, Homo sapiens
aggcctcctagtaaatagccttacactgaaaacataacagcaatacatctttcagaaggccccctctgagacttagatctgtaactcatctttggaatggttgatccccagtgggaaagctctagtgttaattgtggaggttcaagatatagacattcaaagttctgacctcaaggcccaactcacatgttactgttayaggttactgttactgttatatgttactgttacaacaccttggggttgtcacttttctggccagaaatctctgtggacagtgatgtatttgcccaagatttgctcaggccactgggttcattccacccactcggccttgcaggctgcacttggctcttactactggcctggatcccatgcctgccagaggcaagtcaggtgtggagtggcgaggggtgtgtgagtgagcatggggcctggacactgcacacagtcagacataccagctgctgcagcgtagcggacagctgcacgtgcctgcatgggtgctggctggctgtgaggctgcagccagaccaggcacaccaccagcagcttctatggctggcactagggaac

SEQ ID NO: 198273 - DNA, 576 bp, Homo sapiens
aggcctcctagtaaatagccttacactgaaaacataacagcaatacatctttcagaaggccccctctgagacttagatctgtaactcatctttggaatggttgatccccagtgggaaagctctagtgttaattgtggaggttcaagatatagacattcaaagttctgacctcaaggcccaactcacatgttactgttacakgttactgttactgttatatgttactgttacaacaccttggggttgtcacttttctggccagaaatctctgtggacagtgatgtatttgcccaagatttgctcaggccactgggttcattccacccactcggccttgcaggctgcacttggctcttactactggcctggatcccatgcctgccagaggcaagtcaggtgtggagtggcgaggggtgtgtgagtgagcatggggcctggacactgcacacagtcagacataccagctgctgcagcgtagcggacagctgcacgtgcctgcatgggtgctggctggctgtgaggctgcagccagaccaggcacaccaccagcagcttctatggctggcactagggaac

SEQ ID NO: 198274 - DNA, 567 bp, Homo sapiens
atgtaatactttcatttgtctatgaggtcacaactgtgtaattcagtgtttcaagtgaccttagtaatctaaaaccaaacttttctacaaatgtatatgctcagatttagaatacagaaagtgatcatgcacagagctaaagacaaaattgactgtrtttcaggtttttaatgttgtcatttttgtaatagtcaatgagcaataaagttattaaaaatcaaacacttgaaataattgttttaataaaatatattaatgaaaactatgtagatggtaacttttaggcttatgacagccccaagcttcctgactagctcttactgaaaaacaatgagacataggacattattgtcccatgatttagcagcaatgcttaatcattattttaatgtgttctgcaaacctcaattgtagattagctgccggctgttttgataaattgattttgttttattattgtcatagaagcctttttctgtcttaatctctggaagctgctgtagtacttgatattaatgaaacattgacattgtatgcctagaccagctgaaaaggaagagtaagagt

SEQ ID NO: 198275 - DNA, 586 bp, Homo sapiens
atattgtatgcattatttcatgtaatactttcatttgtctatgaggtcacaactgtgtaattcagtgtttcaagtgaccttagtaatctaaaaccaaacttttctacaaatgtatatgctcagatttagaatacagaaagtgatcatgcacagagctaaagacaaaattgactgtatttcaggtttttaatgttgtcatttttgtaatagtcaatgagcaataaagttattaaaaatcaaacacttgaaataattgttttaataaaatatattaatgaaaactatgtagatggtaacttttaggcytatgacagccccaagcttcctgactagctcttactgaaaaacaatgagacataggacattattgtcccatgatttagcagcaatgcttaatcattattttaatgtgttctgcaaacctcaattgtagattagctgccggctgttttgataaattgattttgttttattattgtcatagaagcctttttctgtcttaatctctggaagctgctgtagtacttgatattaatgaaacattgacattgtatgcctagaccagctgaaaaggaagagtaagagt

SEQ ID NO: 198276 - DNA, 450 bp, Homo sapiens
tcttcgagactctgcactcctgacaccgggatcaaaggactctaccacccctttcaacctccaggagcccttccttatggaacagctcccccgagagatgcagtgccagttcatcctgaagcccagccgcctggctgcagcccagcaactgagtggtgagttgcttctagcaaaagttttcgttcttgaacataaatttagtacaaaggcaaagactcaaacctccckccagatgaggtattttttcttggaatttgctaagtattttgaaaaggaaagatggacttttagaagaagatggttttataaatcagcaataggcatgattgactaggaatcagcagctagtagcaatacagtctgttccttctttcttcaccattctttcccctttaaccttattcctactgcagagtcaaaggcactaagcagtgctgcaggtgcttcaat

SEQ ID NO: 198277 - DNA, 609 bp, Homo sapiens
ataatccaatgtgatacacaatattggattaatttttagcttttgggatcttctttgttcctttagatattttttgctaagtagaattcctatatttgggctagatattttcctctagcccccttacaattggatagcatagaaaacttaggttttcctagatgactcttatgcttaatattttttaattaatgattagcattcagcaaaactttgtttctgataccttggggarcacagagacaaccagatgcacacttctcttgaggggttaatttaatgagggtaaacaacttgcaagcataaccacaattcaaagtaggatgaacaggggctttttaagtgcaaagggaagagtggctggttccaacactgaagaccagggaggctgcaccaaaaaaaaagtttttgagagacaggatttacacatgtagaaaacatgagagtccacaatgatagaacagcaaatatacgtgtgtgcacacatgcgtacacactcaacatggacatactcagtgtgttgggaagcaaggacttaggtggaagatgagattcagttgtaggtcaaattggaaaattaggtgaaaactagctcatagatattctttc

SEQ ID NO: 198278 - DNA, 582 bp, Homo sapiens
tacacactcaacatggacatactcagtgtgttgggaagcaaggacttaggtggaagatgagattcagttgtaggtcaaattggaaaattaggtgaaaactagctcatagatattctttctctctcaagtaatgcaagcacaaaataaattcaaacaatacaataaaattcacaatgaaaactaaattttctttccttccctgtactcagtctcacagttcttttctcagagacaaacacagttacacgtttctggcttatctttctgaaaatattctatatattcaaatatcataaagtgcatatatatgtttccyttatgttatttagaaaattgttgcattttatatgcactgttctgcaccctgagtgaatttcttccatactaatgcatagacatgcctagttttattattttaatttttccagctttattgaggtatgattggcagataaacattgcatctatttaagatgtacaatgtgatgttttgatatatctatatattgggaaattatttccccaatcaaactagttggcctgtccatcacctcccatattaacctcttttgtatgtgtgtg

SEQ ID NO: 198279 - DNA, 569 bp, Homo sapiens
gctagatcacactaagcatgattgtgctgaccttgaccttcacctacagctcactgccttctgccccagttgccagaagctatcctccactcacatacagggacattcatcgcagcccagtgtctgatgttttagatgtcaacctcatgcttgtctggtcacagtgttgcctattagcagctgctattttttcatcatgmagatcaatgattagaggtaataatagccaatattaacttagcatttttaggtcattcctttgcctgaaatgaaccccttttcacttagaaaaaaaaaaagtcatgcttgaaaatgacctccaaggtcagctatgatcctactccttatctccactcttctccccttttgcttttctccagccttactggctccaggcccccaggcacactgccaccttaaggcttttgccctggccattaccactgcctgggtgtgcttccctcgagtatctgcatggcccactctctcacaggcttccagtcttttcccaaaagtcagcctctcaatgcagccttctctgatcacccatttataattccctccaccct

SEQ ID NO: 198280 - DNA, 522 bp, Homo sapiens
caatgctgtttgatagcattttacccactgtagaacttctcttaaaattggagtcaaacctctcaaactctaccactgttttatcaactaaatttatgtaatattctttgttgtcatttcaacaatgttcacagtatcttcaccagtagtagattccatctcaagaaaccactttatttgcttatccataagaagcaactcctcatttattcaagtttgattatgggattgcaccaattcactcaratattcaggctccacttctaattctagttctcttgctatttccaccacaactgcagtgaatttccccactgaaatctcaaacctctcaaagtcatccatgagcgctgcaatcaacttcttccaaattcccataactattgatatattttgaccacctcccatagatcataaatgttcttaatggcatctagaatgatgaatcctttatagaagattttccatttacttttaccagatccatcagaagaatcaactacctatggaagctaaagcctt

SEQ ID NO: 198281 - DNA, 581 bp, Homo sapiens
gctttctgagtagggaatagaaagaaaaacaaaatattacccccaaactatgtaaaaataactaggaaagagttgtggaaccaattacgatttcggagcctaaagtttaaattcactgtacagaaggctgttctatgagactgccttgaggtttagagtagaacctgcagcaggggagaatatctggaaatcattctggtcacaaagggaagagcatggtgctatgatttcatccgtgtgcataaaacaagtgaygtgacatccaaattatcttttagtaagagtgagtagagtggattaaattttacaagttgattcaaccgtgttattttaaagcacatatttcaaacacaggcgtaattattacccaaagtgttgcctggcagtgccagtcttttagagaacaaacggtcacttgtgcattataccttacagccatctgcaaggtaaggcgacctctaaagatggtgccctggaggaagagaaagacgaagagggagagacttcttgttttaaaattgtggcttgatttcagaaaacaactccactcataagttttatttatcagcaagcatttacac

SEQ ID NO: 198282 - DNA, 569 bp, Homo sapiens
gataaattattggatttacatttcaactctatcaatctatagattttatatattcattatctcatttaaaagtcatcacaatacatcatcctcaaaagctaaccatataccttttctttttttaagatagagatgaggtygctatgttgcccaagctggtcttgaacttgtagcttcaagtgatcctcccacctcagctttccaaagtgctaggattacaggtgtgagccaccacacccagcctagatttttatttttaaaggtggttcatgttaatatagattgtgcttatggagcaaaactgtatatcatttcagtaactcacacagctatgtatatatatttatatgtatatatggatattacatattatactatatataatacccatatataatatattataccatgtataatatccatatataacatatatgtattttataattatgtaatgttgccaccttaaaggtagcttaaaaactgtctcccatacaaaggtattttaaccagaacacaattttttttgccagttcttttgggtaggcacaactattcctccaaaggct

SEQ ID NO: 198283 - DNA, 560 bp, Homo sapiens
tgcatttcaagccccatactacttgatggcagaaaatgtagtcttaggcaattatggttttctccatcatttcaggcctgaaataacatttcctctgggcccactttccctttgggstgtcacatggccacagacatccctccaggttgaaccctctctgataatcccaccaggccctccaccacaggatttcagcaagcccaatgccctctcttggcctatccctctctggggcaggagaagtgttccagtgatctacctttcttaaggcacagaagactcagggctgtccctgttccctgcaaccagagctgccctgccacaatctgaactctacagctcccccggtggcccccatgcagaagtgcagagagagctagagccgggaccacttcctccagcctcctccacacagggtgcccaaggattcccaaatagtacattctattactgccacccccatccgcgttggctcagtgggccaccagcacatcaccaagtcccttgtttctttcccgatgcttcccccaccgcttcagaggagttttatttggtggtga

SEQ ID NO: 198284 - DNA, 551 bp, Homo sapiens
gccccatactacttgatggcagaaaatgtagtcttaggcaattatggttttctccatcatttcaggcctgaaataacatttcctctgggcccactttccctttggggtgtcacatggccacagacatccctccaggttgaaccctctctgataatcccaccaggccctccaccacaggatttcagcaagcccaatgccctctcttggcctatccctctctggggcaggagaagtgttccagtgatctacctttcttaaggcacagaagactcarggctgtccctgttccctgcaaccagagctgccctgccacaatctgaactctacagctcccccggtggcccccatgcagaagtgcagagagagctagagccgggaccacttcctccagcctcctccacacagggtgcccaaggattcccaaatagtacattctattactgccacccccatccgcgttggctcagtgggccaccagcacatcaccaagtcccttgtttctttcccgatgcttcccccaccgcttcagaggagttttatttggtggtgag

SEQ ID NO: 198285 - DNA, 307 bp, Homo sapiens
aagcccaatgccctctcttggcctatccctctctggggcaggagaagtgttccagtgatctacctttcttaaggcacagaagactcagggctgtccctgttccctgcaaccagagctgccctgccacaatctgaactctacagctcccccggtggcccccatgcagaagtgcagagagagctagagccgggaccacttcctccagcctcctccacacagggtgcccaaggattcccaaatagtacattctattaytgccacccccatccgcgttggctcagtgggccaccagcacatcaccaagtcc

SEQ ID NO: 198286 - DNA, 411 bp, Homo sapiens
aaacaacatgtaacttgtttttttcttctttttgtctagcggaaattgaatacattcacattgattatgactatatatttagaggcgttgctaccattttattttgtgcattctgtttgtctcgattttctaattgctaattcaaaaaaatgcctttttttttctttctggccttttgcattgtttgagagtattctccctcccccacattttatttttgtctctctattactttggtaattatacatcctaatttctattcagctttatcagtcctgagaaagcctcagtcattaatttttcatgtattgcctctcccccatttctcccttatctgcctctggaactccattgagacggtagttagacttggtactcacccstcgtgtctcttaactgggacctagagcc

SEQ ID NO: 198287 - DNA, 440 bp, Homo sapiens
tgaactaccggcaggatgtggtggctcaggcctgtaattccagcactttggaagattgaggtgagaagattgcttgaggccaggggttccagrccagcctgggcaacatggtgagatgctgtctatacaataaaaattttaaaactagccaggtgtggcggcgaatgcctgtagcccctgctactcagtaggtgtaggcgggaggattgcttaagccaagaggtcgagctgggatcatgccactgcactccagcctagacaacagaatgagaccctgtaaaaaacaaaaacaaaaacaaaaaacccttcaactgtctatgcaagccagcatggcaggctgacacccacaaagaacttgccaaggttctagtacatttgtgcaatggtcaacgaatcttacatagtttctccttttatattttaacaagcataacatatgg

SEQ ID NO: 198288 - DNA, 486 bp, Homo sapiens
caagtgattcccctgcctcagcctctcaagtagctgggactacaggcatgtgccaccacgcccggctaattttttgtattttagtagagatggggcttcaccatgttggtcagaatggcctcratctcctgacctcatgatctgcctgcctgggcctcccaaagtgctgagattataggcgtgagccaccgtgcctggcccctaccaatatcttttaagtctagttggcttacaatattgctcgagtctttgatttccttttaatcttctgccaaactgttctatccattatcaaaaatgggatattgaagtctccaattatgccagattttgcttctcctagaagcagaaggcatggcaccccacatagggccacggtgggaagcagaaggttggtcaggagacagaggaagtgaggacagaacatgggcaagagcatttattatttattgttatttctgtgggaaggaacaagcaaggcagggt

SEQ ID NO: 198289 - DNA, 633 bp, Homo sapiens
agccctgggagagtcagtccctgcagggtcagtttattagtctgttttcacactgctataaagaacttccctgagactgggtaattataaaggaaggggtttaattgacttactgttctgcatggcttgagaggcctcaggaaacttacaataatggtggaaggggaagcaggcaccttcttcacaaggcagcaggagagagaagaatgaaggaggaacttctaaacacttataaaaccatcagatcagccaggtgtggtggctcacacctgtaatgccagcactttgggaggccaaggcggttggatcacctgaggtcaggagtytgagaccagcctagtcaacatggtgaaaccccatctctactaaaaatacaaaaaattagccaggcgtggtggtggacgcctgtaatcccagctactcaggaggctgaggcaggagaattgcttgaacctgggaggcgggggttgcagtcagcagagattacaccattgcactccagcctgagcaacaaaagtgaaattctgtctcaaaaaaacaaaaaaacaaaaaacaaaaaacaacccatcagatctcatgagaactcactcattattatgagaacagcataaaggaaaccgcccccatgatcca

SEQ ID NO: 198290 - DNA, 604 bp, Homo sapiens
aacttcagttctggatctgagcactgacttctctgtgaagctaagtgccatttatctctcaattagagcttttaggagaagaaatatctaagatgacagatggcaagatttaacaataataattagaaaatctggatatagtaaatgcaactggagagaaggcrgtagacatggaagagagaacaagatgatccaacataaggataacaggcattcctgatacagagaactaaaaacaagacaaaaaggtggtcaaacatatgatttttaaaaatacaggactgtctcctccatgtttcagttgtctctgatccttaatgtcaccgctaaaggactagttcttcttggcaggacgttgcggctctaacactgcaagttggaaaactgaatttattttgccatagaaaatacgtgtttaaatatagttaaattcctttattatcagttcaagtaaattttgagttaaatgggcttttgtgggctggtttatttacagagtcaatgtttttagtatggcctgtatgtgaaaacatgttctaagtgagaaacttctaacttggaaataaaccttctggaacataaaccagtttttaatttgggacat

SEQ ID NO: 198291 - DNA, 587 bp, Homo sapiens
gatggtggctacctcatgttattgtctccttcagaagctgtagatggaacaaaactgacatgaatcagcaaagtgaaacaatatattctaaggaccttcaggattaactgtacttatgattccactgggtcttttgggaaggaatataataatttccactctgaaatcacctttaattcatttgttcatgcatttacttaatttataatttatcatttatttattcagtaaatgtaagaatttcctaccactgtggcaactgatactacaaatttagaagcctaaacaacacaaatgtattgactcagttatataggtcagaagtacaggtggaaatcaaggtatcagctggctggtctcttatctggaggctctggaaagaatccacttggaagccattcaagctgttggcaaaatccagttccttacggttgkaggactgaaatcctcatatcctttctggctgccagctgggggcttccctgagttcctaggtgtctctctggtccttgcatgtgggcgtctacatacaagagccaacaacagggcattaaccattctcactctcagacctctctgatctcccc

SEQ ID NO: 198292 - DNA, 498 bp, Homo sapiens
tatttcaaatgatattttaaaggatacaaatgaacagccagatgaagagacacttagggtgatatttggaatggtcccaagcacaggagcttctgtccctgtggagttaaaggtgtgctaccctcctcagcacaagaagctctttgaacccagtcctttctgggtttttacaaaggcttcattatataggcatgattgattaaatcactagccactggttaccaactcaaccttcagctcctctccctttcctggatgtaggggttgaaggaagtatgactgaaagtttcaatcttttaatcacatggtccrttctcctggcaaccagcacccccatcctgaggctaactaggagccaccagccatcattcgtctcattatcatacaaaaagacacatcatttcggaggttctaagagttttagaagctgtatgtcaggaaatggtgaggaagaccaaatgtattatttcttattataaatcacagtgtcacactgac

SEQ ID NO: 198293 - DNA, 488 bp, Homo sapiens
gaattcaagatgagattagggtggggacacagcccaaacatgtcaggtaacttcagtggaatgatgactgcmtaagtcatactgtactgaatggaagagagagttggaacagtgaacatattctactttttcaagaatttctcttttgaaggtatgggaaaaagatggcacaaaattcatttgaggatagcatagatctaaaggcatttaaaaccttgagtcttgaacatatttataggcacggaaaaaattctacagaaaggaaagattgtaattataggagagagaaaaacagtgatatttctgaggatattgtggggagtgggtgctaaaggaccattggatatatcattcttaaacagaagggaaagatgggtacgtgaaacagaggggcaaggtaattggtagttggcagaggagtggttgaatttaaggatttagggtgaagggagaaaaagccccaggagtgccaagaagattaataaatg

SEQ ID NO: 198294 - DNA, 543 bp, Homo sapiens
gaattctttagatagtccagatacaagtcctttatcagatatattatttgcaaatattttctcccattttgtgggttgtctttcgactttcttgcttttttcaattggagtaaaatatacataacataaaatttaacatttttggggttgggggcaatggttcacacctgtaatcccagcaatttaggagggcagggtaggaggattgcttcagcccaggagtttgagaccagtctgggcaacatagcaagaatctgtctctacaaaatatttaaaaattagctggggctggctgcacacttstagtcccaggatgaggtgagaaaatcgcttgagtccaggaggtcagggctgtaagtgagccgtgatcacaccactgcagtccagcctgatggcagagtgagactctgtattttttaaaaaaaaaaacaaaaacaaaaagaggccaggcggggtggctcacgcctgtaatccaagcactttgggggaccaaggcgggcagatcacctgaggtcgggagttcgagaccagcctgacctacac

SEQ ID NO: 198295 - DNA, 384 bp, Homo sapiens
aacaagcacctttggagatgartatgcatccagcggcaagcgctccactctcagtctttactaaggaatctacagcctccaaacacagtgaccaccatcaccaccatcaccatgagcacaagaaaaagaagaagaagcataaacataagcacaaacacaagcataagcatgacagtaaagaaaaggacaaggagcctttcactttctccagccctgccagtggcaggtctattcgttctccttccctttcagactgagaaggggacaaaaagacctttcctttcatgtccagaagaatgtatgtaactaaagctttgtcctctgtgaagaattataaaagggaggggggaaaggattcgcctctcctacagaaattctgaattc

SEQ ID NO: 198296 - DNA, 526 bp, Homo sapiens
gaattctgtttttctgaaatatttatgctgaattagttgccatatgagtgcccttttctccttgatcaatatctaaaaaattacagtttatctggaaccagttgctcctgggctcacagtcatggacatgtcctcaggatgtggctcaccaatttttccctaagttaggaaaaaggatctgtcttcttacccagtggagcatggtgtgtgtcatatgtcaaaaggttaaaacaataacagcaaaccagttcccatttcctgttcaaatatacctacctatacacacaccgccccctacacacacctcttatcaggcaagaaaaataaatcatgctctctcactgtcactggaacaatagcatcaggtattttcctaactcgaattttcttttcttttctttatgttaaggtgcttttttatcttaaagttacaaatttgtgttactgacrtggatcttggaaactttacataatagaaattttaatgttatttattttttcttttttttaagtgtcagggtcttgc

SEQ ID NO: 198297 - DNA, 609 bp, Homo sapiens
tgaagtcatgtttgttggttttctctactgcactgtttctctcttttcccctttccatactatattatttggaagaatgtcactatgcaaagtacaatttaaggggagagaagttattttccctctctttgcaggtggaatatttaaatagcttatttagaattttttgcatagaagatttgtctgttctcctccatttaataattaatttaatcatttgtttacatcagtatgttctgatggatatttatttcatattttcgctagcaattcagtactatttcatttgtcactcagattgtttcagcttttgccattgggagctctattagttggctcacttgctttattttacaggaacatcagtgtatatttgtctgctctggaaatagccttctaagtagggaccaygggaaaaagttaatagggagaaaaagcaagtgttcaaaataaaatattctaattaaataaacaaaatataaaaatgttaagtcagtatgtaaaaatatttctaatgtacttaaatgacaaaatttaagttaatgatagaatacaaagatatttacttagcattataaataattatgatactatatacaggaaggggaa

SEQ ID NO: 198298 - DNA, 541 bp, Homo sapiens
caataaaatttattcttttaaaaagacaccaagtcttaaatcataacacattattactaaggctgagcaaattagccaattgacccttctaaaaataaattacttattaaggtctaaaaaaagatggtgttttcccttaatgcagtaaatcttaatacattgagtttttcttgattagcagctttctagggataatttagggggctcaacatctgaacatatggacagggctttcttacrctctgttcatgtactgaacactggtagatacagagagatgtacttcatagaggaaggaaggcaggaaggcaagacttccatgtgaagatgaaaaaaaaaaccaaagaaaaaaagaaagaaagcaatagtcctgggtgtcatttgttagacaaatttcatggtgtgagccatcattgtgtaacagcatgtgctattaagagctaaggtttaggaagaatctagttgtgacttggaacttctcttttaattatacacacaattattagccaccttctgggacatacattttcaaattgataag

SEQ ID NO: 198299 - DNA, 527 bp, Homo sapiens
ttctacttttgagaaagtagattgccattcttctccattataaatactgatttgtatataaaattgttttctagagagacagttccaatttgcaaatcaagtacagtgcaagagaacattcattttcctgtacccttgttaacactgagtatgaatgattttttaaaaattttaaaattagctagttagttcaataaaaggactcatttttacaatttattttactgaatttatcatttarcagtaaagtaaacttagtttcagccagttgaggatgtagaatttggaaatgaaaatttagtgccaactgtatgatctgccttccgttcttgacttctctccctgctggttgggcttaaaaatgagcctgtcaccatctgtctgtgtctgccccatttctgttcctcagaggcaggcatgggtgcaatcacacagacaccccttgattccacacataatcaagaggaaaattcaaaaccccaggaaaaaagcttttcacagaacaagaattgcatcctcgatcttta

SEQ ID NO: 198300 - DNA, 544 bp, Homo sapiens
ctaacgttctgattggttaaaaaagcagcacttactcctattggttaggaaagggctatttggttacttttgtggtttagacaatgttcttgtttctgtctgtgctcatcaggattatggagtaccttattttgccttgttccatcatggacacagagtgcccttgtctgatattaattttctgtgaaactgtgtgtgttggacaggagaacaagaggcctacacagcactgagtgttaggtcagtttccagcaacactgaggcccagctgagaatgcccagctggctttcactgtcaggtgctgcctttctttttcttacctttaatttcttggttcaccttttatggaatttatatgattygcttgttgaacaaagtggctaaccctttgatgatctttttgcttagtttcatgttattttctctattttccatctttgtctttttctgttttctttctgggagatttcctaaatttaacttgcatcttttccagtaaatttaatcttcaagagtttttttgtggttctccagacattcctt

SEQ ID NO: 198301 - DNA, 564 bp, Homo sapiens
atgttgggaagtagtatttgtggtgaataggattaaggacttcggattttatgcataacatagggttacatcatggttctgccaactgtgtaaccttggatgagttacttaaccttttatgcacaartttactcttctgtaaaaatgagattaatcatttattttaaaatgaagattaaatgtttattaaggttgttgaacattttaaatagagtaatatatgtatgatgctgtgctagactgtcagcagctcagcctcatatccacacttatctttattttccattgcatcacagtggagaagcttgggctacatttccccatatctttttccagtatgcttttgtatgagattctggtccacagctatgccaccctgaacacacttgatctcctctgatcttggaagctaagcaggttgggtctggttagtttttgtatgggagagtacctgggaataccaggtgctgtaggctaaaattaaaaaaaaaaaaaggtaaataaataagtgagagtctgccaatgagaaacaatgatctgagatttcagtgcagaagtaaaggc

SEQ ID NO: 198302 - DNA, 518 bp, Homo sapiens
gtcaggtaccattagccacagatattacatatgaagagattacagcataacagtaaagtcatttgttcaagctaagaagatttcaaatgaaaattgaacttcatatatcccartcctaatcattttcctctttgaattgcatgtatgtgttgttgatatcctcccaaataatcgctaaactctaactaaatagtgcagtttttagttcattagttttatgtattgagttttcattaaatattttaaatgaacaaaatgtttagtggataaaccactgatgtgtataaaagagacagataacctatgatatgtttgtaaaagtgctttttctggaaacttgcttggctttatataacaacatattgaaaaaactaatattttcattctataatgatgtcatttattataaaatgcaaagaaatgccaatacttgggcatataataaattctattaataatttagtgtaaactaagcagtgtctaagccactgggcttatactgagctttctttgctaaa

SEQ ID NO: 198303 - DNA, 579 bp, Homo sapiens
ggagaaatgctttgtaaatccagagtgttgagatgtaagggaggccgacgtattttgggggcttccatcagggatggatggttagcagcttctccatcttattggataattcattgattccattcttccccttgcttttttttgatgttttatcttttaagacctctaagtggctgatcaagcctaggcttcctgcttttgtcctgtaaatattttggcagacaagcaaaaaatgacgagagtggtgacagccatcttctgctgtcacaaaagcaactgagagcttcccaagttaatagaatctcaccctagatggattcaagtcagactgagccatatgcaacaaagaacactgcctcttctcagcccccgcaaaaccccaaaagtaaagggaacaacaaacttggaaaatcycaccttagaagttaaatgcaaacagcagccacttaatgttgtaaagcagaaaaatattcataaacctatgacgatgaatcacatgaatacttggtggaattaaaagatagcacctagtaataaggaacttcaattatcttactggaatgtatacacacaagaatg

SEQ ID NO: 198304 - DNA, 352 bp, Homo sapiens
aaattaaaagaattggtgagaggtgtcccagaggccaggtgaaatgcttcaagaaggatgatgtgataaattgcaccaactacaactgatatgtcaaataagagaagactgagaaataatgacccagtctttaaatgggagtcacrggtataagtggaaaaaacgtcagtagaaaactgagtacaaagtctgggtgcagtgagttcaagagatagtgagaatggaaagtccaggaagatttgatgtgataaagagaagtgggaagataactgaaggcaggacttgttttctgatttgttctgtgtggaaactggacaatttattgcactgcaataagtgcaagtgtatctca

SEQ ID NO: 198305 - DNA, 470 bp, Homo sapiens
ctttccaagatcactcaagctttctgtaactatggaaatgttgagataagttttaatattgaaaaaaggcgatttactttcactttgaagcattgtttgtgtcttttgtatctaattccagaattatttaggctttccttgttgccatgttaccgaagtgttcctatagtatgtgtgcatcaatgatagatctagaaattgtgtttggaaaacaaaaatcaataaaaattgttttatttatattaatagttgtaaataataaatattcttcttattgtctaaaatttcaccatattgcgaaaagaaaccagggtgrttagatatggagagttggcagaatccattcatgtctggggaagtaggtgagagttttggttttcactagataccatgattgtgttgtctagagtcataaacatagttctgcctttggttttgcaactagagctaaaacttctgctggttggaat

SEQ ID NO: 198306 - DNA, 575 bp, Homo sapiens
ttgtgactgctctgccagagcagggctaccccgtaagcagagagtagcagtcacatttatacccacttttaataacatgcagattaaggagtagtttatgcagaaatttctagggaaggggtagtaagtaacctttgggtcattgggccattgccttggaaaggggtggtaactcccgggtgttgccatggcagtgwtaaattaacatggcacactggtggttgtgtctgattggaaaactgcctcctccctcatccctatttagctagtcctcaatctggtccagtgtccaagccccacctttggagtcaagtcctgtctcctacctgaatactactaagtttcattatcattaaaaccaaattgtaccactcagagatactttaaatataagtgcggaatgacttgtctcttccaatacctctataacatttacatttagttcaagtgtctgggatcaatttcaacgttgaaacatgatgaagctgaaaattgcagactatgcctaaaccagccctcatgtaaccaactcaccagaataacatagttgggcactccatctgtaaacatacaga

SEQ ID NO: 198307 - DNA, 420 bp, Homo sapiens
ctattatgaatagttctgtgaggaatatatgcatgcatgtgtctttatggcagaatgatttatatttctctgggtatgtaaccaataacgagattgctggaaccaatggtaattctgctttgagttctttgagaaattgtaaacygctttccatagcgactaaactaatttacattcccaccaacagtgtataagcattcccttttctctgcagccttgccaacatctgtttgtttttttttttactttttaatagtagccattctgactggtgtgagatagtatctcattgtggttttgatttgcatttctgtaatgattagtgatgttgaggatttttttatatgcttgttggccatattatttaaatatcttaaggtaaacaaaaaaccatagaaattttctctaaactagggaaag

SEQ ID NO: 198308 - DNA, 555 bp, Homo sapiens
atgtatcctggtgtgatacacacacacattatttgacacccatatatctatgtatatatgtataggtctgcatatatatttgtgcaagcataaatttgtaagggaggggaattaaatgcataaggcttaaattgccatcttgaaccagaagacctttgggtgtaatttttccatgtttgtttaagtgtgtttctcccaaagagactgtatatcatcttggtattctaagcacataatattgttccaggactagtcatataaataaataaataaataaataaataaataaataaataaatatatgtrtgtgtgtgtgtgtgtgtgtgtgtgtgtgtatacactcaacaaatgttcaaattaaattattaatcaaattaatgatttggctattctttccaaacattttatgacgataaaaacttaaatcctgtactaaaatcttgcatcttttcatcccattcattctgtgacccagcagcttaatcctgccttgctgaccttgtatattctctagttccatgatgcctcctttaaggtggggtgaaatatgtagca

SEQ ID NO: 198309 - DNA, 610 bp, Homo sapiens
acggtctgttgggggaatgttgcagtcacctgtcattctaggctgcctcggcccaaaccagttcagtgacctggggtaatggttaactcttgatgacatttccaacaaatttgcagttttgaggattaagcacaatctgcttccccaggaaagctgtcttggtgagggatccctgggaccatccccttttgctggacctagagttccccaagtgaacacaacccagtctccaggctttctgtgttcattaggcctgccactatgtaagggaaaaggaatttctcctggagctgatattttccaacatgttgagcaacgagaccatgtatgtgtgagggcatatgaaaagaggtgamgggctcaagtcagagggaaacttaagtagttgaaatcatagacctttgtgacagtgttgatggaggcaacttgattaaggtgaagccactgggctctgggctccagtgccatgtttgaaatgaagagtgcgattttccttttggcctgtgtgtttaaagggtgaatgggatacttgtacatgggtagctcagcccctgctggccacagggccctgccaggccctcacacaggtctgatggccttcagggccaac

SEQ ID NO: 198310 - DNA, 610 bp, Homo sapiens
acggtctgttgggggaatgttgcagtcacctgtcattctaggctgcctcggcccaaaccagttcagtgacctggggtaatggttaactcttgatgacatttccaacaaatttgcagttttgaggattaagcacaatctgcttccccaggaaagctgtcttggtgagggatccctgggaccatccccttttgctggacctagagttccccaagtgaacacaacccagtctccaggctttctgtgttcattaggcctgccactatgtaagggaaaaggaatttctcctggagctgatattttccaacatgttgagcaacgagaccatgtatgtgtgagggcatatgaaaagaggtgacgggctcaagtcagagggaaacttaagtagttgaaatcatagacctttgtgacagtgttgatggaggcaacttgattaaggtgaagccactgggctcygggctccagtgccatgtttgaaatgaagagtgcgattttccttttggcctgtgtgtttaaagggtgaatgggatacttgtacatgggtagctcagcccctgctggccacagggccctgccaggccctcacacaggtctgatggccttcagggccaac

SEQ ID NO: 198311 - DNA, 379 bp, Homo sapiens
tataatccaggcttgccaaatgatatggtttgcctgtgtccccacccaaatctcatcttgaattgtagctcccataattcccatgtgttgtgggaggggcctggtgggagataactgaatcatggtgtggtttcccccrtactgttcttatgatagtgaataagtttcacgagatctgatggtttcatacaaggaaacccctttcacttggttctcattctctcttgccagctgccatgcaagacttgcctttcaccttccaccacgattgtgaagcctccccagccacgtggaactatgagtccattaaacttccttttctttctaaatcacccagtcttgggtatgtctttatcagcagcatgaagactgactaata

SEQ ID NO: 198312 - DNA, 390 bp, Homo sapiens
tgccaaatgatatggtttgcctgtgtccccacccaaatctcatcttgaattgtagctcccataattcccatgtgttgtgggaggggcctggtgggagataactgaatcatggtgtggtttcccccatactgttcttatgatagtgaataagtttcacgagatctgatggtttcatacaaggaaacccctttcacttggttctcattctctcttgccagctgccatgcaagacttgcctttcaccttccaccacgattgtgaagcctccccagccacgtggaactatgagtccattaaacttccttttctttctaaatcacccagtcttgggtatgtytttatcagcagcatgaagactgactaatacaccagatttctgccaatgaattc

SEQ ID NO: 198313 - DNA, 528 bp, Homo sapiens
tggctatatggtttccatggccaaaaaaatgagaagagggcttccttgggctgggaatctgtgtaagaatgtgcttgcttaatctgctgccctcctgtttgcctcctctgtgtacatacaccaggtccacccccaagcctatggttcattgcacattaggtgacctaatccttgagtggttgctggaattgtccacctggggctagtgtttactctaaatagacccactacacacacaggtcagaagccaacacaagtgagccttgggcatgcccatcccgttgacagccgctttcttagatcatctacctttgtttccactaggctctgactccttgctccattttggtgtctagctggcttgaaaccctttggsctttgtgtcttgttcccaggccctggttgagtatgatctaattctgtgtccttgcatttgactgtcagcagtgggctggtaccagccctgaagctcccttgtaaccataccccagcctatcagcatcagtgaggcccctccaactctcctac

SEQ ID NO: 198314 - DNA, 412 bp, Homo sapiens
aggacctgggaaacgggatccattattattacagagatgtgcgccacggacgctctttccaacctctgccttccccactgagaacasctgttagacacaagcctacttgtggggactatggtgaaatctttggagggaaaccctgggccatgtgggtgcctcatgttctagtgggtgagggttaagagcttcctggggtgatctggcaaacaagctgaatggagtcagctgggcagggattcccagaggaaatgattttcgaagacgggaagggcgaccacctagccatgctcaccaggcaggcaaagctttggtaatagcctttggggcctctccctgatgaaagaggaagtctcgctgggcatggtggctcacgcctgtaatcccagcactttgggaggctgaggtgcgt

SEQ ID NO: 198315 - DNA, 412 bp, Homo sapiens
aggacctgggaaacgggatccattattattacagagatgtgcgccacggacgctctttccaacctctgccttccccactgagaacacctgttagacacaagcctacttgtggggactatggtgaaatctttggagggaaaccctgggccatgtgggtgcctcatgttctagtgggtgagggttaagagcttcctggggtgatctggcaaacaagctgaatggagtcagctgggcagggattcccagaggaartgattttcgaagacgggaagggcgaccacctagccatgctcaccaggcaggcaaagctttggtaatagcctttggggcctctccctgatgaaagaggaagtctcgctgggcatggtggctcacgcctgtaatcccagcactttgggaggctgaggtgcgt

SEQ ID NO: 198316 - DNA, 412 bp, Homo sapiens
aggacctgggaaacgggatccattattattacagagatgtgcgccacggacgctctttccaacctctgccttccccactgagaacacctgttagacacaagcctacttgtggggactatggtgaaatctttggagggaaaccctgggccatgtgggtgcctcatgttctagtgggtgagggttaagagcttcctggggtgatctggcaaacaagctgaatggagtcagctgggcagggattcccagaggaaatgattttcgaagaygggaagggcgaccacctagccatgctcaccaggcaggcaaagctttggtaatagcctttggggcctctccctgatgaaagaggaagtctcgctgggcatggtggctcacgcctgtaatcccagcactttgggaggctgaggtgcgt

SEQ ID NO: 198317 - DNA, 412 bp, Homo sapiens
aggacctgggaaacgggatccattattattacagagatgtgcgccacggacgctctttccaacctctgccttccccactgagaacacctgttagacacaagcctacttgtggggactatggtgaaatctttggagggaaaccctgggccatgtgggtgcctcatgttctagtgggtgagggttaagagcttcctggggtgatctggcaaacaagctgaatggagtcagctgggcagggattcccagaggaaatgattttcgaagacgggaagggcgaccacctagccatgctcaccaggcaggcaaagcyttggtaatagcctttggggcctctccctgatgaaagaggaagtctcgctgggcatggtggctcacgcctgtaatcccagcactttgggaggctgaggtgcgt

SEQ ID NO: 198318 - DNA, 489 bp, Homo sapiens
agagattaagatggctcaagatcacacaaactaatacttaattctagccatattttaagcaatgatgagctgaaaagcctcgtcaagagaatggcagctagcaaagcagaaattagattaggcaatttctttgaaagcgtaaataatctttaaaggtttctcatttaggaaaggaacttaggtagacttttcttgtacttttcttgatacttgctaggtttaatgtgaaatctcactacttgtgaaaggttagaagggcctggttrtataagtaatagaacatcctcacaatggaatgctatgtagcattaaaatgacagtatagaaatgtctactgataaggaaagctgttcagaatacattacaaaagagcaggctaccaaacagtataaatacctttccatttttgtagaaacaaattgtctgtaaggtctgttatgtgtagacatcaaaatgttaacaatggtaatttccaggttgacaagacaa

SEQ ID NO: 198319 - DNA, 430 bp, Homo sapiens
ctctagtataattgccattctttgaaaaataacctggtagtttttaaggcttttttttgtttgtttttgttgatttgctctttcattacaatgtgtttagatgtgattttgtttttatttttcttgctcaggtcctgataggtttctttaatctgaagacaatttccttctcccattcaggaaaattttcaggctttacatttatctccctcgcgctctcttttttttccctcaacctcctgggctcaagtgatcctcctacctcagccactctagtagctggttctacaagcaygtgtcaccatgcctggctaatttaaaaaaaaattttagtaaaggtaaagtcttgctgtgttgtccagactgttctcaaactcccagtctcaaacagtcctcctgccttggccttcaaagtgtgggattataggca

SEQ ID NO: 198320 - DNA, 430 bp, Homo sapiens
ttattacacatcttccatacacatcttaatgctggggaacataaaagaaatataacttggtgcctggtatcaaagaacctaaagacttaaagggcccaggaacaagtacagcattacagcataatctaatattctctacccaaggcaacactggatytagaagaaaaccaatataaggctgagtgtatatcctgggcatttgtttaaagaatcaggactatgggcccaaatcatttagtgataaagtcctgctcctgagtgagcaatggaatagatgatggagttgtttgtgcagaagaccaggcagctagtttttggcaggccagaatgctgctcttaccctcctaaatacccctagagttataactagggaaatccattcaagaagaaatattttgtggcatttctgctcctggagtagagacaagga

SEQ ID NO: 198321 - DNA, 439 bp, Homo sapiens
tacacatcttccatacacatcttaatgctggggaacataaaagaaatataacttggtgcctggtatcaaagaacctaaagacttaaagggcccaggaacaagtacagcattacagcataatctaatattctctacccaaggcaacactggatctaraagaaaaccaatataaggctgagtgtatatcctgggcatttgtttaaagaatcaggactatgggcccaaatcatttagtgataaagtcctgctcctgagtgagcaatggaatagatgatggagttgtttgtgcagaagaccaggcagctagtttttggcaggccagaatgctgctcttaccctcctaaatacccctagagttataactagggaaatccattcaagaagaaatattttgtggcatttctgctcctggagtagagacaaggagccaactgtgaat

SEQ ID NO: 198322 - DNA, 518 bp, Homo sapiens
ttttccttggtggaagcatccacttctctatcagtgatcaagtaagagtaagaagatgattaggctcagtataccatcaactcaaagtgggcacaggagcatctatattattaaagttcaggagggaggagtccatgtctaggttataaaactgaaatggacagcttcaaatacccaccaaagtccagaatttcaccatggwgatatgatagtctttaaaaagaggagatgccagactgtcctgagaatcagttctgattaatatatctatgaggcgactcctctctctggctccaaacatacacctaccagaaatcatcaccctacacctagcagtactggttggatttcatttttaaaaaattactgttggctgctgtcttgtacctcccctatctgagaacttgagccctcagcctgtgttgggggatgtgctcgcatggcttctcctcagtacaccaacacgggtctgtctgtctggaaacagcttccagctggtttgttgctggcagcagtgt

SEQ ID NO: 198323 - DNA, 508 bp, Homo sapiens
tttccttggtggaagcatccacttctctatcagtgatcaagtaagagtaagaagatgattaggctcagtataccatcaactcaaagtgggcacaggagcatctatattattaaagttcaggagggaggagtccatgtctaggttataaaactgaaatggacagcttcaaatacccaccaaagtccagaatttcaccatggtgatatgatagtctttaaaaagaggagatgccagactgtcctgagaatcagttctgattaatatatctatgaggcgactcctctctctggctccaaacatacacctaccagaaatcatcaccctacacctagcagtactggttggatttcatttttaaaaaattacygttggctgctgtcttgtacctcccctatctgagaacttgagccctcagcctgtgttgggggatgtgctcgcatggcttctcctcagtacaccaacacgggtctgtctgtctggaaacagcttccagctggtttgttgctgg

SEQ ID NO: 198324 - DNA, 510 bp, Homo sapiens
cttttccttggtggaagcatccacttctctatcagtgatcaagtaagagtaagaagatgattaggctcagtataccatcaactcaaagtgggcacaggagcatctatattattaaagttcaggagggaggagtccatgtctaggttataaaactgaaatggacagcttcaaatacccaccaaagtccagaatttcaccatggtgatatgatagtctttaaaaagaggagatgccagactgtcctgagaatcagttctgattaatatatctatgaggcgactcctctctctggctccaaacatacacctaccagaaatcatcaccctacacctagcagtactggttggatttcatttttaaaaaattactrttggctgctgtcttgtacctcccctatctgagaacttgagccctcagcctgtgttgggggatgtgctcgcatggcttctcctcagtacaccaacacgggtctgtctgtctggaaacagcttccagctggtttgttgctgg

SEQ ID NO: 198325 - DNA, 524 bp, Homo sapiens
caacactataatttcatgattctttggagctactgttctccccaacttctacctgctaaataaataatccagttagaactttcactttagtctgtacttgactctatttagagttaatttaggagacagaataatggctcataagtttctcaacctcactaataagcaaagaaattcaaatgaaagaggattgttttcaatccaccaaactgacaaaaatgaaaaatatcaattcccagggtaggaaagttggttggctggtactttgggatatatcattctggaaaagaatctggtaacatgtattaatattttaaatatgcatattccacatttgggaatttatcctaaggccaaataagcaaagatgtatataaaataatgttaattgcagcactgcatgtagtagaaaaattcaaaaccacttaagtgtccatcagtaggagagggttaatatgatayatgcataatactatgcagattaaaaaataatcagattgataagtgattctcaaccctgactg

SEQ ID NO: 198326 - DNA, 562 bp, Homo sapiens
tgtaacagatagaaaaagccacatagaacaaattaccttaacaaattattgtaagcaaacacccttgtgaccaccatctaggtgagggaacagcactgtggtagccaccccagaagccctctgtgtgtccatttattcttttatggtaatcatttatttgcttttcttcatgatttgatcaatcaagtgtgcatccataaacattttagtttggtttcacctatttaatatgaaatttcacataacttttagttaattaattagtttttttatttgggacacagtctcactctgtcacccaggctggagtgcagtggtgcaatctcagctcactgcaacctccgcctcccgggttcaagtgattcttctgcctcagcctcccaagtagccgggactagaggtgcgtgccatcactcccagctaatttgttgtatttttagtagagayggggtttcaccgtgttagccaggatggtctcgatctcctgaccttgtgattcgcccacctcggcctcccaaagtgttgggattacaggcgtgagccactgcacccggcccacata

SEQ ID NO: 198327 - DNA, 429 bp, Homo sapiens
ggtttcccatcgttggcactactgacatttcgaccagacgaatctttgtcgggattgggtctgttttgtgcattctaagacgttgagcagtatccctggcctctacccacgagatgcaagtagcacccccgtccgttgtaacaacttttttttttttaaagagacygaatctcactctgtcgcccaggctggagtgcagtggcacgatgtcagctcactgcaacctccacctcctgggttcaagcgattcccctgcctcagcttcccaggtagctgggattacaggcacccgccaccatgctcagctaatttttatttttttatttttttagtagagatcaatttcacctggtctcgaactcctgacctcgtgatctgcctgcctcagcctcccaaagtgctgggattacaggcatgagccaccacgtg

SEQ ID NO: 198328 - DNA, 424 bp, Homo sapiens
cccatcgttggcactactgacatttcgaccagacgaatctttgtcgggattgggtctgttttgtgcattctaagacgttgagcagtatccctggcctctacccacgagatgcaagtagcacccccgtccgttgtaacaacttttttttttttaaagagaccgaatctcactctgtcgcccaggctggagtgcagtggcacgatgtcagctcactgcaacctccacctcctgggttcaagcgattcccctgcctcagcttcccaggtagctgggattacaggcacccgccaccatgctcagctaatttttatttttttatttttttagtagagatcaatttcacctggtctcgaactcctgacctcrtgatctgcctgcctcagcctcccaaagtgctgggattacaggcatgagccaccacgtg

SEQ ID NO: 198329 - DNA, 395 bp, Homo sapiens
caatatgatgagacctcatttctacaaaaaattagctgggcatggtggcacacagctgtggtcccagccattcgggaggctgaggaggatcgcctgagctcaggatgtcaaggctgcagtgagctgtgatcgtgccactgtgtgacagcctgggcaacagagtgagatggacggatggayggacagacggatgggtggacagacggatagatagatagatagacagacagacagacagaccgatagatagattgattgatttgtaagggaaaaatacaaatgttccaagtcagcactttgcaaatggaggggccgtattcgtgaagcaggtggtgtagcatcagcctcacagacctcattgccccataaatctcatcaaataggagcaagaattc

SEQ ID NO: 198330 - DNA, 392 bp, Homo sapiens
gcttgagctcaggaattcgagaccagcctcagcaatatgatgagacctcatttctacaaaaaattagctgggcatggtggcacacagctgtggtcccagccattcgggaggctgaggaggatcgcctgagctcaggatgtcaaggctgcagtgagctgtgatcgtgccactgtgtgacagcctgggcaacagagtgagatggacggatggacggacagacrgatgggtggacagacggatagatagatagatagacagacagacagacagaccgatagatagattgattgatttgtaagggaaaaatacaaatgttccaagtcagcactttgcaaatggaggggccgtattcgtgaagcaggtggtgtagcatcagcctcacagacctcatt

SEQ ID NO: 198331 - DNA, 376 bp, Homo sapiens
gtcctagaaggaaaatgaagagaggccaggcatggtggctcacgcctgtaatcccagcactctgagaggctgaggcaggcggatcgcttgaggtcaggagttcaagaccagcctcgtcaagatagtgaaaccctgtctttattaaaaagacaaaatgagccaggcgtggtggcgggcacctgtaatcccagctactcaggaggctgaggcaggagtatcgcttgaacctaagaggcagaggtcacagtgagctgagatcgtaccactgcactccagcctgggmgacagagggagacatggtctcaaaaaaaagaaagaaagaaagaaaaagaaaagaaaagaaagaaaagaagcaaaaaaatgaagagaaaccagg

SEQ ID NO: 198332 - DNA, 585 bp, Homo sapiens
cagcccggcgtggtggtgcacacctgcattcccagctactcgggaggctgaggtgggaggactgcctgggcccaggtcaaagctgcagtgagccctgactgtgccactgcactctagcctgggcaacacagcaagagctctctcacacaaacaagcaaacaatcaaagacacagatgtcatcaaatcaacaactgacagacaattattgtcctagaaggaaaatgaagagaggccaggcatggtggctcacgcctgtaatcccagcactctgagaggctgaggcaggcggatcgcttgaggtcaggagttcaagaccagcctcgtcaagatagtgaaaccctgtctttattaaaaagacaaaatgagccaggcgtggtggcgggcacctgtaatcccagctactcaggaggctgaggcaggagtatcgcttgaacctaagaggcagaggtcacagtgagctgagatcgtaccactgcactccagcctgggcracagagggagacatggtctcaaaaaaaagaaagaaagaaagaaaaagaaaagaaaagaaagaaaagaagcaaaaaaatgaagagaaaccaggt

SEQ ID NO: 198333 - DNA, 585 bp, Homo sapiens
cagcccggcgtggtggtgcacacctgcattcccagctactcgggaggctgaggtgggaggactgcctgggcccaggtcaaagctgcagtgagccctgactgtgccactgcactctagcctgggcaacacagcaagagctctctcacacaaacaagcaaacaatcaaagacacagatgtcatcaaatcaacaactgacagacaattattgtcctagaaggaaaatgaagagaggccaggcatggtggctcacgcctgtaatcccagcactctgagaggctgaggcaggcggatcgcttgaggtcaggagttcaagaccagcctcgtcaagatagtgaaaccctgtctttattaaaaagacaaaatgagccaggcgtggtggcgggcacctgtaatcccagctactcaggaggctgaggcaggagtatcgcttgaacctaagaggcagaggtcacagtgagctgagatcgtaccactgcactccagcctgggcgacagagggagacayggtctcaaaaaaaagaaagaaagaaagaaaaagaaaagaaaagaaagaaaagaagcaaaaaaatgaagagaaaccaggt

SEQ ID NO: 198334 - DNA, 603 bp, Homo sapiens
agaattttcccagagaaggtgtgcatctgcttctgctgtcatctgggaacactatcagcccaacaccatctgaattaatcctttgtggcaggcctttktggaccacactggtggtaaggctgcacacccaaagcttagggcttgtggttcaaattctcagagaaatgtttttttctttctctatttagtgtcaaggttgagacttgcatgcttctttatggtcccttttctggatggtcaagttaatttctcatttatccctaggtgtaccagccttgtgggttaggtctcctactaaactccctgtcctgagtgtttttcccttcttagaggtatataatgtaatagcactttttaaaaataatctatgacatcttagattcgatgaaatatggtaccttaaataagcttctccagtctattgagtaggctccagaacttctacacaacgactcattatactgcaacctcttttattctctttaggatttcctctttaaaccgttagctttacatactgcagaccaagagcaatgttgtactgtatttctacaaagaacttaattaacatgtacagtaaaaaagtcagaaaataaaatgtct

SEQ ID NO: 198335 - DNA, 603 bp, Homo sapiens
agaattttcccagagaaggtgtgcatctgcttctgctgtcatctgggaacactatcagcccaacaccatctgaattaatcctttgtggcaggcctttttggaccacactggtggtaaggctgcacacccaaagcttagggyttgtggttcaaattctcagagaaatgtttttttctttctctatttagtgtcaaggttgagacttgcatgcttctttatggtcccttttctggatggtcaagttaatttctcatttatccctaggtgtaccagccttgtgggttaggtctcctactaaactccctgtcctgagtgtttttcccttcttagaggtatataatgtaatagcactttttaaaaataatctatgacatcttagattcgatgaaatatggtaccttaaataagcttctccagtctattgagtaggctccagaacttctacacaacgactcattatactgcaacctcttttattctctttaggatttcctctttaaaccgttagctttacatactgcagaccaagagcaatgttgtactgtatttctacaaagaacttaattaacatgtacagtaaaaaagtcagaaaataaaatgtct

SEQ ID NO: 198336 - DNA, 603 bp, Homo sapiens
agaattttcccagagaaggtgtgcatctgcttctgctgtcatctgggaacactatcagcccaacaccatctgaattaatcctttgtggcaggcctttttggaccacactggtggtaaggctgcacacccaaagcttagggcttgtggttcaaattctcagagaaatgtttttttctttctctatttagtgtcaaggttgagacttgcatgcttctttatggtcccttttctggatggtcaagttaatttctcatttatccctaggtgtaccagccttgtgggttaggtctcctactaaactccctgtcctgagtgtttttyccttcttagaggtatataatgtaatagcactttttaaaaataatctatgacatcttagattcgatgaaatatggtaccttaaataagcttctccagtctattgagtaggctccagaacttctacacaacgactcattatactgcaacctcttttattctctttaggatttcctctttaaaccgttagctttacatactgcagaccaagagcaatgttgtactgtatttctacaaagaacttaattaacatgtacagtaaaaaagtcagaaaataaaatgtct

SEQ ID NO: 198337 - DNA, 603 bp, Homo sapiens
agaattttcccagagaaggtgtgcatctgcttctgctgtcatctgggaacactatcagcccaacaccatctgaattaatcctttgtggcaggcctttttggaccacactggtggtaaggctgcacacccaaagcttagggcttgtggttcaaattctcagagaaatgtttttttctttctctatttagtgtcaaggttgagacttgcatgcttctttatggtcccttttctggatggtcaagttaatttctcatttatccctaggtgtaccagccttgtgggttaggtctcctactaaactccctgtcctgagtgtttttcccttcttagaggtatataatgtaatagcactttttaaaaataatctatgacatcttagattcgatgaaatatggtaccttaaataagcttctcmagtctattgagtaggctccagaacttctacacaacgactcattatactgcaacctcttttattctctttaggatttcctctttaaaccgttagctttacatactgcagaccaagagcaatgttgtactgtatttctacaaagaacttaattaacatgtacagtaaaaaagtcagaaaataaaatgtct

SEQ ID NO: 198338 - DNA, 494 bp, Homo sapiens
gtcatggggtgggactctaatctgatagaactggtgtcrttttaagacaaggtgagactacagtactctcccctttgccatgtgaggacaagatgccagccaacctataagccaggaagaaagccctcatcaggaaccgaagcagcagcaccctgatctacagcttctagcctccagaaccgtgagaaaattaagccacccagttctatggtattttattatggcagcccaagctgactaatagagatcctttgcacggtaaccaaaacagtgcctaccctgtgtcatctagttttcagcaacccggacttggattacttaattcagtttcctttgaaatgatgtggcattgttattggtaacatgtaattcagtttattctgaggaaagaaaaacacggctttaaaagcattatgacctgagtaagtagttcactaaaagatttgtaacacaaaagcatgcttttgagtatgagatctagctttccaaaggca

SEQ ID NO: 198339 - DNA, 494 bp, Homo sapiens
gtcatggggtgggactctaatctgatagaactggtgtcattttaagacaaggtgagactacagtactctcccctttgccatgtgaggacaagatgccagccaacctataagccaggaagaaagccctcatcaggaaccraagcagcagcaccctgatctacagcttctagcctccagaaccgtgagaaaattaagccacccagttctatggtattttattatggcagcccaagctgactaatagagatcctttgcacggtaaccaaaacagtgcctaccctgtgtcatctagttttcagcaacccggacttggattacttaattcagtttcctttgaaatgatgtggcattgttattggtaacatgtaattcagtttattctgaggaaagaaaaacacggctttaaaagcattatgacctgagtaagtagttcactaaaagatttgtaacacaaaagcatgcttttgagtatgagatctagctttccaaaggca

SEQ ID NO: 198340 - DNA, 494 bp, Homo sapiens
gtcatggggtgggactctaatctgatagaactggtgtcattttaagacaaggtgagactacagtactctcccctttgccatgtgaggacaagatgccagccaacctataagccaggaagaaagccctcatcaggaaccgaagcagcagcaccctgatctacagcttctagcctccagaaccgtgagaaaattaagccacccagttctatggtattttattatggcagcccaagctgactaatagagatcctttgcacggtaaccaaaacagtgcctaccctgtgtcatctagttttcagcaacccggacttggattacttaattcagtttcctttgaaatgatgtggcattgttattggtaacatgtaattcagtttattctgaggaaagaaaarcacggctttaaaagcattatgacctgagtaagtagttcactaaaagatttgtaacacaaaagcatgcttttgagtatgagatctagctttccaaaggca

SEQ ID NO: 198341 - DNA, 494 bp, Homo sapiens
gtcatggggtgggactctaatctgatagaactggtgtcattttaagacaaggtgagactacagtactctcccctttgccatgtgaggacaagatgccagccaacctataagccaggaagaaagccctcatcaggaaccgaagcagcagcaccctgatctacagcttctagcctccagaaccgtgagaaaattaagccacccagttctatggtattttattatggcagcccaagctgactaatagagatcctttgcacggtaaccaaaacagtgcctaccctgtgtcatctagttttcagcaacccggacttggattacttaattcagtttcctttgaaatgatgtggcattgttattggtaacatgtaattcagtttattctgaggaaagaaaaacasggctttaaaagcattatgacctgagtaagtagttcactaaaagatttgtaacacaaaagcatgcttttgagtatgagatctagctttccaaaggca

SEQ ID NO: 198342 - DNA, 374 bp, Homo sapiens
gagatctagctttccaaaggcatttaaaaattatagagactcagtggctatgaatgatgaggtactcttcatctgcctctagccatgtgctctgactttaaaaccagagacccttcaagtaargtccacgttagtaagtgctgaaatgggtaattatttttcatgattacaacagcaagcttatgtaactacgctgagagggaaaagttaattccatgagaaaatcctattgagcgactgaaataaattaggaaaaggaaaggaaatgcagatttcaaatggttccgttttcaacgatctgaaatctgtattcaaggccaatttctggaaaaacaatttatgtgaatatttatttcctagaaagaatactaatg

SEQ ID NO: 198343 - DNA, 374 bp, Homo sapiens
gagatctagctttccaaaggcatttaaaaattatagagactcagtggctatgaatgatgaggtactcttcatctgcctctagccatgtgctctgactttaaaaccagagacccttcaagtaaggtccacgttagtaagtgctgaaatgggtaattatttttcatgatyacaacagcaagcttatgtaactacgctgagagggaaaagttaattccatgagaaaatcctattgagcgactgaaataaattaggaaaaggaaaggaaatgcagatttcaaatggttccgttttcaacgatctgaaatctgtattcaaggccaatttctggaaaaacaatttatgtgaatatttatttcctagaaagaatactaatg

SEQ ID NO: 198344 - DNA, 252 bp, Homo sapiens
attatttttcatgattacaacagcaagcttatgtaactaygctgagagggaaaagttaattccatgagaaaatcctattgagcgactgaaataaattaggaaaaggaaaggaaatgcagatttcaaatggttccgttttcaacgatctgaaatctgtattcaaggccaatttctggaaaaacaatttatgtgaatatttatttcctagaaagaatactaatgtaggctagtattttaaccaaatctaaaatc

SEQ ID NO: 198345 - DNA, 548 bp, Homo sapiens
cttcaagtaaggtccacgttagtaagtgctgaaatgggtaattatttttcatgattacaacagcaagcttatgtaactacgctgagagggaaaagttaattccatgagaaaatcctattgagcgactgaaataaattaggaaaaggaaaggaaatgcagatttcaaatggttccgttttcaacgatctgaaatctgtattcaaggccaatttctggaaaaacaatttatgtgaatatttatttcctagaaagaatactaatgtaggctagtattttaaccaaatctaaaatcagatctcttttttaaaagtttaagacagcctgtgtgataatttttatttatttaaaagaatctgtcttctaaaatatttaatacacatctcttataatccagttgctagttgaaacaggrtacaggttaaataagatagtatttctaaatggattctgaatggattaagactcaataaaatggacattttattgagtgaatggagagatctaatccatctggcaagtcagttaagagagcttctgctgccattttt

SEQ ID NO: 198346 - DNA, 548 bp, Homo sapiens
cttcaagtaaggtccacgttagtaagtgctgaaatgggtaattatttttcatgattacaacagcaagcttatgtaactacgctgagagggaaaagttaattccatgagaaaatcctattgagcgactgaaataaattaggaaaaggaaaggaaatgcagatttcaaatggttccgttttcaacgatctgaaatctgtattcaaggccaatttctggaaaaacaatttatgtgaatatttatttcctagaaagaatactaatgtaggctagtattttaaccaaatctaaaatcagatctcttttttaaaagtttaagacagcctgtgtgataatttttatttatttaaaagaatctgtcttctaaaatatttaatacacatctcttataatccagttgctagttgaaacagggtacaggttaaataagatagtatttctaaatggattctgaayggattaagactcaataaaatggacattttattgagtgaatggagagatctaatccatctggcaagtcagttaagagagcttctgctgccattttt

SEQ ID NO: 198347 - DNA, 548 bp, Homo sapiens
cttcaagtaaggtccacgttagtaagtgctgaaatgggtaattatttttcatgattacaacagcaagcttatgtaactacgctgagagggaaaagttaattccatgagaaaatcctattgagcgactgaaataaattaggaaaaggaaaggaaatgcagatttcaaatggttccgttttcaacgatctgaaatctgtattcaaggccaatttctggaaaaacaatttatgtgaatatttatttcctagaaagaatactaatgtaggctagtattttaaccaaatctaaaatcagatctcttttttaaaagtttaagacagcctgtgtgataatttttatttatttaaaagaatctgtcttctaaaatatttaatacacatctcttataatccagttgctagttgaaacagggtacaggttaaataagatagtatttctaaatggattctgaatggattaaractcaataaaatggacattttattgagtgaatggagagatctaatccatctggcaagtcagttaagagagcttctgctgccattttt

SEQ ID NO: 198348 - DNA, 584 bp, Homo sapiens
agagatctaatccatctggcaagtcagttaagagagcttctgctgccatttttattgacatgtaatagtgtaataaactcacatgtaatactgtaaagctctgtaaaaaaattttaacctagcctatttgtttaaaggagatgttaacaattcatgctcccttgaaccacttcatttttgcttttaggacaggactgttcattaacacacacaatcaattactaaacacaattactgaaataaatattatcaagcagtaaccaaaaaattcaacgtaaggctatcatacccaaactccaatatccagaagccaatttaagtaacccatgcctccttggcaaaagtgtatggatattaccttttccttgtgatagtaaaacctatccattttcttacatcacccaagtatcagcttttacacttcyacaaataaagcagacaatgaacatactgtgtagaaatcttgagcccttaattaaaaggtactcacagagttgtatctaaatcattggctacaatgatctaaaacacacacacacagttatatctaggtcatttgctacagtgatctaaaccacttcatt

SEQ ID NO: 198349 - DNA, 584 bp, Homo sapiens
agagatctaatccatctggcaagtcagttaagagagcttctgctgccatttttattgacatgtaatagtgtaataaactcacatgtaatactgtaaagctctgtaaaaaaattttaacctagcctatttgtttaaaggagatgttaacaattcatgctcccttgaaccacttcatttttgcttttaggacaggactgttcattaacacacacaatcaattactaaacacaattactgaaataaatattatcaagcagtaaccaaaaaattcaacgtaaggctatcatacccaaactccaatatccagaagccaatttaagtaacccatgcctccttggcaaaagtgtatggatattaccttttccttgtgatagtaaaacctatccattttcttacatcacccaagtatcagcttttacacttctacaaataaagcagacaatgaacatactgtgtagaaatcttgagcccttaattaaaaggtactcacagagttgtatctaaatcattggctacaatgatctaaaacacacacacacagttatakctaggtcatttgctacagtgatctaaaccacttcatt

SEQ ID NO: 198350 - DNA, 562 bp, Homo sapiens
aattgtctgtttccaggtgacatgaacatatatagagagaaccctaaagattccacaaaaaacctactagaaataataaattagtcaagttccaagatacagtatcaaaatataaaaatgaatactacacccatgcaccaatagtgaaatatctaagaaagaaatcragaaagctatttcattaccaaaaaaatgatatctaggaataaacttaaccaaaaaggcaagagatcccaaaatgaaaacttcataaaacatagatgaaagatactaaagcagacacaagtaaatggaaagatatcccatctctatgcactagaagaatgttaaaatatgtgtatcacccaatgtgatctacagaatcaatgcaatccatgttcaattacaagacattcttcattgaaatagaaaaagaatctcaaaattcacatggaagttcaaaatacctcagatagacaaaagaatctggaataaaaagaaaagctggaggcatcacactacctgatttcaaaatatactacaaatttatagtaaggatggtactatcaaaacagtatggtac

SEQ ID NO: 198351 - DNA, 562 bp, Homo sapiens
aattgtctgtttccaggtgacatgaacatatatagagagaaccctaaagattccacaaaaaacctactagaaataataaattagtcaagttccaagatacagtatcaaaatataaaaatgaatactacacccatgcaccaatagtgaaatatctaagaaagaaatcgagaaagctatttcattaccaaaaaaatgatatctaggaataaacttaaccaaaaaggcaagagatcccaaaatgaaaacttcataaaacatagatgaaagatactaaagcagacacaagtaaatggaaagatatcccatctctatgcactagaagaatgttaaaatatgtgtatcacccaatgtgatctacagaatcaatgcaatccatgttcaattacaagacattcttcaytgaaatagaaaaagaatctcaaaattcacatggaagttcaaaatacctcagatagacaaaagaatctggaataaaaagaaaagctggaggcatcacactacctgatttcaaaatatactacaaatttatagtaaggatggtactatcaaaacagtatggtac

SEQ ID NO: 198352 - DNA, 562 bp, Homo sapiens
aattgtctgtttccaggtgacatgaacatatatagagagaaccctaaagattccacaaaaaacctactagaaataataaattagtcaagttccaagatacagtatcaaaatataaaaatgaatactacacccatgcaccaatagtgaaatatctaagaaagaaatcgagaaagctatttcattaccaaaaaaatgatatctaggaataaacttaaccaaaaaggcaagagatcccaaaatgaaaacttcataaaacatagatgaaagatactaaagcagacacaagtaaatggaaagatatcccatctctatgcactagaagaatgttaaaatatgtgtatcacccaatgtgatctacagaatcaatgcaatccatgttcaattacaagacattcttcattgaaatagaaaaagaatctyaaaattcacatggaagttcaaaatacctcagatagacaaaagaatctggaataaaaagaaaagctggaggcatcacactacctgatttcaaaatatactacaaatttatagtaaggatggtactatcaaaacagtatggtac

SEQ ID NO: 198353 - DNA, 562 bp, Homo sapiens
aattgtctgtttccaggtgacatgaacatatatagagagaaccctaaagattccacaaaaaacctactagaaataataaattagtcaagttccaagatacagtatcaaaatataaaaatgaatactacacccatgcaccaatagtgaaatatctaagaaagaaatcgagaaagctatttcattaccaaaaaaatgatatctaggaataaacttaaccaaaaaggcaagagatcccaaaatgaaaacttcataaaacatagatgaaagatactaaagcagacacaagtaaatggaaagatatcccatctctatgcactagaagaatgttaaaatatgtgtatcacccaatgtgatctacagaatcaatgcaatccatgttcaattacaagacattcttcattgaaatagaaaaagaatctcaaaattcacatggaagttcaaaatacctcagatagacaaaagaatstggaataaaaagaaaagctggaggcatcacactacctgatttcaaaatatactacaaatttatagtaaggatggtactatcaaaacagtatggtac

SEQ ID NO: 198354 - DNA, 611 bp, Homo sapiens
tggttgtataatcgggtgtgggacctctctcctctccctgtcttgctcctcctcctgccacatgaatcatctcattgccccttgacattctggtatgactgggaggcttcctgattcctcttagatgtagaagccactatacttccttatagcctgcagaatcatgagccaagtaaacctcttctttatgatcatagagaaaattagtactgcaaagtgggtctattaaatgtcttcaaggccttttccctattgtcttggkagtgagcactcagcttcttttcattgaagtctctgaacccttcttgaattttccccctgaaaatggacttgtcttcccttactacattgtcaggctgcagcaaagatagctgataatgtagaagcaggttcagaagggggtagcagacagagttcagagagtttggagggctttgcagacaagaagttgagggaaagtttggatctttgtaaagaattgttacatacttgtgaccagaaggctcacaggaaaatggtgagtgaaagccagacttagaaggtctcaaatgaaaatgaggaacttactgggaacagaagccaaagtgacttttgttttgccttaacaaaga

SEQ ID NO: 198355 - DNA, 611 bp, Homo sapiens
tggttgtataatcgggtgtgggacctctctcctctccctgtcttgctcctcctcctgccacatgaatcatctcattgccccttgacattctggtatgactgggaggcttcctgattcctcttagatgtagaagccactatacttccttatagcctgcagaatcatgagccaagtaaacctcttctttatgatcatagagaaaattagtactgcaaagtgggtctattaaatgtcttcaaggccttttccctattgtcttgggagtgagcactcagcttcttttcattsaagtctctgaacccttcttgaattttccccctgaaaatggacttgtcttcccttactacattgtcaggctgcagcaaagatagctgataatgtagaagcaggttcagaagggggtagcagacagagttcagagagtttggagggctttgcagacaagaagttgagggaaagtttggatctttgtaaagaattgttacatacttgtgaccagaaggctcacaggaaaatggtgagtgaaagccagacttagaaggtctcaaatgaaaatgaggaacttactgggaacagaagccaaagtgacttttgttttgccttaacaaaga

SEQ ID NO: 198356 - DNA, 467 bp, Homo sapiens
ttaaggtataaacaacaataattttgcaaattattagtaactgccaactcaattagtgtcttgttaaaaagatactgttatgaagtaaagtgttacattgtatattttgactgtatttcaaaattttgttttgtttctaacagttttgttgatttatgttgggtggaacaatttgtgagtgaccctgagatttcatatggcttgaacctggtgatwtctaatgtctccccaagtggtttgttgaagttttggatgattagaagtatttcttaaagaactaaatatttcagtaaacattaagcttcattgaaactctcaaaatataaaatacaaagaaatgttattctctatttatttttatatagattatagtctttatctaactgttcttagttcatttgaactaaaccaatgaatttgtcaacagaacaagccttaccagtggcttcagaggaagagcaacaaag

SEQ ID NO: 198357 - DNA, 499 bp, Homo sapiens
ttattgttataaccttactcataatacagaaggtaacatgaaatattgggtcatattattaaggaatagaaattgtgaacaatttaacaatgatggccactgagttaaactagtgttaaaggagtcatcattgccagtggttcaaatgttgcagttttacattgctggtcatcagtgccgaggttaaagatttattctgttttgtggtcacsatttgacttctgtgtctgtgttcagggagtgaatggggtcataaaagtcaacccagttgcctattaagagaatcctaccttgtggaatgggacctttggtgtcagggtacaaacaataactttattttgacataaatacatagtaaatgttactaaaatttaaaaaatccatccactatcactagtggaacttaaaatatattagaagtggatataagcagataatccatctagatacataacactatcatagtatattatttgaattagaatttaaaattttgctt

SEQ ID NO: 198358 - DNA, 572 bp, Homo sapiens
aagtccaacttcaaaaagacagaggttcacttgctgcttctttttcctctttatcaattatttgatttagtcaaattttctattcaagaaaatctcatgtgtacagttacagtggggttatctaaatgtgtaattatgtgtcaaagtagattagttctgctatctaaataatggttctggagaatgttctcataatgtttgttcattaatcaacctatgtctcactatcagtcttccaagtggcgtatgagctgggaaactaattaagccacataccatgtgaccttctgaaccagatcaacataaagaaattgctaaagaaacaagctctagattctagattcttttttcttgtattcatttagagatgatttacatttatttaatgatagaatgggaatacaatgggaggraagcaatgactgagacaagccacaaaaacacgtctagccttgagagttgcaacgaatattcccagccaaatgagtctgtttaatgtgttttcatgcatgcaagtttatctgcttagctcgaactgtttgaacttacagtcccatcatggttatttccaa

SEQ ID NO: 198359 - DNA, 337 bp, Homo sapiens
tttatttaatgatagaatgggaatacaatgggagggaagcaatgactgagacaagccacaaaaacacgtctagccttgagakttgcaacgaatattcccagccaaatgagtctgtttaatgtgttttcatgcatgcaagtttatctgcttagctcgaactgtttgaacttacagtcccatcatggttatttccaatatttttgaaaacaaacatatacttacacatattttaaaaaatcaccactctgcaatatttctgttgtatcagaccttacgttatgttgtttaataaagtatggtaagttttggcatgtatgatttttatcatataagaagc

SEQ ID NO: 198360 - DNA, 572 bp, Homo sapiens
aagtccaacttcaaaaagacagaggttcacttgctgcttctttttcctctttatcaattatttgatttagtcaaattttctattcaagaaaatctcatgtgtacagttacagtggggttatctaaatgtgtaattatgtgtcaaagtagattagttctgctatctaaataatggttctggagaatgttctcataatgtttgttcattaatcaacctatgtctcactatcagtcttccaagtggcgtatgagctgggaaactaattaagccacataccatgtgaccttctgaaccagatcaacataaagaaattgctaaagaaacaagctctagattctagattcttttttcttgtattcatttagagatgatttacatttatttaatgatagaatgggaatacaatgggagggaagcaatgactgagacaagccacaaaaacacgtctagccttgagagttgcaacgaatattcccagccaaatgagtctgtttaatgtrttttcatgcatgcaagtttatctgcttagctcgaactgtttgaacttacagtcccatcatggttatttccaa

SEQ ID NO: 198361 - DNA, 572 bp, Homo sapiens
aagtccaacttcaaaaagacagaggttcacttgctgcttctttttcctctttatcaattatttgatttagtcaaattttctattcaagaaaatctcatgtgtacagttacagtggggttatctaaatgtgtaattatgtgtcaaagtagattagttctgctatctaaataatggttctggagaatgttctcataatgtttgttcattaatcaacctatgtctcactatcagtcttccaagtggcgtatgagctgggaaactaattaagccacataccatgtgaccttctgaaccagatcaacataaagaaattgctaaagaaacaagctctagattctagattcttttttcttgtattcatttagagatgatttacatttatttaatgatagaatgggaatacaatgggagggaagcaatgactgagacaagccacaaaaacacgtctagccttgagagttgcaacgaatattcccagccaaatgagtctgtttaatgtgttttcatgcatgcaagtttatctgcttagctcraactgtttgaacttacagtcccatcatggttatttccaa

SEQ ID NO: 198362 - DNA, 337 bp, Homo sapiens
tttatttaatgatagaatgggaatacaatgggagggaagcaatgactgagacaagccacaaaaacacgtctagccttgagagttgcaacgaatattcccagccaaatgagtctgtttaatgtgttttcatgcatgcaagtttatctgcttagctcgaactgtttgaacttacagtcccatcatggttatttccaatatttttgaaaacaaacatatacttacacatattttaaaaaatcaccaytctgcaatatttctgttgtatcagaccttacgttatgttgtttaataaagtatggtaagttttggcatgtatgatttttatcatataagaagc

SEQ ID NO: 198363 - DNA, 392 bp, Homo sapiens
atttatttaatgatagaatgggaatacaatgggagggaagcaatgactgagacaagccacaaaaacacgtctagccttgagagttgcaacgaatattcccagccaaatgagtctgtttaatgtgttttcatgcatgcaagtttatctgcttagctcgaactgtttgaacttacagtcccatcatggttatttccaatatttttgaaaacaaacatatacttacacatattttaaaaaatcaccactctgcaatatttctgttgwatcagaccttacgttatgttgtttaataaagtatggtaagttttggcatgtatgatttttatcatataagaagcataatttcttagccaaaaatttagcctttgactctagtagaaagttgagttctg

SEQ ID NO: 198364 - DNA, 438 bp, Homo sapiens
tttggcatgtatgatttttatcatataagaagcataatttcttagccaaaaatttagcctttgactctagtagaaagttgagttctgtacattgtgttctaaagatagacaaaaatctagagattttcttctttcaaagtaaaagcagatgaggcctttttccaccctctgaggcattaaattgctttgctcaagttagacttttaatatatctaatttgataaatttatctggyaatttatgtaattcagcaatatggaattgtatcatgttatatggtgccatgaaatgctagtgaatgccacctcaagagctctggatgaaacatttaatatgtcttggttggtttgactcccattatcagtagataatggggttaaagtaggtaactgtaccatatgttttccacctataaacttttgtggtaattgaatgtga

SEQ ID NO: 198365 - DNA, 438 bp, Homo sapiens
tttggcatgtatgatttttatcatataagaagcataatttcttagccaaaaatttagcctttgactctagtagaaagttgagttctgtacattgtgttctaaagatagacaaaaatctagagattttcttctttcaaagtaaaagcagatgaggcctttttccaccctctgaggcattaaattgctttgctcaagttagacttttaatatatctaatttgataaatttatctggtaatttatgtaattcagcaatatggaattgtatcatgttatatggtgccatgaaatgctagtgaatgccacctcaagagctctggatgaaacatttaatatgtcttggttggtttgactcccattatcagtagataatgsggttaaagtaggtaactgtaccatatgttttccacctataaacttttgtggtaattgaatgtga

SEQ ID NO: 198366 - DNA, 438 bp, Homo sapiens
tttggcatgtatgatttttatcatataagaagcataatttcttagccaaaaatttagcctttgactctagtagaaagttgagttctgtacattgtgttctaaagatagacaaaaatctagagattttcttctttcaaagtaaaagcagatgaggcctttttccaccctctgaggcattaaattgctttgctcaagttagacttttaatatatctaatttgataaatttatctggtaatttatgtaattcagcaatatggaattgtatcatgttatatggtgccatgaaatgctagtgaatgccacctcaagagctctggatgaaacatttaatatgtcttggttggtttgactcccattatcagtagataatggrgttaaagtaggtaactgtaccatatgttttccacctataaacttttgtggtaattgaatgtga

SEQ ID NO: 198367 - DNA, 505 bp, Homo sapiens
agttctgctatttccaaagtaaaagatgagaatgagtttcttactgaacaactttctgaaacacaaattaaattcaatgccttaaaagataagttccgtaagacaagagatagtctcagaaaaaagtcattggctttagaaactgtacaaaacracctaagccaaacacagcagcaaacacaggaaatgaaagagatgtatcaaaatgcagaagctaaagtgaataattccactggaaagtggaactgtgtagaagagaggatatgtcacctccaacgtgaaaatgcgtggcttgtacagcaactagatgacgttcatcagaaagaggatcataaagagatagtaactaatatccaaagaggctttattgagagtggaaagaaagacttcgtgctagaagagaaaagtaagaagctaatgaatgaatgtgatcatttaaaagaaagtctctttcagtatgagagagagaaaacagaagtagtagtaagtatcaaggaagataaat

SEQ ID NO: 198368 - DNA, 594 bp, Homo sapiens
tataagcaaacacagtgaaagtgtgaaaacagaaagaaacctaaaacttgctttagagagaacacaagatgtttctgtacaagtagaaatgagttctgctatttccaaagtaaaagatgagaatgagtttcttactgaacaactttctgaaacacaaattaaattcaatgccttaaaagataagttccgtaagacaagagatagtctcagaaaaaagtcattggctttagaaactgtacaaaacaacctaagccaaacacagcagcaaacacaggaaatgaaagagatgtatcaaaatgcagaagctaaagtgaataattccactggaaagtggaactgtgtagaagagaggatatgtcacctccaacgtgaaaatgcgtggcttgtacagcaactagatgacgttcatcagaaagaggatcataaagagatagtaactaatatccaaagaggctttattgagagtggaaagaaagacytcgtgctagaagagaaaagtaagaagctaatgaatgaatgtgatcatttaaaagaaagtctctttcagtatgagagagagaaaacagaagtagtagtaagtatcaaggaagataa

SEQ ID NO: 198369 - DNA, 594 bp, Homo sapiens
tataagcaaacacagtgaaagtgtgaaaacagaaagaaacctaaaacttgctttagagagaacacaagatgtttctgtacaagtagaaatgagttctgctatttccaaagtaaaagatgagaatgagtttcttactgaacaactttctgaaacacaaattaaattcaatgccttaaaagataagttccgtaagacaagagatagtctcagaaaaaagtcattggctttagaaactgtacaaaacaacctaagccaaacacagcagcaaacacaggaaatgaaagagatgtatcaaaatgcagaagctaaagtgaataattccactggaaagtggaactgtgtagaagagaggatatgtcacctccaacgtgaaaatgcgtggcttgtacagcaactagatgacgttcatcagaaagaggatcataaagagatagtaactaatatccaaagaggctttattgagagtggaaagaaagacttcgtgctagaagagaaaagtaagaagctaatgaatgaatgtgatcatttaaaagaaagtctctttcagtatgagagagagaaaacagaagkagtagtaagtatcaaggaagataa

SEQ ID NO: 198370 - DNA, 586 bp, Homo sapiens
aaagggaaaaactgaaacctgtgggtgaatacttagaatgacagtatttagctcagcctgaagacagatgaggatgaaaaatgtaatgggaactagataagagttttctaaaatttgtcttagtaagatgtaatttaagaaaacttggaatatcttaaactgttaaaaacaatatttctagagcatctttaaaaactaaaatgtaaatataactactcttttttttaaactaacccttagtattttgtgtgtaaaaaccctcatttgtaacaaacattgttggcagtttaaatttcagaaaagataatgatgaaaatttgaatcatttttagcagttttaagaaaagtgactattattgaaatctgaccttattggcgtcaggtttataaaatgcactttatacacctgcataaatacgtattactaatccacttatgagaaataatatttttgagatgagggtttccagattttacaaaaataattttaaacactttttttaagcctaaaaaagaaaatgaagaattaagaaaactttttgagttaatatcatcactgaartataatgtgaatcgaataagaaag

SEQ ID NO: 198371 - DNA, 507 bp, Homo sapiens
ggcctgctactccagatgatgagcaaatgaaggaagccacttccatccttaactgtgaaaaatgagtaggggaaggtggtgcattctgggtcccatgattccagactgaccattggccctatttgagtgcagctgctgttaggcagaaactctggactccaaactctcagtaaaacttctgaagacactgctgttgctattgcagctgtcagcaccattgattcagctgagaagaagtccagaatatcacactgacacccaygctgttggttgtgtttttttgaaccagattgaaattaatatctattgtatggttcaatttctatgaagttcaatgtcaagcaaatgtaatttataaagataaaagtaagaacagtggttgcctatagtaatgattggaggttcacaatagagactcctggattctagtaatactcaattcatattcatgtaggttgtgatgacattagtattttacattctaaaaatgtttaatgctatatgctc

SEQ ID NO: 198372 - DNA, 414 bp, Homo sapiens
attgtccaaatttacaaggaaagagaaaatgaattstgtgttcatcttacagtttctaataaaatccccaacattgaacttaaatgactctccagttgttcattaggagcatatgctgttggttgactgccagcatacattatctcaccttttctttctaagatagaacatattcaatacatccaaggcttccaaggcttcagtacttctctaagtttactgtctcgtcttcagattcaggtatgatgtgattactctaagtatagcctgattctttgccaaaaataagaacaaaaatacgcatatgacccaattcagtacaaaggcaaatcagggcaaattaccttaagagtttttaaaataaatgtttctcttggtgtctctttcttggtcttctgggtagggttgtatctg

SEQ ID NO: 198373 - DNA, 379 bp, Homo sapiens
catttggcagtgaagaatttactcctcccatattttcattcaagagaaatttccatgaggagggttgttggtgggttacctccaactcacccacttcagagctactacagtggtaatgcatgttgaagaaaagagtcaaactctgtgaaatatttgaagagatttattctgaggcaaatatgagtgacctcggcctgtcacacagcccaggagatcctaagaacatstgccaaggttgttggactacagcttggatttatacatgtgagggagacataagacatcaataagtacacctaagatacacattggtaaaattgggaaaggtgagacaactcaaagcaggtgggggtggggtgggtgaaggcttccaggttaa

SEQ ID NO: 198374 - DNA, 379 bp, Homo sapiens
catttggcagtgaagaatttactcctcccatattttcattcaagagaaatttccatgaggagggttgttggtgggttacctccaactcacccacttcagagctactacagtggtaatgcatgttgaagaaaagagtcaaactctgtgaaatatttgaagagatttattctgaggcaaatatgagtgacctcggcctgtcacacagcccaggagatcctaagaacatctgccaaggttgttggactacagcttggatttatacatgtgagggagacataagacatcaatmagtacacctaagatacacattggtaaaattgggaaaggtgagacaactcaaagcaggtgggggtggggtgggtgaaggcttccaggttaa

SEQ ID NO: 198375 - DNA, 425 bp, Homo sapiens
gaattcaaagattttctgaytggcatttgacaactggctaaaataatttatctaaagactggaatcaatagacaggagtgtatgggttaagataaggtgttttagagaccgaggttcttatgcagatgaagcttgcaggtagcaggcttcactgagaatagattgtaaatgatttttatcagacataaaaaggaaaaaggacttggaatcaggaaaaatcaggaaaaagacttggaaagagaaggggattctctacaaaatggagattttccccacagaaacagccttgtagggccatttcaaaatatgtcaaagaaatgtatttttgtggtgaaatactttgatttctttcaaggcctgctatctgtcatgttgatatcttattgctacgaagagtctgttttgtcattcttaagtctctactt

SEQ ID NO: 198376 - DNA, 425 bp, Homo sapiens
gaattcaaagattttctgattggcatttgacaactggctaaaataatttatctaaagacyggaatcaatagacaggagtgtatgggttaagataaggtgttttagagaccgaggttcttatgcagatgaagcttgcaggtagcaggcttcactgagaatagattgtaaatgatttttatcagacataaaaaggaaaaaggacttggaatcaggaaaaatcaggaaaaagacttggaaagagaaggggattctctacaaaatggagattttccccacagaaacagccttgtagggccatttcaaaatatgtcaaagaaatgtatttttgtggtgaaatactttgatttctttcaaggcctgctatctgtcatgttgatatcttattgctacgaagagtctgttttgtcattcttaagtctctactt

SEQ ID NO: 198377 - DNA, 425 bp, Homo sapiens
gaattcaaagattttctgattggcatttgacaactggctaaaataatttatctaaagactggaatcaatagacaggagtgtatgggttaagataaggtkttttagagaccgaggttcttatgcagatgaagcttgcaggtagcaggcttcactgagaatagattgtaaatgatttttatcagacataaaaaggaaaaaggacttggaatcaggaaaaatcaggaaaaagacttggaaagagaaggggattctctacaaaatggagattttccccacagaaacagccttgtagggccatttcaaaatatgtcaaagaaatgtatttttgtggtgaaatactttgatttctttcaaggcctgctatctgtcatgttgatatcttattgctacgaagagtctgttttgtcattcttaagtctctactt

SEQ ID NO: 198378 - DNA, 431 bp, Homo sapiens
aaaggtgaattcaaagattttctgattggcatttgacaactggctaaaataatttatctaaagactggaatcaatagacaggagtgtatgggttaagataaggtgttttagagaccraggttcttatgcagatgaagcttgcaggtagcaggcttcactgagaatagattgtaaatgatttttatcagacataaaaaggaaaaaggacttggaatcaggaaaaatcaggaaaaagacttggaaagagaaggggattctctacaaaatggagattttccccacagaaacagccttgtagggccatttcaaaatatgtcaaagaaatgtatttttgtggtgaaatactttgatttctttcaaggcctgctatctgtcatgttgatatcttattgctacgaagagtctgttttgtcattcttaagtctctactt

SEQ ID NO: 198379 - DNA, 425 bp, Homo sapiens
gaattcaaagattttctgattggcatttgacaactggctaaaataatttatctaaagactggaatcaatagacaggagtgtatgggttaagataaggtgttttagagaccgaggttcttatgcagatgaagcttgcaggtagcaggcttcactgagaatagattgtaaatgatttttatcagacataaaaaggaaaaaggacttggaatcaggaaaaatcaggaaaaagacttggaaagagaaggggattctctacaaaatggagattttccccacagaaacagccttgtaggkccatttcaaaatatgtcaaagaaatgtatttttgtggtgaaatactttgatttctttcaaggcctgctatctgtcatgttgatatcttattgctacgaagagtctgttttgtcattcttaagtctctactt

SEQ ID NO: 198380 - DNA, 413 bp, Homo sapiens
tgaattcaaagattttctgattggcatttgacaactggctaaaataatttatctaaagactggaatcaatagacaggagtgtatgggttaagataaggtgttttagagaccgaggttcttatgcagatgaagcttgcaggtagcaggcttcactgagaatagattgtaaatgatttttatcagacataaaaaggaaaaaggacttggaatcaggaaaaatcaggaaaaagacttggaaagagaaggggattctctacaaaatggagattttccccacagaaacagccttgtagggccatttcaaaatatgtcaaagaaatgtatttttgtrgtgaaatactttgatttctttcaaggcctgctatctgtcatgttgatatcttattgctacgaagagtctgttttgtcattct

SEQ ID NO: 198381 - DNA, 431 bp, Homo sapiens
aaaggtgaattcaaagattttctgattggcatttgacaactggctaaaataatttatctaaagactggaatcaatagacaggagtgtatgggttaagataaggtgttttagagaccgaggttcttatgcagatgaagcttgcaggtagcaggcttcactgagaatagattgtaaatgatttttatcagacataaaaaggaaaaaggacttggaatcaggaaaaatcaggaaaaagacttggaaagagaaggggattctctacaaaatggagattttccccacagaaacagccttgtagggccatttcaaaatatgtcaaagaaatgtatttttgtggtgaaatactttgatttstttcaaggcctgctatctgtcatgttgatatcttattgctacgaagagtctgttttgtcattcttaagtctctactt

SEQ ID NO: 198382 - DNA, 413 bp, Homo sapiens
tgaattcaaagattttctgattggcatttgacaactggctaaaataatttatctaaagactggaatcaatagacaggagtgtatgggttaagataaggtgttttagagaccgaggttcttatgcagatgaagcttgcaggtagcaggcttcactgagaatagattgtaaatgatttttatcagacataaaaaggaaaaaggacttggaatcaggaaaaatcaggaaaaagacttggaaagagaaggggattctctacaaaatggagattttccccacagaaacagccttgtagggccatttcaaaatatgtcaaagaaatgtatttttgtggtgaaatactttgatttctttcaaggcctgctatctgtcatgttgayatcttattgctacgaagagtctgttttgtcattct

SEQ ID NO: 198383 - DNA, 413 bp, Homo sapiens
tgaattcaaagattttctgattggcatttgacaactggctaaaataatttatctaaagactggaatcaatagacaggagtgtatgggttaagataaggtgttttagagaccgaggttcttatgcagatgaagcttgcaggtagcaggcttcactgagaatagattgtaaatgatttttatcagacataaaaaggaaaaaggacttggaatcaggaaaaatcaggaaaaagacttggaaagagaaggggattctctacaaaatggagattttccccacagaaacagccttgtagggccatttcaaaatatgtcaaagaaatgtatttttgtggtgaaatactttgatttctttcaaggcctgctatctgtcatgttgatatcttattgctaygaagagtctgttttgtcattct

SEQ ID NO: 198384 - DNA, 543 bp, Homo sapiens
gttcaaataaggcaagtgccaaggccataaccaatccagctgtttctgtacctcacttctgatttctatrcgtcactttactttgtattgtctataaattcattctgatcatgagacacccctggagtctctctgaatctgctgtgattgtgggggctttccaatttatgaatcattcattactcgattaaactgtaaatttattttggctgaaggttttttttttttttttttttttttagcagtcctcaccataatgatccatacacgtaagtgtctaatataatctttctagctttcttttttggttgtgtttagtcatactgttgctgattcagctttgtataaaatatcagagcaaaatgactatcaataatacagagatctgcaagaattcccacacaggtgaaatatgcatggtggaaagaggcaactcttaaggcaaagagccaagcatgtaccaaacaccaatgcccttgcataccaaagctaaagattctacaatttgccaaagataagaatgtacctttcacaacagcaagg

SEQ ID NO: 198385 - DNA, 543 bp, Homo sapiens
gttcaaataaggcaagtgccaaggccataaccaatccagctgtttctgtacctcacttctgatttctatgcgtcactttactttgtattgtctataaattcattctgaycatgagacacccctggagtctctctgaatctgctgtgattgtgggggctttccaatttatgaatcattcattactcgattaaactgtaaatttattttggctgaaggttttttttttttttttttttttttagcagtcctcaccataatgatccatacacgtaagtgtctaatataatctttctagctttcttttttggttgtgtttagtcatactgttgctgattcagctttgtataaaatatcagagcaaaatgactatcaataatacagagatctgcaagaattcccacacaggtgaaatatgcatggtggaaagaggcaactcttaaggcaaagagccaagcatgtaccaaacaccaatgcccttgcataccaaagctaaagattctacaatttgccaaagataagaatgtacctttcacaacagcaagg

SEQ ID NO: 198386 - DNA, 543 bp, Homo sapiens
gttcaaataaggcaagtgccaaggccataaccaatccagctgtttctgtacctcacttctgatttctatgcgtcactttactttgtattgtctataaattcattctgatcatgagacacccctggagtctctctgaatctgctgtgattgtgggggctttccaatttatgaatcattcattactcrattaaactgtaaatttattttggctgaaggttttttttttttttttttttttttagcagtcctcaccataatgatccatacacgtaagtgtctaatataatctttctagctttcttttttggttgtgtttagtcatactgttgctgattcagctttgtataaaatatcagagcaaaatgactatcaataatacagagatctgcaagaattcccacacaggtgaaatatgcatggtggaaagaggcaactcttaaggcaaagagccaagcatgtaccaaacaccaatgcccttgcataccaaagctaaagattctacaatttgccaaagataagaatgtacctttcacaacagcaagg

SEQ ID NO: 198387 - DNA, 586 bp, Homo sapiens
aagcttcaaaagaatttatcagagcaagcatgcttgtctttttctaggtatcggggcaaaaatattcagtcaccttaatgttattggaaagttaaggtccatagtataaaccttagascacctacctaacaggacaaaataagcaaaaacatatgactaataatctattagttgaaataaaataaaattcaaaattaaacacttaatccaaggtaaagcatcaaaagtggaaaatagtaataaagaacagattaaattttatggaaaataaattttatgatagtagatttaaggccaaaatatagataacaatattaaatgtaagtagtctaaaactactatttaaagtaagaattttaagactaaatttaaaaagtaatgttaaatcaatataaagacaaaggttggtcagaaaaaataggttgaagatagctgtacttcaccatgatacagtaagaggaactaaactaaattctttacaaaacaaacaaacaaaaaacaaaaaaacacacacacaaataaaaactaactgcagacaaaatataatcaacagtgattttttaaccattgacaagaagctgaggat

SEQ ID NO: 198388 - DNA, 586 bp, Homo sapiens
aagcttcaaaagaatttatcagagcaagcatgcttgtctttttctaggtatcggggcaaaaatattcagtcaccttaatgttattggaaagttaaggtccatagtataaaccttagaccacctacctaacaggacaaaataagcaaaaacatatgactaataatctattagttgaaataaaataaaattcaaaattaaacacttaatccaaggtaaagcatcaaaagtggaaaatagtaataaagaacagattaaattttatggaaaataaattttatgatagtagatttaaggccaaaatatagataacaatattaaatrtaagtagtctaaaactactatttaaagtaagaattttaagactaaatttaaaaagtaatgttaaatcaatataaagacaaaggttggtcagaaaaaataggttgaagatagctgtacttcaccatgatacagtaagaggaactaaactaaattctttacaaaacaaacaaacaaaaaacaaaaaaacacacacacaaataaaaactaactgcagacaaaatataatcaacagtgattttttaaccattgacaagaagctgaggat

SEQ ID NO: 198389 - DNA, 372 bp, Homo sapiens
agaagagagagaacatttgcacagagatggtgatatggtatggctttgtccccacccacatctcatcttgaattcccatgyattgtgggagggaccaggtgggagataattgaatcatggtggcaggccatcccatcctcatgatagtgaataagtcccacaagatcttacggttaaataagagggagtttttctgaacaagctctctctttgcctgccgccatccatgtaagatgtgacttgctcttcctggccatctgccatgattgtgaggtttccccagccatgtggaaccataagtccattaaacctctttcttttgtaaatttcccaggctggggtatgtctttatcagtaggataaaaatggatg

SEQ ID NO: 198390 - DNA, 372 bp, Homo sapiens
agaagagagagaacatttgcacagagatggtgatatggtatggctttgtccccacccacatctcatcttgaattcccatgcrttgtgggagggaccaggtgggagataattgaatcatggtggcaggccatcccatcctcatgatagtgaataagtcccacaagatcttacggttaaataagagggagtttttctgaacaagctctctctttgcctgccgccatccatgtaagatgtgacttgctcttcctggccatctgccatgattgtgaggtttccccagccatgtggaaccataagtccattaaacctctttcttttgtaaatttcccaggctggggtatgtctttatcagtaggataaaaatggatg

SEQ ID NO: 198391 - DNA, 592 bp, Homo sapiens
tttgttacctccaacaataaggtaatcaagggtcaaaattttttgtttattcagtaaaatgctctcagtgaattgggcattgggtggcacagagtaagtatttaatgtatctattaattttgtatataaatgaataaattttctaaattttgctaataatgttaatagaagacccaaaaagtataatcagtaaattagttgtattttgaagaaaaaaaagttaatctatgtaacaaatttatgtaaaaattctcaggatatacacttgagtaataatcaytgtaacatttacctatttaaaaagaatgaaatttaacagtgaaggcacctgagtctggaatttgtttcccctaagaaggtattaaattaaaattcagtatctttaataaatctaaatatatgaagaaattttatttattctagagtaattgtaaagattattttgctaaccatacaatttattcaaccattatcaaatttattggcataaagtttttataatttaagttattatcatttcgatatttgtagtatctttacaacacctaccatcttcccaaccttgcccactttatttcctgaaagtggttgc

SEQ ID NO: 198392 - DNA, 592 bp, Homo sapiens
tttgttacctccaacaataaggtaatcaagggtcaaaattttttgtttattcagtaaaatgctctcagtgaattgggcattgggtggcacagagtaagtatttaatgtatctattaattttgtatataaatgaataaattttctaaattttgctaataatgttaatagaagacccaaaaagtataatcagtaaattagttgtattttgaagaaaaaaaagttaatctatgtaacaaatttatgtaaaaattctcaggatatacacttgagtaataatcattgtaacatttacctatttaaaaagaatgaaatttaacagtgaaggcacctgagtctggaatttgtttcccctaagaaggtattaaattaaaattcagtatctttaataaatctaaakatatgaagaaattttatttattctagagtaattgtaaagattattttgctaaccatacaatttattcaaccattatcaaatttattggcataaagtttttataatttaagttattatcatttcgatatttgtagtatctttacaacacctaccatcttcccaaccttgcccactttatttcctgaaagtggttgc

SEQ ID NO: 198393 - DNA, 592 bp, Homo sapiens
tttgttacctccaacaataaggtaatcaagggtcaaaattttttgtttattcagtaaaatgctctcagtgaattgggcattgggtggcacagagtaagtatttaatgtatctattaattttgtatataaatgaataaattttctaaattttgctaataatgttaatagaagacccaaaaagtataatcagtaaattagttgtattttgaagaaaaaaaagttaatctatgtaacaaatttatgtaaaaattctcaggatatacacttgagtaataatcattgtaacatttacctatttaaaaagaatgaaatttaacagtgaaggcacctgagtctggaatttgtttcccctaagaaggtattaaattaaaattcagtatctttaataaatctaaatatatgaagaaatttwatttattctagagtaattgtaaagattattttgctaaccatacaatttattcaaccattatcaaatttattggcataaagtttttataatttaagttattatcatttcgatatttgtagtatctttacaacacctaccatcttcccaaccttgcccactttatttcctgaaagtggttgc

SEQ ID NO: 198394 - DNA, 592 bp, Homo sapiens
tttgttacctccaacaataaggtaatcaagggtcaaaattttttgtttattcagtaaaatgctctcagtgaattgggcattgggtggcacagagtaagtatttaatgtatctattaattttgtatataaatgaataaattttctaaattttgctaataatgttaatagaagacccaaaaagtataatcagtaaattagttgtattttgaagaaaaaaaagttaatctatgtaacaaatttatgtaaaaattctcaggatatacacttgagtaataatcattgtaacatttacctatttaaaaagaatgaaatttaacagtgaaggcacctgagtctggaatttgtttcccctaagaaggtattaaattaaaattcagtatctttaataaatctaaatatatgaagaaattttatttattctagagtaattgtaaagattattttgctaaccatacaatttattcaaccattatcaaatttattggcataaagtttttataatttawgttattatcatttcgatatttgtagtatctttacaacacctaccatcttcccaaccttgcccactttatttcctgaaagtggttgc

SEQ ID NO: 198395 - DNA, 564 bp, Homo sapiens
atttcattgtagttttggttttttattttaaatttaattctattgggtcagagaacatactctccatgatctaatcctgttaaatttgttgaaamtttattatttgttgcctaacatgtgatgaatgtcagtgcacttggaaaataaaataagtttttgctggtgatgagtataatattctatgcatcctagaacttgttaggttataatgtcattaaatttgtagatattttctttaaaattttttatttacttgtttaataatatcagaaaatagttttcaaatctttaaatatattgtggatttgtatatttttcttttcaattctgtaagtttttggcttgagtattttaaatgcagaattgtttgttaatgtgtgaaaaaacattttgcattatcaggttctcttgatgaattggaccaattatattgatctttatcctcctaaaaatatttcttgatttgtggcccattttgtctgatattaatagaagtcttcagtttttatatacttagtagttataccatagaaatactgccatcctcttatcttaaaagactcc

SEQ ID NO: 198396 - DNA, 564 bp, Homo sapiens
atttcattgtagttttggttttttattttaaatttaattctattgggtcagagaacatactctccatgatctaatcctgttaaatttgttgaaaatttattatttgttgcctaacatgtgatgaatgtcagtgcacttggaaaataaaataagtttttgctggtgatgagtataatattctatgcatcctagaacttgttaggttataatgtcattaaatttgtagatattttctttaaaattttttatttacttgtttaatratatcagaaaatagttttcaaatctttaaatatattgtggatttgtatatttttcttttcaattctgtaagtttttggcttgagtattttaaatgcagaattgtttgttaatgtgtgaaaaaacattttgcattatcaggttctcttgatgaattggaccaattatattgatctttatcctcctaaaaatatttcttgatttgtggcccattttgtctgatattaatagaagtcttcagtttttatatacttagtagttataccatagaaatactgccatcctcttatcttaaaagactcc

SEQ ID NO: 198397 - DNA, 564 bp, Homo sapiens
atttcattgtagttttggttttttattttaaatttaattctattgggtcagagaacatactctccatgatctaatcctgttaaatttgttgaaaatttattatttgttgcctaacatgtgatgaatgtcagtgcacttggaaaataaaataagtttttgctggtgatgagtataatattctatgcatcctagaacttgttaggttataatgtcattaaatttgtagatattttctttaaaattttttatttacttgtttaataatatcagaaaatagttttcaaatctttaaatatattgtggatttgtatatttttcttttcaattctgtaagtttttggcttgagtattttaaatgcagaattgtttgttaatgtgtgaaaaaacattttgcattatcaggttctcttgatgaattggaccaattatattgatctttatcctcctaaaaatatttcttgatttgyggcccattttgtctgatattaatagaagtcttcagtttttatatacttagtagttataccatagaaatactgccatcctcttatcttaaaagactcc

SEQ ID NO: 198398 - DNA, 564 bp, Homo sapiens
atttcattgtagttttggttttttattttaaatttaattctattgggtcagagaacatactctccatgatctaatcctgttaaatttgttgaaaatttattatttgttgcctaacatgtgatgaatgtcagtgcacttggaaaataaaataagtttttgctggtgatgagtataatattctatgcatcctagaacttgttaggttataatgtcattaaatttgtagatattttctttaaaattttttatttacttgtttaataatatcagaaaatagttttcaaatctttaaatatattgtggatttgtatatttttcttttcaattctgtaagtttttggcttgagtattttaaatgcagaattgtttgttaatgtgtgaaaaaacattttgcattatcaggttctcttgatgaattggaccaattatattgatctttatcctcctaaaaatatttcttgatttgtggcccattttgtctgatattaataraagtcttcagtttttatatacttagtagttataccatagaaatactgccatcctcttatcttaaaagactcc

SEQ ID NO: 198399 - DNA, 462 bp, Homo sapiens
cacacaaggcacaagtcttgcactctcaatctcaaattataactctgaaagtgagtagctctttaggttttkggacctagttgtgtcattttctttaccctagttccaaacctatttttaattttctaaaaataaatgagccctattttgctttagtgcttaaaattttctacttgttataaaaatgtagataaagctgttttttattatttaattatttatgattgctccattgtctccaagctttcatagtttctgaagaaaattgcccgtatttgtgtgtttgtgtgtgtatttcttttgatgtggattattttttcatctctgatgccttttaagatttttctctttctcactgattttcagaaattagacaatagtttaccttgccattttgtctttatttgtgattctaataacattttggcaatcgtttcttcgaatttttggttttgttcttcc

SEQ ID NO: 198400 - DNA, 597 bp, Homo sapiens
acaatggaggatggctgacaatgaaattctttagattttgttcagtgctgagacaacgttgagatgagcaaattttacttctggtgaaacacttaatgaggcactctctcgggtcacacaaggcacaagtcttgcactctcaatctcaaattataactctgaaagtgagtagctctttaggtttttggacctagttgtgtcattttctttaccctagttccaaacctatttttaattttctaaaaataaatgagccctattttgctttagtgcttaaaattttctacttgttataaaaatgtagataaagctgttttttattatttaattatttatgattgctccattgtctccaagctttcatagtttctgaagaaaattgcccgtatttgtgtgtttgtgtgtgtatttcttttgatgtggattattttktcatctctgatgccttttaagatttttctctttctcactgattttcagaaattagacaatagtttaccttgccattttgtctttatttgtgattctaataacattttggcaatcgtttcttcgaatttttggttttgttcttccctaccacatactcacacacat

SEQ ID NO: 198401 - DNA, 597 bp, Homo sapiens
acaatggaggatggctgacaatgaaattctttagattttgttcagtgctgagacaacgttgagatgagcaaattttacttctggtgaaacacttaatgaggcactctctcgggtcacacaaggcacaagtcttgcactctcaatctcaaattataactctgaaagtgagtagctctttaggtttttggacctagttgtgtcattttctttaccctagttccaaacctatttttaattttctaaaaataaatgagccctattttgctttagtgcttaaaattttctacttgttataaaaatgtagataaagctgttttttattatttaattatttatgattgctccattgtctccaagctttcatagtttctgaagaaaattgcccgtatttgtgtgtttgtgtgtgtatttcttttgatgtggattattttttcatctctgatgccttttaagatttttctctttmtcactgattttcagaaattagacaatagtttaccttgccattttgtctttatttgtgattctaataacattttggcaatcgtttcttcgaatttttggttttgttcttccctaccacatactcacacacat

SEQ ID NO: 198402 - DNA, 597 bp, Homo sapiens
acaatggaggatggctgacaatgaaattctttagattttgttcagtgctgagacaacgttgagatgagcaaattttacttctggtgaaacacttaatgaggcactctctcgggtcacacaaggcacaagtcttgcactctcaatctcaaattataactctgaaagtgagtagctctttaggtttttggacctagttgtgtcattttctttaccctagttccaaacctatttttaattttctaaaaataaatgagccctattttgctttagtgcttaaaattttctacttgttataaaaatgtagataaagctgttttttattatttaattatttatgattgctccattgtctccaagctttcatagtttctgaagaaaattgcccgtatttgtgtgtttgtgtgtgtatttcttttgatgtggattattttttcatctctgatgccttttaagatttttctctttctcactgattttcagaaattagacaatagtttaccttgccattttgtctttatttgtgattctaataacattttggcaatcrtttcttcgaatttttggttttgttcttccctaccacatactcacacacat

SEQ ID NO: 198403 - DNA, 597 bp, Homo sapiens
acaatggaggatggctgacaatgaaattctttagattttgttcagtgctgagacaacgttgagatgagcaaattttacttctggtgaaacacttaatgaggcactctctcgggtcacacaaggcacaagtcttgcactctcaatctcaaattataactctgaaagtgagtagctctttaggtttttggacctagttgtgtcattttctttaccctagttccaaacctatttttaattttctaaaaataaatgagccctattttgctttagtgcttaaaattttctacttgttataaaaatgtagataaagctgttttttattatttaattatttatgattgctccattgtctccaagctttcatagtttctgaagaaaattgcccgtatttgtgtgtttgtgtgtgtatttcttttgatgtggattattttttcatctctgatgccttttaagatttttctctttctcactgattttcagaaattagacaatagtttaccttgccattttgtctttatttgtgattctaataacattttggcaatcgtttcttcgwatttttggttttgttcttccctaccacatactcacacacat

SEQ ID NO: 198404 - DNA, 574 bp, Homo sapiens
ggcacacctaagttttcatcataacctgtaccttcaatcatcttcattcttcctgacctgatctatttttctcatcgtatttaccaccttcaaacatatggtacacatcctagttactttgggtatcttatattacaatataatctcaaaacagattttgttgattttatttacaagatgtaaccaaagggcctagattatctttatagcayagtatatgttcaaaatttattaccaaataaatataaagtacatttatgaaaggtgaaggagaatataaaacagagggaagatcttcagaactaccacaacaaaatgacacataacttaaatgtcaaaataccaacactgacttcttatcaacagcaataaaaagtaagaaaaaatttggaaaatatcctcaatgagtttagacacacttctatacattagaggtttataaaacacaaaaactccttttataaatgagtcaaaataatgacattttagacaaagaataacagaaaatttatcatccaaaagcaccttccaaagaaacctcaaaagacaaatttcaaacaaaggaaaatgatca

SEQ ID NO: 198405 - DNA, 493 bp, Homo sapiens
gtgagatctggccactgaaagctatgtcacctccctactctgcgtgttttcctcttgccatgtgagacaactcactctttctttgccttgtacaaagattgaaagatttctgaggcctcccagaatcagaagccctgtgcttcctgtccaccctgcagaaccatgagccaattaaacctctttttcaaaatgaatcaaacagaaaatggcaaatgacgattgcagyattgctataaagatacctgaaaatgtggaagcagctttggaactaggtaatgggcagaggttggaagagtttggaaggctcaaaagaagacagatgagaaaatttttggactatcttagagactggttaaatggttgtgataaaaatcctggcacaaacatggatagtgaaggccaggctgaggaggtctcagatagaaataagaagctttctggaaaaggtcttccttttgaatatggaaagcttacacaatgcctgtaccatcat

SEQ ID NO: 198406 - DNA, 493 bp, Homo sapiens
gtgagatctggccactgaaagctatgtcacctccctactctgcgtgttttcctcttgccatgtgagacaactcactctttctttgccttgtacaaagattgaaagatttctgaggcctcccagaatcagaagccctgtgcttcctgtccaccctgcagaaccatgagccaattaaacctctttttcaaaatgaatcaaacagaaaatggcaaatgacgattgcagcattgctataaagatacctgaaaatgtggargcagctttggaactaggtaatgggcagaggttggaagagtttggaaggctcaaaagaagacagatgagaaaatttttggactatcttagagactggttaaatggttgtgataaaaatcctggcacaaacatggatagtgaaggccaggctgaggaggtctcagatagaaataagaagctttctggaaaaggtcttccttttgaatatggaaagcttacacaatgcctgtaccatcat

SEQ ID NO: 198407 - DNA, 493 bp, Homo sapiens
gtgagatctggccactgaaagctatgtcacctccctactctgcgtgttttcctcttgccatgtgagacaactcactctttctttgccttgtacaaagattgaaagatttctgaggcctcccagaatcagaagccctgtgcttcctgtccaccctgcagaaccatgagccaattaaacctctttttcaaaatgaatcaaacagaaaatggcaaatgacgattgcagcattgctataaagatacctgaaaatgtggaagcagctttggaactaggtaatgggcagaggttggaagagtttggaaggctsaaaagaagacagatgagaaaatttttggactatcttagagactggttaaatggttgtgataaaaatcctggcacaaacatggatagtgaaggccaggctgaggaggtctcagatagaaataagaagctttctggaaaaggtcttccttttgaatatggaaagcttacacaatgcctgtaccatcat

SEQ ID NO: 198408 - DNA, 618 bp, Homo sapiens
tgttatcatggagctggactgggcctgggtgagagggcctgatggggttgtcctgggtaatcacgggggtgatcagaaaagatgcagaatggaattgctgcgaggatgaacgagatgactgtcagcacagaataggcakccggtgagtgttcagggattaccctcagtagctgctcagaggccaaaaccacccaactgatagcgactgtccccaagctaggaggaagagaagagagcaggtcccactcacctgagtctgatcagtcagctgtgttgagatgtgcctctcacctagaaaacggtccttcacacagagccactcagacaccacagtgtgtctctaactgctccacaacacagaggcgatgggggctcagcaacagtgacattgtggggtgacacaacccaccacaatgggagcctgcatgggtcaacagggcccagagtcagtgtcctctatcccctgaactgacatgtgtggatgaagtgtgtttgtgcatgcgtgtgtgtgtgcacatatgtgtgtgtgtgtttctcttgcttctctggccaggcctagcttctccactcacaggtgcacccaggtcatcaccgagggctcatggccagcattagagc

SEQ ID NO: 198409 - DNA, 618 bp, Homo sapiens
tgttatcatggagctggactgggcctgggtgagagggcctgatggggttgtcctgggtaatcacgggggtgatcagaaaagatgcagaatggaattgctgcgaggatgaacgagatgactgtcagcacagaataggcatccggtgagtgttcagggattaccctcagtagctgctcagaggccaaaaccacccaactgatagcgactgtccccaagctaggaggaagagaagagagcaggtcccactcacctgagtctgatcagtcagctgtgttgagatgtgcctctcacctagaaaacggtccttcacrcagagccactcagacaccacagtgtgtctctaactgctccacaacacagaggcgatgggggctcagcaacagtgacattgtggggtgacacaacccaccacaatgggagcctgcatgggtcaacagggcccagagtcagtgtcctctatcccctgaactgacatgtgtggatgaagtgtgtttgtgcatgcgtgtgtgtgtgcacatatgtgtgtgtgtgtttctcttgcttctctggccaggcctagcttctccactcacaggtgcacccaggtcatcaccgagggctcatggccagcattagagc

SEQ ID NO: 198410 - DNA, 618 bp, Homo sapiens
tgttatcatggagctggactgggcctgggtgagagggcctgatggggttgtcctgggtaatcacgggggtgatcagaaaagatgcagaatggaattgctgcgaggatgaacgagatgactgtcagcacagaataggcatccggtgagtgttcagggattaccctcagtagctgctcagaggccaaaaccacccaactgatagcgactgtccccaagctaggaggaagagaagagagcaggtcccactcacctgagtctgatcagtcagctgtgttgagatgtgcctctcacctagaaaacggtccttcacacagagccactcagacaccacagtgtgtctctaactgctccacaacacagaggcgatgggggctcagcaacagtgacattgtggggtgacacaacccaccacaatgggagcctgcatgggtcaacagggcccagagtcagtgtcctctatcccctgaactgacatgtgtggatgmagtgtgtttgtgcatgcgtgtgtgtgtgcacatatgtgtgtgtgtgtttctcttgcttctctggccaggcctagcttctccactcacaggtgcacccaggtcatcaccgagggctcatggccagcattagagc

SEQ ID NO: 198411 - DNA, 548 bp, Homo sapiens
caggtcatgtgtaaagttgtaggtctgccaagtggtgctggattcaacacatcttctcaccttctctttccagccaccctccaaggtgccctgactcaccttccctgcagatggaggcaaggagactccacagacaaaccccctgcctgaggtcacacagtggccagctggccaggttcctactgaccagccgcccaggaccagtttcccactgatgaggcctctaatgaccactcctccatttaccagttcccactgaccaagtccccactgaccatgtcttcctaaccaggctcacacttaataggcctcataggccagacctcactgaccaatttcccactgacctggtccccactgaccaggttcccactgacaagaccacagttgaccaggtcgctgctcacctgacccccactaaacaattttccatggatcagtccccagctgaccragccccctctgaccaggccctcactgacgaggctccaagccactaaggccccacactgaccaggcccctagtatactgcataggccccaccaac

SEQ ID NO: 198412 - DNA, 548 bp, Homo sapiens
caggtcatgtgtaaagttgtaggtctgccaagtggtgctggattcaacacatcttctcaccttctctttccagccaccctccaaggtgccctgactcaccttccctgcagatggaggcaaggagactccacagacaaaccccctgcctgaggtcacacagtggccagctggccaggttcctactgaccagccgcccaggaccagtttcccactgatgaggcctctaatgaccactcctccatttaccagttcccactgaccaagtccccactgaccatgtcttcctaaccaggctcacacttaataggcctcataggccagacctcactgaccaatttcccactgacctggtccccactgaccaggttcccactgacaagaccacagttgaccaggtcgctgctcacctgacccccactaaacaattttccatggatcagtccccagctgaccaagccccctctgaccagrccctcactgacgaggctccaagccactaaggccccacactgaccaggcccctagtatactgcataggccccaccaac

SEQ ID NO: 198413 - DNA, 409 bp, Homo sapiens
tacaatgcccccctcagcccacagaccctccctccctgtatgtgtgyccagaggtcaggccctggggttttttttgggacatggcttttcctccaagacagagggagagacagctggcctcaggctccaggtgcccagctccacactcaccccaaaagccctctgggccaatctcaaaggagatagtgaggtggcctggcactgcctggacatgccatgtagcctattcctgagtgtcagagtgggaggaaggcagggacatttggcagatgagacatcttgtgctgttgggcatcccagggcccttcccacagagtcccgatctacagacacagcacagaggctacaggaagactaatgcaggacccttgaggctgagccagggaccacatgaggactgtgcccagac

SEQ ID NO: 198414 - DNA, 629 bp, Homo sapiens
tggcctggcactgcctggacatgccatgtagcctattcctgagtgtcagagtgggaggaaggcagggacatttggcagatgagacatcttgtgctgttgggcatcccagggcccttcccacagagtcccgatctacagacacagcacagaggctacaggaagactaatgcaggacccttgaggctgagccagggaccacatgaggactgtgcccagacagccagaaggccctttgctagtttcttgrtacctcatggatgcggcagcggttgttctgttggggaccagtgatcacgtgctggggagggctcgcctgtgcttcctcagtggctccacctctgcttctaagaaaaatcactcattccatggctggagcagagaaaatacaacattagcttagaacatcttgttcctgaaactaaaaaagtgctgacagagtaacgaagacaaataaaaaagacaagaagtcagcttgaaatgtctaccactggcctaatcttggggaattggagcaccagaatcatgagctttcccttctcagttatttattggttttacttctccatgtacagcaaagaagagaagaaaataatcatctggaaaccatcatagtaataattgttcaaaca

SEQ ID NO: 198415 - DNA, 382 bp, Homo sapiens
tgttggccacttacatgtgttattttgagaagtgtctgttcatgtcctttwcccatttttaatggtgttatttattttttgcttgttgatttgtttagatctcctatggattctggataataggtgtttgctgtatccatagtttgtgaatattttcttccattctctacgctgtctgtttaatcctgtgatagtttctcatgctgtgcagaagctctttagcttaattagatcatacttgtcaatttttgttattcttgcaattgcttttgaggactttgccataaattaattgagaagtatgaagtccagaagagtatttcctaggttttcttccaggatttttatagtcagaggatgtactcttatgtaagaaaagcac

SEQ ID NO: 198416 - DNA, 382 bp, Homo sapiens
tgttggccacttacatgtgttattttgagaagtgtctgttcatgtccttttcccatttttaatggtgttatttaytttttgcttgttgatttgtttagatctcctatggattctggataataggtgtttgctgtatccatagtttgtgaatattttcttccattctctacgctgtctgtttaatcctgtgatagtttctcatgctgtgcagaagctctttagcttaattagatcatacttgtcaatttttgttattcttgcaattgcttttgaggactttgccataaattaattgagaagtatgaagtccagaagagtatttcctaggttttcttccaggatttttatagtcagaggatgtactcttatgtaagaaaagcac

SEQ ID NO: 198417 - DNA, 531 bp, Homo sapiens
tttcccttagcaaagaacgttactgcacgatgccattaacctggagatctgtgaaactttgaacttgagagtgatgatttagagtgtatctggtggaatgaacttttaggcagcaaagctcaagaggtgtctggtctgtgccaaacaccctgaggtgtcttatatgtgaccaaagaaatgacctcaaggtgaaacttatatttaaatgagayggagagcttaaaagtttggaaaatttgcaggctggccaagtggtcaaaaagaaaagctgattttccgtgggaaagttcaagaagatttcagaaatgtgcataaaatggaattgagtgctaatagccaagacaaggataaaaaggccttgaaggcacttcagagacttttgcagcaacccttgctgtcacaggcccccaggcctgggagaaaagaatgatttccttatccagtcccatggccctgctgctgtgtccatcctcaggacactgctggctgcatacctgaagctccagctccaaccatggctgacagatacaa

SEQ ID NO: 198418 - DNA, 589 bp, Homo sapiens
tcaatgcctggacagtcataccttggaggtaattaacttgctttgtatttcagaggctcaggggcagaagggatggcagtcttgtctcagaagagactttgggctttggacatttcagtaaatgctggaatgagctaagacattgggaaactgtagagtaggcatcattgtattttgcagtgtgagaacaacatgagatatggggggtcagggtcagaataatacgatttgggtctgcatccctaccaaactcatttggaattgtaatggtgaatgttaaacgtggggcctggtgggaggtgatttattcatggagaagagttgggggttggaggtaggggtgtggggagaataggggagattattttgtgggtgkgggtaaaaggtaagggtaggggggcagatccttcacaaatgtttaaacactatctccttaatgccgcctgcatgatagtgagttctcttgatgatatttgcagctgtgagattgagtgaatactgtcccgctgagttttggacttgtgttgggcctgtgggcccgtttgtgctatttttatgggaaatttcttccctttggactgagaaagct

SEQ ID NO: 198419 - DNA, 589 bp, Homo sapiens
tcaatgcctggacagtcataccttggaggtaattaacttgctttgtatttcagaggctcaggggcagaagggatggcagtcttgtctcagaagagactttgggctttggacatttcagtaaatgctggaatgagctaagacattgggaaactgtagagtaggcatcattgtattttgcagtgtgagaacaacatgagatatggggggtcagggtcagaataatacgatttgggtctgcatccctaccaaactcatttggaattgtaatggtgaatgttaaacgtggggcctggtgggaggtgatttattcatggagaagagttgggggttggaggtaggggtgtggggagaataggggagattattttgtgggtgtgggtaaaaggtaagggtaggggggcagatccttcacaaatgtttaaacactatctccttaatgccgcctgcrtgatagtgagttctcttgatgatatttgcagctgtgagattgagtgaatactgtcccgctgagttttggacttgtgttgggcctgtgggcccgtttgtgctatttttatgggaaatttcttccctttggactgagaaagct

SEQ ID NO: 198420 - DNA, 589 bp, Homo sapiens
tcaatgcctggacagtcataccttggaggtaattaacttgctttgtatttcagaggctcaggggcagaagggatggcagtcttgtctcagaagagactttgggctttggacatttcagtaaatgctggaatgagctaagacattgggaaactgtagagtaggcatcattgtattttgcagtgtgagaacaacatgagatatggggggtcagggtcagaataatacgatttgggtctgcatccctaccaaactcatttggaattgtaatggtgaatgttaaacgtggggcctggtgggaggtgatttattcatggagaagagttgggggttggaggtaggggtgtggggagaataggggagattattttgtgggtgtgggtaaaaggtaagggtaggggggcagatccttcacaaatgtttaaacactatctccttaatgccgcctgcatgatagtgagttctcttgatgatatttgcagctgtgrgattgagtgaatactgtcccgctgagttttggacttgtgttgggcctgtgggcccgtttgtgctatttttatgggaaatttcttccctttggactgagaaagct

SEQ ID NO: 198421 - DNA, 185 bp, Homo sapiens
tttttcctctctcatgcttgctcctgctcctggcatatgagayatctcatttccccttgacattctggtgtgattgggaggcttcctgagtcctctgagatgcagaaactagtatgcctccttacagcctgcagaatcattaacaattaaacttcttttctttttgatcattgagagcattttta

SEQ ID NO: 198422 - DNA, 185 bp, Homo sapiens
tttttcctctctcatgcttgctcctgctcctggcatatgagatatctcattkccccttgacattctggtgtgattgggaggcttcctgagtcctctgagatgcagaaactagtatgcctccttacagcctgcagaatcattaacaattaaacttcttttctttttgatcattgagagcattttta

SEQ ID NO: 198423 - DNA, 185 bp, Homo sapiens
tttttcctctctcatgcttgctcctgctcctggcatatgagatatctcatttccccttgacattctggtgtgattgggaggcttcctgagtcctctgagatgcagaaactagtatgcctccttacakcctgcagaatcattaacaattaaacttcttttctttttgatcattgagagcattttta

SEQ ID NO: 198424 - DNA, 446 bp, Homo sapiens
aacattttccttctcttgctgtcatcctcactactggggaggcattaaggatygaggcacctcaccacacagacctgtgttttatctaccatagatgaacatcaccaaagatggtcagccatgtatggctataatttgtttttatagaaaatgttgtaacctcataggatagtatcatataggccaaattaacataattgaatagtgttgggtgatttatggagaagaaattaattcaagaagttattgcctgattaaaagttcattagaaacattatggcttataatgtagtattaaattgagggacataatagggaagaaattgaggctaggccaaaagggcaattaggggaaaccaatatggaagcacatcagtgtagaacagggcattcaaattgtcatgaatgagttgaagagcttctggaaggtgcacattctgattcag

SEQ ID NO: 198425 - DNA, 412 bp, Homo sapiens
agtagtttgattagctgtcatttcataagtgtgtatactagctgatcaatgtagaacactttctttgatgagaggtgaatcacacwttcacctgaactgtcatcccaactgtgtatttcctcagtgacaagacgaggggaatttgtttgtggcatgctggcagcaatgcctctgctgtgttgagttaaaatactctgtacattcaccatcagctttgacgtcgattccctcaggtttgatttgctcctctgtttaatggtcccttttctcctcatcagtccacgtgttcacggtgatatccatgcttttctattttaggtataggcatttgaaacataatctcactactgaaatgtaaactgtgcattttaggaatcctatattcctattttcctcattatgtttctgtcat

SEQ ID NO: 198426 - DNA, 412 bp, Homo sapiens
agtagtttgattagctgtcatttcataagtgtgtatactagctgatcaatgtagaacactttctttgatgagaggtgaatcacactttcacctgaactgtcatcccaactgtgtatttcctcagtgacaagacgaggggaatttgtttgtggcatgctggcagcaatgcctctgctgtgttgagttaaaatactctgtacattcaccatcagctttgacgtcgattccctcaggtttgatttgctcctctgtttaatggtcccttttctcctcatcagtccacrtgttcacggtgatatccatgcttttctattttaggtataggcatttgaaacataatctcactactgaaatgtaaactgtgcattttaggaatcctatattcctattttcctcattatgtttctgtcat

SEQ ID NO: 198427 - DNA, 184 bp, Homo sapiens
tatagccaggcatgagaattcagctcgayagtaccactgcatgaatgtttggttggccctgtcatacttacatataattgatgacatatcccctttgctttgtagggcctcctgcaaaacatccttccttgaaggtaattaattatgtatatttttgaatcactaactccatgttgtataaaat

SEQ ID NO: 198428 - DNA, 184 bp, Homo sapiens
tatagccaggcatgagaattcagctcgatagtamcactgcatgaatgtttggttggccctgtcatacttacatataattgatgacatatcccctttgctttgtagggcctcctgcaaaacatccttccttgaaggtaattaattatgtatatttttgaatcactaactccatgttgtataaaat

SEQ ID NO: 198429 - DNA, 660 bp, Homo sapiens
taattaattatgtatatttttgaatcactaactccatgttgtataaaatatatatgatttatgaatcattttcttttaaaacccattcagcctagcactgaagtrgaagatcctgctgtgaaaggagcagtacaaagaaagaatgtacagacattgagagcaggtacatttaatggaatactggaaataagtacattcaatgattggaagtactcacattattcttattcctaattctatttgttcaaaattgaatggaaggcattgacataaatgttattgttggtatccatatttgaataaaaataaatttagaagcataaaaaagattttaaaaatgtaagctttaactcagatgtttctcttttaatgtttttgaatagcatgaagttttcagtataaaatttttatacctgtcagggattcaaagaagtgaattttgagactctgagatatttccaatgagttaagtgctacttggagttctgaactttacctagaggaaagctttacttattaacatgtcagattctgttttaactttagaggcttgctgctagtgttattacactgatgatctgaagccaatcagatgttctaatgagcaagactgtgtgtgtaggtgtatatatagctgtgtgtatgtgtgtgtttgtggta

SEQ ID NO: 198430 - DNA, 590 bp, Homo sapiens
ggtgtattttgtattatattttccagatgtatccacattgatatgattatctctggtttaattcattttacacttttcattgtattcccttataccactttaccacatttagttagactctcctgttgctgataaatgaagaaagaaagaaaaagaaaaataatgtcagattaagtgggcttttctttaatcagtttgtatctattaatatttactatatgagagtttaaagttgaaaagttcagaatacaagcatgcaccaccatattttataaatgcccttagaactgtgactcatgagcctttagcctatgaagttaggacaattcatttctctgaagaagtttgttgtgctgttctcaraaaagaaaactgaaaatagcaaatgatattgtcttatttgacctcttggacatctttgaatgaaactgcaactccagggatactcagatcaaaattcagaactaatgttttgaacaatatagtttgtgaatgtccagtggatcatgagcccttgatgggaaaatgacctttcaagtttcacttttgcatttttttgctcttttccttgacttgtcttaaaagcttaa

SEQ ID NO: 198431 - DNA, 614 bp, Homo sapiens
tttcttctaatttttctactgcctgcattgccttttcatctagctccaatttatattcttgtagtttactaatttctaccctattgttttccatatgtgtcttaagatttaatatttcttctttcaacatctttttatcctcctcaagtttttcacattgctgttgtacttttttcatagataaaaactcctgttgaagaacttgattgtctttagccaaattgacacattttgaagataaagcttccttctgtgcygtaagatcatcaaactgcatgaataaaataatatagcttgataatgaagtaggctgagaataatctaatacaaaaccaatagcaaattttgaaatgcatttacttgcaataaaatgttatctgtaatgcagtggattcttcaaatgtgaacccttaaattactcagaattttaagaacaaagttaaagctaccatgagtcacaaaaatatattatttgctatcatcatctttgccacagaacttttgcacttcatcttacttttatttttctgataattcatttttgttcctccttagatggcactaagttatctcttagtaaaaagtgtctaaccaccttccctcattatcattcc

SEQ ID NO: 198432 - DNA, 538 bp, Homo sapiens
tatgatcaagccactgtctctagtctgggtgackacagatgcccagagcccagactggactagcaaggccctgtctcttaacaacaacaaaaaagctcacagaggtaggggaggggaggatgttaatggataccgaattacagttagataagaggaatgagttctggtgttctgtggcattgtagggtgaatatggttaactatgatttattgtatatttttaaaaaggcagaagattttgaatgttcacaattcaaaaaatgaaaaatggttgaagtagtaaatgtgctagttagctcgatcattacacactatatatatatgtatcaaaatatcactctattggccaaaattatgtatatacatgtcaattaaaacaaaagagaagctatatttatcccattaaaaaaacagaatatgggcaatccttactgacttccttctaatgaatagaatgcagtaaaagggatatcatgtggcttccctatctcagactgctttccctttgaactcagcccccagattgtgagtgagatca

SEQ ID NO: 198433 - DNA, 538 bp, Homo sapiens
tatgatcaagccactgtctctagtctgggtgactacagwtgcccagagcccagactggactagcaaggccctgtctcttaacaacaacaaaaaagctcacagaggtaggggaggggaggatgttaatggataccgaattacagttagataagaggaatgagttctggtgttctgtggcattgtagggtgaatatggttaactatgatttattgtatatttttaaaaaggcagaagattttgaatgttcacaattcaaaaaatgaaaaatggttgaagtagtaaatgtgctagttagctcgatcattacacactatatatatatgtatcaaaatatcactctattggccaaaattatgtatatacatgtcaattaaaacaaaagagaagctatatttatcccattaaaaaaacagaatatgggcaatccttactgacttccttctaatgaatagaatgcagtaaaagggatatcatgtggcttccctatctcagactgctttccctttgaactcagcccccagattgtgagtgagatca

SEQ ID NO: 198434 - DNA, 538 bp, Homo sapiens
tatgatcaagccactgtctctagtctgggtgactacagatgcccagagcccagactggactagcaaggccctgtctcttaacaacaacaaaaaagctcacagaggtaggggaggggaggatgttaatggatacygaattacagttagataagaggaatgagttctggtgttctgtggcattgtagggtgaatatggttaactatgatttattgtatatttttaaaaaggcagaagattttgaatgttcacaattcaaaaaatgaaaaatggttgaagtagtaaatgtgctagttagctcgatcattacacactatatatatatgtatcaaaatatcactctattggccaaaattatgtatatacatgtcaattaaaacaaaagagaagctatatttatcccattaaaaaaacagaatatgggcaatccttactgacttccttctaatgaatagaatgcagtaaaagggatatcatgtggcttccctatctcagactgctttccctttgaactcagcccccagattgtgagtgagatca

SEQ ID NO: 198435 - DNA, 538 bp, Homo sapiens
tatgatcaagccactgtctctagtctgggtgactacagatgcccagagcccagactggactagcaaggccctgtctcttaacaacaacaaaaaagctcacagaggtaggggaggggaggatgttaatggataccgaattacagttagataagaggaatgagttctggtgttctgtggcattgtagggtgaatatggttaactatgatttattgtatatttttaaaaaggcagaagattttgaatgttcacaattcaaaaaatgaaaaatggttgaagtagtaaatgtgctagttagctygatcattacacactatatatatatgtatcaaaatatcactctattggccaaaattatgtatatacatgtcaattaaaacaaaagagaagctatatttatcccattaaaaaaacagaatatgggcaatccttactgacttccttctaatgaatagaatgcagtaaaagggatatcatgtggcttccctatctcagactgctttccctttgaactcagcccccagattgtgagtgagatca

SEQ ID NO: 198436 - DNA, 628 bp, Homo sapiens
tgtttctaacaatcagatctctatgaactcactgagaagaactcactcaagtggattgtgctaaaccaagcttgtcyaacccacagcttgtgggctgaatgcaggtcagaacagctttgaatgtggcccaaatttgtcaactttgttaaaacaaaagagagtttgtgtatgtgtgtgtgtgtgtgtgtgtgtgtgtgtgtgtgtgtttatttttatttatttatgtatttatttattttagctcatcagctatttttagtgtattttatgtgtggctcaagaaaattcttcttccaatgctgtccagggaagccaaaagttggacattcctgtgctaagctattcataaggcatccaccccatgatccaatacctctcactgggccccacctccaacattggggatcatattttaacatgagatttggaggggacacacatccaaactatatcagggatatgtacccatcatcgagacaggttgtagagtatgcatactttcaaatgggtcctgtcatgttattttctgaaatggttaaaaccatttaatttcccatccattgcccataaaggttgttttcctcatatcctcatcactcaatgttatctaggattcttatattttcta

SEQ ID NO: 198437 - DNA, 628 bp, Homo sapiens
tgtttctaacaatcagatctctatgaactcactgagaagaactcactcaagtggattgtgctaaaccaagcttgtccaacccacagcttgtgggctgaatgcaggtcagracagctttgaatgtggcccaaatttgtcaactttgttaaaacaaaagagagtttgtgtatgtgtgtgtgtgtgtgtgtgtgtgtgtgtgtgtgtgtttatttttatttatttatgtatttatttattttagctcatcagctatttttagtgtattttatgtgtggctcaagaaaattcttcttccaatgctgtccagggaagccaaaagttggacattcctgtgctaagctattcataaggcatccaccccatgatccaatacctctcactgggccccacctccaacattggggatcatattttaacatgagatttggaggggacacacatccaaactatatcagggatatgtacccatcatcgagacaggttgtagagtatgcatactttcaaatgggtcctgtcatgttattttctgaaatggttaaaaccatttaatttcccatccattgcccataaaggttgttttcctcatatcctcatcactcaatgttatctaggattcttatattttcta

SEQ ID NO: 198438 - DNA, 622 bp, Homo sapiens
ctatgaactcactgagaagaactcactcaagtggattgtgctaaaccaagcttgtccaacccacagcttgtgggctgaatgcaggtcagaacagctttgaatgtggcccaaatttgtcaactttgttaaaacaaaagagagtttgtgtatgtgtgtgtgtgtgtgtgtktgtgtgtgtgtgtgtgtttatttttatttatttatgtatttatttattttagctcatcagctatttttagtgtattttatgtgtggctcaagaaaattcttcttccaatgctgtccagggaagccaaaagttggacattcctgtgctaagctattcataaggcatccaccccatgatccaatacctctcactgggccccacctccaacattggggatcatattttaacatgagatttggaggggacacacatccaaactatatcagggatatgtacccatcatcgagacaggttgtagagtatgcatactttcaaatgggtcctgtcatgttattttctgaaatggttaaaaccatttaatttcccatccattgcccataaaggttgttttcctcatatcctcatcactcaatgttatctaggattcttatattttctaagcaagtggtgaaa

SEQ ID NO: 198439 - DNA, 597 bp, Homo sapiens
ctgagaagaactcactcaagtggattgtgctaaaccaagcttgtccaacccacagcttgtgggctgaatgcaggtcagaacagctttgaatgtggcccaaatttgtcaactttgttaaaacaaaagagagtttgtgtatgtgtgtgtgtgtgtgtgtgtgtgtgtgtgtgtgtgtttatttttatttatttatgtatttatttattttagctyatcagctatttttagtgtattttatgtgtggctcaagaaaattcttcttccaatgctgtccagggaagccaaaagttggacattcctgtgctaagctattcataaggcatccaccccatgatccaatacctctcactgggccccacctccaacattggggatcatattttaacatgagatttggaggggacacacatccaaactatatcagggatatgtacccatcatcgagacaggttgtagagtatgcatactttcaaatgggtcctgtcatgttattttctgaaatggttaaaaccatttaatttcccatccattgcccataaaggttgttttcctcatatcctcatcactcaatgttatctaggattcttatattttcta

SEQ ID NO: 198440 - DNA, 609 bp, Homo sapiens
cactgagaagaactcactcaagtggattgtgctaaaccaagcttgtccaacccacagcttgtgggctgaatgcaggtcagaacagctttgaatgtggcccaaatttgtcaactttgttaaaacaaaagagagtttgtgtatgtgtgtgtgtgtgtgtgtgtgtgtgtgtgtgtgtgtttatttttatttatttatgtatttatttattttagctcatcagctatttttagtgtattttatgtgtggctcaagaaaattcttcttccaatgctgtccagggaagccaaaagttggacattcctgtgctaagctattcataaggcatccaccccatgatccaatacctctcactgggccccacctccaacattggggatcatattttaacatgagatttggaggggacacacatccaaactatatcagggatatgtacccatcatcgagacaggttgtagagtatgcatactttcaaatgggtcctgtcatgttattttctgaaatggttaaaaccatttaatttyccatccattgcccataaaggttgttttcctcatatcctcatcactcaatgttatctaggattcttatattttctaagcaagtggt

SEQ ID NO: 198441 - DNA, 626 bp, Homo sapiens
aatggtaattttcacttggtcattactttattttataattatctctatttaaattagtatcagctcactcctgggtatccacctagaggaaaagaagtcatatgaaaaagacacatgtatgcacattcatagcagcacaactcacagttgcaaaaatgtgtaacaaggttaaatgtctatcagccaatgagtggacaaagaaaatgtgttatagatacaccatggaatactactcagccctaaaaatgaatcaaataatgacacttgcagcaacctggatggagttagagatgattattstaagtgaagtaactcaggaataaaaaacaaatattgtatgttctcacttataagtgggagctaagctatgagagagtgaaggcataagaatgatttaatagactttggggactcagagggaaggttaggggggtgagggataaaagactacacattgggtacaatgtacactacttgagtaatgcgtacaccaaaatctcagaaatcaccactaaataacttttccatgtaaccaaaaaccacctgtttcccaaaaactattgcaataaagtaatatatatgaaaacaatcaacatgatagtcttgaagtgcaacattcactgggt

SEQ ID NO: 198442 - DNA, 626 bp, Homo sapiens
aatggtaattttcacttggtcattactttattttataattatctctatttaaattagtatcagctcactcctgggtatccacctagaggaaaagaagtcatatgaaaaagacacatgtatgcacattcatagcagcacaactcacagttgcaaaaatgtgtaacaaggttaaatgtctatcagccaatgagtggacaaagaaaatgtgttatagatacaccatggaatactactcagccctaaaaatgaatcaaataatgacacttgcagcaacctggatggagttagagatgattattgtaagtgaagtaactcaggaataaaaaacaaatattgtatgttctcacttataagtgggagctaagctatgagagagtgaaggcataagaatgatttaatagactttggggactcagagggaaggttaggggggtgagggataaaagactacacattgggtacaatgtacactactygagtaatgcgtacaccaaaatctcagaaatcaccactaaataacttttccatgtaaccaaaaaccacctgtttcccaaaaactattgcaataaagtaatatatatgaaaacaatcaacatgatagtcttgaagtgcaacattcactgggt

SEQ ID NO: 198443 - DNA, 626 bp, Homo sapiens
aatggtaattttcacttggtcattactttattttataattatctctatttaaattagtatcagctcactcctgggtatccacctagaggaaaagaagtcatatgaaaaagacacatgtatgcacattcatagcagcacaactcacagttgcaaaaatgtgtaacaaggttaaatgtctatcagccaatgagtggacaaagaaaatgtgttatagatacaccatggaatactactcagccctaaaaatgaatcaaataatgacacttgcagcaacctggatggagttagagatgattattgtaagtgaagtaactcaggaataaaaaacaaatattgtatgttctcacttataagtgggagctaagctatgagagagtgaaggcataagaatgatttaatagactttggggactcagagggaaggttaggggggtgagggataaaagactacacattgggtacaatgtacactacttgagtaatgcgtacaccaamatctcagaaatcaccactaaataacttttccatgtaaccaaaaaccacctgtttcccaaaaactattgcaataaagtaatatatatgaaaacaatcaacatgatagtcttgaagtgcaacattcactgggt

SEQ ID NO: 198444 - DNA, 518 bp, Homo sapiens
cttaagattcacaatagtgagaagccctgtgagtggcagggaaatcatcattaatttttcaccgtactgaacatgtgaggaggacatactggaagggagctcaatgagttaacatgcatgagaacatctttcctgaactctcctatcttacagaagtgtgaaaagaaaccctctgaaggtaaagtctatggaaagcctttcatcttcattcatcgtgagtagatatttgttctcacactggagagaagctatgaaagtaaggaatatraaaaaagcctcagtgttgtctcagactcatagttcatacaagaactcacacagcagagactgcttatggaagtaaaaaatgcagaaaatacctctttaaacactatccctcctttatacatgattccacaccctggagggagactacaattgaataaatataagaaagctttcagttccagctcttcacttattgggcatgaatgagcacagggtaggactgaagcacagtaaacgttaacaattattga

SEQ ID NO: 198445 - DNA, 592 bp, Homo sapiens
catcttcttcactaagggaacatagattcactttttccaaggagcactgtttaaatgtctttatttatttatttatgcatattttattattttayaattttttttttgaaaaatggtctcactctgtctcccaggctggagtgcagtggcatgatcagagctcactgcagccttgaactcctgggctcatgtgatctcccagctcagactcctgagtaggtaggactgcaggcataacaggtgtgcaccgccacacccagcttttgttttgttttgtttttgtagagactgggtctcgttatgttgcctggactggtttcaaattcctgtgctcaagtgattctcccaccttggcctcccaaattgctggaattacaggcatgagccaccatgcctggccctggttaacgtctttaaatgagtttcccagtttttcttgtaactgtagtgagcgaatcttatagtcctggccaatgtgaaatgcagaattcactgctttggatttctgaaaatctgtttggaaaggggagagttattgttcctcttttttgttgaccaatttccctttgctttctctgcttgctcctctctg

SEQ ID NO: 198446 - DNA, 447 bp, Homo sapiens
cactgtttaaatgtctttatttatttatttatgcatattttattattttacaattttttttttgaaaaatggtctcactctgtctcccaggctggagtgcagtggcatgatcagagctcactgcagccttsaactcctgggctcatgtgatctcccagctcagactcctgagtaggtaggactgcaggcataacaggtgtgcaccgccacacccagcttttgttttgttttgtttttgtagagactgggtctcgttatgttgcctggactggtttcaaattcctgtgctcaagtgattctcccaccttggcctcccaaattgctggaattacaggcatgagccaccatgcctggccctggttaacgtctttaaatgagtttcccagtttttcttgtaactgtagtgagcgaatcttatagtcctggccaatgtgaaatgcagaattc

SEQ ID NO: 198447 - DNA, 529 bp, Homo sapiens
ggaatatgagtggggggggcctcatctctatataaaaagtatgagcgtatttgtgctcttttgtacattcatttgtatagtcactgggaaaaaaatgagaaaaacccaaacacggctttctatatgcctctgtgctttgttttcaacactgagctgtgagaaatctagttactaaaatgaaactttgaaaaaatayaacaatttgggacaatggggacacttagctgatgcagcacaggtgaacagttcttcttttgtgcccaagaggacacaattcccaggaggctgcatgtggtctcctaggacaagcctgtgggcacccactggctgcagttccacctttccttccctggactctcaggaagacatgagttctggattcagctgaactgagctcaagttcaggttctgtgactcactggctctgtaattctgggtaagtctcttgctctccttgagtctcatatcctccttggtaaaatggagaggtagagctattgttagattttgaaggcaaggcaagggttaa

SEQ ID NO: 198448 - DNA, 529 bp, Homo sapiens
ggaatatgagtggggggggcctcatctctatataaaaagtatgagcgtatttgtgctcttttgtacattcatttgtatagtcactgggaaaaaaatgagaaaaacccaaacacggctttctatatgcctctgtgctttgttttcaacactgagctgtgagaaatctagttactaaaatgaaactttgaaaaaatataacaatttgggacaatggggacacttagctgatgcagcacaggtgaacagttcttcttttgtgcccaagaggacacaattcccaggaggctgcatgtggtctcctaggacaagcctgtgggcacccactggctgcagttccacctttccttccctggactctcaggaagacatgagttctggattcagctgaactgagctcaagttcargttctgtgactcactggctctgtaattctgggtaagtctcttgctctccttgagtctcatatcctccttggtaaaatggagaggtagagctattgttagattttgaaggcaaggcaagggttaa

SEQ ID NO: 198449 - DNA, 484 bp, Homo sapiens
tatcattctttacaatgataaagaagcaaaagaaaaacaaaaggacaaagaacatcttaaatgactacattcaactgccatggagctttaattttttaactattcaaaaagatatccactgtattattccaactatgtgactcttctgaaaaaagtaaaactatgaagacagagtaaacatcaatggttgccacgagttactagggagaaagggaaagatgaacaggcatagcacagagaatttttcgggctgtgaaactgttctgtcgataatattacagtaatagatacatgtcatgtcattatacacttgtccaaattcacagaaygtacagcatcaagagtgaagcctgatgtaaactatgaactttgaatgattataatgtgtcaatgtaagttcatcagttgtaacaaatgtaccactctctggtggaaaatagtaataatgggggaggctatgcatgtgtgggaggcatgggatata

SEQ ID NO: 198450 - DNA, 526 bp, Homo sapiens
ttgcacttatctattctggggtttttaatcaagagtgtatcccaaccttgaaggttttttgtttttttgtgggtttttttttttggctattattgttgttagagacaagagtctcactatgttgctcaagctggattcaaactcttaggctcaagctgggactacaggaatacaccactgtgcccagcttcaagaaaacatttttaaacacgttcaggccttawtaggtctattacatcaaaatcttcaggggaaagcctacaattgtagatttttaacaaaatgtcctcaggtcactgtaatgcacaattctgagaatcagtgcagcagacaatcacttcagtctcacctctcacccacatggctaattcctttatcagttggagatgtggccaaaaagagaaaagagtaagagatagtgtcatttattaaaactccagttaagtttcctggctatgggtagaacagggacaagtaaactcaaaatcccacttgattttgctatttacaagctccttatctccca

SEQ ID NO: 198451 - DNA, 526 bp, Homo sapiens
ttgcacttatctattctggggtttttaatcaagagtgtatcccaaccttgaaggttttttgtttttttgtgggtttttttttttggctattattgttgttagagacaagagtctcactatgttgctcaagctggattcaaactcttaggctcaagctgggactacaggaatacaccactgtgcccagcttcaagaaaacatttttaaacacgttcaggccttaataggtctattacatcaaaatcttcaggggaaagcctacaattgtagatttttaacaaaatgtcctcaggtcactgtaatgcacaattctgagaatcagtgcagcagacaatcacttcagtctcacctctcacccacatggctaattcctttatcagttggagatgtggccaaaaagagaaaagagtaagagatagtrtcatttattaaaactccagttaagtttcctggctatgggtagaacagggacaagtaaactcaaaatcccacttgattttgctatttacaagctccttatctccca

SEQ ID NO: 198452 - DNA, 526 bp, Homo sapiens
ttgcacttatctattctggggtttttaatcaagagtgtatcccaaccttgaaggttttttgtttttttgtgggtttttttttttggctattattgttgttagagacaagagtctcactatgttgctcaagctggattcaaactcttaggctcaagctgggactacaggaatacaccactgtgcccagcttcaagaaaacatttttaaacacgttcaggccttaataggtctattacatcaaaatcttcaggggaaagcctacaattgtagatttttaacaaaatgtcctcaggtcactgtaatgcacaattctgagaatcagtgcagcagacaatcacttcagtctcacctctcacccacatggctaattcctttatcagttggagatgtggccaaaaagagaaaagagtaagagatagtgtcatttattaaaactccasttaagtttcctggctatgggtagaacagggacaagtaaactcaaaatcccacttgattttgctatttacaagctccttatctccca

SEQ ID NO: 198453 - DNA, 458 bp, Homo sapiens
tttttgtttttttgtgggtttttttttttggctattattgttgttagagacaagagtctcactatgttgctcaagctggattcaaactcttaggctcaagctgggactacaggaatacaccactgtgcccagcttcaagaaaacatttttaaacacgttcaggccttaataggtctattacatcaaaatcttcaggggaaagcctacaattgtagatttttaacaaaatgtcctcaggtcactgtaatgcacaattctgagaatcagtgcagcagacaatcacttcagtctcacctctcacccacatggctaattcctttatcagttggagatgtggccaaaaagagaaaagagtaagagatagtgtcatttattaaaactccagttaagtttcctggctaygggtagaacagggacaagtaaactcaaaatcccacttgattttgctatttacaagc

SEQ ID NO: 198454 - DNA, 613 bp, Homo sapiens
tagaaccaaccctaatgcccatcagtaggtgaatggataaagaaaatgtaatatatacatacacagagtattattcagccataaaaagaaaaatatctggccagattcaggggcttacacctgtaatcccagtattttgggaggccaaggtgggcaggtctcttgagccccraattttgagaccaggctggacaacatggcacatttggtcagaagtgtttgaccataactactattcaagaaaaagatctactcattagaactataaatcataaaattataaattctacaaaaacaaatcaaccttatctaccacccagtactacccaattacagaatgttagaacggaaggtctcaccatggactcaagagctgatatgagcaatgtcaccaccatcctgttctctgcggactcatcttcaacagactcatcttcaacggactcctcatctgccatggactcctcatcttcaatgggcagggtggaaactgcagcttgtgccatgatccctgtgcaagaaaagtagtaagaaattgaatggtagaaatccagtatcctaaactcacatccagagctgtgagagtttttcactggctggcaaattgtttttt

SEQ ID NO: 198455 - DNA, 613 bp, Homo sapiens
tagaaccaaccctaatgcccatcagtaggtgaatggataaagaaaatgtaatatatacatacacagagtattattcagccataaaaagaaaaatatctggccagattcaggggcttacacctgtaatcccagtattttgggaggccaaggtgggcaggtctcttgagccccaaattttgagaccaggctggacaacatggcacatttggtcagaagtgtttgaccataaytactattcaagaaaaagatctactcattagaactataaatcataaaattataaattctacaaaaacaaatcaaccttatctaccacccagtactacccaattacagaatgttagaacggaaggtctcaccatggactcaagagctgatatgagcaatgtcaccaccatcctgttctctgcggactcatcttcaacagactcatcttcaacggactcctcatctgccatggactcctcatcttcaatgggcagggtggaaactgcagcttgtgccatgatccctgtgcaagaaaagtagtaagaaattgaatggtagaaatccagtatcctaaactcacatccagagctgtgagagtttttcactggctggcaaattgtttttt

SEQ ID NO: 198456 - DNA, 613 bp, Homo sapiens
tagaaccaaccctaatgcccatcagtaggtgaatggataaagaaaatgtaatatatacatacacagagtattattcagccataaaaagaaaaatatctggccagattcaggggcttacacctgtaatcccagtattttgggaggccaaggtgggcaggtctcttgagccccaaattttgagaccaggctggacaacatggcacatttggtcagaagtgtttgaccataactactattcaagaaaaagatctactcattagaactataaatcataaaattataaattctacaaaaacaaatcaaccttatctaccacccagtactacccaattacagaatgttagaacrgaaggtctcaccatggactcaagagctgatatgagcaatgtcaccaccatcctgttctctgcggactcatcttcaacagactcatcttcaacggactcctcatctgccatggactcctcatcttcaatgggcagggtggaaactgcagcttgtgccatgatccctgtgcaagaaaagtagtaagaaattgaatggtagaaatccagtatcctaaactcacatccagagctgtgagagtttttcactggctggcaaattgtttttt

SEQ ID NO: 198457 - DNA, 613 bp, Homo sapiens
tagaaccaaccctaatgcccatcagtaggtgaatggataaagaaaatgtaatatatacatacacagagtattattcagccataaaaagaaaaatatctggccagattcaggggcttacacctgtaatcccagtattttgggaggccaaggtgggcaggtctcttgagccccaaattttgagaccaggctggacaacatggcacatttggtcagaagtgtttgaccataactactattcaagaaaaagatctactcattagaactataaatcataaaattataaattctacaaaaacaaatcaaccttatctaccacccagtactacccaattacagaatgttagaacggaaggtctcaccatggactcaagagctgatatgagcaatgtcaccaccatcctgttctctgcggactcatcttcaacagactcatcttcaacggactcctcatctkccatggactcctcatcttcaatgggcagggtggaaactgcagcttgtgccatgatccctgtgcaagaaaagtagtaagaaattgaatggtagaaatccagtatcctaaactcacatccagagctgtgagagtttttcactggctggcaaattgtttttt

SEQ ID NO: 198458 - DNA, 618 bp, Homo sapiens
agtttcaagctttaacagcagggtcaattttgacgttcatccaaaaaaaacccatccattgggacaacagggccggtgtcaatgtaagcaatgattctgtagttcctctttgttctttcaaaatctraaataaacaattgaatttatattatatgctaaatctaaagaaaatacatcttgttgtacttgaggccagaagagatagaagtaaggcagtcaagtttgggaacattataaaaaattcaaaaaaagtaataaatgcataaaacttacagagtaacaagtgctatttcagaattcttctaaatactaagtattcacatgaccttatcaatatttgcattactaaccatacaataagaacctgacttctgactgttctgagataagggataaatgtgtactttaccttaaatgggaaagtgcatcatgtacccacttcgagattcacaacagggaaaactgatttgaaaaattgttgcttgtgaagttcatttatatgttaaaaaaaggccaatacattttcccttttccacatagaaaaggaacactatacttataaatactaaaacacagtctgtggaatacaaggaaccaatagaaacagtatgtaggaaa

SEQ ID NO: 198459 - DNA, 618 bp, Homo sapiens
agtttcaagctttaacagcagggtcaattttgacgttcatccaaaaaaaacccatccattgggacaacagggccggtgtcaatgtaagcaatgattctgtagttcctctttgttctttcaaaatctaaaataaacaattgaatttatattatatgctaaatctaaagaaaatacatcttgttgtacttgaggccagaagagatagaagtaaggcagtcaagtttgggaacattataaaaaattcaaaaaaagtaataaatgcataaaacttacagagtaacaagtgctatttcagaattcttctaaatactaagtattsacatgaccttatcaatatttgcattactaaccatacaataagaacctgacttctgactgttctgagataagggataaatgtgtactttaccttaaatgggaaagtgcatcatgtacccacttcgagattcacaacagggaaaactgatttgaaaaattgttgcttgtgaagttcatttatatgttaaaaaaaggccaatacattttcccttttccacatagaaaaggaacactatacttataaatactaaaacacagtctgtggaatacaaggaaccaatagaaacagtatgtaggaaa

SEQ ID NO: 198460 - DNA, 616 bp, Homo sapiens
cagatacaacagatccaagtttcaagctttaacagcagggtcaattttgacgttcatccaaaaaaaacccatccattgggacaacagggccggtgtcaatgtaagcaatgattctgtagttcctctttgttctttcaaaatctaaaataaacaattgaatttatattatatgctaaatctaaagaaaatacatcttgttgtacttgaggccagaagagatagaagtaaggcagtcaagtttgggaacattataaaaaattcaaaaaaagtaataaatgcataaaacttacagagtaacaagtgctatttcagaattcttctaaatactaagtattcacatgaccttatcaatatttgcattactaaccatacaataagaacctgacttctgactrttctgagataagggataaatgtgtactttaccttaaatgggaaagtgcatcatgtacccacttcgagattcacaacagggaaaactgatttgaaaaattgttgcttgtgaagttcatttatatgttaaaaaaaggccaatacattttcccttttccacatagaaaaggaacactatacttataaatactaaaacacagtctgtggaatacaaggaaccaat

SEQ ID NO: 198461 - DNA, 571 bp, Homo sapiens
gtaggaaaatggaagtgaaaagattatacattgcaaagacttcagtagaaggagtttttcatcaacatcatcrgtttcagaagggcctgctttgggatacaaagacaatacttcaacagtaactcccccaagccagacgcagcgacttatgcctgtaatcccagtaatttgggaggccaaggcaggcagtgaggtctggagttcaagacaaacctggccaacagggtgatacaccgtctctaccaaaaaatacaaaaattaaccaggtgtagtggcatgcacctatacagtcccagctatatgggaggctgaggcaaatgtactcattttttcattcctgcacccaagaaactgcaaccaatctactctgttaagagcagagataaagggtttagactccatattacatgtgaaatagaagaaatgaatcagtttagtatgaacttgtatgcacttttggagaggaaagtaggtcaagaagccattaagatacatgaaggaaggtcaaatcttaaagaaaactagaaattcagatttatttacatagctctagaaggaagaaccaggaata

SEQ ID NO: 198462 - DNA, 571 bp, Homo sapiens
gtaggaaaatggaagtgaaaagattatacattgcaaagacttcagtagaaggagtttttcatcaacatcatcagtttcagaagggcctgctttgggatacaaagacaatacttcaacagtaactcccccaagccagacgcagygacttatgcctgtaatcccagtaatttgggaggccaaggcaggcagtgaggtctggagttcaagacaaacctggccaacagggtgatacaccgtctctaccaaaaaatacaaaaattaaccaggtgtagtggcatgcacctatacagtcccagctatatgggaggctgaggcaaatgtactcattttttcattcctgcacccaagaaactgcaaccaatctactctgttaagagcagagataaagggtttagactccatattacatgtgaaatagaagaaatgaatcagtttagtatgaacttgtatgcacttttggagaggaaagtaggtcaagaagccattaagatacatgaaggaaggtcaaatcttaaagaaaactagaaattcagatttatttacatagctctagaaggaagaaccaggaata

SEQ ID NO: 198463 - DNA, 522 bp, Homo sapiens
gctacttgttttcagggtgctcttggggtgctggagacagacctgccacacccctactgggtaactgaggatgcccctctgccttttaaagccagcatcctcctgtattcgaagcacaaaggagataaggatggctgctcaggcttcatgaggctgcagggccagtgacacgggggtgggagctgcctcatgggctataagcagcacccaggtggaccctgggtctctgagccacccacagggagacttgcagtcaggtgagccctgcccaggagcacccagcacagcctggctgggtccctgacctccagctgtggcacttggggtaggagcatgcgtgtggaagaccctagctyggatacagggagttccagccccacagaggtagggcactccagggctcctcccactctccctgacagcgggcctgtcatctcaccacatttcccttcaccttcctcagcggctcccactcccacccagacccccgcatggcccctcaggccctgggatggggctcct

SEQ ID NO: 198464 - DNA, 559 bp, Homo sapiens
gtctttaatttttgttctgtttatgaagaacagtggttaatataaatatcttataatgtctataaactattatttgtaacacctctggagacctaggcacagtactattagcctctactctaagcaaaaaataagcaaaggtaaaggtattttccctttaaaagtgaagttaaatttttaaaatttgtaatcattggcattgatgaattcagtccatctgctttttgtttttcttaaaaggcttttattataatgcaaaggcrtaaactatttactaacaaatagggctgaaaccctgtgtgaggccgttcttgcattgctataaagaaatgcatgaggctggttaatttataaagaaaagaggtttaattggcccctggttctgcagactgtacaggaagcatggcacaggcatctgctcagcttctagggaggcctcaggaagcttccagtcatggcagaaggtgaagggagagcaggcatctcacgtgacagtgcaggagcaagaaggaggaaggaggtgccacacacttttaaaaaaactgatctcctgagaacg

SEQ ID NO: 198465 - DNA, 572 bp, Homo sapiens
ttcgataaggtatagaacaatgaaacagaagatcaataacactgtagactaattggatctagctgacatttacaaaacactctacccggcaacagcagaatacacatttttctcaagtgcacatgacatattctccaggaaagaccatatgttgagtcacaaagtaagtcttaataaatttaaaaatattgaaatcatacaaaatatcttttttcaatcataatgaaatgaaactagaaatcaaaagcagaaggaaaactggaaaacacataaatatgtggaaattaaacaacatacttaaacaacaatggctcaaagaagaaatctcaagagaaactagaaaatatcttgagaaatgaaatgaaaacacaacataccaaamtttacaagatacagtgaaaacagtcctaagagggaaatttatagctataaatacttaacattaaaaaagaaggaagagctcaagtcaacaacctaactttatgccctaaggaactagaagaacaaaactagcagaaggaagaaataataaagattaggtcagatatagacaaaataaagaatagaaaaac

SEQ ID NO: 198466 - DNA, 460 bp, Homo sapiens
tatgaaagttctgggctatcttagctaacttatcctaaacccttaacctaaatttaacttgagccccagtctcagaaattaacatggtatgaargtgtttccaggccaggcgcggtggctcacgcctgtaatcccaacactttgggaggccgaggtgggtggatcacctgaggtcaggagtttgagaccagcctggccaacactatctgtactaaaaacacaaaattagctgggcgtggtagtgcgtgcctgtaatcccagctacttgggaggctgaggtagaagaattgtttgaacctgggaggtggaggttgcagtgagccaagatcgtgccattgcactccagcctaggcaacaagagtgaaactccatctcaaaaaaaaaaaaaaaaaaaaaaaaagaaagaaagtgttcccagccacaaatgtgacaagtgagaactgggccttggaaaagagat

SEQ ID NO: 198467 - DNA, 491 bp, Homo sapiens
gcttattccagaggccaggctgtgactctgtccttggattccatgaaatgtyccaattttccaaaaaagttatctcttttgcttaagttagctactatttactcttgttacttgcaatcaaaagcatccaaattaatacttttttaaatgctgtaaacattttctcaatggtctggaggggaaagggttggagtgaagtctgaagatgctccttctctccgccaaaaggggagatagtccaagtcatgctgacttaaatggtgaggagacttagtggttcaggaagctacgagtccggaggaagtgcaggtttctgggatgacttattccagggactctagcaccatttccctgctgttcttctgatttgcctcctccatgtccacctcatccttgggcaagtggtgagataactgctgcctatgagtgcaaggaaacttttccaatgttccccagcacattttcattgggctgaattcttttttttttct

SEQ ID NO: 198468 - DNA, 536 bp, Homo sapiens
acatttcagatagggactcagaacaccctttacaacattttaaaactgggttacagaagttttagtttcagcagttcctaattaccttaaagaaggcaatttccatgtcttataaaaaaccagtttgaaaaatctactctagaaaaagcaaggaaaatcagtaacatcgcagcctgcttttggattctttcatctcttcatagggtggcactgaagttacagacttacatcctccctcattgaggaagacttgtcaaaccatctctggatggacagactgagagaaatagactcagggctgtggctgtgtacactctcccatttccttgccagaaatcttgcctttcccatccccgagcccatagttactgttcttagttagatggcattggcagaaagaygctgggatctcagccatgcatggtagaaaatataagcaagctggggctgagtacaagccaggaagattaactcatcaatgaggaggctccttgtgaaggacacttcaaagactactatttaattggggcataacc

SEQ ID NO: 198469 - DNA, 536 bp, Homo sapiens
acatttcagatagggactcagaacaccctttacaacattttaaaactgggttacagaagttttagtttcagcagttcctaattaccttaaagaaggcaatttccatgtcttataaaaaaccagtttgaaaaatctactctagaaaaagcaaggaaaatcagtaacatcgcagcctgcttttggattctttcatctcttcatagggtggcactgaagttacagacttacatcctccctcattgaggaagacttgtcaaaccatctctggatggacagactgagagaaatagactcagggctgtggctgtgtacactctcccatttccttgccagaaatcttgcctttcccatccccgagcccatagttactgttcttagttagatggcattggcagaaagatgctgggatctcagccatgcatggtagaaaatataagcaagctggggctgagtacaagccaggaagattawctcatcaatgaggaggctccttgtgaaggacacttcaaagactactatttaattggggcataacc

SEQ ID NO: 198470 - DNA, 450 bp, Homo sapiens
tatgaaaaaggaatgctgaccacataaatagagagtaatacaagctactcactccatctactgagcctgaacaaatgtatcttattcaaaatgagttagaagaaaaaaagacatatatggagtgtaaaaaaattaccataggacataaagtgaytaagatccagaagattcaagtgaaatagataacatttaagaattaactaccaaagaatccagagaaattttctacaatataatgtaaacatttactccaatagacttggaagtctaaaagaaatagatgattcctgagagagacataaattaccaaaatgacttaggtctggattggaaaaaaaataagatttacccattaaaatataccaagaaacataaaactacatagttgaagtctaccaaatatcaaagaacaagcaatgcctattaaataaaccattccaagcttaaaaa

SEQ ID NO: 198471 - DNA, 537 bp, Homo sapiens
gctgaataaagtgagttccacatttacccttgctttttcttgtgaagatatgtacctaaattcacagcacaggggaayagaaagcagaagtccaggggggataaggagccataggttggaatgtgagaaggccaaagctgtaaggacctgaggtcaatacagcccaaagaggaggatgtcgcatggaagtgagccctaaaatcctcgtgcaatttgccctgggggaatttaccaatccctaaactctgcatacataagaaggatgagaatccaaaagcctagcagacagcaatagctgagaggccaaagagctgagcagatactttagcagccagctgcctggtactgggaagataagttggaattcaaggtcagacaaggtgaaactgcccagggatgtacttcaggcttaaagtaagaccccaaaagggttacactgtagaagggcaaactgaagtacaatacagcactaagtctaaaactaacaatatgattaaaatattctgcttgtgcattaactgtcttccagaagatgtt

SEQ ID NO: 198472 - DNA, 481 bp, Homo sapiens
gtgattttcatacaaaaaattatttacataaggtgatctatgaaatgagatgtggtaacacataggatcttgtgtgcaatattttgttagtagggatctcagaaatgagaaaataccaacttgcatcttctttgtggaacttacaaaaaataaaggtagggttttgtcttccacagcagctggaaatgaacatagtgactaagcatcattctaacaaagatttgttggttcagagtttaaggaggtagatraagagtagtagtagtccaagccagatgctgacatctattagttttctgcccttggtgtgactgatgagctcagtaatagagtataattaggttatctgatttaatgatttaatatatttataaataaatttcattacaaaatataaaatagcttagatgctctgaattacaagccacaaagaatagaacatctaatatccaaaagtaggaattaataacagaaaattgca

SEQ ID NO: 198473 - DNA, 445 bp, Homo sapiens
agaaaagcgaaaacaaaagacaaaacttatgttattcaccttccaacagatggctccaaacccatgtacccctaaacagagcttccagtgggccagaaactrtaaaggttccaaaccctcctttaaaggacccaagcctccattgggaggatcaaggctctcgtctaccagtccatctaaatagcatgggggagtaaaatcaaagaatcccagaactgagagtggggaagggcaaggtaggcactacaaatgtggaagaacaggccacttcaagagagaatgtcccaaattagaaaaggaaaaagaagcccttccactcatggcttttgaggaagaataatggtgtcaggggttctgtctcttttatcttgagtcccaccaggagcccttgataagtctagaagtgggacctaagcatgagtttataacctttttagtcaattca

SEQ ID NO: 198474 - DNA, 445 bp, Homo sapiens
agaaaagcgaaaacaaaagacaaaacttatgttattcaccttccaacagatggctccaaacccatgtacccctaaacagagcttccagtgggccagaaactataaaggttccaaaccctcctttaaaggacccaagcctccaytgggaggatcaaggctctcgtctaccagtccatctaaatagcatgggggagtaaaatcaaagaatcccagaactgagagtggggaagggcaaggtaggcactacaaatgtggaagaacaggccacttcaagagagaatgtcccaaattagaaaaggaaaaagaagcccttccactcatggcttttgaggaagaataatggtgtcaggggttctgtctcttttatcttgagtcccaccaggagcccttgataagtctagaagtgggacctaagcatgagtttataacctttttagtcaattca

SEQ ID NO: 198475 - DNA, 445 bp, Homo sapiens
agaaaagcgaaaacaaaagacaaaacttatgttattcaccttccaacagatggctccaaacccatgtacccctaaacagagcttccagtgggccagaaactataaaggttccaaaccctcctttaaaggacccaagcctccattgggaggatcaaggctctygtctaccagtccatctaaatagcatgggggagtaaaatcaaagaatcccagaactgagagtggggaagggcaaggtaggcactacaaatgtggaagaacaggccacttcaagagagaatgtcccaaattagaaaaggaaaaagaagcccttccactcatggcttttgaggaagaataatggtgtcaggggttctgtctcttttatcttgagtcccaccaggagcccttgataagtctagaagtgggacctaagcatgagtttataacctttttagtcaattca

SEQ ID NO: 198476 - DNA, 456 bp, Homo sapiens
gtgctaactcttctttgtgtcaccaaaaagttatttccaacatgaaggtgcacccttggtggagggaacatctgacgaagttcaatgtttggggaaagcaatatctggaaagattgaacagtcagcaggagaaacacctaggaaaattacaaggcctgtgaaagaaacatctgagaaatttgcmtggccacaagaaaggccttcaaagaccacacgggaggaaaaagaaacatctgtaaagactgaatgagtggcaggagtaacatttaataaaattgaagttttggaagaaggaacatctaagatgatcacatgtcctacaaaaaaacagctacaaaagcaagtacaaatggtaagatgcttgagtgaactttgtagagtttattggcactctgggttgcctaatggaaatagtgtggtatgggagtagttgggaatggcttgaatgtctagata

SEQ ID NO: 198477 - DNA, 462 bp, Homo sapiens
aaaatgaattttaagataagtatatttaatggyagattgactttaaaccaagaagaagagaagagaagaaatgccaatatattaaatgaaaaattagggaagaattaggaaaaatcgaagagcaacaaaagaaaaagttagaagtgaagcaacttgagctcactctccgaatatacaaaatatggaattgaagactgtaagaagtaatttgaatcagctcaatcaatcgctggtaaaaattttatatttctaactttatttcatcaatattacttttaatatcccttcgatttagtatgtattattcagaattatgataatgccgctataatatttaggtacaaacttttgtatatttcattcataagttttcatttcttttgggtatgtacctaggaatggaattgctgggtcataaggtacctatgcataaccttttcatcaatcacctcacagttttcc

SEQ ID NO: 198478 - DNA, 578 bp, Homo sapiens
actagaaagaaaaaacatattcaagaatatagaaattttactggaataataaaccaatatacgaagaagtagatctcaaagtgaattctatgttctaacaaaatgaattttaagataagtatatttaatggcagattgactttaaaccaagaagaagagaagagaagaaatgccaatatattaaatgaaaaattagggaagaattaggaaaaatcgaagagcaacaaaagaaaaagttagaagtgaagcaacttgarctcactctccgaatatacaaaatatggaattgaagactgtaagaagtaatttgaatcagctcaatcaatcgctggtaaaaattttatatttctaactttatttcatcaatattacttttaatatcccttcgatttagtatgtattattcagaattatgataatgccgctataatatttaggtacaaacttttgtatatttcattcataagttttcatttcttttgggtatgtacctaggaatggaattgctgggtcataaggtacctatgcataaccttttcatcaatcacctcacagttttccaatgtgtgcactatttt

SEQ ID NO: 198479 - DNA, 439 bp, Homo sapiens
aaaatgaattttaagataagtatatttaatggcagattgactttaaaccaagaagaagagaagagaagaaatgccaatatattaaatgaaaaattagggaagaattaggaaaaatcgaagagcaacaaaagaaaaagttagaagtgaagcaacttgagctcactctccgaatatacaaaatatggaattgaagactgtaagaagtaatttgaatcagctcaatcaatcgctggtaaaaattttatatttctaactttatttcatcaatattacttttaatatcccttcgatttagtatgtattattcagaattatgataatgcckctataatatttaggtacaaacttttgtatatttcattcataagttttcatttcttttgggtatgtacctaggaatggaattgctgggtcataaggtacctatgcataacctttt

SEQ ID NO: 198480 - DNA, 478 bp, Homo sapiens
caggccttcttcatatggaattatgggtgatttccttcaatctgcatcatatcaagttgaggttcatgttgatggaaagtaaaacatacgtttaaaatatcagtaatgawgttttcccctcctttttagcacatgtgcttgtgagagtcatcgtaatacaattctagtctcatgctttgatcattcctaagatgaaaataatatttttagataaaatatctgagttttatgaggcctttagtatatgatgtaatagaatatcagaaaaccatacttttttctagttttccatgtaattctttcattgtttcacctttactcctacgacagtaattttccaaaacaggtatcttgtcattcctcctgttgttatcagtaaataagtgaaatgaagagctagattatgtaatttatctagaacaagaaagtagaattgaatctatattcattaatgagactaaccagtcaattacacaga

SEQ ID NO: 198481 - DNA, 439 bp, Homo sapiens
aaaatgaattttaagataagtatatttaatggcagattgactttaaaccaagaagaagagaagagaagaaatgccaatatattaaatgaaaaattagggaagaattaggaaaaatcgaagagcaacaaaagaaaaagttagaagtgaagcaacttgagctcactctccgaatatacaaaatatggaattgaagactgtaagaagtaatttgaatcagctcaatcaatcgctggtaaaaattttatatttctaactttatttcatcaatattacttttaatatcccttcgatttagtatgtattattcagaattatgataatgccgctataatatttaggtacaaacttttgtatatttcattcataagttttcwtttcttttgggtatgtacctaggaatggaattgctgggtcataaggtacctatgcataacctttt

SEQ ID NO: 198482 - DNA, 496 bp, Homo sapiens
aattttaagataagtatatttaatggcagattgactttaaaccaagaagaagagaagagaagaaatgccaatatattaaatgaaaaattagggaagaattaggaaaaatcgaagagcaacaaaagaaaaagttagaagtgaagcaacttgagctcactctccgaatatacaaaatatggaattgaagactgtaagaagtaatttgaatcagctcaatcaatcgctggtaaaaattttatatttctaactttatttcatcaatattacttttaatatcccttcgatttagtatgtattattcagaattatgataatgccgctataatatttaggtacaaacttttgtatatttcattcataagttttcatttctttygggtatgtacctaggaatggaattgctgggtcataaggtacctatgcataaccttttcatcaatcacctcacagttttccaatgtgtgcactattttacttccccaccagcgatgtatga

SEQ ID NO: 198483 - DNA, 485 bp, Homo sapiens
attttaagataagtatatttaatggcagattgactttaaaccaagaagaagagaagagaagaaatgccaatatattaaatgaaaaattagggaagaattaggaaaaatcgaagagcaacaaaagaaaaagttagaagtgaagcaacttgagctcactctccgaatatacaaaatatggaattgaagactgtaagaagtaatttgaatcagctcaatcaatcgctggtaaaaattttatatttctaactttatttcatcaatattacttttaatatcccttcgatttagtatgtattattcagaattatgataatgccgctataatatttaggtacaaacttttgtatatttcattcataagttttcatttcttttgggtatgtacctargaatggaattgctgggtcataaggtacctatgcataaccttttcatcaatcacctcacagttttccaatgtgtgcactattttacttccccaccag

SEQ ID NO: 198484 - DNA, 485 bp, Homo sapiens
attttaagataagtatatttaatggcagattgactttaaaccaagaagaagagaagagaagaaatgccaatatattaaatgaaaaattagggaagaattaggaaaaatcgaagagcaacaaaagaaaaagttagaagtgaagcaacttgagctcactctccgaatatacaaaatatggaattgaagactgtaagaagtaatttgaatcagctcaatcaatcgctggtaaaaattttatatttctaactttatttcatcaatattacttttaatatcccttcgatttagtatgtattattcagaattatgataatgccgctataatatttaggtacaaacttttgtatatttcattcataagttttcatttcttttgggtatgtacctaggaatggaattgctgggtcataagktacctatgcataaccttttcatcaatcacctcacagttttccaatgtgtgcactattttacttccccaccag

SEQ ID NO: 198485 - DNA, 496 bp, Homo sapiens
aattttaagataagtatatttaatggcagattgactttaaaccaagaagaagagaagagaagaaatgccaatatattaaatgaaaaattagggaagaattaggaaaaatcgaagagcaacaaaagaaaaagttagaagtgaagcaacttgagctcactctccgaatatacaaaatatggaattgaagactgtaagaagtaatttgaatcagctcaatcaatcgctggtaaaaattttatatttctaactttatttcatcaatattacttttaatatcccttcgatttagtatgtattattcagaattatgataatgccgctataatatttaggtacaaacttttgtatatttcattcataagttttcatttcttttgggtatgtacctaggaatggaattgctgggtcataaggtacctatgcataaccttttcakcaatcacctcacagttttccaatgtgtgcactattttacttccccaccagcgatgtatga

SEQ ID NO: 198486 - DNA, 342 bp, Homo sapiens
caatcagcagaatgacataactgaaaaatggaagaaaatrtttgcaaattacacatgtgaaaagcagttaatatcaaaaatatacaagaaactcaaaggactatacaacaaaaaacaaataaccatgaaaaataagcaaaagatctatataaataattttcaaagaaagacatacatatagcttggcagacagatgaatatggctcaaagtcaattatcatcaaggaaaggcaaaccaaaacaactctaacatataaactcactcctgttaaaatgtttaaaaaattgttggtaaacttgaaaaaagagaaagaggggagctttcacactgtttgtgtcaat

SEQ ID NO: 198487 - DNA, 342 bp, Homo sapiens
caatcagcagaatgacataactgaaaaatggaagaaaatatttgcaaattacacatgtgaaaagcagttratatcaaaaatatacaagaaactcaaaggactatacaacaaaaaacaaataaccatgaaaaataagcaaaagatctatataaataattttcaaagaaagacatacatatagcttggcagacagatgaatatggctcaaagtcaattatcatcaaggaaaggcaaaccaaaacaactctaacatataaactcactcctgttaaaatgtttaaaaaattgttggtaaacttgaaaaaagagaaagaggggagctttcacactgtttgtgtcaat

SEQ ID NO: 198488 - DNA, 342 bp, Homo sapiens
caatcagcagaatgacataactgaaaaatggaagaaaatatttgcaaattacacatgtgaaaagcagttaatatmaaaaatatacaagaaactcaaaggactatacaacaaaaaacaaataaccatgaaaaataagcaaaagatctatataaataattttcaaagaaagacatacatatagcttggcagacagatgaatatggctcaaagtcaattatcatcaaggaaaggcaaaccaaaacaactctaacatataaactcactcctgttaaaatgtttaaaaaattgttggtaaacttgaaaaaagagaaagaggggagctttcacactgtttgtgtcaat

SEQ ID NO: 198489 - DNA, 342 bp, Homo sapiens
caatcagcagaatgacataactgaaaaatggaagaaaatatttgcaaattacacatgtgaaaagcagttaatatcaaaaatatacaagaaactcaaaggactatacaacaaaaaacaaataaccatgaaaaataagcaaaagatctatataaataattttcaaagaaagacatacatatagcttggcagacagatgaatatggctcaaagtcaattatcatcaaggaaaggcaaaccaaaacaactctaasatataaactcactcctgttaaaatgtttaaaaaattgttggtaaacttgaaaaaagagaaagaggggagctttcacactgtttgtgtcaat

SEQ ID NO: 198490 - DNA, 558 bp, Homo sapiens
gacataacacttaactaaatgcaggtcttaaaaagtttaaaactattccctttaatttaaaagctaagttatcacagtcttataaaagaattttaaaattccctacattttattacataaaagtacaattggtaaaacaatttactactaaaactcaaagttttcctttcactataatgcagaatattactctaaacacataactcatgtatcacatgaaaaatgttaaaagtcagccataaagagcctctccaattagattttcaatatacatcttacattttaatatccttactcttccacggaaaagttaatgaatgatgcctacctaataagaaaggaatctctcagatttctgatgcaacagaaattgatgacatgcttttacacaaacaacaggaaaaaaggagcagaatgaagcarttttacagttgaattacctcactatttgcttttcaaaaaatctacatttttttcaaggaaaaacgtatatcttgaatgtaattataactctccaaaaaataatcttccactcctcttaaacttatatacaaataa

SEQ ID NO: 198491 - DNA, 558 bp, Homo sapiens
gacataacacttaactaaatgcaggtcttaaaaagtttaaaactattccctttaatttaaaagctaagttatcacagtcttataaaagaattttaaaattccctacattttattacataaaagtacaattggtaaaacaatttactactaaaactcaaagttttcctttcactataatgcagaatattactctaaacacataactcatgtatcacatgaaaaatgttaaaagtcagccataaagagcctctccaattagattttcaatatacatcttacattttaatatccttactcttccacggaaaagttaatgaatgatgcctacctaataagaaaggaatctctcagatttctgatgcaacagaaattgatgacatgcttttacacaaacaacaggaaaaaaggagcagaatgaagcagttttacasttgaattacctcactatttgcttttcaaaaaatctacatttttttcaaggaaaaacgtatatcttgaatgtaattataactctccaaaaaataatcttccactcctcttaaacttatatacaaataa

SEQ ID NO: 198492 - DNA, 531 bp, Homo sapiens
atgaattctcttatgtatagtgaggcctgaagactgcttaaaaagctttgccacatgcttcacatttgtagggtttctctccagtatgatttctcttatgttcattcagttttgaggagtgtttaaagactctgacacattcttcacatttatagggtttctcttcagtaygaattctctgatgtatagtaagctcagaggaccacttaaaagctttgccacattcttcacatttgtacagtttctcttcagtatgaactatcatatgcttagtaaggcttgaggaacagtaaaagcctttgccacattcttcacatttgtaggattcctctccactatgagttatctaatgttcattcagttttgaggatagtttaaagactttgccacattcttcatatctgtagggtttctctccactatgaattatcttatgtacattaaggtctaaagacttcttaaaagctttgccacattcttgacatttgtagtgtttctcttcagcatgaactatgttattttgaataaggt

SEQ ID NO: 198493 - DNA, 393 bp, Homo sapiens
gaattctctgatgtatagtaagctcagaggaccacttaaaagctttgccacattcttcacatttgtacagtttctcttcagtatgaactatcatatgcttagtaaggcttgaggaayagtaaaagcctttgccacattcttcacatttgtaggattcctctccactatgagttatctaatgttcattcagttttgaggatagtttaaagactttgccacattcttcatatctgtagggtttctctccactatgaattatcttatgtacattaaggtctaaagacttcttaaaagctttgccacattcttgacatttgtagtgtttctcttcagcatgaactatgttattttgaataaggtttgaggaacagtaaaacgctttgccacattttt

SEQ ID NO: 198494 - DNA, 570 bp, Homo sapiens
tagtaagctcagaggaccacttaaaagctttgccacattcttcacatttgtacagtttctcttcagtatgaactatcatatgcttagtaaggcttgaggaacagtaaaagcctttgccacattcttcacatttgtaggattcctctccactaygagttatctaatgttcattcagttttgaggatagtttaaagactttgccacattcttcatatctgtagggtttctctccactatgaattatcttatgtacattaaggtctaaagacttcttaaaagctttgccacattcttgacatttgtagtgtttctcttcagcatgaactatgttattttgaataaggtttgaggaacagtaaaacgctttgccacatttttcacaattgtatggtttctctccagcatgaattttcttatatatagtaagatttgaagacccttaaaagctttgatgcattcttgacaactgtagtgcttctctccagtatgaactatcatgtttagtaaagcttaaggaccagtaaaaggctttaccacattcttcacatttgtagggtttctcttcagtat

SEQ ID NO: 198495 - DNA, 393 bp, Homo sapiens
gaattctctgatgtatagtaagctcagaggaccacttaaaagctttgccacattcttcacatttgtacagtttctcttcagtatgaactatcatatgcttagtaaggcttgaggaacagtaaaagcctttgccacattcttcacatttgtaggattcctctccactatgagttatctaatgttcattcagttttgaggatagtttaaagactttgccacattcttcatatctgtagggtttctctccactatgaattatcttatrtacattaaggtctaaagacttcttaaaagctttgccacattcttgacatttgtagtgtttctcttcagcatgaactatgttattttgaataaggtttgaggaacagtaaaacgctttgccacattttt

SEQ ID NO: 198496 - DNA, 570 bp, Homo sapiens
tagtaagctcagaggaccacttaaaagctttgccacattcttcacatttgtacagtttctcttcagtatgaactatcatatgcttagtaaggcttgaggaacagtaaaagcctttgccacattcttcacatttgtaggattcctctccactatgagttatctaatgttcattcagttttgaggatagtttaaagactttgccacattcttcatatctgtagggtttctctccactatgaattatcttatgtacattaaggtctaaagacttcttaaragctttgccacattcttgacatttgtagtgtttctcttcagcatgaactatgttattttgaataaggtttgaggaacagtaaaacgctttgccacatttttcacaattgtatggtttctctccagcatgaattttcttatatatagtaagatttgaagacccttaaaagctttgatgcattcttgacaactgtagtgcttctctccagtatgaactatcatgtttagtaaagcttaaggaccagtaaaaggctttaccacattcttcacatttgtagggtttctcttcagtat

SEQ ID NO: 198497 - DNA, 393 bp, Homo sapiens
gaattctctgatgtatagtaagctcagaggaccacttaaaagctttgccacattcttcacatttgtacagtttctcttcagtatgaactatcatatgcttagtaaggcttgaggaacagtaaaagcctttgccacattcttcacatttgtaggattcctctccactatgagttatctaatgttcattcagttttgaggatagtttaaagactttgccacattcttcatatctgtagggtttctctccactatgaattatcttatgtacattaaggtctaaagacttcttaaaagctttgccacattcttgacatttgtagtgtttctcttcagcatgaactatrttattttgaataaggtttgaggaacagtaaaacgctttgccacattttt

SEQ ID NO: 198498 - DNA, 456 bp, Homo sapiens
gttaagtccattgtaacctccttcctgcaccttagatgcattcaaacttttacagccttttcttatttgtaaattctcatgtctgcatttcccatatcttctcagcatcactttttgaaatgaattttttgtgttctgatctagccaaaggtcttcggtgaaatgaraacacagctgaaagaaataaaaataacaaattatctcactaggcccatgtaaatatacaaatctattgtttacaaatctaatacataaaattatacaaagtacattagcaacatggcataacaaaaataccacaggtcttaattattttatagacttataacaaaactgtactgaccaaaatgtctatggaaaatctagaaatgagttaagtgtgttcagtgtaccaggtgagcaaaatgccacaagccatactgaatggatagaaaagtttgttacatttgcccaaca

SEQ ID NO: 198499 - DNA, 456 bp, Homo sapiens
gttaagtccattgtaacctccttcctgcaccttagatgcattcaaacttttacagccttttcttatttgtaaattctcatgtctgcatttcccatatcttctcagcatcactttttgaaatgaattttttgtgttctgatctagccaaaggtcttcggtgaaatgaaaacacagctgaaagaaataaaaataacaaattatctcactaggcccatgtaaatatacaaatctattgtttacaaatctaatacataaaattatacaaagtacattagcaacatggcataacaaaaataccacaggtcttaattmttttatagacttataacaaaactgtactgaccaaaatgtctatggaaaatctagaaatgagttaagtgtgttcagtgtaccaggtgagcaaaatgccacaagccatactgaatggatagaaaagtttgttacatttgcccaaca

SEQ ID NO: 198500 - DNA, 601 bp, Homo sapiens
gagaattccgcatggcagagaagaagccaagatgaagagaatgtcgagaagactctagtatatagaaaataatatatttcagagttgcttgactatcatgagaagaaaaaatgtttaaacaaacttatagggagaaacagcataaagtcaagaagtacaggtttgtaagttctaaacatatggcattccaggaggcagagtgaacactgctcctaatctgagacacagtcacctgagaaaaagccatttttctcttcatcatccttctctagcatttcttctcaggtgatattctctggacaagtcacacctgcatctttggaatatgcctttaaaggaatcagcacaatctcttcacctgctaccaccacaaacacaggtagaaagatccaggcatgcagaacatgtccacccatttatgttctttataacaggtgagattcaaggacagtgagctsctccacaaagatcaaaatttatctttctcttttcctgccacagacgccacaatttctgctacagcaatggggatatgggccacattaacttgtacctaccaaatccaaccatagtagaccctgtgacctccctttggaataaa

SEQ ID NO: 198501 - DNA, 601 bp, Homo sapiens
gagaattccgcatggcagagaagaagccaagatgaagagaatgtcgagaagactctagtatatagaaaataatatatttcagagttgcttgactatcatgagaagaaaaaatgtttaaacaaacttatagggagaaacagcataaagtcaagaagtacaggtttgtaagttctaaacatatggcattccaggaggcagagtgaacactgctcctaatctgagacacagtcacctgagaaaaagccatttttctcttcatcatccttctctagcatttcttctcaggtgatattctctggacaagtcacacctgcatctttggaatatgcctttaaaggaatcagcacaatctcttcacctgctaccaccacaaacacaggtagaaagatccaggcatgcagaacatgtccacccatttatgttctttataacaggtgagattcaaggacagtgagctgctccacaaagatcaaaatttatctttctcttttcctgccacagacgcmacaatttctgctacagcaatggggatatgggccacattaacttgtacctaccaaatccaaccatagtagaccctgtgacctccctttggaataaa

SEQ ID NO: 198502 - DNA, 452 bp, Homo sapiens
atttggtattgtagatttaggtcctggatggatggagaaatggcaggtgttaactgcacatttatgggaatttggggaggaggagaaagaggaactttgagatactcacrtttactcaatgcacacatgtcaccctaattgttcttctgggcctaatagtctccaactcagtttcaggtctgaagacactatggtcactgaaagaggtgaaatggctgattactgtcctgtgaattttgtcaaccacttgtagaaaggcttaacctctctacgagtggttgtagaggactatagatgtgaaacaggcagagacacaagtctgcctgcatactctgggggcagtgtgcactttgaagcacaactgactgagttgactggaagcctgaaggggaaagccttctctaaaatgaagcttggggggcaatttatacatatatacaatgtctggtaat

SEQ ID NO: 198503 - DNA, 452 bp, Homo sapiens
atttggtattgtagatttaggtcctggatggatggagaaatggcaggtgttaactgcacatttatgggaatttggggaggaggagaaagaggaactttgagatactcacatttactcaatgcacacatgtcaccctaattgttcttctgggcctaatagtctccaactcagtttcaggtctgaagacactatggtcactgaaagaggtgaaatggctgattactgtcctgtgaattttgtcaaccacttgtagaaaggcttaacctctctacgagtggttgtagaggactatagatgtgaaacaggcagagacacaagtctgcctgcatactctggggscagtgtgcactttgaagcacaactgactgagttgactggaagcctgaaggggaaagccttctctaaaatgaagcttggggggcaatttatacatatatacaatgtctggtaat

SEQ ID NO: 198504 - DNA, 416 bp, Homo sapiens
gggaggaggagaaagaggaactttgagatactcacatttactcaatgcacacatgtcaccctaattgttcttctgggcctaatagtctccaactcagtttcaggtctgaagacactatggtcactgaaagaggtgaaatggctgattactgtcctgtgaattttgtcaaccacttgtagaaaggcttaacctctctacgagtggttgtagaggactatagatgtgaaacaggcagagacacaagtctgcctgcatactctgggggcagtgtgcactttgaagcacaactgactgagttgactggaagcctgarggggaaagccttctctaaaatgaagcttggggggcaatttatacatatatacaatgtctggtaattgtgaacagggtttgagaaatataattaaaaggaaaat

SEQ ID NO: 198505 - DNA, 452 bp, Homo sapiens
atttggtattgtagatttaggtcctggatggatggagaaatggcaggtgttaactgcacatttatgggaatttggggaggaggagaaagaggaactttgagatactcacatttactcaatgcacacatgtcaccctaattgttcttctgggcctaatagtctccaactcagtttcaggtctgaagacactatggtcactgaaagaggtgaaatggctgattactgtcctgtgaattttgtcaaccacttgtagaaaggcttaacctctctacgagtggttgtagaggactatagatgtgaaacaggcagagacacaagtctgcctgcatactctgggggcagtgtgcactttgaagcacaactgactgagttgactggaagcctgaaggggaaagccttctctaaaatgaagcttggkgggcaatttatacatatatacaatgtctggtaat

SEQ ID NO: 198506 - DNA, 584 bp, Homo sapiens
cttccacccttaattccaaccattaaacaaaactggagaaatctaacatggcattatatcacaaagtattttattatttttattttggattcaaggatacacgtgcagatttgtaacataggtatactgcatgacattgaggtttgggcaattaataatcccattgcccaartagggtacattatacatcacaagtacttttaaacccctgtaccccttctccctccattttggaatccttagtgtttattgttctcatctttgcttccatgtgtacccaatgtttagcttccacttataagtgagaaaatgtagtatttggttttctgttctgtgttaatttgcttaggatcatgaccttgagctgtatccatgttgctgcaaagagtattacatgattcttcttcagtggctgcatagtattggatggtgtgtaattacataatttttaaaatccatcttaaaatttatgagcacatggtttcattccatgtctttgctattgtgactagtgctgcaataagcatacgagtgcaggtgtaatttatttgtatttgggtatacgcccagtagtgaggctgctg

SEQ ID NO: 198507 - DNA, 584 bp, Homo sapiens
cttccacccttaattccaaccattaaacaaaactggagaaatctaacatggcattatatcacaaagtattttattatttttattttggattcaaggatacacgtgcagatttgtaacataggtatactgcatgacattgaggtttgggcaattaataatcccattgcccaaatagsgtacattatacatcacaagtacttttaaacccctgtaccccttctccctccattttggaatccttagtgtttattgttctcatctttgcttccatgtgtacccaatgtttagcttccacttataagtgagaaaatgtagtatttggttttctgttctgtgttaatttgcttaggatcatgaccttgagctgtatccatgttgctgcaaagagtattacatgattcttcttcagtggctgcatagtattggatggtgtgtaattacataatttttaaaatccatcttaaaatttatgagcacatggtttcattccatgtctttgctattgtgactagtgctgcaataagcatacgagtgcaggtgtaatttatttgtatttgggtatacgcccagtagtgaggctgctg

SEQ ID NO: 198508 - DNA, 584 bp, Homo sapiens
cttccacccttaattccaaccattaaacaaaactggagaaatctaacatggcattatatcacaaagtattttattatttttattttggattcaaggatacacgtgcagatttgtaacataggtatactgcatgacattgaggtttgggcaattaataatcccattgcccaaatagggtacattatacatcacaagtacttttaaacccctgtrccccttctccctccattttggaatccttagtgtttattgttctcatctttgcttccatgtgtacccaatgtttagcttccacttataagtgagaaaatgtagtatttggttttctgttctgtgttaatttgcttaggatcatgaccttgagctgtatccatgttgctgcaaagagtattacatgattcttcttcagtggctgcatagtattggatggtgtgtaattacataatttttaaaatccatcttaaaatttatgagcacatggtttcattccatgtctttgctattgtgactagtgctgcaataagcatacgagtgcaggtgtaatttatttgtatttgggtatacgcccagtagtgaggctgctg

SEQ ID NO: 198509 - DNA, 584 bp, Homo sapiens
cttccacccttaattccaaccattaaacaaaactggagaaatctaacatggcattatatcacaaagtattttattatttttattttggattcaaggatacacgtgcagatttgtaacataggtatactgcatgacattgaggtttgggcaattaataatcccattgcccaaatagggtacattatacatcacaagtacttttaaacccctgtaccccttctccctccattttggaatccttagtgtttattgttctcatctttgcttccatgtgtacccaatgtttagcttccacttataagtgagaaaatgtagtatttggttttctgttctgtgttaatttgcttaggatcatgaccttgagctgyatccatgttgctgcaaagagtattacatgattcttcttcagtggctgcatagtattggatggtgtgtaattacataatttttaaaatccatcttaaaatttatgagcacatggtttcattccatgtctttgctattgtgactagtgctgcaataagcatacgagtgcaggtgtaatttatttgtatttgggtatacgcccagtagtgaggctgctg

SEQ ID NO: 198510 - DNA, 333 bp, Homo sapiens
actatgtctgcttatggttttcttacttatgcctacctacaccatcttttaattaaatgtgccgataaaatttctaagtgcagaatttcctttgcttgacacaaacactttgttctactgtgaatcaactgctggggctttctattgtatggatttctacaaarggatgtgctgtaactcaagtataagcagatggttctttcattgttgtaaatcaaattggtataacctgtgactgggttcgatgtggccccagtttcctgaggcctgtgaaaattgctaggtagctcattttcattttttcttatcaccttaactggagttggaggccct

SEQ ID NO: 198511 - DNA, 464 bp, Homo sapiens
aactactatgtgatccagcaattctatgcctatatacatgcccaaagtaattgcaaatagagactccaacagatattaaccaccaatgttcacagtaccatgatttacagtaacaaaaagcaggaagcaactcaaaggttcatcaataaatgaatgaataaacaaaatwcaccatattcacataatggaaacttattcagccttattaaggaatgaaattctaatatacactacagaacttcaatgactacaacctacgtaaactttgaaaacattatgcttagtgaaataagccagatgcaaaaggataaatattgcttgaagtacttagaataagcaaattacagagacagaataatcattaccagggactagtgtgggtgagaagttattgtttaatgggtacagagcttctatatgggatgattaaagagttctggaaatggacggtggtaaaggttgtg

SEQ ID NO: 198512 - DNA, 464 bp, Homo sapiens
aactactatgtgatccagcaattctatgcctatatacatgcccaaagtaattgcaaatagagactccaacagatattaaccaccaatgttcacagtaccatgatttacagtaacaaaaagcaggaagcaactcaaaggttcatcaataaatgaatgaataaacaaaatacaccatattcacataatggaaacttattcagccttattaaggaatgaaattctaatatacactacagaacttcaatgactacaacctacgtaaactttgaaaacattatgcttagtgaaataagccagatgcaaaaggataaatattgcttgaagtacttagaataagcaaattacagagacagaataatcattaccagggactagtgtgggtgagaagttattgkttaatgggtacagagcttctatatgggatgattaaagagttctggaaatggacggtggtaaaggttgtg

SEQ ID NO: 198513 - DNA, 508 bp, Homo sapiens
tatcagggaattgggactatgtctttatgatagatatggttaggctttgtgtacccccatctcatcttgaattgtaatccccaggtgttaagggagacacctggtgggaagtgattggatcatggsgggtggtttcccccatgctgttcttgtgatactgagtaaattctcatgaattctgatggttttataaatggtagttttttctgcacacacacacatgttttttctcctgctgtcatgtaagaaggtccagtttgcttctcctttgccttttgccatgattataagtttcctgaggcctccccagctatgagtaactgtgagtcaatttaacctttttgctttataaattacccagtcttgggaagatttttattgcagtgtgagaatggactaatacagtaaattcatactggtagagttgggtactgctataaagatacccagcaatgtaaaagcgactttgggtctggagatggagatgagaaacctattgggaactaga

SEQ ID NO: 198514 - DNA, 508 bp, Homo sapiens
tatcagggaattgggactatgtctttatgatagatatggttaggctttgtgtacccccatctcatcttgaattgtaatccccaggtgttaagggagacacctggtgggaagtgattggatcatggcgggtggtttcccccatgctgttcttgtgatactgagtaaattctcatgaattctgatggttttataaatggtagttttttctgcacacacacacatgttttttctcctgctgtcatgtaagaaggtccagtttgcttctcctttgccttttgccatgattrtaagtttcctgaggcctccccagctatgagtaactgtgagtcaatttaacctttttgctttataaattacccagtcttgggaagatttttattgcagtgtgagaatggactaatacagtaaattcatactggtagagttgggtactgctataaagatacccagcaatgtaaaagcgactttgggtctggagatggagatgagaaacctattgggaactaga

SEQ ID NO: 198515 - DNA, 546 bp, Homo sapiens
gagtataactcagctactgagttataactgagtataatcatgaaatgatttaaggctttgagaccctggaacaaacttagaaccactatattaatagtggctacaaactagtattagccagagggttttgaaagattatgttgatttcttagatatatttgtcagagaggcaactgcaagttaatctcttctctcagtgaaaggcttaatgtggacacctataaaatccscagtggtcataacttgcaggaatctctccagagggacagcatcatacccagtagggcgacattaatttcctcaggacagatcagcaattaaaaaaaaatacagaactaggcatgagtcaacttctcccttaaaattgtatttctcatctaaatgaaagcacatttttaagagagaaagatgtgtaagatatagaaatattaaagtaagggctacagtacatataatacaaagcaaatgaagagaggaggctaaatatcaaagttgtaggtggtgagttatactcagctacttcatttgacagtttaagaagtcaga

SEQ ID NO: 198516 - DNA, 430 bp, Homo sapiens
agcttatagacttagatataaagaaaataatattttttaaagttgtacaatatgtttatcttttaagctaagagttgtgacaraggagccaaaaggttaaaaaaagtatattaaataaaaaaattacagtaagctaaagctaatttattattgataaaagaaaacaatttaaaaataaatttggcatagcttaagtgtacatccagtactgctaaagtctacaacagtgcccgtaatgtcctaggccttcatattcactcacctctcactcacttacccagagcaacttccagctgtgcaagctccattcatggtaagtgccctctacaagtgtaccccttttttttttttactgcaccttttctatgataagatgcaaaatacctaccactgtgttacagttgcctgcagtatttagtacagtaacatg

SEQ ID NO: 198517 - DNA, 430 bp, Homo sapiens
agcttatagacttagatataaagaaaataatattttttaaagttgtacaatatgtttatcttttaagctaagagttgtgacagaggagccaaaaggttaaaaaaagtatattaaataaaaaaattacagtaagctaaagctaatttattattgataaaagaaaacaatttaaaaataaatttggcatagcttaagtgtacatccagtactgctaaagtctacaacagtgcccgtaatgtcctaggccttcatattcactcaccwctcactcacttacccagagcaacttccagctgtgcaagctccattcatggtaagtgccctctacaagtgtaccccttttttttttttactgcaccttttctatgataagatgcaaaatacctaccactgtgttacagttgcctgcagtatttagtacagtaacatg

SEQ ID NO: 198518 - DNA, 430 bp, Homo sapiens
agcttatagacttagatataaagaaaataatattttttaaagttgtacaatatgtttatcttttaagctaagagttgtgacagaggagccaaaaggttaaaaaaagtatattaaataaaaaaattacagtaagctaaagctaatttattattgataaaagaaaacaatttaaaaataaatttggcatagcttaagtgtacatccagtactgctaaagtctacaacagtgcccgtaatgtcctaggccttcatattcactcacctctcactcacttacccagagcaacttccagctstgcaagctccattcatggtaagtgccctctacaagtgtaccccttttttttttttactgcaccttttctatgataagatgcaaaatacctaccactgtgttacagttgcctgcagtatttagtacagtaacatg

SEQ ID NO: 198519 - DNA, 430 bp, Homo sapiens
agcttatagacttagatataaagaaaataatattttttaaagttgtacaatatgtttatcttttaagctaagagttgtgacagaggagccaaaaggttaaaaaaagtatattaaataaaaaaattacagtaagctaaagctaatttattattgataaaagaaaacaatttaaaaataaatttggcatagcttaagtgtacatccagtactgctaaagtctacaacagtgcccgtaatgtcctaggccttcatattcactcacctctcactcacttacccagagcaacttccagctgtgcaagctccattcatggtaagtgccctctacaagtgtaccccttttttttttttactgcamcttttctatgataagatgcaaaatacctaccactgtgttacagttgcctgcagtatttagtacagtaacatg

SEQ ID NO: 198520 - DNA, 386 bp, Homo sapiens
acatatttcaagatagctactcggaagactggaaatagcttcttctacaaaaatwgctgaaaagctgtgtttgttggggagatttgcatttgtagagaaaatctgcattgatatagacaggctttccctgagatactcccttgtctgggtttaggaaagattaactgagtctggcacgtttacatttcaaaaaaccatttcctatctttacttcccaagaggagggctgctccctgtgaggtttcatccatgtaacaagacaacttctgctgccaggctcctctttcttccttgtcgtcacctgccttctgcaaagcctgatttagcaaagtacagctctgtgttttctgtaacctcaagacagcataggcgtgttgactaccttg

SEQ ID NO: 198521 - DNA, 386 bp, Homo sapiens
acatatttcaagatagctactcggaagactggaaatagcttcttctacaaaaatagctgaaaagctgtgtttgttggggagatttgcatttgtagagaaaatctgcattgatayagacaggctttccctgagatactcccttgtctgggtttaggaaagattaactgagtctggcacgtttacatttcaaaaaaccatttcctatctttacttcccaagaggagggctgctccctgtgaggtttcatccatgtaacaagacaacttctgctgccaggctcctctttcttccttgtcgtcacctgccttctgcaaagcctgatttagcaaagtacagctctgtgttttctgtaacctcaagacagcataggcgtgttgactaccttg

SEQ ID NO: 198522 - DNA, 386 bp, Homo sapiens
acatatttcaagatagctactcggaagactggaaatagcttcttctacaaaaatagctgaaaagctgtgtttgttggggagatttgcatttgtagagaaaatctgcattgatatagacaggctttccctgagatactcccttgtctgggtttaggaaagattaactgagtctggcacgtttacatttcaaaaaaccatttcctatctttacttcccaagaggagggctgctccctgtgaggtttcatccatgtaacaagacaacttctgctgccaggctcctctttcttccttgtcrtcacctgccttctgcaaagcctgatttagcaaagtacagctctgtgttttctgtaacctcaagacagcataggcgtgttgactaccttg

SEQ ID NO: 198523 - DNA, 478 bp, Homo sapiens
cacgtttacatttcaaaaaaccatttcctatctttacttcccaagaggagggctgctccctgtgaggtttcatccatgtaacaagacaacttctgctgccaggctcctctttcttccttgtcgtcacctgccttctgcaaagcctgatttagcaaagtacagctctgtgttttctgtaacytcaagacagcataggcgtgttgactaccttgcctttcctggagtttttatacatatatagtatatatttgtatatcgatttataatatacaaatatttgtatatacatatttatatatattatgtaaactccaagtgcatagttgtgcacataattatatccgtaaaccttttttcctgttaattgagtctattgtttgatagactcaaataattaaagcttcaagggaaatataaagaactaattaagttagcacctacttttcaaatatcgcattttttcacagacctattaaat

SEQ ID NO: 198524 - DNA, 478 bp, Homo sapiens
cacgtttacatttcaaaaaaccatttcctatctttacttcccaagaggagggctgctccctgtgaggtttcatccatgtaacaagacaacttctgctgccaggctcctctttcttccttgtcgtcacctgccttctgcaaagcctgatttagcaaagtacagctctgtgttttctgtaacctcaagacagcataggcgtgttgactaccttgcctttcctggagtttttatacatatatagtatatatttgtatatcgatttataatatacaaatatttgtatatacatatttatatatattatgtaaactccaagtgcatasttgtgcacataattatatccgtaaaccttttttcctgttaattgagtctattgtttgatagactcaaataattaaagcttcaagggaaatataaagaactaattaagttagcacctacttttcaaatatcgcattttttcacagacctattaaat

SEQ ID NO: 198525 - DNA, 478 bp, Homo sapiens
cacgtttacatttcaaaaaaccatttcctatctttacttcccaagaggagggctgctccctgtgaggtttcatccatgtaacaagacaacttctgctgccaggctcctctttcttccttgtcgtcacctgccttctgcaaagcctgatttagcaaagtacagctctgtgttttctgtaacctcaagacagcataggcgtgttgactaccttgcctttcctggagtttttatacatatatagtatatatttgtatatcgatttataatatacaaatatttgtatatacatatttatatatattatgtaaactccaagtgcatagttgtgcacataattatatccrtaaaccttttttcctgttaattgagtctattgtttgatagactcaaataattaaagcttcaagggaaatataaagaactaattaagttagcacctacttttcaaatatcgcattttttcacagacctattaaat

SEQ ID NO: 198526 - DNA, 575 bp, Homo sapiens
gccatctgtaatttggagctaaatgagcactgtcactagggcatgaacctccagtggtctttactgaatatcctggaagtacagaggggattcccttctctsgctggtcagagctaacatgtcttcctgtcatgtgatgccagggaagtgttcttccaactccctggtagtcctttgctgagctccttagaatttcatcctatgtacatttggcttagggacttgggagaaaccttaggctgattattggttcctttttctgtaaacgttctcttctactacatattccagctgcttaacattttggtttttatctggttcctcagtgcaatgacaatgtctgctctctctgggattcctctctactgctgtcacggagaacctgggaataaagcaggagtcattctggctccttcttttctcttgcggagcacagtcctgtgctgcctgatgttcagtatttcaaaaaaagtttcatatattttgtccagtttactattctttaactctaaaagagtaactccagtcccagttacagcatcatgttctgtaactctactccttgttgcttcatt

SEQ ID NO: 198527 - DNA, 575 bp, Homo sapiens
gccatctgtaatttggagctaaatgagcactgtcactagggcatgaacctccagtggtctttactgaatatcctggaagtacagaggggattcccttctctggctggtcagagctaacatgtcttcctgtcatgtgatgccagggaagtgttcttccaactccctggtagtcctttgctgagctccttagaatttcatcctatgtacatttggcttagggacttgggagaaaccttaggctgattattggttcctttttctgtaaacgttctcttctactacatattccarctgcttaacattttggtttttatctggttcctcagtgcaatgacaatgtctgctctctctgggattcctctctactgctgtcacggagaacctgggaataaagcaggagtcattctggctccttcttttctcttgcggagcacagtcctgtgctgcctgatgttcagtatttcaaaaaaagtttcatatattttgtccagtttactattctttaactctaaaagagtaactccagtcccagttacagcatcatgttctgtaactctactccttgttgcttcatt

SEQ ID NO: 198528 - DNA, 575 bp, Homo sapiens
gccatctgtaatttggagctaaatgagcactgtcactagggcatgaacctccagtggtctttactgaatatcctggaagtacagaggggattcccttctctggctggtcagagctaacatgtcttcctgtcatgtgatgccagggaagtgttcttccaactccctggtagtcctttgctgagctccttagaatttcatcctatgtacatttggcttagggacttgggagaaaccttaggctgattattggttcctttttctgtaaacgttctcttctactacatattccagctgcttaacattttsgtttttatctggttcctcagtgcaatgacaatgtctgctctctctgggattcctctctactgctgtcacggagaacctgggaataaagcaggagtcattctggctccttcttttctcttgcggagcacagtcctgtgctgcctgatgttcagtatttcaaaaaaagtttcatatattttgtccagtttactattctttaactctaaaagagtaactccagtcccagttacagcatcatgttctgtaactctactccttgttgcttcatt

SEQ ID NO: 198529 - DNA, 419 bp, Homo sapiens
agcaggagtcattctggctccttcttttctcttgcggagcacagtcctgtgctgcctgatgttcagtatttcaaaaaaagtttcatatattttgtccagtttactattctttaactctaaaagagtaactccagtcccagttacagcatcatgttctgtaactctactccttgttgcttcattctgccattrtctggtatgagtgcccctttcccttctgtaatcaggccaagagcataacataatactagttataactgcacagcttgcctccgttgtgtaaaaaaatcactgagacttaactgtgtccaactttttaaatgtgaatataagtacaactaaagctatattttgtttaatatttgcattgcatgcttttccattatttaatttcaacatatgtgaaatataaatataaa

SEQ ID NO: 198530 - DNA, 210 bp, Homo sapiens
ccagtcccagttacagcatcatgttctgtaactctactccttgttgcttcattctgccattatctggtatgaktgcccctttcccttctgtaatcaggccaagagcataacataatactagttataactgcacagcttgcctccgttgtgtaaaaaaatcactgagacttaactgtgtccaactttttaaatgtgaatataagtacaact

SEQ ID NO: 198531 - DNA, 210 bp, Homo sapiens
ccagtcccagttacagcatcatgttctgtaactctactccttgttgcttcattctgccattatctggtatgagtgcccctttcccttctgtaatcaggccaagagcataayataatactagttataactgcacagcttgcctccgttgtgtaaaaaaatcactgagacttaactgtgtccaactttttaaatgtgaatataagtacaact

SEQ ID NO: 198532 - DNA, 210 bp, Homo sapiens
ccagtcccagttacagcatcatgttctgtaactctactccttgttgcttcattctgccattatctggtatgagtgcccctttcccttctgtaatcaggccaagagcataacataatactagttataactgcacagcttgcctccgttgtgtaaaaaaatcactgagacttaactgtgtccaacttttwaaatgtgaatataagtacaact

SEQ ID NO: 198533 - DNA, 480 bp, Homo sapiens
gcgtttctctatcacatgagattctggaacactgctaaaatgtaggaatgtttgtccctcacaaagagtccagagcaccgcttgtgggttctgagtgtttgtccctcacataggattgcagaacacagctgctaggttctgagtgtttgtcccaaacataggattccaaaacactgctcagagggtctgaaagtttcttcctcaccaaggattccagaacactgctgctgggttctgaaagtttgtccctcacatacgattccrgaacactgctatgagggtctgagtgtttgtccctcaaagggattccagaacactgcttttgagttctgagtgtttgtccgacacaaaggattccagaacactgctgctggcttctgagtgtttgtccctcacataggatttcagaacactgctatgagggtctgcatgtttttcccctcagaaagcattctgtatcactgctacgagtgtctgaat

SEQ ID NO: 198534 - DNA, 480 bp, Homo sapiens
gcgtttctctatcacatgagattctggaacactgctaaaatgtaggaatgtttgtccctcacaaagagtccagagcaccgcttgtgggttctgagtgtttgtccctcacataggattgcagaacacagctgctaggttctgagtgtttgtcccaaacataggattccaaaacactgctcagagggtctgaaagtttcttcctcaccaaggattccagaacactgctgctgggttctgaaagtttgtccctcacatacgattccggaacastgctatgagggtctgagtgtttgtccctcaaagggattccagaacactgcttttgagttctgagtgtttgtccgacacaaaggattccagaacactgctgctggcttctgagtgtttgtccctcacataggatttcagaacactgctatgagggtctgcatgtttttcccctcagaaagcattctgtatcactgctacgagtgtctgaat

SEQ ID NO: 198535 - DNA, 270 bp, Homo sapiens
gctgctggtttgtgtttgtccctcatatgggattccagaacacttctgctgggttctgagtgtttgtccctcatataggataccagaacactgctattggcttcagagtgtttgtccctyacataggattccagaaaacttctaagaggttccgaatgttttccttcagataggattccagaacactgctgctgggttctgagtgtttgtccctcacataggattccagaacactgctaagggggtctgaatgtttatccctcccaaagg

SEQ ID NO: 198536 - DNA, 428 bp, Homo sapiens
tccctcacaaaggattagagaacactgctgctgagttctgagtgtttgtccctctcattggattccagaacactgccgctaggttctgagggtttgtccctcacataggattccagaacactgctgctggtttctttgggtttgtctctcacataggattgcagaacactgctacgattatctgaatgttgtccstcacaaagtattacagagcactgctgctgggttctctctgtttgcccctcacattggattacagaacactgctgctaggtttgagggtttgtccctcacataggattccaaaacactgttgctgggttctgagtgtttgtccctcacatacgattccagaacactgctatgattgtctgaatgtttgtccctcacaaagtagtccagagcactcctgctgggttaagagtgtt

SEQ ID NO: 198537 - DNA, 428 bp, Homo sapiens
tccctcacaaaggattagagaacactgctgctgagttctgagtgtttgtccctctcattggattccagaacactgccgctaggttctgagggtttgtccctcacataggattccagaacactgctgctggtttctttgggtttgtctctcacataggattgcagaacactgctacgattatctgaatgttgtccgtcacaaagtattacagagcactgctgctgggttctctctgtttgcccctcacattggattacagaacactgctgctaggtttgagggtttgtccctcacataggattccaaaacactgttgctgggttctgagtgtttgtccctmacatacgattccagaacactgctatgattgtctgaatgtttgtccctcacaaagtagtccagagcactcctgctgggttaagagtgtt

SEQ ID NO: 198538 - DNA, 542 bp, Homo sapiens
tgggttgtgtttgtcccccacataggattccagaatactgctgctgggttctgagtgtttgtccctcacataggattccagaacactgctacgagggtctgaatatttttgcctctcaaaggattccagaacactgctgctcagttgtgtttgtttgtccctcacaagggactccagtgcactgctgcaggtttctgagagtttttccctcacataggattccagaacacttctacgagggtctgaatgtttgtatctcacagtggaatctacaaaactgctgcagggttmtgagtgtttctcactcatataggattacagaacactgctgctgggttctgagagtttatccctcacatgggattccagaacacagctgctgggttctgagtgtttgtcccccacataggattgcagaacactgctactagggtcagaatgtttgtccatcacaaaggactccagaacattgctgctgggttctgagtgtttgtccatcacatagtattccagaacactgctccaagggtctgaatgttttt

SEQ ID NO: 198539 - DNA, 545 bp, Homo sapiens
ggctgggttgtgtttgtcccccacataggattccagaatactgctgctgggttctgagtgtttgtccctcacataggattccagaacactgctacgagggtctgaatatttttgcctctcaaaggattccagaacactgctgctcagttgtgtttgtttgtccctcacaagggactccagtgcactgctgcaggtttctgagagtttttccctcacataggattccagaacacttctacgagggtctgaatgtttgtatctcacagtggaatctacaaaactgctgcagggttctgagtgtttctcactcatataggattacagaacacwgctgctgggttctgagagtttatccctcacatgggattccagaacacagctgctgggttctgagtgtttgtcccccacataggattgcagaacactgctactagggtcagaatgtttgtccatcacaaaggactccagaacattgctgctgggttctgagtgtttgtccatcacatagtattccagaacactgctccaagggtctgaatgttttt

SEQ ID NO: 198540 - DNA, 522 bp, Homo sapiens
ataggattccagaatactgctgctgggttctgagtgtttgtccctcacataggattccagaacactgctacgagggtctgaatatttttgcctctcaaaggattccagaacactgctgctcagttgtgtttgtttgtccctcacaagggactccagtgcactgctgcaggtttctgagagtttttccctcacataggattccagaacacttctacgagggtctgaatgtttgtatctcacagtggaatctacaaaactgctgcagggttctgagtgtttctcactcatataggattacagaacactgctgctgggttctgagagtttatccctcacatgggattccagaacacagctgctgggttctgagtgtttgtcccccacatargattgcagaacactgctactagggtcagaatgtttgtccatcacaaaggactccagaacattgctgctgggttctgagtgtttgtccatcacatagtattccagaacactgctccaagggtctgaatgtttttc

SEQ ID NO: 198541 - DNA, 542 bp, Homo sapiens
tgggttgtgtttgtcccccacataggattccagaatactgctgctgggttctgagtgtttgtccctcacataggattccagaacactgctacgagggtctgaatatttttgcctctcaaaggattccagaacactgctgctcagttgtgtttgtttgtccctcacaagggactccagtgcactgctgcaggtttctgagagtttttccctcacataggattccagaacacttctacgagggtctgaatgtttgtatctcacagtggaatctacaaaactgctgcagggttctgagtgtttctcactcatataggattacagaacactgctgctgggttctgagagtttatccctcacatgggattccagaacacagctgctgggttctgagtgtttgtcccccacataggattgcagaacactgctactagggtcagaatgtttgtccatcacaaaggamtccagaacattgctgctgggttctgagtgtttgtccatcacatagtattccagaacactgctccaagggtctgaatgttttt

SEQ ID NO: 198542 - DNA, 523 bp, Homo sapiens
cataggattccagaatactgctgctgggttctgagtgtttgtccctcacataggattccagaacactgctacgagggtctgaatatttttgcctctcaaaggattccagaacactgctgctcagttgtgtttgtttgtccctcacaagggactccagtgcactgctgcaggtttctgagagtttttccctcacataggattccagaacacttctacgagggtctgaatgtttgtatctcacagtggaatctacaaaactgctgcagggttctgagtgtttctcactcatataggattacagaacactgctgctgggttctgagagtttatccctcacatgggattccagaacacagctgctgggttctgagtgtttgtcccccacataggattgcagaacactgctactagggtcagaatgtttgtccatcacaaaggactccagaayattgctgctgggttctgagtgtttgtccatcacatagtattccagaacactgctccaagggtctgaatgtttttc

SEQ ID NO: 198543 - DNA, 542 bp, Homo sapiens
tgggttgtgtttgtcccccacataggattccagaatactgctgctgggttctgagtgtttgtccctcacataggattccagaacactgctacgagggtctgaatatttttgcctctcaaaggattccagaacactgctgctcagttgtgtttgtttgtccctcacaagggactccagtgcactgctgcaggtttctgagagtttttccctcacataggattccagaacacttctacgagggtctgaatgtttgtatctcacagtggaatctacaaaactgctgcagggttctgagtgtttctcactcatataggattacagaacactgctgctgggttctgagagtttatccctcacatgggattccagaacacagctgctgggttctgagtgtttgtcccccacataggattgcagaacactgctactagggtcagaatgtttgtccatcacaaaggactccagaacattgctgctgggttctgagtgyttgtccatcacatagtattccagaacactgctccaagggtctgaatgttttt

SEQ ID NO: 198544 - DNA, 542 bp, Homo sapiens
tgggttgtgtttgtcccccacataggattccagaatactgctgctgggttctgagtgtttgtccctcacataggattccagaacactgctacgagggtctgaatatttttgcctctcaaaggattccagaacactgctgctcagttgtgtttgtttgtccctcacaagggactccagtgcactgctgcaggtttctgagagtttttccctcacataggattccagaacacttctacgagggtctgaatgtttgtatctcacagtggaatctacaaaactgctgcagggttctgagtgtttctcactcatataggattacagaacactgctgctgggttctgagagtttatccctcacatgggattccagaacacagctgctgggttctgagtgtttgtcccccacataggattgcagaacactgctactagggtcagaatgtttgtccatcacaaaggactccagaacattgctgctgggttctgagtgtttgtccatcayatagtattccagaacactgctccaagggtctgaatgttttt

SEQ ID NO: 198545 - DNA, 522 bp, Homo sapiens
ataggattccagaatactgctgctgggttctgagtgtttgtccctcacataggattccagaacactgctacgagggtctgaatatttttgcctctcaaaggattccagaacactgctgctcagttgtgtttgtttgtccctcacaagggactccagtgcactgctgcaggtttctgagagtttttccctcacataggattccagaacacttctacgagggtctgaatgtttgtatctcacagtggaatctacaaaactgctgcagggttctgagtgtttctcactcatataggattacagaacactgctgctgggttctgagagtttatccctcacatgggattccagaacacagctgctgggttctgagtgtttgtcccccacataggattgcagaacactgctactagggtcagaatgtttgtccatcacaaaggactccagaacattgctgctgggttctgagtgtttgtccatcacatagkattccagaacactgctccaagggtctgaatgtttttc

SEQ ID NO: 198546 - DNA, 482 bp, Homo sapiens
gtttgtcactcacataggattccagaacacwgctgctgggttctgagtgtttgtccctcacatacaattccagaacactgctactaggttctgaatgtttgtccctcacaaaggattccagaacactgcttctgagttctgagtgtttgtctgtcaaataggattccagaacactgctgctgggctctgtttgtttgtccatcacaaaggatcccagaacactgctataagtttctgagtgtttgtccctcacataggattccagaacaattctacgaggctccgaatgtttgtccttcagataggatttcagagcacagtggctgggttctgagtgtttgtccctcacatagggtatcagaacactgctgctgggatctgagtgtttgtctttcacagaggattccagaacactgctgctttgttctgagtgtttgtccctcacataggattccagaacactgccgctcggtactgagggt

SEQ ID NO: 198547 - DNA, 489 bp, Homo sapiens
gtttgtcactcacataggattccagaacactgctgctgggttctgagtgtttgtccctcacatacrattccagaacactgctactaggttctgaatgtttgtccctcacaaaggattccagaacactgcttctgagttctgagtgtttgtctgtcaaataggattccagaacactgctgctgggctctgtttgtttgtccatcacaaaggatcccagaacactgctataagtttctgagtgtttgtccctcacataggattccagaacaattctacgaggctccgaatgtttgtccttcagataggatttcagagcacagtggctgggttctgagtgtttgtccctcacatagggtatcagaacactgctgctgggatctgagtgtttgtctttcacagaggattccagaacactgctgctttgttctgagtgtttgtccctcacataggattccagaacactgccgctcggtactgagggtttgttcc

SEQ ID NO: 198548 - DNA, 489 bp, Homo sapiens
gtttgtcactcacataggattccagaacactgctgctgggttctgagtgtttgtccctcacatacaattccagaacactgctaytaggttctgaatgtttgtccctcacaaaggattccagaacactgcttctgagttctgagtgtttgtctgtcaaataggattccagaacactgctgctgggctctgtttgtttgtccatcacaaaggatcccagaacactgctataagtttctgagtgtttgtccctcacataggattccagaacaattctacgaggctccgaatgtttgtccttcagataggatttcagagcacagtggctgggttctgagtgtttgtccctcacatagggtatcagaacactgctgctgggatctgagtgtttgtctttcacagaggattccagaacactgctgctttgttctgagtgtttgtccctcacataggattccagaacactgccgctcggtactgagggtttgttcc

SEQ ID NO: 198549 - DNA, 493 bp, Homo sapiens
gtttgtcactcacataggattccagaacactgctgctgggttctgagtgtttgtccctcacatacaattccagaacactgctactaggttctgaatgtttgtccctcacaaaggattccagaacactgcttctgagttctgagtgtttgtctgtcaaataggattccagaacactgctgctgggctctgtttgyttgtccatcacaaaggatcccagaacactgctataagtttctgagtgtttgtccctcacataggattccagaacaattctacgaggctccgaatgtttgtccttcagataggatttcagagcacagtggctgggttctgagtgtttgtccctcacatagggtatcagaacactgctgctgggatctgagtgtttgtctttcacagaggattccagaacactgctgctttgttctgagtgtttgtccctcacataggattccagaacactgccgctcggtactgagggtttgttccttac

SEQ ID NO: 198550 - DNA, 482 bp, Homo sapiens
gtttgtcactcacataggattccagaacactgctgctgggttctgagtgtttgtccctcacatacaattccagaacactgctactaggttctgaatgtttgtccctcacaaaggattccagaacactgcttctgagttctgagtgtttgtctgtcaaataggattccagaacactgctgctgggctctgtttgtttgtccatcacaaaggatyccagaacactgctataagtttctgagtgtttgtccctcacataggattccagaacaattctacgaggctccgaatgtttgtccttcagataggatttcagagcacagtggctgggttctgagtgtttgtccctcacatagggtatcagaacactgctgctgggatctgagtgtttgtctttcacagaggattccagaacactgctgctttgttctgagtgtttgtccctcacataggattccagaacactgccgctcggtactgagggt

SEQ ID NO: 198551 - DNA, 493 bp, Homo sapiens
gtttgtcactcacataggattccagaacactgctgctgggttctgagtgtttgtccctcacatacaattccagaacactgctactaggttctgaatgtttgtccctcacaaaggattccagaacactgcttctgagttctgagtgtttgtctgtcaaataggattccagaacactgctgctgggctctgtttgtttgtccatcacaaaggatcccagamcactgctataagtttctgagtgtttgtccctcacataggattccagaacaattctacgaggctccgaatgtttgtccttcagataggatttcagagcacagtggctgggttctgagtgtttgtccctcacatagggtatcagaacactgctgctgggatctgagtgtttgtctttcacagaggattccagaacactgctgctttgttctgagtgtttgtccctcacataggattccagaacactgccgctcggtactgagggtttgttccttac

SEQ ID NO: 198552 - DNA, 489 bp, Homo sapiens
gtttgtcactcacataggattccagaacactgctgctgggttctgagtgtttgtccctcacatacaattccagaacactgctactaggttctgaatgtttgtccctcacaaaggattccagaacactgcttctgagttctgagtgtttgtctgtcaaataggattccagaacactgctgctgggctctgtttgtttgtccatcacaaaggatcccagaacactgctataagtttctgagtgtttgtccctcacataggattccagaacaattctacgaggctccgaatgtttgtccttcagataggatttcagagcacagtggctgggttctgagtgtttgtccctcacatagggtatcagaacactgctgctgggatctgagygtttgtctttcacagaggattccagaacactgctgctttgttctgagtgtttgtccctcacataggattccagaacactgccgctcggtactgagggtttgttcc

SEQ ID NO: 198553 - DNA, 566 bp, Homo sapiens
tgtttgtttgtccatcacaaaggatcccagaacactgctataagtttctgagtgtttgtccctcacataggattccagaacaattctacgaggctccgaatgtttgtccttcagataggatttcagagcacagtggctgggttctgagtgtttgtccctcacatagggtatcagaacactgctgctgggatctgagtgtttgtctttcacagaggattccagaacactgctgctttgttctgagtgtttgtccctcacataggattccagaacactgccgctcggtactgagggtttgttccttacatagaattctagaacactgtagctcatttctgagtgtttgtccctcacttaggattccagaacaatgctacgattgtctgaatgtttgttccttaccaagtattccagaacactgctgctgggttctgagtgtttggcactcacattggtttccagaacactgctatgagggtctgaatgtcccrcacataggattccagaacactgctaagagggtctgaatgtttttccctcagaaaggattctggaaccctgctact

SEQ ID NO: 198554 - DNA, 541 bp, Homo sapiens
ggaggtcaagttcctgagattattaggcaaagaggttgacccaggatgtctgtagtactattaaaaactgaacaaggctaagaggtgtgataaaggcctatttactctggagtagaaaaagtaataagaaattgttttaagcaatattatttattgtatagcatttattaagtgttggactctatactgaaaactttgaatatattaactcatttatcctagcaaaagttttattaagtagaaactctttttatcgcaatctttcagatgaagggtgtgtgaagagttgtrtatcgtgcccaagttcaggaagataaataagaagtaaagctaagatatattcccagctatactgacttgagttcatgctttatggcatttgtcacagttttaaagctggaaaaacaacaacaataacaacaacaacaaaaacttctttctttgaataaactttagtcaggtttctctgagcccttctcctgacttggccttaaccttagcccccatccttgctaagcatgcatggcccagttgtagcaaa

SEQ ID NO: 198555 - DNA, 179 bp, Homo sapiens
tgacatatccacaaattatttactcatcagataaactcagctgtgaatccaacgagaagtaccataaaagcaacattaattcatgctaygcatttctcttcttcttcatatccattgtcattatcctcccacaacatttagactaattcgaattgatggactcaatcaacaaattaaaa

SEQ ID NO: 198556 - DNA, 546 bp, Homo sapiens
ataaccattaaacacagaggttgattccatctttctttatatgaatgtttctaatcagatgactttaaccacattctccttcctcaactctgacatatccacaaattatttactcatcagataaactcagctgtgaatccaacgagaagtaccataaaagcaacattaattcatgctacgcatttctcttcttcttcatatccattgtcattatcctcccacaacatttagactaattcgaattgatggactcaatcaacaaattaaaaaacaatactctctagacttcagtgatgaaaaatatacatagtgaaacaatatgttcttccgaaatggagcacttagttatctttatsgtgcagagtgaaagacaaattaagggaagaatgctgtgcaagcggtttttattgcttttatgataagaagaagatagtccttatttgttttgattgagtggtgcaaattcattgtcctgctagaatttattgattcggttaaaaatcagtggatgcctggttgaaaacttacaagtgttttcttctgata

SEQ ID NO: 198557 - DNA, 379 bp, Homo sapiens
atagtaaaattttaagttatcaaaataataggtacaacctgctactatttctactgctattgtcagataataataaaacatttaacatgcattgagagcttattacatactaagcaagtttgtaaccatttttcatgtattaactcttgtraaccacataaacaatatgaagaacataacatacacatatctattttataaaggatgaaagtcaggtgcgtcagatgtatcttgccaaaggttctacagtaagtggcagtgttcaggtttcaactcgattgcttgaactctaaagttcactcagtacgaaatattatggtcagttttattcttcaatgaataagtaccatcattaaaggcttagtggctgcctgaatta

SEQ ID NO: 198558 - DNA, 443 bp, Homo sapiens
actgcaaattaatcggtttatttgtggtttagtttgtggaggatatagattttctaaggaagcattttctcatgttttgtggttacataactgatatcttatagtttattagtaaataattaacactaaacacaatctaattgctttatccyttaagtggttgcaataagcaagacattattttatatcacttcagtgtattaaattttgatacctaggataaagagctgtaactcactcgccttatattgggaggggcataaaataaagtactcaccttgttttaaaaagttattttggcacacttttaaatatatttaggagaaaaatatttttgagaagtacaatattttatattaaaacattgattgtttccaacatgaatattgttaaatagtgatttattccaggaaaccatgaaaaggtgtcaacaaaatagtaaa

SEQ ID NO: 198559 - DNA, 443 bp, Homo sapiens
actgcaaattaatcggtttatttgtggtttagtttgtggaggatatagattttctaaggaagcattttctcatgttttgtggttacataactgatatcttatagtttattagtaaataattaacactaaacacaatctaattgctttatcccttaagtggttgcaataagcaagacattattttatatcacttcagtgtattaaattttgatacytaggataaagagctgtaactcactcgccttatattgggaggggcataaaataaagtactcaccttgttttaaaaagttattttggcacacttttaaatatatttaggagaaaaatatttttgagaagtacaatattttatattaaaacattgattgtttccaacatgaatattgttaaatagtgatttattccaggaaaccatgaaaaggtgtcaacaaaatagtaaa

SEQ ID NO: 198560 - DNA, 443 bp, Homo sapiens
actgcaaattaatcggtttatttgtggtttagtttgtggaggatatagattttctaaggaagcattttctcatgttttgtggttacataactgatatcttatagtttattagtaaataattaacactaaacacaatctaattgctttatcccttaagtggttgcaataagcaagacattattttatatcacttcagtgtattaaattttgatacctaggataaagagctgtaactcactcgcyttatattgggaggggcataaaataaagtactcaccttgttttaaaaagttattttggcacacttttaaatatatttaggagaaaaatatttttgagaagtacaatattttatattaaaacattgattgtttccaacatgaatattgttaaatagtgatttattccaggaaaccatgaaaaggtgtcaacaaaatagtaaa

SEQ ID NO: 198561 - DNA, 687 bp, Homo sapiens
gtgatagtactcaaaatttcagtccatatttctgattaatctaaatgaagtgaattattaacattcacaaggagtatttgaaccagcgatgtctgatttctgatctagcttcaactgacttcatgtgtaaagttttataaaactttgtgcatgacttcttacataacttcttgtacaatttgtgtaaattgtgtaactgacttgtataactgcaaattaatcggtttatttgtggtttagtttgtggaggatatagattttctaaggaagcattttctcatgttttgtggttacataactgatatcttatagtttattagtaaataattaacactaaacacaatctaattgctttatcccttaagtggttgcaataagcaagacattattttatatcacttcagtgtattaaattttgatacctaggataaagagctgtaactcactcgccttatattgggaggggcataaaatamagtactcaccttgttttaaaaagttattttggcacacttttaaatatatttaggagaaaaatatttttgagaagtacaatattttatattaaaacattgattgtttccaacatgaatattgttaaatagtgatttattccaggaaaccatgaaaaggtgtcaacaaaatagtaaaaaaattgtatcctgcaagctcaatttttagtgaggc

SEQ ID NO: 198562 - DNA, 414 bp, Homo sapiens
ttcatatgctgagtatataatatgcatcaattatcataccatattctttatatagatacactcaataactcttctacacaatggtatggcatatctattattattttattttgcaaaagagaaaatatggtcgaagagtgtggacaatttactatttaatttttaaarccatgatcttttctctgtgctacactctcaatcatggtctgtcttgttgtcatactggttttgtgtctctcaaacataagtatgtaacttgtattgaaaacaaaagcataagtaatgatattttgatgtagtccctcttgataatatgaatattgaatgtgggggaaataatcaaatgagtgttttttaaggtgctcaaattatgaatttcttaagatgtttgtaaagatatttgtatataagaat

SEQ ID NO: 198563 - DNA, 536 bp, Homo sapiens
caatgatggtatgtattaaataaaatggagatgtcagatttgccttgatagaatgttgagaagggattcccaaggctcacataagtagactttatagagtgactctgttatgtaaaatccaaaatcttctcccctgatgatcagggtccttaagagagccagaagacattttattttcaaagatgataaggaatgtatcaaagagcagcccagtaagtggctgttttctctaagttggtgctgacagtaggagacaatgttgtgctactgggctctctagtctcaaaaataatgacagatttaattactctaatctgcagccagttcagagtgacagctagagaaactgtcccacagaaatcttgataacactcaatagrtcagagttttcctaaggaaattcaacaatagttttgctcacacggtcttggccaaatcattgtctgtgggctcacaggctgcctgatttaccaacaagagactatacctagcatcatttagacaaaggagctcaatttaagatggaagagagcaac

SEQ ID NO: 198564 - DNA, 439 bp, Homo sapiens
atttttctttctacctaaataggtagccatgagtcttaaaataagtgtccctattgtgattttagatgtgtctttcccccactgtgggggcatttaggcaagttctactctcatttttatcaaaatgatttgaattatttcttaaaagtgggttcaaactgatggcaggcagatgggagtgccagtttttatctatatcacatttggatgtggaggatttcaggtacaaatctgtgactcatcttattcaagggaaagatgattaaaccagaatattrtggtctcttccattttactgagcacaattactgactccagacctcagaaaagagagaaaacctaatttcctggatttgcacctctttgtgctgggccattctgacactttgctggcagcatttgcttgagctctttggatttctaaggcaaactttgggga

SEQ ID NO: 198565 - DNA, 506 bp, Homo sapiens
ccagctatgctgaactgtgcatcaattaaacctcttttgttttaaattacccagtctcaggttgttctttayagcagtgtgaaaatggacaaatacagtatctttagctggcaagtttttcttccagtactttgaatatattatttcagtctcttctggcctgtaaggtttctgctgagaaatccactctaaaagtctgatggaggtttctgtataagtgaccagacacttttattttgcagtttttagaattctatatttgtctttgacttttgatagcttgactataatgtaccatggagaagatataatttcattgtatctgtttgagaatctctgatattcttgtatctgaatgcctaaatcttttgctagatttgagcattttttaaatattattttgttaaataggctttataagtcttttatttttctctttactttctgggacactgaaaatttaaacgtatggttgtgttatggtgtcccatatgtcatataggctt

SEQ ID NO: 198566 - DNA, 628 bp, Homo sapiens
ctgttctcacactgctgcaaggacatacccaagactgggtaattcacaaaggaaagaggtttaattgactcacagttcagcatggctggggaggtctcagaaaacttacaatcatggcagaaagagaaggaaacacatccttcttcacagatcagcaaaagagaagaatgagagctgagcaaagggggaagccccttataaaaccatcagatctcatgaatacttattcactatcatgagaatagcctggggaaaccaaccccatgattcaatcacctcccactgggttcctctcatgacacgtgggtattatgggaactacaattcaagataagacttgggtggggacacagccaaaccatatcattccacacctggcccctccgaaatctcatgtcctcacatttcaaaacacaatcatgcccttccaacagtcccyatattctcttatttttgtcttctactctttttctgattgtcatttagcactttatatgtttattttttctgtcctttctcaatgtgttagttatatcttgttttttacttccttgcttgttggcctatggtttgcaatatacatttataactaatccaagtcccctttcaaataacattataccacttt

SEQ ID NO: 198567 - DNA, 614 bp, Homo sapiens
agtccctatattctcttatttttgtcttctactctttttctgattgtcatttagcactttatatgtttattttttctgtcctttctcaatgtgttagttatatcttgttttttacttccttgcttgttggcctatggtttgcaatatacatttataactaatccaagtcccctttcaaataacattataccactttataaatagtataacttataacaataaaataattttaatttctacctctcatccttggtatcattactttcattcatttcagttacatttatgcatacataagtgtgtgtgtatatatatgtgtacataagtrtatatatgccatatgcatatgcataagcatatgtaattgaatacattggtgccagtattttgtataagctattatgttagattgatttaggataagaaatagaagttttttatttgacctccacttcttccttctttaattctcttttaaaatgatcaacctgtgtttctgacatattttgtttcttctctctaaagaacttctgttaaatttcttgcaaggcagttctactggcaacaatttcttcaattgtcatttgtctaataatgtatttttttccttaaca

SEQ ID NO: 198568 - DNA, 562 bp, Homo sapiens
gaggtaatctcaggtcagctctgccattgtaaagcccattcaagatcatattcttgaatggaagtcatattgttggcatctttaataggcctcttggaacattgtttaagaaagaagttttcagactgaatttacataatgttcagaaaagataaatgtgctgaaataccacacagcagccaccactatccaatcagcaatagggtcagggtggccactccaatagccctacccaagggatgagcctatatgcagcgaccataataagcaatgggaagagcttccaayggataacaaatccacagcctggtactctctgcctcctccctattaccagtaaccccagtgaactcaagatacgcctcctggtcctcagttcctaactccttgcatgaaacctctccaacccttctacctaaccaaaaaaaaaaaaaaaaaaaaaaataccatatcttaagtcctggctcaggagccatgttgcccatgaaggccactcttccaatccctcagtccaaacagattgtccttctctctaaataaatgtagcatttatagtctctaa

SEQ ID NO: 198569 - DNA, 595 bp, Homo sapiens
atcaccaataagcagttctacaagaaatgcttaagtgaatcctacacctggaagttaagggacaatatctacaatcatgaaaatgcatgtaagtataaaacccatgggaagagarcacataaataggagagaaaaaagattcaactgttaccaatacagaaaagaccccaactacaatggtaaatagtaagagaaaaacaagaaataaagaatattgaaaacaatcaaaaaacagctaacaatatgatataaagaaagcctcacatatcaacaataaacttgaatgtaagcagattagactgttcacttaaaagaaatataaagaaacactgaatagatttttaaaataaaaagaaaagaaaaaggctctaattataagccgctcacaagaaattcaccttagtagtaaagacacttatagattgaaagtaaaattatagaaaatgatatttcaaacagaaaccaaaagtgagcagaagtagctatactttgacaaactgactttaagtcaaaaacaagggaagtttgtagtgataaatgaatacagtagaaaaagtagaaagattttaaataagaaatctagctatgcatctca

SEQ ID NO: 198570 - DNA, 595 bp, Homo sapiens
atcaccaataagcagttctacaagaaatgcttaagtgaatcctacacctggaagttaagggacaatatctacaatcatgaaaatgcatgtaagtataaaacccatgggaagagagcacataaataggagagaaaaaagattcaactgttaccaatacagaaaagaccccaactacaatggtaaatagtaagagaaaaacaagaaataaagaatattgaaaacaatcaaaaaacagctaacaatatgatataaagaaagcctcacatatcaacaataaacttgaatgtaagcagattagactgttcacttaaaagaaatataaagaaacactgaatagatttttaaaataaaaagaaaagaaaaaggctctaattatawgccgctcacaagaaattcaccttagtagtaaagacacttatagattgaaagtaaaattatagaaaatgatatttcaaacagaaaccaaaagtgagcagaagtagctatactttgacaaactgactttaagtcaaaaacaagggaagtttgtagtgataaatgaatacagtagaaaaagtagaaagattttaaataagaaatctagctatgcatctca

SEQ ID NO: 198571 - DNA, 595 bp, Homo sapiens
atcaccaataagcagttctacaagaaatgcttaagtgaatcctacacctggaagttaagggacaatatctacaatcatgaaaatgcatgtaagtataaaacccatgggaagagagcacataaataggagagaaaaaagattcaactgttaccaatacagaaaagaccccaactacaatggtaaatagtaagagaaaaacaagaaataaagaatattgaaaacaatcaaaaaacagctaacaatatgatataaagaaagcctcacatatcaacaataaacttgaatgtaagcagattagactgttcacttaaaagaaatataaagaaacactgaatagatttttaaaataaaaagaaaagaaaaaggctctaattataagccgctcacaagaaattcaccttagtagtaaagacacttatagattgaaagtaaarttatagaaaatgatatttcaaacagaaaccaaaagtgagcagaagtagctatactttgacaaactgactttaagtcaaaaacaagggaagtttgtagtgataaatgaatacagtagaaaaagtagaaagattttaaataagaaatctagctatgcatctca

SEQ ID NO: 198572 - DNA, 488 bp, Homo sapiens
aaaccccaaaacagaaatatcatataatccaacaatcccactgctgggtatttatccaagggaaaagaaattagtatatcaaaaggataccttcactatcaaaaggataccttcaccccagtgtttattgaaacactctccacatttacaaagatattgaatcaacctmagttccagaaaatggataaatgaataaagaatatatggtacatatacacaatgaaatactatttagccatggaaaagattgttaccaagccatttgcagcaatatggatagaactagaggtcattatgttaagtgaaataagccaagcatagaaagacaaatatctcatgttctcactcttatgtgggagctaaaaaagttgatctcatagttgtagagaataggatgatagttaccaaaagctaggaagggtgtatggggaggtggtggtaaagagaggttggttaatggatacaaatatacagttagatgaaaagaa

SEQ ID NO: 198573 - DNA, 565 bp, Homo sapiens
atgaattataaacataaccttggacacatcaaagaacgaaattatatttctacctcccaacatatataaaaaatgagtttcacatggacagaaagaactaagcatgaaaagcaagtttttaatctgctagtagaagaaaatatagctgcaaatctttatgttktggtggagaaaggtttttaaaacaggatcccaagagcacaaatcaaaatagtaagatttgagtatagcaagaattactccttctgcataatgaatagttccataaacagaatgaaaagacaatcattaaacttaaagagaaaatatttttcaatatgtacaacagatagaagaccagtctctagagtatattaaaacagattttaaagatcagaagggaatagactacccaaataaaaataggagaaagacaagaacaagcaattcacagaagaaaaaactcaaataaccaatagacacataaaaagatattcaacttcattagacatcagataaatacaaatgaaagcaaaaattagatttcactatttacccattaaagtcagctaagtgttttgaaatg

SEQ ID NO: 198574 - DNA, 603 bp, Homo sapiens
tataacttgtgttccagtaacctgcacctacttacataaatcttatatgtgtataaaagaaaacatatataaggatatcaattgcagaattgcttatagtaatacaaatataagacaatatgtctatcatggccataaaaggttccagttgctgccctctgaattaaccaycaccttcatgctaaagtctgacttcccacaggcttctttcagccagtgattgagcacagagaagatactaaggcaggcctattcctgggaaatgtgtgacttttctgcaggtgactttggctcaaggattttctatgagacttgctgaaacttttgtggaaattcattgcagtctggcttttttttcttccctctcttcttcataggggccagacatgcatcctagtctgatggttctcccagcctcctaaggctttctctatattttccctcaaagataggtttccccaataaatctattttatatctggtcacatcttgacatttgcttcttagaaatcctcagctaacacaagtggtgccaaaagtggtttgaccacacaggtggtatgctgagaatctgggactagttttctcactgcctggtaagca

SEQ ID NO: 198575 - DNA, 603 bp, Homo sapiens
tataacttgtgttccagtaacctgcacctacttacataaatcttatatgtgtataaaagaaaacatatataaggatatcaattgcagaattgcttatagtaatacaaatataagacaatatgtctatcatggccataaaaggttccagttgctgccctctgaattaaccatcaccttcatgctaaagtctgacttcccacaggcttctttcagccagtgattgagcacagagaagatactaaggcaggcctattcctgggaaatgtgtgacttttctgcaggtgactttggctcaaggattttctatgagacttgctgaaacttttgtggaaattcattgcagtctggcttttttttcttccctctcttcttcataggggccagacatgcatcctagtctgatggttctcccagcctcctaaggctttctctatattttccctcaaagataggtttccccaataaatctattttatatctggtcacatcttgacatttgcttcttagaaatcctcagctaacacaagtggtgccaraagtggtttgaccacacaggtggtatgctgagaatctgggactagttttctcactgcctggtaagca

SEQ ID NO: 198576 - DNA, 593 bp, Homo sapiens
taagcaatatttgcatcaatgtctaaaatggctttagtgaaataacactactcaaaaattgtcacacattctaactaagaagtgtcatgctagaagaatgcttttttaggttcctacctctgcaactcttttccataaacagataggattatttggcctcatttacacagaaacagtcttttccatcttgggactattcctgtctgaggttggatattgtatgcattgcagccccacatctctctcttccctaaagcaaaactgtccttccccacctctcctagctaggttaatacctacaccatgtaccagttccccagctgggaaaccctggtagtggaagyccagctcacagtgagcccagaaccaatagagaccaccaagccctgtgctttcttctttatggtggtgaaggcatgttacggcaatttgacttctatttcttatggagtatcagagcatgctgttgaccatggtctcttaagatcttcactgaatagcaggtacctgaatcttcaaaaggtttatatgccacccttcacaacatgtgtatcttcccaaggcttccagcatattagtcgcctcttgctcat

SEQ ID NO: 198577 - DNA, 536 bp, Homo sapiens
tttattaagaaaagaggtttaatggactcacggttccacatggcctggggaggcctcacgatcatggtggaaggcaaagaagaagcaaaggcacgtcttacatggtgtcaggcaacagagcttgtgcagaggaactcccatttataaaaccatcaggtctcataaaacttatccactatcacgagaacagtatgggggaaactacccccatgattcagttatctccagctggccccacccttgacaggtggggattattacaattcagggtgatatttgggtggggacacagagccaaackatatcagcttgttacaagcattaaatagaatggtgcatgtaaagcccagagctcaatgccaggtgagggtcactgctcccttcctggtagccatcagaggcatgacacaggctgcactgaggcacagcaggactgggttctggaccctcttgggactggtctccagtatctagaaagctgagagctgatacatatgttgaagtacgtgcatcatcatgcgtgtgcacgcacctgt

SEQ ID NO: 198578 - DNA, 396 bp, Homo sapiens
gagcctccagctgtgggcaccggtacagaggtggtttcagaagcaggtctagctggcactcccctcaagcattcagagggctttcctcctccaactttcccacccaatccatgtccttctcattcttcaaaccatgtcagatagcaccttttccaggaagtcttcccygatgagccccatctgactccgacaactccacttaacaccaaatatggatcctgcaaactcagtttatatcccactgggggttcttgctactttgtaagggaacagaagtttgtaccagatctagcatccccccaggagtcaggccggtgccaccccttcccctaggttcctcccctcctgctgctctcaggatgtggctgtgctcttgagcgtgattggcgcattcgt

SEQ ID NO: 198579 - DNA, 583 bp, Homo sapiens
agaattcatcaaggcagaaagtatttgttattcgaggatgggtttgatttttggcaatgatgttgaggctctctgagtcaagtctggaggattatgcagcagggagagctctttgcttagaccactgcatcagaccaccctcctcaatctcagggctcagctaccacttcccttctrtagctcccccagtcgccatggcagatgtggccagacacctcactctcttgccatccgcccagggtttctctgacaccaaggccatgcccgcctcttccttgtctcaggtgcattttgcatggttcttcagaggttccctagcaggatggagcctcaatgacccacagtgatgaccagctcagttaagaaaacttagcttggcctttctgcttccctgttttatgcttcccaatcccccttgggattctagggaaccattgcttttccctagaatctctttccaaaataagctacttgaaccaaaggctctttatgtgggggaacccaggcaaggacagctgccctgctgaatttttttgtaagatttcaacagagcttgaggacggagttggggggagtctattga

SEQ ID NO: 198580 - DNA, 538 bp, Homo sapiens
actctgcctcaaaataataataataataatataaggtgactctaagaggtagtacaagaaaaatacgattggaaaagaacttattggccgggtgcggttgctcaagcctgtaatcccagcactttgggaggccaaggcgggtggatcacctgaggtcgggaattcgagaccagcctgaccaacatggagaaaccccgtctctactaaaaatacaaaatgagccgggcatggtggcacacgtctgtaatcctacctacttgggaggctgaggcagaagaatygcttgaacctgggaggcggaggttgcagtgagccaagatcacaccattgctttccagcctgggcaacaagagtgaaactctgtctcaaaataaataaataaataaataaaagaaaaaacaaggaaaagaacttattaaattttattgatgcttgaataaatgatgcatatatatcacatctaaagcaaaaatccaaataatatcaacatgatagtagtcgagagagacaggaggtgggaagagatgaaaagaatagc

SEQ ID NO: 198581 - DNA, 538 bp, Homo sapiens
actctgcctcaaaataataataataataatataaggtgactctaagaggtagtacaagaaaaatacgattggaaaagaacttattggccgggtgcggttgctcaagcctgtaatcccagcactttgggaggccaaggcgggtggatcacctgaggtcgggaattcgagaccagcctgaccaacatggagaaaccccgtctctactaaaaatacaaaatgagccgggcatggtggcacacgtctgtaatcctacctacttgggaggctgaggcagaagaatcgcttgaacctgggaggcggaggttgcagtgagccaagatcacaccattgctttccagcctgggcaacaagagtgaaactcygtctcaaaataaataaataaataaataaaagaaaaaacaaggaaaagaacttattaaattttattgatgcttgaataaatgatgcatatatatcacatctaaagcaaaaatccaaataatatcaacatgatagtagtcgagagagacaggaggtgggaagagatgaaaagaatagc

SEQ ID NO: 198582 - DNA, 524 bp, Homo sapiens
ggtttagaattcaggctgaaataccatcttcagctgaaacgaagaaagaagggtatgagggaggccagttatggggaggtgaccaggaaaagcacagtaaacaagggtaaggtttgctatgcatattaaagtcagtgcttatccattgataagtctctagtgatttggagacatccttctcttcctggtacagagagggagacatccttacaaagggagatttcctttgtaaatgtaaatttcccatatgaaagggtaacttctactctgttttcagtttctcctgtgtctgcagattctcaaaataattaactcaaaatamtccttatgccagagaggcatatgctagggtggtatattctggtcccctacagtcatattttggtctcctacaattcacagagaaaactagtgtcagagacgagactagaagccagcacaagatgtatagagccaaagatatgttgctgccattctgggtgaaggagcccagaatctaatgtggtgtctgctccttctcttac

SEQ ID NO: 198583 - DNA, 358 bp, Homo sapiens
aaatattgcagtttgactgctgaattacgacaggagcctccagtggagaagcagcagctcctgcaggctggaagagatgggcaagagaagggcctagcatttgggtcyagcctccagcatgcagaagacgtaggctgaggagctcagacagggtggttagaaagggaatactcaggacagcaatagagaagggcacacagggcgctggaatagtaacagcaatccaacaacagcaatgagagtaagagtgaatgtgggcaacatcataaacactaaaattatatcaagcaacgcactaagttccagaaagacagtaatgacaagccatgtgtggtctctgacttcaacaactaggaat

SEQ ID NO: 198584 - DNA, 586 bp, Homo sapiens
gaaagcaaggaagacacagtacctaaaatgagaaacagtctattgaaaaccacgaagattaatttagtgataccactaaatgtgactatttaattagacatttttattttgctgtgatatcctcacactgcttaccaggtgattacctttgaaattgcctagccatgccaattcaattaaactggataggataataggagtgaaaatgttttgcaaatgacaaaatctttgcaatcatttgctaatattactaattctcatattccatgaatttagagttgaatacttctatcctaacacatgtacttctaaatgtgtttgaagtttgagtcttactaacttatgtagaattcacatatttttyggccgggcacggtgactcacgcctgtaatcccagcactttgggaggccgaggcagacagatcacaaggtcaagagtttgagaccagcctgaccaacatggtgaaacccccgtctctactaaaaataaaaaattagccgggcatggtggcacgcgcctgtaatcccagctactcaggaggctgaagaaggagaatcgcttgaacccgggagacggaggttgca

SEQ ID NO: 198585 - DNA, 586 bp, Homo sapiens
gaaagcaaggaagacacagtacctaaaatgagaaacagtctattgaaaaccacgaagattaatttagtgataccactaaatgtgactatttaattagacatttttattttgctgtgatatcctcacactgcttaccaggtgattacctttgaaattgcctagccatgccaattcaattaaactggataggataataggagtgaaaatgttttgcaaatgacaaaatctttgcaatcatttgctaatattactaattctcatattccatgaatttagagttgaatacttctatcctaacacatgtacttctaaatgtgtttgaagtttgagtcttactaacttatgtagaattcacatattttttggccgggcacggtgactcacgcctgtaatcccagcactttgggaggccgaggcagacagatcacaaggtcargagtttgagaccagcctgaccaacatggtgaaacccccgtctctactaaaaataaaaaattagccgggcatggtggcacgcgcctgtaatcccagctactcaggaggctgaagaaggagaatcgcttgaacccgggagacggaggttgca

SEQ ID NO: 198586 - DNA, 586 bp, Homo sapiens
gaaagcaaggaagacacagtacctaaaatgagaaacagtctattgaaaaccacgaagattaatttagtgataccactaaatgtgactatttaattagacatttttattttgctgtgatatcctcacactgcttaccaggtgattacctttgaaattgcctagccatgccaattcaattaaactggataggataataggagtgaaaatgttttgcaaatgacaaaatctttgcaatcatttgctaatattactaattctcatattccatgaatttagagttgaatacttctatcctaacacatgtacttctaaatgtgtttgaagtttgagtcttactaacttatgtagaattcacatattttttggccgggcacggtgactcacgcctgtaatcccagcactttgggaggccgaggcagacagatcacaaggtcaagagtttgagaccagcctgaccaacatggtgaaacccccgtctctactaaaaataaaaaattagccgggcatggtggcacgygcctgtaatcccagctactcaggaggctgaagaaggagaatcgcttgaacccgggagacggaggttgca

SEQ ID NO: 198587 - DNA, 548 bp, Homo sapiens
tttgtttccattttacagataataaaatcagagggcttgaccaaggaataccacaagcagcttagcagtctagaagtatagagggcatcagaggttaagccagaggaaaagattagaattaggaggaaggactagatccaggtagaaaagaagcacaacatccaccctgttctggagcactggatcaaaatcagggcttgggtaaataatttcagataaatattaatgattcagtcataggtaattgaccaggcacagtgactcatgcctgtaatcctagcaccttcagaggctgaagcaggaggatcgctttaagccaggagtttgagacaagcctgggcaacaaagcgagactcagtctctacaaawaataaaaaatatagccaggaatggtggcacacacctgtactcctaagctaatcaggagcctgagatgagaggacaacttgagcccaagggttgaggctgcagtgagccatgattgtgtcactatactccagcctgggtgacagagggagactccatctcttcaaaaaaaatcataggaa

SEQ ID NO: 198588 - DNA, 548 bp, Homo sapiens
tttgtttccattttacagataataaaatcagagggcttgaccaaggaataccacaagcagcttagcagtctagaagtatagagggcatcagaggttaagccagaggaaaagattagaattaggaggaaggactagatccaggtagaaaagaagcacaacatccaccctgttctggagcactggatcaaaatcagggcttgggtaaataatttcagataaatattaatgattcagtcataggtaattgaccaggcacagtgactcatgcctgtaatcctagcaccttcagaggctgaagcaggaggatcgctttaagccaggagtttgagacaagcctgggcaacaaagcgagactcagtctctacaaataataaaaaatatagccaggaatggtggcacacacctgtactcctaagctaatcaggagsctgagatgagaggacaacttgagcccaagggttgaggctgcagtgagccatgattgtgtcactatactccagcctgggtgacagagggagactccatctcttcaaaaaaaatcataggaa

SEQ ID NO: 198589 - DNA, 578 bp, Homo sapiens
ttctggttttgactgatgggaggctggaatgtatgactactaagatgttgtccaactctaagattacaaattttaatgcattaagcaattaattattttktaactgtatttaaaaaattaatggacaggcttctgtgtatcaagtagtaggaacacactgggaatactagaaaaaaatatatagccctcatgttgaaggaggtgacagacaaaccaataacaataatacagtgtggtacatgctgtgatggtgataaggacgggaagttgtggaggtacgtcaacatctcttgccacactaggaagccaatcaacactgcctggaagagggtttaaaggacaagtaggaggtagtcaaagaaaggacaagaagctttctaggaagaaagagcctagatgaccaaatcctacatttttgtttttgttttgtttgtttttgagacttgggctaggcaacactttctagaaagataccaaaatgagcatcttctggcatctccataactccagccctcactctgggtcagaggttcctctctactctatgtctccctcacaaggctgtgagctcctggagg

SEQ ID NO: 198590 - DNA, 593 bp, Homo sapiens
ttaaagagcaattagcaagaagtagctatagtcaaatgataaattgaggcctaaaacttgcaagcaaacaaatgggcagtttcaggttagactttccctgactccaggcaactagtgaaccactttctctttaaagagttgttaagtggcaatatcatcctggtattcattgctcagtatgcatttatcaattgtagagcaggtttttgtatgagacaccatgcaagatcctaggataacagcatcacttattttatattgtagtaaaacatgtaacgtaaaatttaacattttaaccattttaaagggttcagctttctggcattaagtacrttcgcgttgctgtgcaagctatcattttttttttcctagtgaatatttagatataaatcacaatccctttccagtgtctccttttttcttaggggataatgattgataatatgattaaaatgaacacataggcagtgtatccactctgtctttcatagcctagtgttcttatgtacattctattttagccatctcttgcacacacagtagtgcacatgcaacccagccacacatacacagtcactgagtgtgttgaatca

SEQ ID NO: 198591 - DNA, 444 bp, Homo sapiens
tcggtaattgtggacataaagatggcaacaatagacactggggactactaaagcgcagagggaaggaaggaggagttgaaaatgaactattgagtactatcctcagtacctgggtgacaggatcattcataccccaaacctcagcatcatacaatatrcccaggtaacaaaccttcatgtactctctgaatctaaaataaaatctgaaaaaaaaaaaatcatttatgtctctcttacggtaccagtgagccttggtactacttcctcatcttattttgctgactccaactgagctccggaaatgttctcctgtaaatactcctttgcaagtagagaatcttaatacatatttgtgtaattgttagtatcttcagtgatttttccaagttagttgtccttgaggttgaattggtatttttactctgcccatggccctgttgcctg

SEQ ID NO: 198592 - DNA, 488 bp, Homo sapiens
tgcttctcgtatcatccttttcacaaaaatccattacccattgaggcctatcgtaatcgtaagtttatttcargaatcactgatttcttctcttccaacccaaatcttacatttcctttttggttcatttaaaattgtgcctttttcataatggcttccaaaattcccacaagcacataatgtcataaagctctttcctttctcagaatcgccaacatataaatcaaaaaacaaaaaccatcattatactataatgcctgttattagatacgggcttggtccatttttcagtaatttacattcagttatttattctaatatttgcgaatttgaaaagcatatgacatgattctgataaaatgattaagaacctataaagtgccagtctttttgagtacattattttattcaacaattctgagagtcatgtgcctccattttacagttgaggaaataggcctaattaggtttagtaaagtgcccagggg

SEQ ID NO: 198593 - DNA, 578 bp, Homo sapiens
cttgaagcctaatgaaagtgaagcagccaagcggtgaatctgagtttagtgcttgagctcggtatttatgatggtgggagtcaagacaactgaggtgttcacagcaaggggcggagacacatcacaggtggcagaaggaatcttgctgtcctgtgcagctgttagaaactytaaactgttgagtgaaaaaaggcagaaacagaacagtatgggcatctctacaacacattgcaatgagggcatgtgggggcaggagaatggaagtggagctcagaaatgaaaggaaaaaaagttaaaataacgtaaagtatgaaaaaagatttgcatgatctgatgataatgagccaaagaagtgaggattatgagaaggttaattctttgcatctgtggttcaaaacaaccaccaccataacaggttatgaaataagaacctgcactgccccccagcaccatctatggggaaggggctatgaaagtagacatgaaggttgtggctacccctggcttttgggttttttttttttttttttttttttttactccacagagctgtgctaaaacacagattctgggcctca

SEQ ID NO: 198594 - DNA, 605 bp, Homo sapiens
attaaatgttatgagtaatcttgaagcctaatgaaagtgaagcagccaagcggtgaatctgagtttagtgcttgagctcggtatttatgatggtgggagtcaagacaactgaggtgttcacagcaaggggcggagacacatcacaggtggcagaaggaatcttgctgtcctgtgcagctgttagaaactctaaactgttgagtgaaaaaaggcagaaacagaacagtatgggcatctctacaacacattgcaatgagggcatgtgggggcaggagaatggaagtggagctcagaaatgaaaggaaaaaaagttaaaataacgtaaagyatgaaaaaagatttgcatgatctgatgataatgagccaaagaagtgaggattatgagaaggttaattctttgcatctgtggttcaaaacaaccaccaccataacaggttatgaaataagaacctgcactgccccccagcaccatctatggggaaggggctatgaaagtagacatgaaggttgtggctacccctggcttttgggttttttttttttttttttttttttttactccacagagctgtgctaaaacacagattctgggcctcacctttgtg

SEQ ID NO: 198595 - DNA, 573 bp, Homo sapiens
aagtgttaaaatagaggtatatacaaaagtaaaataaataacgtttagctctgctggagagaggtattggggaaggttcagcttagtatttgaagataccagatgcaagtttactggagtattatccttgcaggcttgatatgaagyttgaaatttctccccaaagagatttagttaacaggcaaatatcccatgggaggtatatgtcaataggttatacaacattactgtcagtcttttacaacttagcgtgaattaattttccttcaggaaatcagtcatctctggagcagagacaggaggccaggtgttaataggagcaaagagaagaaaaggcctgggcagtgcttggacataaaagacctgaacgatcagacccttccatgggctccctttaagaagagcagggagagaccaagggctaaagttgggagactgagaaaatgcagcccaccggggcattacttatttctccagctctgatccgctgttgtactaggggtctaatccggcctgtgtctgcctccttcttgaatagcccagagcattcatctaaacagccttcctacagca

SEQ ID NO: 198596 - DNA, 573 bp, Homo sapiens
atataaatggaattaaacagtaatgtacacttttgtgcctagcatctttcactcagcctgcacctgtggtggtgtctgtattgattgttctttgtattgctgaatagtataacattgcatgaatttgtttatccatttttgtgttgattgacatttgggttgcttccaatttggggctatcgtaaataagacttatgagcattcctttttttaacttatgttttcatttctcatgggtaaatacccaggattggaatcctgggttataaagtagatctgtgtttaactttttaaaaatctaccaaacaattctcaaaaattattatgtcacactattttatattcaccaacagtatgagtttcagttgctccacatcctcaccaacatttggtgatatcaacctttgattttagcttttctagtggatgttaaatgytatttcattgttattttaatttgcattctcctcataactaataataccaagaatctttcatgtcgttattagccattgtatatcttttcttttttcaagtcttttgcccgtttttaaattgggttgcttatgtttt

SEQ ID NO: 198597 - DNA, 551 bp, Homo sapiens
acacttttgtgcctagcatctttcactcagcctgcacctgtggtggtgtctgtattgattgttctttgtattgctgaatagtataacattgcatgaatttgtttatccatttttgtgttgattgacatttgggttgcttccaatttggggctatcgtaaataagacttatgagcattcctttttttaacttatgttttcatttctcatgggtaaatacccaggattggaatcctgggttataaagtagatctgtgtttaactttttaaaaatctaccaaacaattctcaaaaattattatgtcacactattttatattcaccaacagtatgagtttcagttgctccacatcctcaccaacatttggtgatatcaacctttgattttagcttttctagtggatgttaaatgttatttcattgttattttaatttgcattctcctcataactaataataccaagaatctttcatgtcrttattagccattgtatatcttttcttttttcaagtcttttgcccgtttttaaattgggttgcttatgtttttaag

SEQ ID NO: 198598 - DNA, 554 bp, Homo sapiens
acacttttgtgcctagcatctttcactcagcctgcacctgtggtggtgtctgtattgattgttctttgtattgctgaatagtataacattgcatgaatttgtttatccatttttgtgttgattgacatttgggttgcttccaatttggggctatcgtaaataagacttatgagcattcctttttttaacttatgttttcatttctcatgggtaaatacccaggattggaatcctgggttataaagtagatctgtgtttaactttttaaaaatctaccaaacaattctcaaaaattattatgtcacactattttatattcaccaacagtatgagtttcagttgctccacatcctcaccaacatttggtgatatcaacctttgattttagcttttctagtggatgttaaatgttatttcattgttattttaatttgcattctcctcataactaataataccaagaatctttcatgtcgttattagccattgtatatcttttcttttttcaagtcttttgcccrtttttaaattgggttgcttatgtttttaagatt

SEQ ID NO: 198599 - DNA, 493 bp, Homo sapiens
atattctgaataagaatcctatgttagaaatatgtaatgcaaatatttcccaatctgttgcttacctgttgattttgttaatggtgtcttttaatgaggatcagtgtaccaatttttaaaatgttttctgccttttgtggtctgtgtttggtaagaggtrgatgtttaggtcaggttggcttttttccccccacataggtatctggttgttccaacagtatttgtttttatatgttgaccttgaatcatttaatcttgctttgcacttaacagttttatagggttgtggggttttgggatcaattccacagagcttttctacacacagtcagccctctgtatccatgggttctgcatctgtatattcatccaaacatggattgaaaatgtagttaggcctattgtggttgtgtctgtacttaatatgtacagttttgtttttctctaaacaatataatataataacaatttccatagcatttacattatatta

SEQ ID NO: 198600 - DNA, 466 bp, Homo sapiens
tattctgaataagaatcctatgttagaaatatgtaatgcaaatatttcccaatctgttgcttacctgttgattttgttaatggtgtcttttaatgaggatcagtgtaccaatttttaaaatgttttctgccttttgtggtctgtgtttggtaagaggtggwtgtttaggtcaggttggcttttttccccccacataggtatctggttgttccaacagtatttgtttttatatgttgaccttgaatcatttaatcttgctttgcacttaacagttttatagggttgtggggttttgggatcaattccacagagcttttctacacacagtcagccctctgtatccatgggttctgcatctgtatattcatccaaacatggattgaaaatgtagttaggcctattgtggttgtgtctgtacttaatatgtacagttttgtttttctctaaacaatataatataataaca

SEQ ID NO: 198601 - DNA, 466 bp, Homo sapiens
tattctgaataagaatcctatgttagaaatatgtaatgcaaatatttcccaatctgttgcttacctgttgattttgttaatggtgtcttttaatgaggatcagtgtaccaatttttaaaatgttttctgccttttgtggtctgtgtttggtaagaggtggatgtttaggtcaggttggcttttttccccccacataggtatctggttgttccaacagtatttgtttttatatgttgaccttgaatcatttaatcttgctttgcacttaacagttttatagggttgtggggttttgggatcarttccacagagcttttctacacacagtcagccctctgtatccatgggttctgcatctgtatattcatccaaacatggattgaaaatgtagttaggcctattgtggttgtgtctgtacttaatatgtacagttttgtttttctctaaacaatataatataataaca

SEQ ID NO: 198602 - DNA, 493 bp, Homo sapiens
atattctgaataagaatcctatgttagaaatatgtaatgcaaatatttcccaatctgttgcttacctgttgattttgttaatggtgtcttttaatgaggatcagtgtaccaatttttaaaatgttttctgccttttgtggtctgtgtttggtaagaggtggatgtttaggtcaggttggcttttttccccccacataggtatctggttgttccaacagtatttgtttttatatgttgaccttgaatcatttaatcttgctttgcacttaacagttttatagggttgtggggttttgggatcaattccacagagcttttctacacacagtcagccctctgtatccatgggttctgcatctgtatattcatccaamcatggattgaaaatgtagttaggcctattgtggttgtgtctgtacttaatatgtacagttttgtttttctctaaacaatataatataataacaatttccatagcatttacattatatta

SEQ ID NO: 198603 - DNA, 533 bp, Homo sapiens
ggaattcatgactactctgggcaacacagagaaaacccaygtctacaaaaaataaagtaaaacaaaaaattagctgggtgtggtggcgtacacctgtagtcctagctattcaggtgactgaggtgggaggatcaactaaactcaggagactgaagctgcagtgagccgtgtcgcaccactgcactctagcctgggcaacaaagagagatttcgtctcaaaaaataataaataaataagaaaacatgcattgaagaatctaggaagtaaagtttctcactaaatgcttcatcccacccccaacctctggcagcacaatgtggagagaaatactgtccacatggaagaaggatgacataagcatccagctctccccacagattccagtacttgccctatcccagcccaaggtcagcccccacagcccaggatggatccctgcagacttaggctctaggcctacacaagagccaggcttggacctgcagccccaaattccgaaccagccactgtagacccaggctggtctcaggct

SEQ ID NO: 198604 - DNA, 533 bp, Homo sapiens
aacacattacatgtaggaaaaaaatggctacaatgactggatttctcctcagaaatccaggtcagaaggcagtggaacattttaaactactgaaagaaaatcattgtcagttcagaattctgtaaccagcaaaaatatatttcaagaatacaggtgaaataaagacattctcagatgaaaaaaaaacaaagaaaattcattgtcattagacctgccataaaagaaattcttcaaacagaaggcaaatgacaccagaggaaaacttggaacttcaagaatgaagagtagcagatgtgataaatacctaattcagtataataaattaggctttttccttgtgaattctttaaaatatgtgtgataattaaaaaaaaattaaaacrttgtttaatggggttttctttagcaattggtgcaaaacatggagaaaatacaatataaggggcaggtaaaggaaaccatacaagctttctataatccactttaagtggttggatagtaattcaaaacagactgtaaaaagttaagtatgt

SEQ ID NO: 198605 - DNA, 535 bp, Homo sapiens
ggctcaggataacaactcttctctcatgtttattgatagaatctcttctggagagtctgaagggcccaggcaaaatgcttctagaagctgactttgagagtaacctacagaaaggtccccatcacttcatagtaaaattcatccttccatgcacgctgaagttttagttagctcctatatataagcagtcccttcttggcaagatgaccagacatttaagaaaagtctcaaaggggacccagagaaaacagaaacaatgaaggaagtagtaagcaatttaagtaaaatctgtaaataacatattcaaaaagtttttttaaaayctggagttcttgaaaaaaaggaataattggatagcaagaaagagcattcagaaattaaaaatatgacatagctgtaatatgaaaatacagtacaatgcctagaaagtgaagttgaaaaacatccccaacaaggtagagtaaaaagacaaagattggaaataaaggaggtaagagggataatataggagaattggaggtttaatgtaagaatc

SEQ ID NO: 198606 - DNA, 492 bp, Homo sapiens
gcacagttagggctttctgaatagatattactaaagtgtgtttcctggcctgagagcaagcttagaaggcaatttatgactgatcagatagtgaacacattccaaagagattgacctaactctggcagtaagaggctcagggccttggagccatctctgagttgtcaaactgaagacactgcrctcttcttttccctcagaggtttactttcctaccaaagggttagggtaaagatccctccatctgatctctaaggattctcagaaggtgagggggagagtgatgtctttgctttttataaacaaaacaaaatccatatttctctatatctcacttatagagtcaacctaccacttgtacagggcatttattccatctggcactcacatggtactctgcaggcaggctgggtgagggggaccaatgctgcaatgttactttggctgttgatctttctgtgagtgtaaaaagaaatctgtctctggtccaaa

SEQ ID NO: 198607 - DNA, 634 bp, Homo sapiens
cctggtatggcaccttcctagcccctgcaccaagcaaataattctgtactttaaataaaggagggacggctgagggagaatacttcaggccctccctgtctacttctgcagcacttcccagcccaagagcccttggagggcatttgtgacctggagcattaggagggtcagtctgtctgggctgagtaatggtccaggccctggtcagctcaggctgtgtgtgtgtgtgtgtgtgtgtgtgtgtgtgtgtgtgtgtgtgtgwgagagagagagagagagagagagagcgcacgcgcttagtaatcagataattccggtcattccaaccatccaaatccctttctgatccatttctcctccctcccagtcgagctttctgaaaacctcaccgcgcatgaccctccacttggtgactctacccccttccatctcctcctcctcattgcatggtgactcgcacctgaccaacctgctcctctccaccttctgtcacttcagcaccgtagatgcaccacacactctggttcccagtcctctatcatgttgacaaccatcctctccctcctcaacacctcagctactgacacccacagcctaacttcacaagtaaatgcaccaccttcaacagcttgct

SEQ ID NO: 198608 - DNA, 385 bp, Homo sapiens
tttttaatttatttttattttttcaggttgagactgagctaaagttaatctgtggcgacgttctggatgtactggacaaacacctcattccagcagctacaactggcaagtccaaggttttctatcatgaaatgtaggttctatactaacaattaacaagtgtacttcaataaatttaaacattctcaggaatagttgactttgtttctttttttcttagacatttcatattattttccttattaaatataaccaaaaatcccacagaaattaactgaggagcctctaaatatcaacaaarttatcacttgatagactagaattaaacaagcaagtggttccaagaaatggcacgagtgtattaatcataaaataaaatttctac

SEQ ID NO: 198609 - DNA, 595 bp, Homo sapiens
acatcatggtagctgtgggtcaaagggcatgcacgctctgggatgtacattgccatgcattgctcatgatcagcctttctcatgtcaaaatgttttgtgaccaccagaagggctggttctgcttttattatccattgactgaggagtagaaatgacatggcatgtatgcaggatatttaaccatcgtatagataatccttgtgcacaagtgcattctatattctttcccaataggtctacatctgccagagttgaaataaaataaaacaaaacaaacctatttagcaccttctgtgtagcaggtccattcatgtatgttgttgtatttcattctcagaattcttatgacctaggcattttaaamatttttttaaaaatattgagttgacaaggattgtgtatatttaatgcatacaatgtgatgatttcatatatgtatatattgtgtactaattatcacaatcaaatttattacatccattaccacctatgctgtacattaaatctccagaatttgttcatcttataactgaaagtttacaccctttgattaatagcttcccattttccccacctccagcccttggcaaccacc

SEQ ID NO: 198610 - DNA, 517 bp, Homo sapiens
agagaaaagaaggaagttcttaaagcgctgccaaacaccttggtctttttcttcacaacttttatttttatctctagaaggggtcttagccctcctagtctccaggtatgagaatctaggcaggggcaggggagttacagtcccttgtacagatagaaaaacagggttcaaaacgaatcagtttgcaagaggcagaatccagggctgcttacttcccagtggggtctgttsttcactctccagctcaccctaggtctcccaggagccctgtcccttggatgtcttatgagagatgtccagggcttctcttgggctggggtatgacttcttgaaccgacaaaattccatgaagagagctaagagaacagtccattcaggtatctggatcacatagagaaacagagaacccactatgaagagtcaaggggaaagaggaatatagacagaaacaaagagacatttctctgcaaaaccccccaaatgccttgcagtcacttggtctgagcaagcctgccct

SEQ ID NO: 198611 - DNA, 523 bp, Homo sapiens
attctgtagggcatattcatgatgaatcaagctcttaatagcaattacttacattgttgaggcttactcctactgagtgctttttatacattgttcatttaatcttaccaatgcaatagtacagcttaggtactattaatacctccacttgacagaaaagtaacccagggctcagaaaggttagacaacttggctgaggttacacagcatgtaaaaggtcaattgtgttcccaaactggacttttattgaactacagactatgctgttaaccattgaccaagttatttcccaaagtatgacccgcctatactcaaatcttaccccattctttaacagatgatactttatccattgcaaccacttcctgtcaggattctgagttgacatagagtgtttsagcagtgattatttaagccaattacatcaggatctttaggtgtagacctgggaactgatatttttatcaagctcatgaggtgttccatagcatgttaatgactgagagccactgtcaatagaatt

SEQ ID NO: 198612 - DNA, 515 bp, Homo sapiens
atttatagaacattatttatcatttctgtgttcagctatgtaaaacaatgaattcgttttgagtaaaccagtcttaaactgttggtgatcctattggctttgttttgtgacaaagcaaggtggtgggatgggaggggaagagyagaaaactctgaagaggggaagtcagcagaaaggaaatgacggtaatgcctctccccaaataatgaaactctattttttaaaacaatgattattttataaagtattatgcacccagtgtataatgcatatgcactaggtaaattcatgcttgatatatatattcatgcatttaagcttatttttctcatgagtcaagctctcttaaaaattattcattgtgcttcaaattctaacagtgtctccaagggctaagtattattaatattcccatttaacagaagaggaaatgttggctcagagagttaaaacaacttgtccatggccatgcagcgaataaatagtgtaactaatatgcaatcctatgagcattc

SEQ ID NO: 198613 - DNA, 558 bp, Homo sapiens
cgagtctttgctgtcaccctatcaggtaagcgtgcttagaagttacacgaagcacacggctcagtgtttggcccatggtaagggcctaaaaagggatagccccagtggtggggatgctgctgctgctgaccattaaccccagtctgctccaccttcttccaggcagtctgtgagatgtttgatgtccgaggcaaacagcacattcagatccccaagctctacacctccagtgtgaccaggcacctgcaccacttcaggctcatgcaggactcacagcctttggacctcagctaaaggacttgcttctcttcagcacacggggcttgtttgtgttggggtctgagccctgagcccatggtcaaggagacccccaggtctttctgaacagagacagctggcctgggggcctccctctcactgcgtgcaagaggctgttagggtgcaagactcaaggcgctgagggaggctgtttcaggagggagccccaggagggtggtggagacagaagggggcagcatctgccgaggccctmctgtgtgcctggcaccgtgtggggtt

SEQ ID NO: 198614 - DNA, 472 bp, Homo sapiens
tgaacctcccgcctcgacctctcaaattgctgggattacaggtgtgagccaccacacccggcctaaatttcttatgtgccatgggactgcaaaacatcattattaggggcagctggatggaaggtataggaggatactatagtgccttttcaatatttctgtctaaaatctaaaatcatttcaacaggaaacatttatttcaaaacatgaaggtggttatccttccatgagtttgaagtacaaaggcaggctcacggtgtcgtcagaattcaraacgatggtcgtggggctgggggtgctgggaggggctgggcatggttggctttgtgatctggggtctggtgtgttccatctctgaatctctctcgagctgcactctttcttaatacattttcataagtttaaccaaaaataaaacgaggatgcgaagcttgcttgggttgttaagcctagggaaattatccagccatga

SEQ ID NO: 198615 - DNA, 503 bp, Homo sapiens
gtgtgaaagaacctggtccttccaggctggggctggtggctcgagctgcgcacactggggcttcagtctccagagtcagtgaccttccccatgagggtcgcctgagccctccaggacgctgggtcagacaaggtcttgaagctcctcatggggggcactcatttgagtggggatgtggctcctggagagaggggcttgcccagggcttgaggcttccctgagccctctcaagtcgggtcctggcccagtctgcccatgaggctgggcctgagccccagccatkgccctgggatgacccctcttgggcagagggttttgcttgtgtgtcctttggggacccgcctgagcctcctgtgggctgggagtgagccagacccccgggctggggaagcagggcactgcagggcaaggaaggtccctgagccagggtctccctatgcctccttaccccgtcaatcaatatccggatgaggcagcctaacggggaacactgcccacataga

SEQ ID NO: 198616 - DNA, 486 bp, Homo sapiens
gcaggtgtgaaagaacctggtccttccaggctggggctggtggctcgagctgcgcacactggggcttcagtctccagagtcagtgaccttccccatgagggtcgcctgagccctccaggacgctgggtcagacaaggtcttgaagctcctcatggggggcactcatttgagtggggatgtggctcctggagagaggggcttgcccagggcttgaggcttccctgagccctctcaagtcgggtcctggcccagtctgcccatgaggctgggcctgagccccagccattgccctgggatgaccccycttgggcagagggttttgcttgtgtgtcctttggggacccgcctgagcctcctgtgggctgggagtgagccagacccccgggctggggaagcagggcactgcagggcaaggaaggtccctgagccagggtctccctatgcctccttaccccgtcaatcaatatccggatgaggcagcctaac

SEQ ID NO: 198617 - DNA, 420 bp, Homo sapiens
ttctagacatgttatctaaaacctggttcatctgtccttccacacagggcctaggggatgccaaattccaggggccagaaagagcttgggataaaawgaaacttcaaggggacggctttgacctgggctgagtctgcctgtgccatccaactggagtctcaagtcctgaggcaggacgtccagatgccccagtgcagggtcctcctgatcaacacctgctcccctgtactcattagcaacctcacccaccctactctcaaagcacacttggctctcgtatccaggagctctgcatctgtagattcagcaacagcagatggaaaatattcagaaaataaattggacggttatgtttctattgaacatgtgcagagtttgttcttgtcattattccctaaagaatccagtatcacgaccatt

SEQ ID NO: 198618 - DNA, 420 bp, Homo sapiens
ttctagacatgttatctaaaacctggttcatctgtccttccacacagggcctaggggatgccaaattccaggggccagaaagagcttgggataaaaagaaacttcaaggggacggctttgacctgggcygagtctgcctgtgccatccaactggagtctcaagtcctgaggcaggacgtccagatgccccagtgcagggtcctcctgatcaacacctgctcccctgtactcattagcaacctcacccaccctactctcaaagcacacttggctctcgtatccaggagctctgcatctgtagattcagcaacagcagatggaaaatattcagaaaataaattggacggttatgtttctattgaacatgtgcagagtttgttcttgtcattattccctaaagaatccagtatcacgaccatt

SEQ ID NO: 198619 - DNA, 420 bp, Homo sapiens
ttctagacatgttatctaaaacctggttcatctgtccttccacacagggcctaggggatgccaaattccaggggccagaaagagcttgggataaaaagaaacttcaaggggacggctttgacctgggctgagtctgcctgtgccatccaactggagtctcaagtcctgaggcagkacgtccagatgccccagtgcagggtcctcctgatcaacacctgctcccctgtactcattagcaacctcacccaccctactctcaaagcacacttggctctcgtatccaggagctctgcatctgtagattcagcaacagcagatggaaaatattcagaaaataaattggacggttatgtttctattgaacatgtgcagagtttgttcttgtcattattccctaaagaatccagtatcacgaccatt

SEQ ID NO: 198620 - DNA, 566 bp, Homo sapiens
atagggttgttttgaagacagttcaaacatgtaaatccatattatggaaatcagcacatggtgatcactcgataaatattacttattgtgaactaaaatttgtgtagttgctaatctatcattagtacaaaatcaaagtttgtttccamactcccacattgcctttattaaactataaatttcttgagaaaaagaaactaaaataaaatcaacaggacatggtctaggtttttgaagagcaaattacataggtaactaattataacacactgtactgtaatcacagagatagaggatgtcccttatcagaacactgactgattcagcagtttccatttccttttctcactctccacaactcacagaagccagctcccagaaaaggaatcacgagtatggagggggttcccctaagaagtgagtgacggaacgcaattcagggtatcaacgagagctgagaggcagagggtggggtgagaaggagtcattgcctgtgatgtaggtttctaatgagacaagtggcagagatacctttatttggaattggtagcaataggggaagatac

SEQ ID NO: 198621 - DNA, 566 bp, Homo sapiens
atagggttgttttgaagacagttcaaacatgtaaatccatattatggaaatcagcacatggtgatcactcgataaatattacttattgtgaactaaaatttgtgtagttgctaatctatcattagtacaaaatcaaagtttgtttccacactcccacattgcctttattaaactataaatttcttgagaaaaagaaactaaaataaaatcaacaggacatggtctaggtttttgaagagcaaattacataggtaactaattataacacactgtactgtaatcacagagatagaggatgtcccttatcagaacactgactgattcagcagtttccatttccttttctcactctccacaactcacagaagccagctcccagaaaaggaatcacgagtatggagggggttcccctaagaagtgagtgasggaacgcaattcagggtatcaacgagagctgagaggcagagggtggggtgagaaggagtcattgcctgtgatgtaggtttctaatgagacaagtggcagagatacctttatttggaattggtagcaataggggaagatac

SEQ ID NO: 198622 - DNA, 531 bp, Homo sapiens
actggcatccctgcagctttgggaraccatgctagtgtagatgccagctcacgccagcgggcctgactgggagaccttgggctggggttctggtctggggctcctaggcctgatgggaggagagttcagccccaggtttcctgtacttcagctcatatccacacaatggtaattattgaaatgagagactcaaaagaagatggaacgtgaacttttttgttgtcccatgtggacacctgtgttcggtttccagttctacctttgctgtctgtgtgttcttaagtaactcacttaaacctttctgagtctcattttcttcatttataaaataaaagacgtaacatttatgtcagatattgtcctgaggattaaatgggagaatgaacaagcctcttctgcattcccctggcatccagtgggtggaggccagagaagctgctaaacatcctgccaggtgcaggacagcccccatcacaaagaattgaccggatcctgatgtcagtaaggcagaattgaggatccttggtgtgg

SEQ ID NO: 198623 - DNA, 531 bp, Homo sapiens
actggcatccctgcagctttgggagaccatgctagtgtagatgccagctcacgccagcgggcctgactgggagaccttgggctggggttctggtctggggctcctaggcctgatgggaggagagttcagccccaggtttcctgtacttcagctcatatccacacaatggtaattattgaaatgagagactcaaaagaagatggaacgtgaacttttttgttgtcccatgtggacacctgtgttcggtttccagttctacctttgctgtctgtgtgttcttaagtaactcacttaaacctttctgagtctcattttcttcatttataaaataaaagacrtaacatttatgtcagatattgtcctgaggattaaatgggagaatgaacaagcctcttctgcattcccctggcatccagtgggtggaggccagagaagctgctaaacatcctgccaggtgcaggacagcccccatcacaaagaattgaccggatcctgatgtcagtaaggcagaattgaggatccttggtgtgg

SEQ ID NO: 198624 - DNA, 585 bp, Homo sapiens
agccttgctctgtcgcccaggctggagtgcagtggtgcaatcttggctcactgcaacctccgcttcccaggttcgagccattctcctgcctcagcctcccgagtagctgggattacaggcatgtgtcaccatgcctggcttatttttgtatttttagtagagacggggtttcaccatgttgaccaggctggtctcgaactcctgacctcaggtgatccgcccacctcggcctcccaaagtgctggaattacaagcatgagccactgcacccagtctgttgtttctttttatgatacagtatcttgtcattggttccattttatttactaaataaatggaaaattctgtttactgaagtgtctttcctttataactgataccctgcagaacccctaagttttattttgctttcataaggttgctcttttttaaatttttaatgaaagagtaaggactcaagtaggtcaagtggcgacagttttatgtgtagcatatggaagtgccattaaatgaatgacctgtcttgaattgatagagcatctgyctttattcccattgctgccattccagataaagaacaaagca

SEQ ID NO: 198625 - DNA, 418 bp, Homo sapiens
atgatgtgtaatacaatgcagatgctacataaatggtcgtgatactgtattctttagggaatgatgacaagaacaaagtctgcacatgttcaatagaaacataaccrtccaatttattttctgaatattttccatctgctgttgctgaatctatagatgcagagctcctggatacgagagccaagtgtgctttgagagtagggtgggtgaggttgctaatgagtacaggggagcaggtgttgatcaggagggccctgcactggggcatctggacgtcctgcctcaggacttgagactccagttggatggcacagacagactcagcccaggtcaaagccgtccccttgaagtttcattttatcccaagctctttctggaccctggaatttggcatcccctaggccctgcgtggaaggac

SEQ ID NO: 198626 - DNA, 418 bp, Homo sapiens
atgatgtgtaatacaatgcagatgctacataaatggtcgtgatactgtattctttagggaatgatgacaagaacaaagtctgcacatgttcaatagaaacataaccatccaatttattttctgaatattttccatctgctgttgctgaatcyatagatgcagagctcctggatacgagagccaagtgtgctttgagagtagggtgggtgaggttgctaatgagtacaggggagcaggtgttgatcaggagggccctgcactggggcatctggacgtcctgcctcaggacttgagactccagttggatggcacagacagactcagcccaggtcaaagccgtccccttgaagtttcattttatcccaagctctttctggaccctggaatttggcatcccctaggccctgcgtggaaggac

SEQ ID NO: 198627 - DNA, 418 bp, Homo sapiens
atgatgtgtaatacaatgcagatgctacataaatggtcgtgatactgtattctttagggaatgatgacaagaacaaagtctgcacatgttcaatagaaacataaccatccaatttattttctgaatattttccatctgctgttgctgaatctayagatgcagagctcctggatacgagagccaagtgtgctttgagagtagggtgggtgaggttgctaatgagtacaggggagcaggtgttgatcaggagggccctgcactggggcatctggacgtcctgcctcaggacttgagactccagttggatggcacagacagactcagcccaggtcaaagccgtccccttgaagtttcattttatcccaagctctttctggaccctggaatttggcatcccctaggccctgcgtggaaggac

SEQ ID NO: 198628 - DNA, 418 bp, Homo sapiens
atgatgtgtaatacaatgcagatgctacataaatggtcgtgatactgtattctttagggaatgatgacaagaacaaagtctgcacatgttcaatagaaacataaccatccaatttattttctgaatattttccatctgctgttgctgaatctatagatgcagagctcctggatacgagagccaagtgtgctttgagagtagggtgggtgaggttgctaatgagtacaggggagcaggtgttgatcaggaggrccctgcactggggcatctggacgtcctgcctcaggacttgagactccagttggatggcacagacagactcagcccaggtcaaagccgtccccttgaagtttcattttatcccaagctctttctggaccctggaatttggcatcccctaggccctgcgtggaaggac

SEQ ID NO: 198629 - DNA, 477 bp, Homo sapiens
caataaaaatgttgcccagggccaggcatggtggctcttgcctggaatcccagcactttgggaggccaaggcaggaggatcacctgaacccaggagttcaaaaccaacytgggcaacacaggaaaaataaaaaaaaattagtcatacgtggtgacacaaacctgtggtcccagctactccaaaggctgaggcaagagcattgctgaagcctaggaggttgaagctggagtgagccatgaacatgccactgcactcccatctaggtgacagagtgagaccctgtctcgaaaaagaaaaaaaaatgtgcagggtgtagcacaataactagaagtcatgctggtggtgcctcttttactattcagactgtaagcattttccaaccccagggtttctgcatctgcttgcaaagtctccagatatctaaacactttatgtcattcaggcctctgctcaaatcacttttttttttttttttga

SEQ ID NO: 198630 - DNA, 494 bp, Homo sapiens
atgtgggcagtgttccccgttaggctgcctcatccggatattgattgacggggtaaggaggcatagggagaccctggctcagggaccytccttgccctgcagtgccctgcttccccagcccgggggtctggctcactcccagcccacaggaggctcaggcgggtccccaaaggacacacaagcaaaaccctctgcccaaggggggtcatcccagggccatggctggggctcaggcccagcctcatgggcagactgggccaggacccgacttgagagggctcagggaagcctcaagccctgggcaagcccctctctccaggagccacatccccactcaaatgagtgccccccatgaggagcttcaagaccttgtctgacccagcgtcctggagggctcaggcgaccctcatggggaaggtcactgactctggagactgaagccccagtgtgcgcagctcgagccaccagccccagcctggaaggaccaggttctt

SEQ ID NO: 198631 - DNA, 495 bp, Homo sapiens
tatgtgggcagtgttccccgttaggctgcctcatccggatattgattgacggggtaaggaggcatagggagaccctggctcagggaccttccttgccctgcagtgccctgcttccccagcccgggggtctggctcactcccagcccacaggaggctcaggcgggtccccaaaggacacacaagcaaaaccctctgcccaagrggggtcatcccagggccatggctggggctcaggcccagcctcatgggcagactgggccaggacccgacttgagagggctcagggaagcctcaagccctgggcaagcccctctctccaggagccacatccccactcaaatgagtgccccccatgaggagcttcaagaccttgtctgacccagcgtcctggagggctcaggcgaccctcatggggaaggtcactgactctggagactgaagccccagtgtgcgcagctcgagccaccagccccagcctggaaggaccaggttctt

SEQ ID NO: 198632 - DNA, 495 bp, Homo sapiens
tatgtgggcagtgttccccgttaggctgcctcatccggatattgattgacggggtaaggaggcatagggagaccctggctcagggaccttccttgccctgcagtgccctgcttccccagcccgggggtctggctcactcccagcccacaggaggctcaggcgggtccccaaaggacacacaagcaaaaccctctgcccaaggggggtcatcccagggcmatggctggggctcaggcccagcctcatgggcagactgggccaggacccgacttgagagggctcagggaagcctcaagccctgggcaagcccctctctccaggagccacatccccactcaaatgagtgccccccatgaggagcttcaagaccttgtctgacccagcgtcctggagggctcaggcgaccctcatggggaaggtcactgactctggagactgaagccccagtgtgcgcagctcgagccaccagccccagcctggaaggaccaggttctt

SEQ ID NO: 198633 - DNA, 494 bp, Homo sapiens
atgtgggcagtgttccccgttaggctgcctcatccggatattgattgacggggtaaggaggcatagggagaccctggctcagggaccttccttgccctgcagtgccctgcttccccagcccgggggtctggctcactcccagcccacaggaggctcaggcgggtccccaaaggacacacaagcaaaaccctctgcccaaggggggtcatcccagggccatggctggggctcaggcccagcctcatgggcagactgggccaggacccgacttgagagggctcagggaagcctcaagccctgggcaagcccctctctccaggagccacatccccactcaaatgagtgccycccatgaggagcttcaagaccttgtctgacccagcgtcctggagggctcaggcgaccctcatggggaaggtcactgactctggagactgaagccccagtgtgcgcagctcgagccaccagccccagcctggaaggaccaggttctt

SEQ ID NO: 198634 - DNA, 494 bp, Homo sapiens
atgtgggcagtgttccccgttaggctgcctcatccggatattgattgacggggtaaggaggcatagggagaccctggctcagggaccttccttgccctgcagtgccctgcttccccagcccgggggtctggctcactcccagcccacaggaggctcaggcgggtccccaaaggacacacaagcaaaaccctctgcccaaggggggtcatcccagggccatggctggggctcaggcccagcctcatgggcagactgggccaggacccgacttgagagggctcagggaagcctcaagccctgggcaagcccctctctccaggagccacatccccactcaaatgagtgccccccatgaggagcttcaagaccttgtctgacccagcgtcctggagggctcaggcgaccctcatggggaaggtcactgactcwggagactgaagccccagtgtgcgcagctcgagccaccagccccagcctggaaggaccaggttctt

SEQ ID NO: 198635 - DNA, 469 bp, Homo sapiens
ggctcatggctggataatttccctaggcttaacaacccaagcaagcttcgcrtcctcgttttatttttggttaaacttatgaaaatgtattaagaaagagtgcagctcgagagagattcagagatggaacacaccagaccccagatcacaaagccaaccatgcccagcccctcccagcacccccagccccacgaccatcgttctgaattctgacgacaccgtgagcctgcctttgtacttcaaactcatggaaggataaccaccttcatgttttgaaataaatgtttcctgttgaaatgattttagattttagacagaaatattgaaaaggcactatagtatcctcctataccttccatccagctgcccctaataatgatgttttgcagtcccatggcacataagaaatttaggccgggtgtggtggctcacacctgtaatcccagcaatttgagaggtcgaggcggga

SEQ ID NO: 198636 - DNA, 477 bp, Homo sapiens
tgggccagggctcatggctggataatttccctaggcttaacaacccaagcaagcttcgcatcctcgttttatttttggttaaacttatgaaaatgtattaagaaagagtgcagctcgagagagattcagagatggaacacaccagaccccagatcacaaagccaaccatgcccrgcccctcccagcacccccagccccacgaccatcgttctgaattctgacgacaccgtgagcctgcctttgtacttcaaactcatggaaggataaccaccttcatgttttgaaataaatgtttcctgttgaaatgattttagattttagacagaaatattgaaaaggcactatagtatcctcctataccttccatccagctgcccctaataatgatgttttgcagtcccatggcacataagaaatttaggccgggtgtggtggctcacacctgtaatcccagcaatttgagaggtcgaggcggga

SEQ ID NO: 198637 - DNA, 477 bp, Homo sapiens
tgggccagggctcatggctggataatttccctaggcttaacaacccaagcaagcttcgcatcctcgttttatttttggttaaacttatgaaaatgtattaagaaagagtgcagctcgagagagattcagagatggaacacaccagaccccagatcacaaagccaaccatgcccagcccctcscagcacccccagccccacgaccatcgttctgaattctgacgacaccgtgagcctgcctttgtacttcaaactcatggaaggataaccaccttcatgttttgaaataaatgtttcctgttgaaatgattttagattttagacagaaatattgaaaaggcactatagtatcctcctataccttccatccagctgcccctaataatgatgttttgcagtcccatggcacataagaaatttaggccgggtgtggtggctcacacctgtaatcccagcaatttgagaggtcgaggcggga

SEQ ID NO: 198638 - DNA, 477 bp, Homo sapiens
tgggccagggctcatggctggataatttccctaggcttaacaacccaagcaagcttcgcatcctcgttttatttttggttaaacttatgaaaatgtattaagaaagagtgcagctcgagagagattcagagatggaacacaccagaccccagatcacaaagccaaccatgcccagcccctcccagcacccccagccccacgaccatcgttctgaattctgacgacaccgtgagcctgcctttgtacttcaaactcatggaaggataaccaccttcatgttttgaaataaatgtttcctgttgaaatgmttttagattttagacagaaatattgaaaaggcactatagtatcctcctataccttccatccagctgcccctaataatgatgttttgcagtcccatggcacataagaaatttaggccgggtgtggtggctcacacctgtaatcccagcaatttgagaggtcgaggcggga

SEQ ID NO: 198639 - DNA, 516 bp, Homo sapiens
caagtgcacatggatttcaatattatcatgatggcagttctcccccaaattgatttattaacctaacacaatccctatcaaacacccaggaagctttttttgtgagaattgataacctaatttaaaaatatctatataaaaatgcaaaggatctggagtagccaaacaattttttaaaagagaacaaattagggactgacattactcaatatgaaacttactctaaaactacactttttaagactatatggtattagcacaaggatagatatatagatcagtggagtggaattataagtctagaaacaaaccytcacatttacaaccaactgattttctaaaaagattccagaaaactcagttcaatgatgaaagggttatcttttcaaaaaacattgctgggacaatttaataaccacgtgccaaaaaaaaaaaaagagaaagaacttaggctctcatttcacagcataaacagaaaaattaatccacaatggatcatagacataaatgtaagag

SEQ ID NO: 198640 - DNA, 516 bp, Homo sapiens
caagtgcacatggatttcaatattatcatgatggcagttctcccccaaattgatttattaacctaacacaatccctatcaaacacccaggaagctttttttgtgagaattgataacctaatttaaaaatatctatataaaaatgcaaaggatctggagtagccaaacaattttttaaaagagaacaaattagggactgacattactcaatatgaaacttactctaaaactacactttttaagactatatggtattagcacaaggatagatatatagatcagtggagtggaattataagtctagaaacaaaccctcacatttacaaccaactgattttytaaaaagattccagaaaactcagttcaatgatgaaagggttatcttttcaaaaaacattgctgggacaatttaataaccacgtgccaaaaaaaaaaaaagagaaagaacttaggctctcatttcacagcataaacagaaaaattaatccacaatggatcatagacataaatgtaagag

SEQ ID NO: 198641 - DNA, 460 bp, Homo sapiens
tttctgtttattgggagactgcctttccctcgtggtggctgcaaccaattattattttagagagacagttaacaaccgcctgaccatcacctaatggtcacctgacattcctggtgggggttgggggaacctctcctgccctgctcatgtctgactagctacctactgtaacaactcctctatggcaccttaacctaaaagcatggagacctataccattattttatacatgaggacactcaggagacgttaactctacgattgcaaatagttttcaccttacatacgaattccctggattggaaaatgtgtcccgaatttaaaagagtccaccccactcactaccgmtaaagaatgattttctcatccctaggatgtgacattatctggaaagaaatatagcttcaaatagcccaagaaatagaggtcaatgtcactggctgttttcaatgtaccataa

SEQ ID NO: 198642 - DNA, 634 bp, Homo sapiens
aaagatgggcccgttggcaatgttgtccatgtggatgctggggatggtgggggcggagtctgactgtgcatgtgggggcctagggcagatggcgcccatgccacacctgggggcctgaggtccttccaacctaagcaattggacggacgggagtcagaaagggttcagtgagagtgctgactttgctgttgctgctgctgtttttagtgcatggctacmgcatttgctcctgacatctcaagttgggggatgtgaatctgggattctctcccagccactcttggctccccatggggaatcccttcacatctcattagacctgcctgccgccatctggatcaagtcgaccttgatcccaatcgggcgggaggggtaggtgagcagagggaggtgcgtgatgctgctctttgcgaagaagcaggcctgcctgtgtcccaagagcaaagaggcaaagagctgggacttaaagtgcagttggcctgaattcaaagcccagctctgctgtttactgcatcattttgggcaagctactcaacctctctgcatcctagtttcctcgctcatgaagtgaagtcgccaaaacttgtttcaagagttgctgtgaggtttaaatgggggagagagatgcaaaccc

SEQ ID NO: 198643 - DNA, 422 bp, Homo sapiens
ctaaaattttatttttgggtctgcaatcttctaggagaaaggaaacaaatcttatattctatgtcmcccttttaaaattgcaatgtttatctatcctcgaatatacattagcatgttgcagtaattagtgctgtcttatattttgctatttttactacgacaaaggggatgccagggaaattccccttgtgagtcctgagtatccaatcaaatgttgccttatttcatgacttcttccttttggtcttcagactagcccttaaagtggctcaacttaactgtaggccacaagctatatgaggggtcttcaaaaagctcatggaaaatgcatataatgaaagaactatgcattggaaacggaaatggaaactatggtttccattttttgcaccaaaataaactcgtactaacttgttataacg

SEQ ID NO: 198644 - DNA, 601 bp, Homo sapiens
aagcttagccatatggtatactatataattaactacattttctttctcataccacgctttttttcttttttgctttcctaagataatttttctttttagatttttatgtgccaattgctaatttatcttcattcttataaatctcctaaaatgtaaattgcttctccatacattcaaacatagtaggtaatttatcaatttttttttcccttggggccacccctcctgtaaccctctgtcctcttgtttcagactgattctgttatgataataccaggggttccgtctacgtcctgctgctcaccgamcagaacaccaatcactgagcgattatttccaaggaggacggctttaactgggtgctgcagcctaggagatgggagatcagtctcaaatccacctccctgatggactaaaattaggggtttacatagcagggaagaaaagtaacaacgtgtaggaaaacaggaactagggaggggtaaggaagcaattgtgatgaatgaggggtctggcatctcattggctgatgcgatgatctggtgagttgcagttctttgatactattttttgagaggtctgagggtcttttcccagggaa

SEQ ID NO: 198645 - DNA, 581 bp, Homo sapiens
cgctttttttcttttttgctttcctaagataatttttctttttagatttttatgtgccaattgctaatttatcttcattcttataaatctcctaaaatgtaaattgcttctccatacattcaaacatagtaggtaatttatcaatttttttttcccttggggccacccctcctgtaaccctctgtcctcttgtttcagactgattctgttatgataataccaggggttccgtctacgtcctgctgctcaccgaccagaacaccaatcactgagcgattatttccaaggargacggctttaactgggtgctgcagcctaggagatgggagatcagtctcaaatccacctccctgatggactaaaattaggggtttacatagcagggaagaaaagtaacaacgtgtaggaaaacaggaactagggaggggtaaggaagcaattgtgatgaatgaggggtctggcatctcattggctgatgcgatgatctggtgagttgcagttctttgatactattttttgagaggtctgagggtcttttcccagggaaagaacttagataaaacaaatataaatttcaagct

SEQ ID NO: 198646 - DNA, 581 bp, Homo sapiens
cgctttttttcttttttgctttcctaagataatttttctttttagatttttatgtgccaattgctaatttatcttcattcttataaatctcctaaaatgtaaattgcttctccatacattcaaacatagtaggtaatttatcaatttttttttcccttggggccacccctcctgtaaccctctgtcctcttgtttcagactgattctgttatgataataccaggggttccgtctacgtcctgctgctcaccgaccagaacaccaatcactgagcgattatttccaaggaggamggctttaactgggtgctgcagcctaggagatgggagatcagtctcaaatccacctccctgatggactaaaattaggggtttacatagcagggaagaaaagtaacaacgtgtaggaaaacaggaactagggaggggtaaggaagcaattgtgatgaatgaggggtctggcatctcattggctgatgcgatgatctggtgagttgcagttctttgatactattttttgagaggtctgagggtcttttcccagggaaagaacttagataaaacaaatataaatttcaagct

SEQ ID NO: 198647 - DNA, 531 bp, Homo sapiens
ctgggccctgctgaatccagtgcttacacaagctgagagccaaacacagcttcttcctcttccaaacccacccaccagcccgcaacatccaccatggtaagcatttcccaggcccaggtcaggacccttgcttcaactttagcttgcaaaaggcccctttttaaagaggcctcttagctttctctcttcccttgctaataaaactgttccctaccatcaccatgttgcagtaagagagacctctcccttcttccaacccctctcggtctataacayaacctacagcaggttggccccatccaatcagtctgaattgcttcatgccaaggaaattgctgcttttattaaaaataaaagcacactaggcaggcgaagggctgtgaaaagtatgagtctggcataattatgaaggtcgaggttaaggttaccaaaagagacatgcaaagatttcccgaaagcctgggggaatcaagatgtatatctacgtgagtatagacacacagatgaaacacagagggaatttatgcagca

SEQ ID NO: 198648 - DNA, 497 bp, Homo sapiens
aagggggaagggagggtcaactggtcaaagcccattcatacatgcaacaactagaaaccacagtattgccgcatcagcacaagattttaatttacggcgcattgagccccaccgtaccttccgccaacacctcgtccactgtgacctgctgtcgcccgatgccgaagactcttccgatgtagccactgcccaggcccgaggtgctgccccctcctccgctggagccggagcccaggccagagccgccctgctctcgccgggagtcgaaaaacttcttcatcttgcgaatagggagcagcaaagcaaaataccgatggtttctagattttttttttttttttttttttttaaaaaaagagatccaaggatttcttctcaaatttcacctcggagaggagccacccgaatmcggccgtgggggtgggggctgagggaggatgcctataggaatatgcgtgtcaatcgcgcagcgggtcccctcctcctccagaaagcga

SEQ ID NO: 198649 - DNA, 603 bp, Homo sapiens
gactgggttaacagtagcgtttgttgttgctgctgctgcagcttgtttcaagtagtgccattgtaattaaactccgtgaagagatagcatcttttcttccggagagagtcagtgttgtcacctcagttcacgaattcatgtagccacctccagggtgaaatgcagcccctmttccctcaaactaagcccacgaaggcatgttctctgcactttccttaaaaggccagatttttgtctgaggaagtttgaagcagatcttaaaatagatgagaaagctcatttggaattagactcattgacccccatttctctcagcacttatttgtcttgactgacttttttaaacaagctgtgctaggtcctaaaatcaatctgatgctatctcagtttttacctttctagacttctctggtaccagactagtccaggcttacacaaatctcaagtcttacttcagtgatacaaaaactcccaatatgcttaaggtagctaacatgcatttatttaacacccacgtgaatgctctgatcagaagctgagggaagaggtttaaaaaacaaaaaacatgactagattccttgccctccattccctcacagacta

SEQ ID NO: 198650 - DNA, 603 bp, Homo sapiens
gactgggttaacagtagcgtttgttgttgctgctgctgcagcttgtttcaagtagtgccattgtaattaaactccgtgaagagatagcatcttttcttccggagagagtcagtgttgtcacctcagttcacgaattcatgtagccacctccagggtgaaatgcagcccctattccctcaaactaagcccacgaaggcatgttctctgcactttccttaaaaggccagatttttgtctgaggaagtttgaarcagatcttaaaatagatgagaaagctcatttggaattagactcattgacccccatttctctcagcacttatttgtcttgactgacttttttaaacaagctgtgctaggtcctaaaatcaatctgatgctatctcagtttttacctttctagacttctctggtaccagactagtccaggcttacacaaatctcaagtcttacttcagtgatacaaaaactcccaatatgcttaaggtagctaacatgcatttatttaacacccacgtgaatgctctgatcagaagctgagggaagaggtttaaaaaacaaaaaacatgactagattccttgccctccattccctcacagacta

SEQ ID NO: 198651 - DNA, 603 bp, Homo sapiens
gactgggttaacagtagcgtttgttgttgctgctgctgcagcttgtttcaagtagtgccattgtaattaaactccgtgaagagatagcatcttttcttccggagagagtcagtgttgtcacctcagttcacgaattcatgtagccacctccagggtgaaatgcagcccctattccctcaaactaagcccacgaaggcatgttctctgcactttccttaaaaggccagatttttgtctgaggaagtttgaagcagatcttaaaatagatgagaaagctcatttggaattagactcattgacccccatttctctcagcacttatttgtcttgactgasttttttaaacaagctgtgctaggtcctaaaatcaatctgatgctatctcagtttttacctttctagacttctctggtaccagactagtccaggcttacacaaatctcaagtcttacttcagtgatacaaaaactcccaatatgcttaaggtagctaacatgcatttatttaacacccacgtgaatgctctgatcagaagctgagggaagaggtttaaaaaacaaaaaacatgactagattccttgccctccattccctcacagacta

SEQ ID NO: 198652 - DNA, 603 bp, Homo sapiens
gactgggttaacagtagcgtttgttgttgctgctgctgcagcttgtttcaagtagtgccattgtaattaaactccgtgaagagatagcatcttttcttccggagagagtcagtgttgtcacctcagttcacgaattcatgtagccacctccagggtgaaatgcagcccctattccctcaaactaagcccacgaaggcatgttctctgcactttccttaaaaggccagatttttgtctgaggaagtttgaagcagatcttaaaatagatgagaaagctcatttggaattagactcattgacccccatttctctcagcacttatttgtcttgactgacttttttaaasaagctgtgctaggtcctaaaatcaatctgatgctatctcagtttttacctttctagacttctctggtaccagactagtccaggcttacacaaatctcaagtcttacttcagtgatacaaaaactcccaatatgcttaaggtagctaacatgcatttatttaacacccacgtgaatgctctgatcagaagctgagggaagaggtttaaaaaacaaaaaacatgactagattccttgccctccattccctcacagacta

SEQ ID NO: 198653 - DNA, 483 bp, Homo sapiens
aattttagaaatgaaagacataatcaccaaaatttaaagcaaatggttaaatagcagataakacacaattaaagagaaagaaccaattaactagaagttaaagctgaggctatttgccagaagggagggagggagagagagagagagagagagagaatatgagtgaaaagttgagatatggaagataggaacatactcaaaatagaagggagagataagagagataatagaagggagggggaagatgacaatggctgagaatgtccaggactgaaaaaagatgtaactcttcagattccagaagcataagtcctaaaagcatagagaaaagcaaatccacatatagctacatttactgacaaagacatacagacggacttaagaactcaaagagaggaaatatagattactcacaagaaaacagcaattagacagaagacttctcatgacaacaatacaggccagaaacaaaggattaatatc

SEQ ID NO: 198654 - DNA, 501 bp, Homo sapiens
attttagaaatgaaagacataatcaccaaaatttaaagcaaatggttaaatagcagataagacacaattaaagagaaagaaccaattaactagaagttaaagctgargctatttgccagaagggagggagggagagagagagagagagagagagaatatgagtgaaaagttgagatatggaagataggaacatactcaaaatagaagggagagataagagagataatagaagggagggggaagatgacaatggctgagaatgtccaggactgaaaaaagatgtaactcttcagattccagaagcataagtcctaaaagcatagagaaaagcaaatccacatatagctacatttactgacaaagacatacagacggacttaagaactcaaagagaggaaatatagattactcacaagaaaacagcaattagacagaagacttctcatgacaacaatacaggccagaaacaaaggattaatatcttcaaagtgggtaggaaaa

SEQ ID NO: 198655 - DNA, 485 bp, Homo sapiens
gaaattttagaaatgaaagacataatcaccaaaatttaaagcaaatggttaaatagcagataagacacaattaaagagaaagaaccaattaactagaagttaaagctgaggctatttgccagaagggagggagggagagagagagagagagagagagaatatgagtgaaaagttgagatatggaagataggaacatactcaaaatagaagggagagataagagagataatagaagggagggggaaratgacaatggctgagaatgtccaggactgaaaaaagatgtaactcttcagattccagaagcataagtcctaaaagcatagagaaaagcaaatccacatatagctacatttactgacaaagacatacagacggacttaagaactcaaagagaggaaatatagattactcacaagaaaacagcaattagacagaagacttctcatgacaacaatacaggccagaaacaaaggattaatatc

SEQ ID NO: 198656 - DNA, 485 bp, Homo sapiens
gaaattttagaaatgaaagacataatcaccaaaatttaaagcaaatggttaaatagcagataagacacaattaaagagaaagaaccaattaactagaagttaaagctgaggctatttgccagaagggagggagggagagagagagagagagagagagaatatgagtgaaaagttgagatatggaagataggaacatactcaaaatagaagggagagataagagagataatagaagggagggggaagatgrcaatggctgagaatgtccaggactgaaaaaagatgtaactcttcagattccagaagcataagtcctaaaagcatagagaaaagcaaatccacatatagctacatttactgacaaagacatacagacggacttaagaactcaaagagaggaaatatagattactcacaagaaaacagcaattagacagaagacttctcatgacaacaatacaggccagaaacaaaggattaatatc

SEQ ID NO: 198657 - DNA, 672 bp, Homo sapiens
gaattcagaaaatccctacacttatgattacagttttattaygaagcatacaactcagatacagccaaatggtagagattcatagggcaaggtatggttggggagcaggcacgaaaacagaacttccaagccccctccaggcacaccatcctcccaacacatccatatgtcaccaacccagaagctcctagcctccttgctgcagttttaaccaagtttttatcacacaggtttgactgataaaatcactggctgttgttgagtgaacccaatctccagcccctttcccttcccagagatcagggattgcagctaaaagttctaaccctgtaatcacatggttggttcctccggcaactagtccccatcccgtagctacctgggggcccaccaagagtccaaggatcacattagcacaaactcaggtatggtctaaaggagctcattatgagtaacaaaaaatgttcctatcactcaagaaatcccaagggttatttttaggagtcccaggaatcagggacaagatcaaatatatcatttgtattacaccacattgactcaaagtcaagagtctttactcactaatatatcaagatgcagcactgaaccagtgtagaaaagatcaaccttctcaatcacaggtttgtggcggcaacagatcaactaccatat

SEQ ID NO: 198658 - DNA, 672 bp, Homo sapiens
gaattcagaaaatccctacacttatgattacagttttattatraagcatacaactcagatacagccaaatggtagagattcatagggcaaggtatggttggggagcaggcacgaaaacagaacttccaagccccctccaggcacaccatcctcccaacacatccatatgtcaccaacccagaagctcctagcctccttgctgcagttttaaccaagtttttatcacacaggtttgactgataaaatcactggctgttgttgagtgaacccaatctccagcccctttcccttcccagagatcagggattgcagctaaaagttctaaccctgtaatcacatggttggttcctccggcaactagtccccatcccgtagctacctgggggcccaccaagagtccaaggatcacattagcacaaactcaggtatggtctaaaggagctcattatgagtaacaaaaaatgttcctatcactcaagaaatcccaagggttatttttaggagtcccaggaatcagggacaagatcaaatatatcatttgtattacaccacattgactcaaagtcaagagtctttactcactaatatatcaagatgcagcactgaaccagtgtagaaaagatcaaccttctcaatcacaggtttgtggcggcaacagatcaactaccatat

SEQ ID NO: 198659 - DNA, 672 bp, Homo sapiens
gaattcagaaaatccctacacttatgattacagttttattatgaagcatacaactcagatacagccaaatggtagagattcatagggcaaggtatggttggggagcaggcacgaaaacagaacttccaagccccctccaggcacaccatcctcccaacacatccatatgtcaccaacccagaagctcctagcctccttgctgcagttttaaccaagtttttatcacacaggtttgactgataaaatcactggctgttgttgagtgaacccaatctccagcccctttcccttcccagagatcagggattgcagctaaaagttctaaccctgtaatcacatggttggttcctccggcaactagtccccatcccgwagctacctgggggcccaccaagagtccaaggatcacattagcacaaactcaggtatggtctaaaggagctcattatgagtaacaaaaaatgttcctatcactcaagaaatcccaagggttatttttaggagtcccaggaatcagggacaagatcaaatatatcatttgtattacaccacattgactcaaagtcaagagtctttactcactaatatatcaagatgcagcactgaaccagtgtagaaaagatcaaccttctcaatcacaggtttgtggcggcaacagatcaactaccatat

SEQ ID NO: 198660 - DNA, 435 bp, Homo sapiens
ttggctcccttctccctgctctgctattaaatgccttccttgggttcaaataaagctagtttctctagagcctttctaggtatgcccgtgcgccttcccactccaaacccactgtgaatggaagaccattcattcaccaattcctcatttagttaaaaatcaagacccaccagcaagaaactcagtgcaaggctccttggaggtgctggggtaaagcaagaaactgctagtacttcattaagccagtaggcaactggtttgagccttaattcatgaaaacacacacacttcactctaaattgatttttaaaatatcataaatgccatyggactatctcaaatggcaagaaacggccaaagatgactccagagtagataattgaaatggatgtggggaaagtaagctcattcaggagcactgagcctggggcatcc

SEQ ID NO: 198661 - DNA, 580 bp, Homo sapiens
tatcctcattttacaggtgaggctgagtaagggaagtgggagaactgaggttggatgaaggcctgactctaaagcctatattcttaactgtcccttctgaggggtttttgagcagccagttggaggaaaggaagccccacctgtgtttgccttccccaggacctattctgcctccttgtctaaagagatgtgcctgctcccaggtgtgtttagccccgtgtgggctcacttgggtcaccttgtgctttgaaacaagatagcactgagggctcctgctgcaactggctcccagggcagacaggggtagaggccccacttccctggcattggggagacagatgtggycctcgggcaagaggtgacaaagatcttccatcatcaccccaacaattccaacatggtgacagccccagactgctagaaaagccaacccacatggaggcgagataaaatccagagggctcagaaacatttcaacaaatgctaatatcggtctctccaatacagctctgtcagcaggaagggagaattctgccagcatgcatgcatggggcacactttttggcacaagggaccttgt

SEQ ID NO: 198662 - DNA, 379 bp, Homo sapiens
tagagataatttcctagaatacaacttgggtcatttttttgtctgtatattgtaacaagggaagccttgtgttccctttcttcctgggaatgcacgctcccgcgtgggaggagaaagctgctttcccatttctcccactctttgttgctgccatggtggctggtkcagggagactgcagcgcagggacagaatggggctttttttttgtttttgtttaatttgagaactatgatgtgccatttacacacctaggaaaggtgctagggataaatatacctatacaaacagaagccatgaattctggttttggggaatgagaggagaggttttgggatgggttggtgtttgagctgtgtcttgaggtaccagtaattttct

SEQ ID NO: 198663 - DNA, 523 bp, Homo sapiens
gtagggggaatgaaaaagagaaggagacaaaacatgaaagagatggaaactttcactgaaaatattttcttcacagaatacttgcacatcttttgataggtttatgtataagtgtcttattgcttctttggtactgtgaatgagatttttttttctaattatgtttctgattggttaytgttttgtgtaggaatgcgattgtctttttatgttgttttggtatccagccaaaatgctaaaacgtttattagttctcatattttgtagattcttttggatttttggtgtagacagtcatagcatctacaaataacagcagcttatatgtttctttccaatcttttacttcttatttctttttcttgttttattgcatgggctatggaactgaagatagttgcccttcttattcctgtctttaatgggaatatttctacaatatcaccattaagtatattgtttgctgtctgtaaatctgttaggagtatccttggtcaggttaaggaaacctcctctaacaatc

SEQ ID NO: 198664 - DNA, 545 bp, Homo sapiens
tttcaattgtataaactttttgttattgatgttataaatctgagttttaaaagtagctaactttataacttttagaaattttcatcatactttgagacctcagtctcttcatctttcaagtaaaagggttgggctggatctctaagtgtccttctggccctaacatcctatgggtctgggtgccaaggctttaaacaatgtccagtgagaaaataaagaggatgcaaactctgaccctgggctgtgaatgagtatgctactcccagatttacccagaaggatgttctgtgccctraagagtggccaagtgagtttatggtctggttatcttggctatttgctcttttctagaattgcaatatgtgaataaatttaaaacactttagttttccaactagtaaatataggttgaattggaaaatggaaattttgaagtattcttatttgcaaaacacaatactacaactcagttcttcatttatattgcatggatcaaaaataaaatgaaatgacaaaaattattggtggaaatattctttaaatta

SEQ ID NO: 198665 - DNA, 425 bp, Homo sapiens
gaattcctcgagttgaggtggtgtctrtaagttcagtctcacaccacaagctgaggggcactcactgggtcagcagagatatttgagcctttaaggagttatagcaccaggggcatttgcccctgctctgctggacacacgtccttgcaacagtgtccatttccatgtggctgtctttgggtatgtctgacctgctaggaggttcttcttgctcctgtttcagcagtcagtccatcttccagacactggacaaacctctccgtggtttctccgtggctggagttaggcttagagttgaagctcacaggggctgagtcaaggtgagaatgaaacagacacaaaagcccaacaaaagaggaaaacaatgcatatttgataaccgaaaagggggcggagatgggctttttcttaatttttgactgaaa

SEQ ID NO: 198666 - DNA, 425 bp, Homo sapiens
gaattcctcgagttgaggtggtgtctgtaagttcagtctcacaccacaagctgaggggcactcactgggtcagcagagatatttgagcctttaaggagttatagcaccaggggcatttgcccctgctctgctggacacacgtccttgcaacagtgtccatttccatgtggctgtctttgggtatgtctgacctgctaggaggttcttcttgctcctgtttcagcagtcagtccatcttccagacactggacaaacctctccgtggtttctccgtggctggagttaggcttagagttgaagctcacaggggctgagtcaaggtgagaatgaaacagacacaaaagcccaacaaaagargaaaacaatgcatatttgataaccgaaaagggggcggagatgggctttttcttaatttttgactgaaa

SEQ ID NO: 198667 - DNA, 392 bp, Homo sapiens
tgctgaagtatgatgacttaaaaaaaaactctgaatataaaagtagaacatgctctataaaaagaaattcagacaaaaaaaataaagaagggaacaaaaatcacctgtcaccacgccaccagtgatagccctgataacatttttgtatatttttcccatactattttctgtgcatacagacatatgtttttatgtgagctaaaattgttaacatggtcatgctcttagcattcttcctgcccctgtctactgaagaaaatcttgaatwtgtctatttggtttccttcacttctctcttctagggagaggaacaattattacttgctgagaggagctaagctgatctgcatgatgaaggaatggaatgggctaaggaagacgtccagacaggg

SEQ ID NO: 198668 - DNA, 433 bp, Homo sapiens
ccttagtgaggaaggagattgtgacgcatgctacaacatggaggaatcctgaagacattatgctaagtgaaataagcctgacacaaggacaaatactatatgattccacttatatgagatgcctagaatagtcaaattcatacagactcaggtagaatggtggttgccaggggctgggggatagggggaatggaaagttattgtttaataggtacatagtttaagtttgggatgatgaaaatgatctgtggatggatggtggtgatggttgtacaacagtgtgaatatacttaatgtacaacastgtgaatatacttaacgtgaatatacaaataatgaattgtaaacttaagaagatgattacaatggtaaattttgtgttacgtatattttaaccacacgtgcacacacacacacacacacacacacacac

SEQ ID NO: 198669 - DNA, 537 bp, Homo sapiens
aggtaatatagggcttttcttgtgttgggtacagctgaggcctctaatttaaaagggaagtgagaagaacatcccctttttaaaagaaaggttctggaccttctgagcaggacttgttaaatttacaattttttttaaaaaaagagttctacctttctgaacccatcactcactcaccttycagcgattcattctaaatgctaacagtgtaaatactagggtgagagttgtcctggagtcctgggcatttccctcccagtcaagcctagtcaggggacccaagagatggacccagactgcttgatataggtttcctgcagttaggaagactgggaaagtctaaagaagaggtgtcggctgtcctgcttttgatctagtgggccctgatattacttttgaaggggatcagaatgtgccaccccaaaatatgccactttggcataaggattattttaagctgaaggcaaatgagaagaagcaggtacaagaaaagccctctgccttccccctatttgcctaaaagctggatataatttg

SEQ ID NO: 198670 - DNA, 567 bp, Homo sapiens
caatcacctcccaccagtttcttccctcaacattggaaactacaactcaaaatgagatttgggtggggacacagaaccaaaccatatcattccacttctggaatctcatgtccgtctcacatttcaaaaatgagcctgtagaatcaaaagcaatttagttacttcctagacacaatggaagtacagaaattggggaaattctcccaatccaaaagggagaaattggccaaaacaaagtagatacagaccccatgcaagtctgaaacccatcaggacagtcattaaaccttaaagctccaaagtgatctcttttgactccatgtctcacatccaggccacactgatgaaatgggtgggcttccaaggccaagggtagctccattcctgtggctctgcacagggtacmgcccctatggctgttttcacaggcttgtgctaagtgtctatggctttttcaggcacatagtgcaagctgtcactggatctactattctggtgtctggagaatagtggccctcttctctcagctccactaggtggtgccccagtggggattctgtgtgggga

SEQ ID NO: 198671 - DNA, 636 bp, Homo sapiens
aacaacaacaaaaaaaacagtggagtttgcaatgaagaagtttaagttattactgagtgcagacaatgtcattgtatacttagaagagcccaagtgaataacctgaaaaactacctgataagtaatgagaggtttcaataatgcagtaaagtaaaaaatacgtattttcaatcattcttacatatacaaacaataactgagtacaacatgtagtgtaacaaatatactaaaatagcattttttaatctattagtatggcaaaaatctcaaaacttgatttaaaaaaatctctttttaataaactctatgagaaataggcatgctcacacattgcagataggagtagaaactgccacaatccctacgaaaagcaatttacttatgatattagaaaattataaattcatttactctttgacccagcaatcccattttggtagtttacctacagatatgcctatacctgtttgaaattatgtatatacaactttattcattgaagcattatttgaataattaaamgataattgaccaacaataatgaaagtatagcacaaaaataaaaatgataatggcaagaaatttgaaaaccatgcccattagtagagactgattaaataaattattgtctattta

SEQ ID NO: 198672 - DNA, 245 bp, Homo sapiens
tgcggtctaaccctagccaataggggaacaacacagcagcacgtgcgtcagggataagaaccccttcccctcccttgtccaagtgtgtggtcaccattgctccatctgtgagggcgcacccttctataaaagtaaattgccttgctgaggattgaaaagaaaattttatatttgagtgctatttcttttgtggcaccgaaactttatttataacactmtgtactgaattttaaaaacaaaaaacc

SEQ ID NO: 198673 - DNA, 434 bp, Homo sapiens
atagaagaaaaggagaagagggctaaaagctgcagrtactactaggaatacaccaaaaaaataaaattcaactatctagaagccaattattcagcagtgaaattagcaagaatccccttgtatgtgaagaaaaagcgtaaattttaatgggaacaacactataaatcagcatttatcagtggtctaaaaataacaacaacaatcatatgtcctttaattagtccaaatctaatttttttttcattcttgagagagtagattgaaaataaatctttctacggatgaatctaaagcgtttctagattttggtcataaaaatgatgaaatgcatctagtgtgtcctagttaaaaaagcaggatgccaagaggaacattttagagagactattactaaggttaatactgttttttttaagttaaacataagccagtta

SEQ ID NO: 198674 - DNA, 434 bp, Homo sapiens
atagaagaaaaggagaagagggctaaaagctgcaggtactactaggaatacaccaaaaaaataaaattcaactatctagaagccaattattcagcagtgaaattagcaagaatccccttgtatgtgaagaaaaagcgtaaattttaatgggaacaacactataaatcagcatttatcagtggtctaaaaataacaacaacaatcatatgtcctttaattagtccaaatctaatttttttttcattcttgagagagtagattgaaaataaatctttctacggatgaatctaaagcgtttctrgattttggtcataaaaatgatgaaatgcatctagtgtgtcctagttaaaaaagcaggatgccaagaggaacattttagagagactattactaaggttaatactgttttttttaagttaaacataagccagtta

SEQ ID NO: 198675 - DNA, 336 bp, Homo sapiens
agatctgtaccttggattctacatgttgaggcctatcrtctctgaatcttggggttatgaatcatcttgatgtatcccaagctaggctgagagtttaccaaaatgatttttccatagaaggactagaagacagaagacctccaatatgatgttgggtggtaacatgataaaatgtactatttctactaataattctatgtcttgagtgctatgtgcttgacactgtgctaaagtgctttctgtggcttgtttcataccatgctcaaacagaaccttaggtcggttaaatttctattctcatttttagataagataactgagggctggaaaagttgc

SEQ ID NO: 198676 - DNA, 336 bp, Homo sapiens
agatctgtaccttggattctacatgttgaggcctatcgtctctgaatcttggggttatgaatcatcttgatgtatcccaagctaggctgagagtttaccaaaatgatttttccatagaaggactagaagacagaagacctccaatatgatgttgggtggtaacatgataaaatgtactatttctactaataattctatgtcttgagtgctatgtgcttgacactgtgctaaagtgctttctgtggcttgtttcataccatgctcaaacagmaccttaggtcggttaaatttctattctcatttttagataagataactgagggctggaaaagttgc

SEQ ID NO: 198677 - DNA, 515 bp, Homo sapiens
agattctttatggaaaaggcaaaactatggagacagcaaaaggatcagtggtggtcagggattgggagggagggaggaatgaataggcagagcgcagaggatttttagggcaatgaaactatttcatatgatactataaaggtggatacctgccattttatgtttatcaacccccaaagaatgtacaaattatagagtgaactctaatatatacaactgactttattaattataatatgtcaatactgattcataaattataacaaatgcatcccaatgatgcaagatattaataataagagaaacagtgtatggggcagggagaggagggattatatgggaactctatacttcttgttatagaacaagggcmtattaatttttaaaaagtaaatattaataccaaaaaaggaaaacaaaatcatatgcattcgcaataaaataccacttcacaagcactaggatggctatactcaaaaagatagattacaagtgtttgtgaggatttagaaaaa

SEQ ID NO: 198678 - DNA, 574 bp, Homo sapiens
cctctggcagccctccccatggacctctgcaacacaaaatcagaaatggctttcctgaggactgagagagcccacagggctcttcccactcttcttctacccctgtatttcactgggttctctaaaatagtctcagctccaggtaaggtcaaacccttctcccatgatctggatctttaggttatccagggagggtgtgtgttcaggggcagataatctccctttcccactttcacactttgggcactcacagtttctgggctgtctcctggggyctgcaggagcaatccacttccttcaaagtgtctgtgcattctcttggcttcacttgtatgttcctgtagtggttcttggagcaaaatttcacaatgtgaatctctacgtgttgttctgtccatccaggtaggagctgcaatttagtcctgcctcctatccaccattttcctaatctctcctagttgcaaatctttcattaactactgaaagaaagcatatcagtggacaaagtttatcttaatctgaaatacaggaaaaaatatataggtgctcatattaaaatattgaataaatttac

SEQ ID NO: 198679 - DNA, 574 bp, Homo sapiens
cctctggcagccctccccatggacctctgcaacacaaaatcagaaatggctttcctgaggactgagagagcccacagggctcttcccactcttcttctacccctgtatttcactgggttctctaaaatagtctcagctccaggtaaggtcaaacccttctcccatgatctggatctttaggttatccagggagggtgtgtgttcaggggcagataatctccctttcccactttcacactttgggcactcacagtttctgggctgtctcctggggcctgcaggagcaatccacttccttcaaagtgtctgtgcattctcttggcttcacttgtatgttcctgtagtggttcttggagcaaaatttcacaatgtgaatctctacgtgttgttctgtccatccaggtaggagctgcaatttagtcckgcctcctatccaccattttcctaatctctcctagttgcaaatctttcattaactactgaaagaaagcatatcagtggacaaagtttatcttaatctgaaatacaggaaaaaatatataggtgctcatattaaaatattgaataaatttac

SEQ ID NO: 198680 - DNA, 518 bp, Homo sapiens
cagcagccatttctgtatttttcatagcacytgttacatagcacatgtttacaaaatacttattgaataaatagataatcaaattaaagaataagtgtatgaaaatgagatttgtctgtattccctagttatcctaaacagtatcttgaacattataagcacttatgaagtatataaaaagataattgaaatatttcatggaaatccttttaatttcactaattgaaattctatctgcaatgactattccctgagccttctatttttaggcagagggaggcaatataaaaaacactaacctaagaatcaattttagctctggtactcaatttttgtttttgtggtatgattttggacaattcacttttacctttacaaccttcagtatattcatctgtaaaatgaagataagacccagcctacacagttcccagattgttctgaggatgggatgagatgctgtaattaaaaggattttgtaaataaaagagcctggtagaaacatattgaaataaata

SEQ ID NO: 198681 - DNA, 563 bp, Homo sapiens
tggaaaattagatcatctatacaaatacaattaacattaaaggagctctaccagtcagttctttcaccaaatttgggttcakgaaattataaacttcatttcaaagcccttcactgattagcatcatctggttttatctttagcaaaagcttgagtctgaatcacagcagtcaggagaaagggtagactttgaaaatataaaattttaccaaacatggaagagaaataacaataacaaaaacaatgataataatataaagcatacgttttacagtttcagagagatttgtatagttgaaacagcatggctttgaagtcagaccatcgttttccagcaattttgcacatcgtgcaacttaaattatctgagttttagttgacttggttgtaaaacagaacaattaactgcttactttccatgattattgtgtggattgaatatggtaacataaaaataaaatattgagttcatggtagaggcaaaacaattgttaatcttcctcatctatttctcatacacattatcataacaaccttgtgtaagtagttattatctattcatc

SEQ ID NO: 198682 - DNA, 420 bp, Homo sapiens
tttcatgtctattgaggtgaccatatagcttttgtttttaattctgtttatgtggtaaatyacatttattaatttgtgcatgttgaaccaaccttgcatcccaggaatgaagcctacttaatcatgtggaattaacttttctatgtgctgctggatttggtttgctaatattttgagaatttttacatttatgtttatgagagatattggcctgtagtgtttttgttctgttgtttttgtgtctttgccagcttttggtatcagagtgattctggcttcatagagtgagccagaatttatactccttggtttttttgaataggttcagtagaattagtagcagctcatctttgtacttttggtagaatttggccatgaatccatctggactggggcttgctttggttggtaggttttttt

SEQ ID NO: 198683 - DNA, 420 bp, Homo sapiens
tttcatgtctattgaggtgaccatatagcttttgtttttaattctgtttatgtggtaaatcacatttattratttgtgcatgttgaaccaaccttgcatcccaggaatgaagcctacttaatcatgtggaattaacttttctatgtgctgctggatttggtttgctaatattttgagaatttttacatttatgtttatgagagatattggcctgtagtgtttttgttctgttgtttttgtgtctttgccagcttttggtatcagagtgattctggcttcatagagtgagccagaatttatactccttggtttttttgaataggttcagtagaattagtagcagctcatctttgtacttttggtagaatttggccatgaatccatctggactggggcttgctttggttggtaggttttttt

SEQ ID NO: 198684 - DNA, 420 bp, Homo sapiens
tttcatgtctattgaggtgaccatatagcttttgtttttaattctgtttatgtggtaaatcacatttattaatttgtgcatgttgaaccaaccttgcmtcccaggaatgaagcctacttaatcatgtggaattaacttttctatgtgctgctggatttggtttgctaatattttgagaatttttacatttatgtttatgagagatattggcctgtagtgtttttgttctgttgtttttgtgtctttgccagcttttggtatcagagtgattctggcttcatagagtgagccagaatttatactccttggtttttttgaataggttcagtagaattagtagcagctcatctttgtacttttggtagaatttggccatgaatccatctggactggggcttgctttggttggtaggttttttt

SEQ ID NO: 198685 - DNA, 420 bp, Homo sapiens
tttcatgtctattgaggtgaccatatagcttttgtttttaattctgtttatgtggtaaatcacatttattaatttgtgcatgttgaaccaaccttgcatcccaggaatgaagcctacttaatcatgtggaattaacttttctatgtgctgctggatttggtttgctaatattttgagaatttttacatttatgtttatgagagatattggcctgtagtgtttttgttctgttgtttttgtgtctttgccagcttttggtatcagrgtgattctggcttcatagagtgagccagaatttatactccttggtttttttgaataggttcagtagaattagtagcagctcatctttgtacttttggtagaatttggccatgaatccatctggactggggcttgctttggttggtaggttttttt

SEQ ID NO: 198686 - DNA, 626 bp, Homo sapiens
ggtgcatgtatatgtgcatgtgtgtaataaatgtgataaaggctctgtatagtgcctagcatacaggatggtcaacaagtgtcyaccaaatggatagatacagatgctaatgaatattagcaaatatcacaaaattttcctcaagagtctgtggcattagggtgtcacaaaaaacccaactttggataattgtagatacatttctttttttttaagtaaattttctttggtggattgactatgtatttgagctaagactgattacttatattattttacaacatacatcagtgggtttctctggggaagccagaaaagcagtgtgctttatgaggctgctttgaccgagaacaatctactcaacgttatcaaagctttatgttaaatgattagaaaacatggatcaaaaagtgacctgctttgtttgatcgctttcatgattaatacaaagtgatttgatctaatgcaaaacagatcacttttttcattaatcatgagagtgatctttgcgttaatcatgaacaagtgatctaaatctctgttcggttaagctgcagcagttactattacattttagagtaagattgttttcctctagaagctttgtgtcaagataggatttcatc

SEQ ID NO: 198687 - DNA, 592 bp, Homo sapiens
tcattttatctataaaatgataataatatcaaggaatgattataaattttgaaagaaagcttctaatattgagaaccccatataaggaagaataatgagtgatgaaattaatattatttttataaaaaatacaatgtaatttaaagactctgaagaacaacaactgaaaatattagatttatttatataggaactcatgaagtaggcagtttattcctgatgaaagagtccaaattattattttaagtccaattattattataagtataggcaaaaatgaaactttatcctctatactgctttccrtagagtatttttccttcataaaaatgttatcttgtttgcaatatttttaggcaagtaagttaaattggaaaaaatctaaaattcagaggttggggcacttgcccaagatcaaatactgactaggtattaatgggaaaaggttgagaaacaaattcctccaattccttgcctgaattctttgcttcagcaaccaggaacaacaaatctgtgaagctaatattttgcttataaaaatactctactatctgggatagaatatttgaaagcatgtttttctatttatgtc

SEQ ID NO: 198688 - DNA, 603 bp, Homo sapiens
tagttttatctaagggaatatttcacaggcagatggaagtgaatatgcaaaattgttccagttaagcaaatgttccagatagatttttaagataaaacatgcttgcagttttatgcaatctgcactatttttaatagtctgttgctggattttgtatatgacttcagttattttatcatcctacctctgtgaagcaacactgagcatgaaaaactgaactgcaagaaaagcttccagccaggcagtgggtaggagtacaagcagaataacgatgttttaacaggactgtgaaargatgacagatgtacaagggaaagttctcaaacatgttggagatgaagcccattaagcccccaaaccttgtgatatctgtctgatcactcactctgggattcattacacaaatgattcagtacttccaagatacattaaaattagtgccctagtattagagcctcattcctggaaccaccctgttgaatttataggaggaatttttgaaaaaaaaaaatttatgtatacattgtatgatacttagattagaaagaaatgcatgccacagggattaagaggtagacactgaaatcaaaacctgagtttaat

SEQ ID NO: 198689 - DNA, 605 bp, Homo sapiens
tggaagtgatgcattttatttctaagtcaaatactcaagagcttttagactgtactctatgaactctcttgctctgctccagcgaccatgtgagcttatgstggtatggagttatggtaaaatcagagcattctatacctagacgatagctaccctagagcatcacttggacagcaaaatttgtgtgaacaagttctcaactgttttatgttaagctactgcgattatagaattattaattgctatagcataactaatttatcttgattgatagcccctaaaatccagaagttttatgtctatatatgtaccctatgaaaacaaaactcatacatatacataaaaggacatgtattataatgttttaaatagcaagtgttttaaaaggcaaaaattcagaaaccacctcatcaaaaaaggaggggcatattatagtatagacaatacaatgaaatgaagcagtgaaaatgaataaattggagtcactcatacaaataagggtaaattttaaaagcatcatggtaaccaaaataaatttgagaagaacatatattgtagtgtccatcctgtatgtatttatatactcatgaagatcatgtaaatgc

SEQ ID NO: 198690 - DNA, 605 bp, Homo sapiens
tggaagtgatgcattttatttctaagtcaaatactcaagagcttttagactgtactctatgaactctcttgctctgctccagcgaccatgtgagcttatggtggtatggagttatggtaaaatcagagcattctatacctagacgatagctaccctagagcatcacttggacagcaaaatttgtgtgaacaagttctcaactgttttatgttaagctactgcgattatagaattattaattgctrtagcataactaatttatcttgattgatagcccctaaaatccagaagttttatgtctatatatgtaccctatgaaaacaaaactcatacatatacataaaaggacatgtattataatgttttaaatagcaagtgttttaaaaggcaaaaattcagaaaccacctcatcaaaaaaggaggggcatattatagtatagacaatacaatgaaatgaagcagtgaaaatgaataaattggagtcactcatacaaataagggtaaattttaaaagcatcatggtaaccaaaataaatttgagaagaacatatattgtagtgtccatcctgtatgtatttatatactcatgaagatcatgtaaatgc

SEQ ID NO: 198691 - DNA, 482 bp, Homo sapiens
aaaaaataagcctgctacacaagtgaaacggagcaattcctaatactaagatgtaagacacatcatcaatttaatcctcattagaggatacagtgtgagaaagtgaataatatccttgaaataaatacagtgaatttctcaaagttctttgatccttcgagactgtgaagtcaagattgttgtttgagggaagtgctctatttgcttttaacmgtatttaaatatttacattaaacctatatctagctgccagataaaactatttttttctaaattcctccgatatccaggtttttgtccaattcatcaacaaacccttctgagcatcagagaggatgccctatactattgccaaaggaatttggatcctctccagggtgaccaaacatcctggttttcctgggacaggggttactgggatgtgaacctttccatgataaaaccaggaaagttcaggcacactggcataagttggtcactgt

SEQ ID NO: 198692 - DNA, 433 bp, Homo sapiens
gcataaatcccaacccactcctctgctctccacactgtatggatggaggtgctgaggaagttggtggggtgaggagaggcctgagaacactcactgatagcctccagtttggagtgacattgatctaagtgggtgatcgtgtggcctgggaaaaatgtacaataawaaccaatgtcagtagggccctgacttaccacaccagtagttgggcacccagtggaatggggaaggggcctgagggctgtaagaacagactccagggctcaaagctgttagaagagtgacacgaaggttaaagaggggtcccccactgcaatctcccaggaaaaagatacaccccctcctgcttgtggagggagccctggaatggcccgataaacaatctttcagatcagagtcaagtccaggtcctcagtcaaggctgtgcaaaaac

SEQ ID NO: 198693 - DNA, 524 bp, Homo sapiens
attgacttcccaaacctcgtgctaatttgtacagcccatagtccatttcccataatttgaaatcgctgtgtatttgaatagaaatataatccacatgttcatgattcatttgcactttatgtaaccaaatgttggtctgtagctgtttgatgtccaagagaccatctgaaaagtctttgcagccagaagtcatgagttgccaagaaaattaagagaaaaamctcagccagccctatctataatccaaggcagtcggcaggaaatgaataggtacagtgtgaaagacagagcattcaagctgccaattgttagatcagatccatgttctatgtctcaagttccagccacttgatgctaaagaagccatatcaacacacaggcaatgcctggagatgcactgtcatttattaaacagattggttactgttggacatttaggtcatttccaattttgttattacaaattaagctaaaacaaaaatcttggttgataaatttttgctcacatctctttatttatttac

SEQ ID NO: 198694 - DNA, 544 bp, Homo sapiens
ccaaacacaaaattagtagaaggaaagaaataataaagaccagagcaaaactaaataaaatagagcctaaaaatacaaagaatcaatgcaatgaagagttagtttttggaaaagataaataaaattggtaaactgctagcgagactaaccaagaaaaaagaaagaatatccaaataaaaaaaatcagaagtgaataagaagaaatcacaattgattccacagaaatacaaaygatcttttaaaagtaatatgaaaaactctgcactaacaaattggaagacctagaggaaatggataaattcctggacacatacaacctatcaagaatgagcgaagaagaaatagaaaacttgaacagaccaataatgagtaacaaagttgaatcaataataagtctcccaacaaagaaaaacccaggaccagatggctttactgctgaattctacaaaagttataaagaagaactaacactgattcttctcaaattactccaaaaaattgaacaggagaaaattctccccaacccattttctaaggctagcat

SEQ ID NO: 198695 - DNA, 487 bp, Homo sapiens
gaagaaaagatttaaaatgttccccacacaaaaaaatgataaatgtctgagtgatggatattctaattaccctgatttgatcataacacattgtatgcatgtatcaaaatattgcacttactccctatatatgtgtaattgttaagtattaactaaaaaaaaaaaaaaacaaacaaaacccatgactgacaactgtcttttgtctcctttgcaagtttatccatttcctagcataaagataacactaaatgtatttctcaaacaaagtaattatctttgaattactttggcagactaaaaagtagacagagtacttgtgaatttaacacttttttatatgctagggcatgtttactgtatggatttcttcagcttgtgatgaaggttaactgaagccacctctgtcttaccattatattttgcagattattaaaccaacttttacttttggtacttcartgcagcagtagaagttatattgcctatt

SEQ ID NO: 198696 - DNA, 540 bp, Homo sapiens
ttgtctaccttcatattttcagcacctagaactgtgcctggcacctagtgtttaacaaacattattcgtataaataatgcattaattgtagctttattaccataaaatattattactgatgttgttatgttagttcagatttttccttctttaggtagctaatttctattcaccctccaagacttcagttaggaatcccaaaatcctacaggttttcctttgtctccaaggctgcattagtgtcccctctctaagctcccgtgggaaactgagcacatctctatcacagagcagacctcggtcagatgataatgtctatttacctggattaccagcagggcatattatcttttttttttttttcttaaaaracaggatcttgctctgttgcctgggctggagtggagtacaggggtggtgtgatcatagctcactgcagccagcctcaaactcctgggctcaagtgatcctcctgcctcagccacataagtagttgggactacaggcacatgccactgtgcctggcaaatgttttaattt

SEQ ID NO: 198697 - DNA, 571 bp, Homo sapiens
atgaactcttttcgcagaaacaagtgacacactaaatgaaatgaatgatgcttacctgttaattataacaggcctagaaggcccgtcccttgaaatgttttattaactttaaaccctgttcttctaagtgctcacaattatgttacataattgtgtaacataaactctgtaactgagtttataattcatactgtcccccaaccagcagttcaaaaaggggagttttactaagagctattaactgagactgagtagtgcagagtccagcttgaagaaaaccttggatccttgctcaggaagagagacgtgagctctctgaaagagggcggtggtmgcagtaaaaaaagctttcaataggaaggaagcaaatgacttaggtaaaatattggtatagtcatcaaataacaaactagaggaaattgtggggtgggtcaggaaaaaggttaactgaaaagaccttcaaagtggatgtaaacaacctgactagagtaaatgaacttgtgggtctgggttgccataagcaaaaatctgatgagtatgagaaaatggacagcacaagtacttaaaagac

SEQ ID NO: 198698 - DNA, 525 bp, Homo sapiens
ggtgccagtgatccatggagcatactttgagaaacactgttttaggaactagtacagtatcagtcctgtgcagaatagmattaatatagtgaacagtatttggaaaaaatgaagatgtcatgattcaaaaggatccatctgtttcacaaatctgaggcaactcctacatcttgacagcagcaagagatatgtaaggataatggattatatcctccttggccctactttccaagtcaattgtgttgactatttatacagaccagaatctacagttgagtatttggctgtggtagtggctataaagcacctctggcatgactgaccaaattttgacagtttcagagagaatatagagaagacgacagatgcttgcttttgtaaatcttcatatttttctattaacaagtataaacctattcagacatttttgggagcaattttcatcagttgttagctttgtttatttgtataactccagttaatataagaagtacatgtatgtggtagaaattatgtattaagtcc

SEQ ID NO: 198699 - DNA, 525 bp, Homo sapiens
ggtgccagtgatccatggagcatactttgagaaacactgttttaggaactagtacagtatcagtcctgtgcagaatagcattaatatagtgaacagtatttggaaaaaatgaagatgtcatgattcaaaaggatccatctgtttcacaaatctgaggcaactcctacatcttgacagcagcaagagatatrtaaggataatggattatatcctccttggccctactttccaagtcaattgtgttgactatttatacagaccagaatctacagttgagtatttggctgtggtagtggctataaagcacctctggcatgactgaccaaattttgacagtttcagagagaatatagagaagacgacagatgcttgcttttgtaaatcttcatatttttctattaacaagtataaacctattcagacatttttgggagcaattttcatcagttgttagctttgtttatttgtataactccagttaatataagaagtacatgtatgtggtagaaattatgtattaagtcc

SEQ ID NO: 198700 - DNA, 404 bp, Homo sapiens
aatgcttaataaaacttttagtgtgaggctttattagtccttgatgttaaatgtctagaataatcttcttcttagggatcctttctaactgcaagtttaaattttaagggcttttaaatttgcctttttgttgttttgttggtttttcttttacagcaayaaatgagtccactacatgattactctaagcaacctttgattttaaataagttctcagagaaaactaataactctaaaatttagcactttcttaaaaatcaaatccatttctacatgatgtaatttcttttcaaaattaattttaaggactagaaattcttcactgctaattggtacattgggtataatatttgtttttagatacagagtaaacaatttactttagtatcaaggaaacatagtta

SEQ ID NO: 198701 - DNA, 614 bp, Homo sapiens
aaacatctgtaggtttaaaaagtaaattagcacagtaggaaaagtctgttgtgtagrgatggacagagttaggtttgaatgactgccatttaggagccgctcaaccttgggtatgttgtttaccttcccaagattttgtcaggtgcaaatgacaaaagaaacccaactgaaaccaccctaggcaagaacttaagtttagttgcttaaaagtattgcagagcagctcatataaagacctgtaggaactggagtttcaagggcttgattttggagcttagaactgccagcatttatgctatatccatttattactacttttctttgcaaattggcctaatgaaccctgtagaagaccttcattatgagccctgtaaaaatcaccttgtgctgcttcaggcctgcatctgtcattataaggtagggaagaaatggactatgattgacagttccatcaggaatatgtggactgggagaagcagtctctgaagcagtgtggtattatcaaaagaaagggaacaaaaaaggctgctgggcagacctaaatctctctccttctattcctctttctcacacacacacgtgcacacatacatagtgattacagtcctctagag

SEQ ID NO: 198702 - DNA, 536 bp, Homo sapiens
ttcaaacaaataaaaaattaactacttgctatactaaccaaggaaaaaagtgaaaagacaaacaaagaaaacagaaatgagaaagatattacacctggtaccacagaaataaaataggtcagagactatttgaacaactatagataaacaaactggaaaacctaaaagaaatggataaattcctagacacatacagtctaccaagactgaataaaaaaaattagaaaacccaaatagaccaacaacaagyaatgagatcaaagcagtaaaaaaaatttctctaacaaagaaaagtccaggaccagatggcttcactgctgaattctaccgaattcaaagaaaaactaacaccaattctcctcaaactatttcaaacattggagaggaaacaattctttctaattcattctacaaggccagaattaccctcaggctaaaatcagataagaatgtaaaacaaccactaaaaaaaactgtaggctaatagccctgatgaacatagatgcacaatgcaaaaatcctcaacaaaatactag

SEQ ID NO: 198703 - DNA, 515 bp, Homo sapiens
ggcatttctgacgtggaagaaattgggaccagtaaagccgggaagaaagcaaaatggggtagcaggggcccttttctcagcttctaatgaaatatttgtagtcaagaccaagcacacatattgattctcatcaagtgtgaaatcgttggcggccctggaggtgagccccacgggaccatttgtaccgcactctttcaaatgaacagattaaatctctcgtaagatgctgtttttgacacactygtactgcatatattaaaatcctccctggtgcccttttggcggttaggattcaggtagttccagtgcatcacagcctgtgtaccagctggaaaggatattttttttttcttccctggaatgtgtaaaggaagaattatattgctgtttgttgaaagagactatatgtctcgcaagtcccacttcaataatcttctagaagcaagaatgaatttgggattggaaagggcattacaacatggctaaataaatagcaaggggtctctcaacacctg

SEQ ID NO: 198704 - DNA, 559 bp, Homo sapiens
ttgcctttttggcttgcccctgcctctatcttatgcccatgaaagacttcagctggcatggcaacacaagcagctgagcatcagtgatataagtggctgagcgtcaataatacaagtggctgaggagcaaatagagaaacaactgagtgtcagagactacaggtagacatgactaacttcagaccttgtggcttcagagaggggaccagctgaagatggctgggcttcagggagtgatcatctttccatcccctttccagtttccctttccactgagagccggcaccgctcaataaagtcttccatattcatcacctttcaaacagttcatgtgacctgattcttcctggatgctgggcaagaacccaggtgccgagagggcaggggctgccaccctgaccctccamtaagctggttggcacttggccatcctggatgcagagctgaaagagcattggttgaatacacttgaacaccactacagggttcgcacggagcctgctcccaccagagaggaatgcccagcggattccagcattcagttcactcaagtttccac

SEQ ID NO: 198705 - DNA, 618 bp, Homo sapiens
tcaatctaaagccatgtaaatttcaagggaaattaaatctatttctgattcagttatacattactcattgaaatattatttggtggaaaatgtttgatgtccagaaaccttatgatccattttattatcttttttatttgatgcaggaagttgattttcatgggtagtaaataaagtttatatccagaaagatgaagccatgtagtctaacaatatgcttattataatttacaccaccaatatttccaaacagatttgatatgacttacagtaaaagaattttcaataggacagttcaaaataaaggtaaaaattgagatgaaaagatgtagaggaaataaaaaaataactatatggggagatttrtaaaatatattaaatttgttctgatcttcctgactgccaaggcaaaaggcaaaccaaatgattttacttggaagccaactctgctgctttgctttaccatcgtcatggatagtacacacatcacattacaaatgcacaggctcagcaaagaaatcagtaaaccaggaacattgtccagctatatgtatttgtctgttctcacgctgctatgaagatactacctgaaactgggtaatttataaaggaaagagg

SEQ ID NO: 198706 - DNA, 618 bp, Homo sapiens
tcaatctaaagccatgtaaatttcaagggaaattaaatctatttctgattcagttatacattactcattgaaatattatttggtggaaaatgtttgatgtccagaaaccttatgatccattttattatcttttttatttgatgcaggaagttgattttcatgggtagtaaataaagtttatatccagaaagatgaagccatgtagtctaacaatatgcttattataatttacaccaccaatatttccaaacagatttgatatgacttacagtaaaagaattttcaataggacagttcaaaataaaggtaaaaattgagatgaaaagatgtagaggaaataaaaaaataactatatggggagatttgtaaaatatattaaatttgttctgatcttcctgactgccaaggcaaaaggcaaaccaaatgattttwcttggaagccaactctgctgctttgctttaccatcgtcatggatagtacacacatcacattacaaatgcacaggctcagcaaagaaatcagtaaaccaggaacattgtccagctatatgtatttgtctgttctcacgctgctatgaagatactacctgaaactgggtaatttataaaggaaagagg

SEQ ID NO: 198707 - DNA, 352 bp, Homo sapiens
gaactggtggtagtaagtcttccagagtatcatcctatcagcaccagtattccactcatggaagaggacttgcagtcaagttgaacagggactactaggttctataattcctttcattcctyccctaaatcactttcacacagtcctacaagtgaacacaggtcaggttctggtgacagtcaacatataggcatgaatcaagataagttttgggttttatgaaacagtgcctttaatggaacacaaagggctaggcagctctagatggagacaggatacaaggcattgaaggatttcatatttctcccattgctgcctccagctgtactagctccattctacctttcccatc

SEQ ID NO: 198708 - DNA, 638 bp, Homo sapiens
aaaagagtaaaaatatggatagatataatagattacccttctcctcttgagttttctaaattttgttaattaaagtaaaaattacagtgtttgatatagttctcaatgtatacagactaagtatttagagcgactatattataaagggggcataaaaaagtctcaagtggaagtaaggtatctacactgtacatgaactggtaaaacattgacatcagtaaagactatgataagttatgtatatataatttaatatgtagaaaaccactagtaaaaagaaatacatttataaactcaaaagataagccaaaatggaatgctaaataatttcaagtaaccaacaggaaggcaagaaaagtgaaataaagaaatgaaaagcagaagaacaaataataaaataaaagacatatcaataattaaattacaggtaaatgacttaaatacacaaattaaaagacaaaattagcataatgcatttgaaaacatagcttggagtgaagttacagagaatagcacaataggaagctccctrtggagctaaaaaactcaaattccactattttaaaactgcagtctagtcaaacaatggcagcatccaggtgagtgcttggtgaagaaagaggctggtaaattttgat

SEQ ID NO: 198709 - DNA, 308 bp, Homo sapiens
ttagtctgtgattctggatgagccaactggtaacaattctgggccggcagagcttgctttgggttctctagatgrctgcgcagctgcctttgctctgactttggatggggccactggctgggctctgctatccaataaaagcactggctgagcagtgcaatcaggctgaggtgctggatggacactgcaatcacctctgatcaggctgaaccacaaagtaccttccctggtcagatggtaccactatttgagttcagcaattggacagggttacaggagagccacagagattaagtggagttgctgat

SEQ ID NO: 198710 - DNA, 404 bp, Homo sapiens
tgccccaaaattctgtaacggggctcttgggcccttatgctcaggcccactcccaccctgtggagtgaacttttgttttcaataaatctctgcttttgttgcttcattctttctttgctttgtgtgttttgtccaattatttgtttgagacgccaagaccctggacacccttcatcattatcaatgctacagaaaactgagatgacactgataagagagggcattggtttgagcaaaagacccaggttctattcctggcttgaagacttactctgttgaccttggaatttgcatcccagtaggaataacaacaccttcagcctcataaagcattagtaaaaatgaatgtgttcttaaaagtcctttgaacaatggagyagagctaccaaaagacaaactgagtc

SEQ ID NO: 198711 - DNA, 476 bp, Homo sapiens
ggctgtgcctctgaattcacccacccagggcccttggtgagggtgggaggtgtggtggccagttgccccgccatcttcagtagctgggggcagtagggccactggctctgcctgaggccaaaacgtgccacactggctgctcactgggctctgaaaccctgcatgtaagctaccccgaggcctcaccaagcgtgtggaaatgtctttctgctgtcattacttgtcctggcttttgctcagactcacacaggacttacacccctgggcagggatgctgagtgcccgggtccccttagtctaaagctctgtcccttggaaggaaggaaggaaggaaggaaggaaggaaggaaggaaggaaggaaggaagggagggaggaaggaaagaaggaaggaagggaggaaggaaagaaatggtatgcccagatcttttttcccctcttcygagttaaacagctcaagtgctatgatcatattag

SEQ ID NO: 198712 - DNA, 557 bp, Homo sapiens
gaattctatgtggattgtcaggggacaatactcatttctgtaatcaggcatactttctttgaaaaagtttatcatatcaaacctcacaaggacaaccagaactctgygatatccactctacaaacctcagatccctacagtgtagtaaaggtgatagccgagatagaaagacagaaacacactgtttgacgaccaatctttggaagttgagatggcaaatgtggatttactcagattattttcctgttagcacctccaggtgtaattttgacagtactttgcattgggctaatgacacaatggggaaacataaactgctgacactggacttcagcagtacagtaacagccatgtgcaaggccattgaaaaagtaaagactggtggttacattgccacatgtttttctgcatggcatcatcatcttaactatggactttatgtgctttcacagcaagatgtttctagtatttagaaatggaccttatgcatcgtatacttcataagagcttgaaaagctctcacccaggtattaccaaatgccagacatctctctatg

SEQ ID NO: 198713 - DNA, 391 bp, Homo sapiens
gaattcaacaacacatcaaaaagattatacatcatgactaagtgggaattatctctggcatgcaaggttggtttaacatatgtaaatcaatcaatgtgatatatcacattaacaaaatgaaagataaaaccacatggtcacctgaattgatgcagaaaaagcatttaacaaaatttagcaacctttcttgataaaacctcttaatagtttatgtatagaaggaaagttcctcaacataataaagaccatttatcagaaacccatggcctacatcatagtcagtggggaacaactaaaagcttttctactaagattgagtacaagatagsgatgcccagtctcatcacttttattcaacatagtacttgcaagagcaatctgatgagaaaaa

SEQ ID NO: 198714 - DNA, 449 bp, Homo sapiens
ttatgtattgagtggttcttaagcaggagtgtatccagattttgagaaaattgttgttgctgttgttgttagagacagggtctcattatgttgaccaggctagactcgaattcctgagctcaagcaatcctcccacctcagcctccctagcagctgggactacagccatgcaccaccatgcctggcttcaaggaaacattttcaaatatacatatccaggatttattagacttactgtatcaaaatattcagaaaaagcctagacttgttgattatttaaacattttcctcaggttactgggatgcacaattctagctgaaagctagtgcaacagacaattatttcagtctcatttctcacccayatgaccaattccctttctcatttgaagatttggccaaaaagagtaaggagtaggagagagacccatttgctgaaaacaccacat

SEQ ID NO: 198715 - DNA, 394 bp, Homo sapiens
tattgagactagccagattaaaaggggtagagggcaggaaagggtgacggcatgccacgcagcagcaagagcrggagcaaggcctgaaagagtgaaagtatttgcctacaatagaaggatgagtgagtagggcattaccagcagctcagtaatgccagagaaagggcacacagggaaaagggctaaagatggagagtggggcagaagtcagattatgaaagccttatgtgtaattttaagatgcttggacattaatgttcaagagtggtcctgggtcctatctgcattagacatagatcactttaaatgccaaaaccaatattaccagtgaactattattcattaagacaaggtgacagatagctcatgtggacacagctgagatgatactatg

SEQ ID NO: 198716 - DNA, 394 bp, Homo sapiens
tattgagactagccagattaaaaggggtagagggcaggaaagggtgacggcatgccacgcagcagcaagagcaggagcaaggcctgaaagagtgaaagtatttgcctacaatagaaggatgagtgagtagggcattrccagcagctcagtaatgccagagaaagggcacacagggaaaagggctaaagatggagagtggggcagaagtcagattatgaaagccttatgtgtaattttaagatgcttggacattaatgttcaagagtggtcctgggtcctatctgcattagacatagatcactttaaatgccaaaaccaatattaccagtgaactattattcattaagacaaggtgacagatagctcatgtggacacagctgagatgatactatg

SEQ ID NO: 198717 - DNA, 394 bp, Homo sapiens
tattgagactagccagattaaaaggggtagagggcaggaaagggtgacggcatgccacgcagcagcaagagcaggagcaaggcctgaaagagtgaaagtatttgcctacaatagaaggatgagtgagtagggcattaccagcagctcagtaatgccagagamagggcacacagggaaaagggctaaagatggagagtggggcagaagtcagattatgaaagccttatgtgtaattttaagatgcttggacattaatgttcaagagtggtcctgggtcctatctgcattagacatagatcactttaaatgccaaaaccaatattaccagtgaactattattcattaagacaaggtgacagatagctcatgtggacacagctgagatgatactatg

SEQ ID NO: 198718 - DNA, 394 bp, Homo sapiens
tattgagactagccagattaaaaggggtagagggcaggaaagggtgacggcatgccacgcagcagcaagagcaggagcaaggcctgaaagagtgaaagtatttgcctacaatagaaggatgagtgagtagggcattaccagcagctcagtaatgccagagaaagggcacacagggaaaagggctaaagatggagagtggggcagaagtcagattatgaaagccttatgtgtaattttaagatgcttggacattaatgttcaaragtggtcctgggtcctatctgcattagacatagatcactttaaatgccaaaaccaatattaccagtgaactattattcattaagacaaggtgacagatagctcatgtggacacagctgagatgatactatg

SEQ ID NO: 198719 - DNA, 506 bp, Homo sapiens
accattagtttcttgagtatgttagataagaagcccttccagatygacagtttttcataattttcttctagtctgcaagatgccttttatttgggttcagtattttctgtcctgtgttgaagctgcgtgaagctctgaagttgtccttagtctcacatggtcacattagcttttgttagtggtgatttctgtgtccctttgagaagaaaagtgagatggcgaagccattgtatggtctatgggtatttggttcctatgtcttccttttctgtttgtggcttaggttcacaggttcaagtttacccacagtagacacacaccctacgtgttttccttggagattttggtttcaggattgaacttaggtgttcagtagattttgtgtcgctttttgtgtcttgggtaaaggaaaggttcggtcctttgcacgtgacccctcagtttcctcaaccattgtgcctttggtgtgcttttggaggaacaacaagaatcccatgggttcagtg

SEQ ID NO: 198720 - DNA, 506 bp, Homo sapiens
accattagtttcttgagtatgttagataagaagcccttccagattgacagtttttcataattttcttctagtctgcaagatgccttttatttgggttcagtattttctgtcctgtgttgaagctgygtgaagctctgaagttgtccttagtctcacatggtcacattagcttttgttagtggtgatttctgtgtccctttgagaagaaaagtgagatggcgaagccattgtatggtctatgggtatttggttcctatgtcttccttttctgtttgtggcttaggttcacaggttcaagtttacccacagtagacacacaccctacgtgttttccttggagattttggtttcaggattgaacttaggtgttcagtagattttgtgtcgctttttgtgtcttgggtaaaggaaaggttcggtcctttgcacgtgacccctcagtttcctcaaccattgtgcctttggtgtgcttttggaggaacaacaagaatcccatgggttcagtg

SEQ ID NO: 198721 - DNA, 506 bp, Homo sapiens
accattagtttcttgagtatgttagataagaagcccttccagattgacagtttttcataattttcttctagtctgcaagatgccttttatttgggttcagtattttctgtcctgtgttgaagctgcgtgaagctctgaagttgtccttagtctcacatggtcacattagcttttgttagtggtgatttctgtgtccctttgagaagaaaagtgagatggcgaagccattgtatggtctrtgggtatttggttcctatgtcttccttttctgtttgtggcttaggttcacaggttcaagtttacccacagtagacacacaccctacgtgttttccttggagattttggtttcaggattgaacttaggtgttcagtagattttgtgtcgctttttgtgtcttgggtaaaggaaaggttcggtcctttgcacgtgacccctcagtttcctcaaccattgtgcctttggtgtgcttttggaggaacaacaagaatcccatgggttcagtg

SEQ ID NO: 198722 - DNA, 391 bp, Homo sapiens
tgtagagagataaacagaaacagaaattacagtgaactgcttgtcagcaactctacaagtcagaaaccaatgatacaaaatttttaaataactgaaaaaagtcaacccccaatcttatatccattaactatatcgcgaaaataacaattaaatgaagacattttcagattaacactggaagagtcccttgctaacaggtctgcactaaaataaatgtcaaaatcatttcttgaggcaaaaggaatatggaagcagatgaaagttgaaactacacaaagaaataaagagtgccagagaagatacaaagatatattaccccatyattttacattgctctaaagataattgtcttactttttttaaaaaaagagtaactttatattatggaatt

SEQ ID NO: 198723 - DNA, 487 bp, Homo sapiens
atctgtcaccatctcccgtcacccccagataggaccatctagttgcaggaaaacaagctcagggctcccactgattctacattttggtgagttatataattatttcattatatattaataataatagaaataaagtgcacaatgaatgtaatgttcttgaatcctggaaccatcccccacctcaggttcctggaaaaattatcttccacaaaaccagtccctggtgccagcatggttggggacacctggttaacagatgtgagacccctttgccttgcttggaataatgtgcagatatacattgtgtgaatgacatctgatggcgccakcttgccctgtagatcattttagggacacctccagtatttcatgaaaattaaaatttcttctaatgatgaacaaaatgatactcagaagcaactttctgaagaacagaacactggaatattacaagatgagattctgttcatgaagaaaagcagataga

SEQ ID NO: 198724 - DNA, 202 bp, Homo sapiens
ggaaaggaaattggaggagcccccaggacccacggaggaaagaggctgaggtgggaagaggggctggaaacttgaaactgggtctracaagtgctgggtgcccctgaggtggagcaggcctgctcgctggtgtgctgggacttcgtttcctcctctgccaggcccaggctggttcccatgagggcaccaggaatgcagatct

SEQ ID NO: 198725 - DNA, 181 bp, Homo sapiens
tggctgccattactaaaattctctccatctataaaatgaggttattatgaattgctacataagatgttgtgaggagttatgagcaygtataacaattaaaattaaaacactataaaaatgccaggtattatgtctccctcacacattgcccactacctgtcaaagctgtctttgagaattc

SEQ ID NO: 198726 - DNA, 456 bp, Homo sapiens
ctacataagagttggcatggacatttgtttcctgtggattcttcacaaagatgytgtaactgcttgtttgctaaacatttgttagtaccactagggttccctaagagcaggaagcaaagagcaagtgaaagaacttcaaaagtgggtagatgtctattggagaaaggaaaagatgcacctccctaaagaaaattaaagaaatatgtccaatggacactttatctatctttacaagaatatgacttaaaatgtctcttataatctgtctgcacagagaaaattaaacacaactaatcatgtaaagaaaatggattagattatgaacaatgttattatccactttatacccagcagaaaacataagaatcaaatgttcatctatttatattctgctaatcatctattatctttaaaagtagggtgaggctagccctattcacaaaattgtaagagtgt

SEQ ID NO: 198727 - DNA, 469 bp, Homo sapiens
tctctctaaatgtttattgtgaaattctacataagagttggcatggacatttgtttcctgtggattcttcacaaagatgctgtaactgcttgtttgctaaacatttgttagtamcactagggttccctaagagcaggaagcaaagagcaagtgaaagaacttcaaaagtgggtagatgtctattggagaaaggaaaagatgcacctccctaaagaaaattaaagaaatatgtccaatggacactttatctatctttacaagaatatgacttaaaatgtctcttataatctgtctgcacagagaaaattaaacacaactaatcatgtaaagaaaatggattagattatgaacaatgttattatccactttatacccagcagaaaacataagaatcaaatgttcatctatttatattctgctaatcatctattatctttaaaagtagggtgaggctagccctattcacaaa

SEQ ID NO: 198728 - DNA, 476 bp, Homo sapiens
taaatgtttattgtgaaattctacataagagttggcatggacatttgtttcctgtggattcttcacaaagatgctgtaactgcttgtttgctaaacatttgttagtaccactagggttccctaagagcaggaagcaaagagcaagtgaaagaacttcaaaagtgggtagatgtctattggagaaaggaaaagatgcacctcyctaaagaaaattaaagaaatatgtccaatggacactttatctatctttacaagaatatgacttaaaatgtctcttataatctgtctgcacagagaaaattaaacacaactaatcatgtaaagaaaatggattagattatgaacaatgttattatccactttatacccagcagaaaacataagaatcaaatgttcatctatttatattctgctaatcatctattatctttaaaagtagggtgaggctagccctattcacaaaattgtaagagtgt

SEQ ID NO: 198729 - DNA, 469 bp, Homo sapiens
tctctctaaatgtttattgtgaaattctacataagagttggcatggacatttgtttcctgtggattcttcacaaagatgctgtaactgcttgtttgctaaacatttgttagtaccactagggttccctaagagcaggaagcaaagagcaagtgaaagaacttcaaaagtgggtagatgtctattggagaaaggaaaagatgcacctccctaaagaaaattaaagaaatatgtccaatggacactttatctatctttacaagaatatgacttaaaatgtctcttataatctgtctgcacagagaaaattaaacacaactaatcatgtaaagaaaatggattagattatgaacaatgttattatccactttatacccagcagaaaacatawgaatcaaatgttcatctatttatattctgctaatcatctattatctttaaaagtagggtgaggctagccctattcacaaa

SEQ ID NO: 198730 - DNA, 538 bp, Homo sapiens
agtgtgaatgaattagttaacagatttagtaaaatgaattggttaaagactatttaaatatccaggtttttttatgattcttaaaagtagtacaggatattctagttgctattttctgtttaataggattaagatatccctagttccctgatgtttaatgatgttacaatgtaatccacagatgtttaggygcacatctgcaagtctttttttaattcagttctgggagaccagttaacttactgaaaaggaactttagattttattacattctggtgctgtttaaggacatcattgtttaaatcctttctaattgtttcagaagttgtagatcaggcaattagaaataaaacagctgtgtatcagttgcctacaatactgaaaaggttccttttccttctctgttgctgtcccatcaaataaataggctgagagtttacctgtgataaatgcactgtatttaatacaatggggcagtcccttaatttgagcacctagcatagcgtcaacctaaatcttctgctgatttaattagcaa

SEQ ID NO: 198731 - DNA, 538 bp, Homo sapiens
agtgtgaatgaattagttaacagatttagtaaaatgaattggttaaagactatttaaatatccaggtttttttatgattcttaaaagtagtacaggatattctagttgctattttctgtttaataggattaagatatccctagttccctgatgtttaatgatgttacaatgtaatccacagatgtttaggcgcacatctgcaagtctttttttaattcagttmtgggagaccagttaacttactgaaaaggaactttagattttattacattctggtgctgtttaaggacatcattgtttaaatcctttctaattgtttcagaagttgtagatcaggcaattagaaataaaacagctgtgtatcagttgcctacaatactgaaaaggttccttttccttctctgttgctgtcccatcaaataaataggctgagagtttacctgtgataaatgcactgtatttaatacaatggggcagtcccttaatttgagcacctagcatagcgtcaacctaaatcttctgctgatttaattagcaa

SEQ ID NO: 198732 - DNA, 485 bp, Homo sapiens
cacaagtttacctatataacaaacctgcacatgtacctctgaacttagcataaaaggtttatttttatttagaatgttagcctaccactactaggctgaaatcaggatgacgcaaactggacctccggacaggcaattactgaagatgatcatcggaaccagacacacagacctgtacactcctgcatcacccccagttgtttctcacaccaagttttccttcttagatcccttccctcagcaccgraagttggaatgatattttaaaggcatgagcccagccatatctcaactgctaccagctgaataaggctgctttttttccatcacacctcacttcttgggttttcaggctctgagtggcaagcagccagacttgagccagttacacaatgaccgaactgctcaatgatgtctcagcacatatcttcatctttatgtgaaacactttaacaatacctaaatatagctacccggaaatattg

SEQ ID NO: 198733 - DNA, 485 bp, Homo sapiens
cacaagtttacctatataacaaacctgcacatgtacctctgaacttagcataaaaggtttatttttatttagaatgttagcctaccactactaggctgaaatcaggatgacgcaaactggacctccggacaggcaattactgaagatgatcatcggaaccagacacacagacctgtacactcctgcatcacccccagttgtttctcacaccaagttttccttcttagatcccttccctcagcaccggaagttggaatgatattttaaaggcatgagcccagccatatctcaactgctaccagytgaataaggctgctttttttccatcacacctcacttcttgggttttcaggctctgagtggcaagcagccagacttgagccagttacacaatgaccgaactgctcaatgatgtctcagcacatatcttcatctttatgtgaaacactttaacaatacctaaatatagctacccggaaatattg

SEQ ID NO: 198734 - DNA, 663 bp, Homo sapiens
agcaagtaggtgtatttacaycagcatcaccacaaacatgtaagtaatgtgttacaccatgaagttacaaaggctacattttcactagacaataggaattattcagctccattgtaatcttatgagactaccatcgtatattccatcttttattggctaaaatgtcattttgttgtgaatgactatagataatttgaatgagacaaattgtatcaatttaaatacccccaacgttaactaaaaccaccaaaatgttcatgttgctttctatggtcatttatggacatgaattggaagattcaataaaatataaagaaataaaattactgctctttagaatggaggaataagacacgaccatcatgtcctaggctagaaaaagacttgttagtacatatcaacaggagaaaacccaccaccctcttctgaaatggaattctaaaaatatgtcctgagtgactattcttagaaatattcctacaattatgtgaaatctttacatggcttgggatttgagaacatttatgaatctgttttactgttgtgtacagtaacatgtcaatctcactataatgactcaaatgtgctagctcttctgatactaattgctataaatgtcagtgtgttagaaatattttaaaatagaacctaccacatttatgt

SEQ ID NO: 198735 - DNA, 663 bp, Homo sapiens
agcaagtaggtgtatttacaccagcatcaccacaaacatgtaagtaatgtgttacaccatgaagttacaaaggctacattttcactagacaataggaattattcagctccattgtaatcttatgagactaccatcgtatattccatctkttattggctaaaatgtcattttgttgtgaatgactatagataatttgaatgagacaaattgtatcaatttaaatacccccaacgttaactaaaaccaccaaaatgttcatgttgctttctatggtcatttatggacatgaattggaagattcaataaaatataaagaaataaaattactgctctttagaatggaggaataagacacgaccatcatgtcctaggctagaaaaagacttgttagtacatatcaacaggagaaaacccaccaccctcttctgaaatggaattctaaaaatatgtcctgagtgactattcttagaaatattcctacaattatgtgaaatctttacatggcttgggatttgagaacatttatgaatctgttttactgttgtgtacagtaacatgtcaatctcactataatgactcaaatgtgctagctcttctgatactaattgctataaatgtcagtgtgttagaaatattttaaaatagaacctaccacatttatgt

SEQ ID NO: 198736 - DNA, 663 bp, Homo sapiens
agcaagtaggtgtatttacaccagcatcaccacaaacatgtaagtaatgtgttacaccatgaagttacaaaggctacattttcactagacaataggaattattcagctccattgtaatcttatgagactaccatcgtatattccatcttttattggctaaaatgtcattttgttgtgaatgactatagataatttgaatgagacaaattgtatcaatttaaatacccccaacgttaactaaaaccaccaaaatgttcatgttgctttctatggtcatttatggacatgaattggaagattcaataaaatataaagaaataaaattactgctctttagaatggaggaataagacacgaccatcatgtcctaggctagaaaaagacttgttagtacatatmaacaggagaaaacccaccaccctcttctgaaatggaattctaaaaatatgtcctgagtgactattcttagaaatattcctacaattatgtgaaatctttacatggcttgggatttgagaacatttatgaatctgttttactgttgtgtacagtaacatgtcaatctcactataatgactcaaatgtgctagctcttctgatactaattgctataaatgtcagtgtgttagaaatattttaaaatagaacctaccacatttatgt

SEQ ID NO: 198737 - DNA, 572 bp, Homo sapiens
cccaactggctgtacacataaattctgtaatactgtacaaaagtaattcttatataagcccctccagagaacagaaaaaacccaaaaactaatcagtttaatttataaggctagtgtgatatggtggacaaaacatgatatagggacatgaagaaagaaaaactggcctattttcttccaaatgtagattcagtatcytaaataatatatcagctaaacttacaaaaactgtgaaattatcacaatcaaattagtgtttaacctagataagtgaagttattttgtcatgtaagtatatgtcatctgcagaaacataatttgatacatttcaaaaatgttttaatgataaaaattctcacaaaattaagaatagaggaacacttccttaacttgataaaactttgtcaaaacattataacaaacattaaataagcaaatatataagcccaccatgatgcctactgttttatatagttttagaagataaagtcaaagctataaataaacaatattatctagactttcagtactttaagagaataagtaaagctgtcattatttgcagctgaaaa

SEQ ID NO: 198738 - DNA, 592 bp, Homo sapiens
aattaaaagtgctactccagtgaatacacaaatgataagaaagtgaaacaaacttattgctgatatggagaaagttttaatgatctggatagaagatcaaaccagccacaatgttctattaartcaaaatctaatccatagcaaggccctcactctcttcaatactgtgaaggctgagagaggtgctgaagcttcagaggaaagctagcagagtttggttcataagatttaaggaaagaggccatctccatatcataaaagtgcaaggtgaagcagcaagtgctgattgagaaggtgcaggaagttatccagaagatctaagcaagaccattgatgaatgtggctacactaaacaacagattttcaatacagattcttctgttagaagaaaatgctactgaggactttcatagctagagaagagaaatcaatgcttggtttcaaagattcaaaaggctggctgactctcctgttagacactaaagcagctagtgactttaagttgaagccagtgttcactgaccatttcaaaaatctcatggcccttaagaggtatgctaaatctactctgccggcatgttaaaaatacaaa

SEQ ID NO: 198739 - DNA, 592 bp, Homo sapiens
aattaaaagtgctactccagtgaatacacaaatgataagaaagtgaaacaaacttattgctgatatggagaaagttttaatgatctggatagaagatcaaaccagccacaatgttctattaaatcaaaatctaatccatagcaaggccctcactctcttcaatactgtgaaggctgagagaggtgctgaagcttcagaggaaagctagcagagtttggttcataagatttaaggaaagargccatctccatatcataaaagtgcaaggtgaagcagcaagtgctgattgagaaggtgcaggaagttatccagaagatctaagcaagaccattgatgaatgtggctacactaaacaacagattttcaatacagattcttctgttagaagaaaatgctactgaggactttcatagctagagaagagaaatcaatgcttggtttcaaagattcaaaaggctggctgactctcctgttagacactaaagcagctagtgactttaagttgaagccagtgttcactgaccatttcaaaaatctcatggcccttaagaggtatgctaaatctactctgccggcatgttaaaaatacaaa

SEQ ID NO: 198740 - DNA, 592 bp, Homo sapiens
aattaaaagtgctactccagtgaatacacaaatgataagaaagtgaaacaaacttattgctgatatggagaaagttttaatgatctggatagaagatcaaaccagccacaatgttctattaaatcaaaatctaatccatagcaaggccctcactctcttcaatactgtgaaggctgagagaggtgctgaagcttcagaggaaagctagcagagtttggttcataagatttaaggaaagaggccatctccatatcataaaagtgcaaggtgaagcagcaagtgctgattgagaaggygcaggaagttatccagaagatctaagcaagaccattgatgaatgtggctacactaaacaacagattttcaatacagattcttctgttagaagaaaatgctactgaggactttcatagctagagaagagaaatcaatgcttggtttcaaagattcaaaaggctggctgactctcctgttagacactaaagcagctagtgactttaagttgaagccagtgttcactgaccatttcaaaaatctcatggcccttaagaggtatgctaaatctactctgccggcatgttaaaaatacaaa

SEQ ID NO: 198741 - DNA, 592 bp, Homo sapiens
aattaaaagtgctactccagtgaatacacaaatgataagaaagtgaaacaaacttattgctgatatggagaaagttttaatgatctggatagaagatcaaaccagccacaatgttctattaaatcaaaatctaatccatagcaaggccctcactctcttcaatactgtgaaggctgagagaggtgctgaagcttcagaggaaagctagcagagtttggttcataagatttaaggaaagaggccatctccatatcataaaagtgcaaggtgaagcagcaagtgctgattgagaaggtgcaggaagttatccagaagatctaagcaagaccattgatgaatgtggctacactaaacaacagattttcaatacagattcttctgttagaagaaaatgctactgaggactttcatagctagagaagagaaatcaatgcttggtttcaaagattcaaaaggctggctgactctcctgttagacactaaagcagctagtgacttyaagttgaagccagtgttcactgaccatttcaaaaatctcatggcccttaagaggtatgctaaatctactctgccggcatgttaaaaatacaaa

SEQ ID NO: 198742 - DNA, 374 bp, Homo sapiens
ttctttcctgccctgattgtttgatagtgttcataatcaatattaaaaacagaattcttcatttaacaaaattgcagcagcttggattacggtggtagcagttggaattaagagaactatatgtattggactgatttggggaagttaggttaaagagatttacttacggattaaatataagggtgatgatgaggcaaagagagttaccaaggacgacttctaagtttttgtcttaagctaatgtgtatatgtcactataatttactgaaatggcygcatattttggccatgataattttgaaatttctcttgggcatccaagttgagatgttaagaatttgtggtatgttaaacaaaatgagccagcgtagaaa

SEQ ID NO: 198743 - DNA, 628 bp, Homo sapiens
attttgaaatttctcttgggcatccaagttgagatgttaagaatttgtggtatgttaaacaaaatgagccagcrtagaaagataaatactacatgttctcactcatatgtgaaagctaaaaaagttctactcacagaagtagagagtaggatgatggttactagaaggttgaaaagtaggggaaagggaggttagccagaggtgggctaatagatacacaagtacagctgaataggaaaaatgcattctcattttctatagcactatagggtgactatgataaacaacaatttatttatactttcaaaactaggagaatgaattttgaatgttgtcaacacaaagaaatgataaatgagatgatatatttgctaattatcttaatttgatatttatacattacattcatatattgaaatatcacactgtactcaaatatgtagaatctttatgtggcaattaaaattattataattaaacatcttaaaaattaaaataaaagtgacatacttttgaccaactataaaattcgacttcaattaccagaatatacattgtttagtcttcattaccaggttctcatattttaaaattgtgaatgttgcccttcattttaaggacagagaaa

SEQ ID NO: 198744 - DNA, 628 bp, Homo sapiens
attttgaaatttctcttgggcatccaagttgagatgttaagaatttgtggtatgttaaacaaaatgagccagcgtagaaagataaatactacatgttctcactcatatgtgaaagctaaaaaagttctactcacagaagtagagagtaggatgrtggttactagaaggttgaaaagtaggggaaagggaggttagccagaggtgggctaatagatacacaagtacagctgaataggaaaaatgcattctcattttctatagcactatagggtgactatgataaacaacaatttatttatactttcaaaactaggagaatgaattttgaatgttgtcaacacaaagaaatgataaatgagatgatatatttgctaattatcttaatttgatatttatacattacattcatatattgaaatatcacactgtactcaaatatgtagaatctttatgtggcaattaaaattattataattaaacatcttaaaaattaaaataaaagtgacatacttttgaccaactataaaattcgacttcaattaccagaatatacattgtttagtcttcattaccaggttctcatattttaaaattgtgaatgttgcccttcattttaaggacagagaaa

SEQ ID NO: 198745 - DNA, 455 bp, Homo sapiens
actttctcaattttccattgtggcatataatactcttctatttaacaacttagtaaaactgtgtcataaaggatgctaaaattattrtctaatagtttccctcaaagatctggtccagtgagagaatctagatttacaaatatctgtatgtcaaggaagattctgacatattatatcaaagaaaaataacattatagagatttagaaaaaggagaaactgtatttacttaatgatgaaaagaaagacttcatgaagggtgtggtatatgtggtgaaaagaaatcaaggaatatgtagagtaaggcagagcatgagaggtccttccagaaaggtagaagagtatataatattctcatcaaatgttcttccttgagtagactacagctcatttatttgcctggaaaactaatagcatagtggcaattatcagatttcttcaataatatttaggccat

SEQ ID NO: 198746 - DNA, 620 bp, Homo sapiens
atgttcatcacatttgtagatagtaccaaatttgacatgcttattgatatcctgaaacgcaggcaaaaatgtcaagacaatcttgcaaattagaaaattagtcactggtaggatttgaaaattttgtttcttccaaaattcttgttgaaactttatctctagttcaatagtactaggaggtgggccctttaggaagtgattaagtcatgagagcagagaactgctggatgtcattagtctttataaaagtagttgaggaagcagctttgttcttttttgctctttgattcttctgccacatgaggacagtgtttgtcacttttgtccttttgccatgtaagagcagacaccccrttggatcattgaacagccctcactagacattgaatctgatgatggcttgatcttggaatttccaaaccccagagtgtaagaaataaattttggttgtttataaattacccaggctctgatattttttagcagcagaaatggactgagacggtttctatctggaataaattttggaaggaacatggtcgtaaaagtagacttcagaacaagcaattcaactatagcatataaataactggctgagcatatattaggaaactcctgta

SEQ ID NO: 198747 - DNA, 588 bp, Homo sapiens
tcatgcaagtcactgtgaggctggggaggttaagtgcctgcccaaccctgagcctcagctcttcactcacaccctgagaatgacacccctaccacctgcagagccacactagcacagaatggacgcatgcaatatgtgaagcactaaaaccattaacccactagttcattggcagacaagctctgtgtggggtgttgaggctgctcaggggatctggacacagccctaattcctcatcaggacagccttccccamtcacattcctaaatgaagtatgaaggcaaggaaaagcaggagtgccccaccccagcccctagggccccctcccagaagagtgcccccatccaaggtgcctcaccttgctgaggccagtggtgaccaccatgctctcagtaccataccagaggccattgtcttttcattaattcccacttcactgcaaggaaattatacaattataagaacaataaatacacttgcacttgctcagcaggctttattttcaaagcacatttgtatctggtgtcttgtatgagtcattcccaatatcttaattaacaagggtaatatttcctttttaaaaattat

SEQ ID NO: 198748 - DNA, 610 bp, Homo sapiens
tgtgtcagtataaaaaaagggaagtgaggcagaattcctctaatcaggtctgagtgtcattttcctctaaccctcagctttggaaactttggatgcttcttgaaagaattcattataaagkctgcattgttagatcgggatgttacacatcattgtactcccgccccttgcaaagtgctaggacatagtaggcattcagtaaatagttgtgcagtgctgttggatgcactcctttagaggccagtagttttgattcagccaattttattttttcctgtctttcaacaaggatatggctgcatgtggcgtcagctttggaagatattaagtagcaagtttggaaatgaattttctggagattgtatttacttatcggctaaaggaaaaaaaagatacaatccagtatatctgtttataacgtttcttgcctggctgtcttgagataaacattttagtcatttttatagcagttagatagatatgaacttaaacaagtacagacacatctgtcactagttaatttgatgatttacgaatgtaaaatgtttccaaggaagtctgtaatgatgttgcctttgtctaaattaatctcttgatagaaatcagtgaa

SEQ ID NO: 198749 - DNA, 582 bp, Homo sapiens
atgagtctgtctgtgatttttttcagcactgtgatccaaaagatatccaaacataacatccccctcctaccccagccccctcagtgcatgtgtgtttggtaaacgttaatgtgcctggggtctttggtattgggaagttaacattcatttttttggytggaaatgcaaatagttcatcaaaatgtaatgcttttggtgaaccagagattgaaagaatgaaccaattctgaggacagtaatcatggacttgatttgcagcttaagaaaggtcatttctgctgagtagtatcctgaagcaaatactaccaagggacgctatggactttctagactcgatattcttaaaactatggataaacatacctcttgagaaatgcaggtattcacatgcttaaagagaggtttggtacgtatgctatctttttttttttttttcttgagacagggtcttactttattgcctagactggagtgtagtggcacagtcatagctcactgcagcctcagcctccctaagtgttgagattacagatgtaagccactgtgcctggcctgccgatactatcttaagggtgcttgcag

SEQ ID NO: 198750 - DNA, 520 bp, Homo sapiens
aaaacttttaaatatactctcgtctccctgcttttcatcagtccattgaccaatcactctggttatcaatgcacctatttccagaaattcttctaccctaattttctgatgttcagtgtttactgtgagcatagaagaccaatatagacacacacttacacgtgtgtgcatgcagwtgtgcattagaactgtgtgtagagaggtttgaggaggtacctgagagtttcctatgagtaaatggaatatgttatgagttctctgttttggttttccagagactgcttttgttaaattttttgctcattttaggaatagaaagttgcaagacaaatgagtttaataatgatgaaaagctcccagatttttaggagctatctatctttctagaaagttcttcctcggttcattttttttttttttttcacttaatgcaagtataggcaatggttactaaaaggagattccttttatgagaggcttgtcatttcattatcccaacttcacatacaaatgatttcat

SEQ ID NO: 198751 - DNA, 520 bp, Homo sapiens
aaaacttttaaatatactctcgtctccctgcttttcatcagtccattgaccaatcactctggttatcaatgcacctatttccagaaattcttctaccctaattttctgatgttcagtgtttactgtgagcatagaagaccaatatagacacacacttacacgtgtgtgcatgcagatgtgcattagaactgtgtgtaragaggtttgaggaggtacctgagagtttcctatgagtaaatggaatatgttatgagttctctgttttggttttccagagactgcttttgttaaattttttgctcattttaggaatagaaagttgcaagacaaatgagtttaataatgatgaaaagctcccagatttttaggagctatctatctttctagaaagttcttcctcggttcattttttttttttttttcacttaatgcaagtataggcaatggttactaaaaggagattccttttatgagaggcttgtcatttcattatcccaacttcacatacaaatgatttcat

SEQ ID NO: 198752 - DNA, 520 bp, Homo sapiens
aaaacttttaaatatactctcgtctccctgcttttcatcagtccattgaccaatcactctggttatcaatgcacctatttccagaaattcttctaccctaattttctgatgttcagtgtttactgtgagcatagaagaccaatatagacacacacttacacgtgtgtgcatgcagatgtgcattagaactgtgtgtagagaggtttgaggaggtacctgagagtttcctatgagtaaatggaatatgttatgagttctctgttttggttttccagagactgcttttgttaaattttttgctcattttaggaatagaaagttgcaagacaaatgagtttaataatgatgaaaagctcccagatttytaggagctatctatctttctagaaagttcttcctcggttcattttttttttttttttcacttaatgcaagtataggcaatggttactaaaaggagattccttttatgagaggcttgtcatttcattatcccaacttcacatacaaatgatttcat

SEQ ID NO: 198753 - DNA, 552 bp, Homo sapiens
aattcaatagggcatattaagccatatctgctggaaaaacttaggctttatttcttgaccaacaactacagagtgattacttaaattttttttattatggtaaaatatatataacataacatttatgattttaatcagtttaagtgtacagttcagtggcattaagtacattcacattgttgtagagccatcaccaccatccatcaccaggcgttttcatcctaccatatggaaactctacccattaaacattaactccctatccctacccctagcctttgggaaccactcttccactttctttctgtatgtgatggactattctaccttatataagtggaatcatacaataggtatccttctgtgtctggcttatttcacttgacataatgttttcaaggttcatccatgtggtaacatgtcasaatttctttccttttaaaggttgcatcatattccattatatgtacatacacatttcatttatccatttatccatcgatggaagtaattactttttaaaaagcacaccagtacttacacataaaaatg

SEQ ID NO: 198754 - DNA, 575 bp, Homo sapiens
tgcttgaaactctctttttcttgctttctggaagggcgtagctcctgcctttctgatggtttcatctgaatctccttcataaattctcctttctctgcctggcttttaaataatggtcttatgcagagtcttgacctaggacctattttcttctcattctatacaaaattttatgattttaactattctcggggcttctacatcctgtaggcaaagaccttcttcaagtctgtatttccrcctcagacctctcctgtaagttccagacccctggattcaacagcttactaggtaacctcacctggatgccccactaacatttaaactcaatgggttccaaactgaatttataattccctcttccaaacctgtttctgctgttttgttatctttctcattgtatacaattgctatagcaccaatatccattcagttgtccaagttagaaatctgaatgtcatcccttgacctcttccatcctctctgcttctaatctgttgattccatttccagaagaggctctcaaatctatccacctctctccatctcccttgccattaccttagtctcagcta

SEQ ID NO: 198755 - DNA, 427 bp, Homo sapiens
gaattctaattgttcaaatcatttaatctgataatatcacttttggcaactacctgctgaaattacagcttaagaacatagagatatatctataaggatattctttggtacattgctgcaatggcaaaagaaactgttaaaacttccatatccatattacaatggaatgttttgtttccattaaaaattaaaaagtattcatcatggcatacagtttgtttrtttgtttatttatttatttatttatttatttatttatttgaggcacagtctcactctattgcccaggctagagtacagtggcatgatctcggctcactgcaatctctaccacccgggttcaagcgattctcctgcctcagcttcccaagtagctgggactacaggtgcacaccaccatgcctggctaatttttgtatttttagta

SEQ ID NO: 198756 - DNA, 427 bp, Homo sapiens
gaattctaattgttcaaatcatttaatctgataatatcacttttggcaactacctgctgaaattacagcttaagaacatagagatatatctataaggatattctttggtacattgctgcaatggcaaaagaaactgttaaaacttccatatccatattacaatggaatgttttgtttccattaaaaattaaaaagtattcatcatggcatacagtttgtttgtttrtttatttatttatttatttatttatttatttatttgaggcacagtctcactctattgcccaggctagagtacagtggcatgatctcggctcactgcaatctctaccacccgggttcaagcgattctcctgcctcagcttcccaagtagctgggactacaggtgcacaccaccatgcctggctaatttttgtatttttagta

SEQ ID NO: 198757 - DNA, 427 bp, Homo sapiens
gaattctaattgttcaaatcatttaatctgataatatcacttttggcaactacctgctgaaattacagcttaagaacatagagatatatctataaggatattctttggtacattgctgcaatggcaaaagaaactgttaaaacttccatatccatattacaatggaatgttttgtttccattaaaaattaaaaagtattcatcatggcatacagtttgtttgtttgtttatttatttatttatttatttatttatttatttgaggcacagtctcactctattgcccaggctagagtacagtggcatgatctcggctcamtgcaatctctaccacccgggttcaagcgattctcctgcctcagcttcccaagtagctgggactacaggtgcacaccaccatgcctggctaatttttgtatttttagta

SEQ ID NO: 198758 - DNA, 496 bp, Homo sapiens
tagctgcactagccaaaaatgtgagaaaatcagagtcagtctccagacagaaccctcctatcctatttttcttgtcagtctaacagcaactaagaaatccaacaagcctcccctctccctaccccacccaactcctcacagagagctgacaccctgctctggggagcaggctctggtatatagcccccagatcacaggtgtcagatcccctcctctaatggtcaacgtcacaggaaaagaccagccagytggttcccaagatgtgcttagatagcttctataggtatgaactggagcttgggagactaaccaaggaaccttctaaagacgaagtctatggtatctcccagtgtatcttggattactggagaatgggaaatgcataacacagtagatttccaagaacccaatgacttcaaatttggactttttgggcttatggattctgtaatttaccttacaaacaatctttgcacaaagagcaagtgtccaaggc

SEQ ID NO: 198759 - DNA, 512 bp, Homo sapiens
caaataatttgtaaccaggaacacgaggaacaactggtgagcctcttttgtcctttttagaaaagatttgagacaagcaggggcaggtggtggtgggctcatctccaaacagctgtgagagttagcattaaggtagtaagcccaccaacctcaccctacttcatcctccccagtcctctccgcccaggtggcagggagcacgccctctgctgaccagcgcaccagtggctccaagtacccagtctttggcatcagtggccaccaggctgcagctctgtgaacagcagctgcagaggagcttcctgccagcccagggaagccatagcctgtgcatgatcagccccttttaggaaactaaggttgatttgatggagccagtgctggcaaatctgtccaaggaaaaccgtcctggtacctggatttatccaggatccagccttggaggtggtaagggaggtcactttcgtggcaggccaagagccttgasaggttttgaaaaattcaagaagagg

SEQ ID NO: 198760 - DNA, 561 bp, Homo sapiens
tgggctccagccttcacctaggcccaggactaggatgcctgccctaacatttatctttataccttaaagcaaaacagctggaccataagcattcaagaacaaactgtgaataaggagaaagttctcccaggaaacaagagctttagttmtgttgggccagcccttatattccttagctgttaccagtcactgcttgatttaatctcggctatcacttggcctgacaggtctgctgctggtgccaggatgtctgggttttgaagcctggctccattacatacttcctgtgtgaccttgggcaacttactcaacctgtctgttcctcagtttccccagctgtattatgtcagcataatagtttgttgtgtgaattaaatgaggtaataactggaaatgcttcaaacatggttcctatcatgagaaatcctgctttccgcctaaatgtgctggaaaattcctggtggtgcagaacaggagaccagagcaaaggaaagacagggtgcagaagccaaaaattaccttggagaacaaagcgcatgttaaggttatttttggattcta

SEQ ID NO: 198761 - DNA, 428 bp, Homo sapiens
tggaatgtatgccctacgccaggcccatggaatcggagcttggttttaggaaaaagcacctytgcagttcagaagccctggtccaaccaccactcacctctccccacacggtgagcagtgaaccttggtccacaaaccagacccccagaatccgtttcatgtcccaccacggtgtgctctcccaggctgtgcctgaggcccaggctcctgtgcgcagcagaacgtggggaaaggggatagagtgtgtgcaagtgttgggtgggtgggggaaggctggacggtggggaagggagtgaacagtagtagcgggaggtggtggggggaggagagggtgctgatacaggcagcaggtgtaggggtggtgctgggggctcagtgccatcccccggccagccatgcatgcaacagttgggggcctgtcccctggt

SEQ ID NO: 198762 - DNA, 433 bp, Homo sapiens
ctggggtgcctggccttgaggtgccctygcaagtcccatttcacaggcagacttctgcgaatccattatctgcgataccccagggcgctggagcttaattagggcttagcccaggcccagagctgagaaacctaccactcaattaattggatactttcctctgcagttctgggaggggtctggcgaggctgggggctggcagaagggaatggcattttcactaattaaactaatcgattacccagagtgctaggcaccaggccagcaggggctgcagaggaaagagatggcagagccaggcacggatgggctggggggtggggcgggtcactcccccaggtgtacactacaacctcccctgacctcacaggggagatgagagacagggggcggcaggtgaatggaacgtctcccataggccaagacaggccaa

SEQ ID NO: 198763 - DNA, 602 bp, Homo sapiens
gaattaatgtaattctttgatcaaatttcttcctgtgccattaaataattttcagtatttttattttactgaaataatttagactttattcagtgatcccattttatgtccttattaaatctttccaacttttccaatcagcaattttgaggtttcttttgtagtcattttctaccaaacctaattttcctgggctagattttgcaggtataatttttgacaagaagatttgattcttttgtcaatttttaaagtcaattacaaatttttctgtgtaaagctttcacctttgtcagttttattttgtgttatttctataaagtgcaattttaaaagagttcacttttgtagttttgtgrcttaccaacacaatgagattcttcagtcagttttttgtcaatatcaaagttaacatatatcattttagttattatcagtttgatcctgtgtagattctttttactacatcaatttttttttctagtgacccgttgaaaatatacttgatgtaagaatatcaaggtcataacatcatgttttcatccaaagctactctgtttaaatatatttaaaaagtagaatcgacctgtctttttagaagc

SEQ ID NO: 198764 - DNA, 386 bp, Homo sapiens
agattccctctttgaattgaagtgtttcaaagatatcttattttaaaataccaaaataggaatagaatatgaagggctggttatgagtaatatgatacacktttttgagaggatgagattacaataacaatacctcctctcatagaatagccagcaagtctccactaaataagagtgccttgattttatagatgtttaatcatggatattgagataatgcgaacgatttgtagacacaggagtttattaaagaattatataatacctttcaagtgttgaaattaagcctgcatccccacaattttcagaggtgctgatgcctaataaactcaaccccttgcatgccaaaattggcttaaagcccacccattacccaagctacactt

SEQ ID NO: 198765 - DNA, 386 bp, Homo sapiens
agattccctctttgaattgaagtgtttcaaagatatcttattttaaaataccaaaataggaatagaatatgaagggctggttatgagtaatatgatacacttttwtgagaggatgagattacaataacaatacctcctctcatagaatagccagcaagtctccactaaataagagtgccttgattttatagatgtttaatcatggatattgagataatgcgaacgatttgtagacacaggagtttattaaagaattatataatacctttcaagtgttgaaattaagcctgcatccccacaattttcagaggtgctgatgcctaataaactcaaccccttgcatgccaaaattggcttaaagcccacccattacccaagctacactt

SEQ ID NO: 198766 - DNA, 386 bp, Homo sapiens
agattccctctttgaattgaagtgtttcaaagatatcttattttaaaataccaaaataggaatagaatatgaagggctggttatgagtaatatgatacacttttttgagaggatgagattacaataacaatacctcctctcatagaatagccagcaagtctccactaaataasagtgccttgattttatagatgtttaatcatggatattgagataatgcgaacgatttgtagacacaggagtttattaaagaattatataatacctttcaagtgttgaaattaagcctgcatccccacaattttcagaggtgctgatgcctaataaactcaaccccttgcatgccaaaattggcttaaagcccacccattacccaagctacactt

SEQ ID NO: 198767 - DNA, 378 bp, Homo sapiens
tctttgaattgaagtgtttcaaagatatcttattttaaaataccaaaataggaatagaatatgaagggctggttatgagtaatatgatacacttttttgagaggatgagattacaataacaatacctcctctcatagaatagccagcaagtctccactaaataagagtgccttgattttatagatgtttaatcatggatattgagataatgcgaacsatttgtagacacaggagtttattaaagaattatataatacctttcaagtgttgaaattaagcctgcatccccacaattttcagaggtgctgatgcctaataaactcaaccccttgcatgccaaaattggcttaaagcccacccattacccaagctacactt

SEQ ID NO: 198768 - DNA, 378 bp, Homo sapiens
tctttgaattgaagtgtttcaaagatatcttattttaaaataccaaaataggaatagaatatgaagggctggttatgagtaatatgatacacttttttgagaggatgagattacaataacaatacctcctctcatagaatagccagcaagtctccactaaataagagtgccttgattttatagatgtttaatcatggatattgagataatgcgaacgatttgtagacacaggagtttattaaagaattatataatacctttcaagtgttgaaattaagcctgcatccccacrattttcagaggtgctgatgcctaataaactcaaccccttgcatgccaaaattggcttaaagcccacccattacccaagctacactt

SEQ ID NO: 198769 - DNA, 504 bp, Homo sapiens
ctggccagtgagctttcagtctagcaaggaatgtagaacaggaacatagcaactctaatccaatgtagagagagagacaattttaaatccaattgaaaaataaatagctgtgttagactgaggccatcaaataaagcttcatgcaataagtagcaataggtcttcaaagatgacagtttagcaaaaggcacaaagrtgaaaagtgcagagcattaagtagtgtatggtttagtgtgctggaaataacaggttggacaagagttgtgactaggataaacagcaaaaaggatttatgagagcctgatggccactagtgactgggtaagatgtgtacactttctgtgcaggaaaagggacaaagcttttgagcagcagagaaacatgatcagagggatgcatgaggaaggtcctgaaaaccctaatgagtaatcttggttaaaccattgcactataactcaagttttgcatgtatatactataatagaaacaacatttgtgctcttc

SEQ ID NO: 198770 - DNA, 527 bp, Homo sapiens
aattttagatctttcctgctttctcttgtgggcatttagtgctataaatttccctctacacactgcttaaatgtgtcccagagattctggtatgttgtgtctttgtcctcattggtttcaaagaacatctttatttctggcttcatttcattatgtacccagtagtcagtcattcaggagcaggttgttcagtttccatgtcgttctttccttccttccttctttcctttcttccttctttccttccttccttccctccttctttacttccttccttccttctttccttccttccttccttctttccttctttcttttttgacagagtttcagtcttgtcacccaggctggagtgcagaggcacaatctcagctcactgcaacctccacctcctgggttcaagygattctcctgcctcagctttgcgagtagctgggaatacagccacctgccatcatgcccggctaatttttgtatttttagtagagacagggtttcgtcatgttggccaagcccgtctcgaagtc

SEQ ID NO: 198771 - DNA, 483 bp, Homo sapiens
aaagttggttgtagatatttggctttatttctgggctctctattctcttacattaatttttttttagataggatttttctgtcattgtccagcctgcagagtaatggcacgatctcggctcactgcaacctctgcctcctgtgttcaagtgattctccacatctttggcactgccttagtagaggctgtccgtggtggctccactcctgcatcaggcttcttcctgggcacatagttctctatatacatcttctgatatctargtagaagctgcccagcctccttcactcttccattctgtatatctgccataatccagttgtcccaacaccatttactgaatacagagatttttcctcattgcttgtttttgtcagccttatcaaatataagatggttgtatatgtgcagctttatttctttatttctgttttctattttgtcccatttttcctgcatgtcttctcatgtaccagtaccaag

SEQ ID NO: 198772 - DNA, 477 bp, Homo sapiens
ttcaccttgtttgttacctgtatttccaggcatttcatattttgtgtgtgtgaatattgtaagtgkgataggattgtgttcttgatttcagtctcagcttggacgtagttggggtatagaaatgctagatttttgtacattgattttgtatcccaacactttaccaaagttgtttatctattctataattattttggcagggtctttagaattttgtaggtatagaattatatcatcagtttggagagatacattgacttcttcttttcctatttggattctgtattagtccattcacacactataaagaaacacctgagactgtgtaatttataaagatttttaattgtttcatggttcttcaggctgtacaggaagcatggctggggaggcctcaggatcctgacaatcagtacagaaagggaagcatcatgtcctacatggctggagcaggaggaagagagacaagggaggtgc

SEQ ID NO: 198773 - DNA, 476 bp, Homo sapiens
tttcaccttgtttgttacctgtatttccaggcatttcatattttgtgtgtgtgaatattgtaagtgggataggattgtgttcttgatttcagtctcagcttggacgtagttggggtatagaaatgctagatttttgtacattgattttgtatcccaayactttaccaaagttgtttatctattctataattattttggcagggtctttagaattttgtaggtatagaattatatcatcagtttggagagatacattgacttcttcttttcctatttggattctgtattagtccattcacacactataaagaaacacctgagactgtgtaatttataaagatttttaattgtttcatggttcttcaggctgtacaggaagcatggctggggaggcctcaggatcctgacaatcagtacagaaagggaagcatcatgtcctacatggctggagcaggaggaagagagacaagggaggt

SEQ ID NO: 198774 - DNA, 477 bp, Homo sapiens
ttcaccttgtttgttacctgtatttccaggcatttcatattttgtgtgtgtgaatattgtaagtgggataggattgtgttcttgatttcagtctcagcttggacgtagttggggtatagaaatgctagatttttgtacattgattttgtatcccaacactttaccaaagttgtttatctattctakaattattttggcagggtctttagaattttgtaggtatagaattatatcatcagtttggagagatacattgacttcttcttttcctatttggattctgtattagtccattcacacactataaagaaacacctgagactgtgtaatttataaagatttttaattgtttcatggttcttcaggctgtacaggaagcatggctggggaggcctcaggatcctgacaatcagtacagaaagggaagcatcatgtcctacatggctggagcaggaggaagagagacaagggaggtgc

SEQ ID NO: 198775 - DNA, 476 bp, Homo sapiens
tttcaccttgtttgttacctgtatttccaggcatttcatattttgtgtgtgtgaatattgtaagtgggataggattgtgttcttgatttcagtctcagcttggacgtagttggggtatagaaatgctagatttttgtacattgattttgtatcccaacactttaccaaagttgtttatctattctataattattttggcagggtctttagaattttgtaggtatagaattatatcatcagtttggagagatacattgacttcttcttttcctatttggattctgtattagtccattyacacactataaagaaacacctgagactgtgtaatttataaagatttttaattgtttcatggttcttcaggctgtacaggaagcatggctggggaggcctcaggatcctgacaatcagtacagaaagggaagcatcatgtcctacatggctggagcaggaggaagagagacaagggaggt

SEQ ID NO: 198776 - DNA, 476 bp, Homo sapiens
tttcaccttgtttgttacctgtatttccaggcatttcatattttgtgtgtgtgaatattgtaagtgggataggattgtgttcttgatttcagtctcagcttggacgtagttggggtatagaaatgctagatttttgtacattgattttgtatcccaacactttaccaaagttgtttatctattctataattattttggcagggtctttagaattttgtaggtatagaattatatcatcagtttggagagatacattgacttcttcttttcctatttggattctgtattagtccattcrcacactataaagaaacacctgagactgtgtaatttataaagatttttaattgtttcatggttcttcaggctgtacaggaagcatggctggggaggcctcaggatcctgacaatcagtacagaaagggaagcatcatgtcctacatggctggagcaggaggaagagagacaagggaggt

SEQ ID NO: 198777 - DNA, 448 bp, Homo sapiens
gtatttccaggcatttcatattttgtgtgtgtgaatattgtaagtgggataggattgtgttcttgatttcagtctcagcttggacgtagttggggtatagaaatgctagatttttgtacattgattttgtatcccaacactttaccaaagttgtttatctattctataattattttggcagggtctttagaattttgtaggtatagaattatatcatcagtttggagagatacattgacttcttcttttcctatttggattctgtattagtccattcacacactataaagaaacacctgagactgtgtaatttataaagatttttaattgtttcatggttcttcaggctgyacaggaagcatggctggggaggcctcaggatcctgacaatcagtacagaaagggaagcatcatgtcctacatggctggagcaggaggaagagagaca

SEQ ID NO: 198778 - DNA, 462 bp, Homo sapiens
atttccaggcatttcatattttgtgtgtgtgaatattgtaagtgggataggattgtgttcttgatttcagtctcagcttggacgtagttggggtatagaaatgctagatttttgtacattgattttgtatcccaacactttaccaaagttgtttatctattctataattattttggcagggtctttagaattttgtaggtatagaattatatcatcagtttggagagatacattgacttcttcttttcctatttggattctgtattagtccattcacacactataaagaaacacctgagactgtgtaatttataaagatttttaattgtttcatggttcttcaggctgtacaggaagcatggctgrggaggcctcaggatcctgacaatcagtacagaaagggaagcatcatgtcctacatggctggagcaggaggaagagagacaagggaggtgccacata

SEQ ID NO: 198779 - DNA, 454 bp, Homo sapiens
ctgtcattggagaagacccaaattctaggaactgggccttatcctccagaacttaaagaaagatatcagtgctaaatagccacattgagtctaggaacactttagtcattaacttatttttggctcccctctgtgtaacggcaacaacagtctttttaagggaaaaacatatttttgtaggtaaaatagctatgtactgaaagtattataatcataaactccacatatctgggctctgagtaagtctattagtccattttcacactgctgataaagacgtacctgagactaggcaatttacaaaaaaagaggtttaactggactcacagttccatgtggctggggaggcctcacaatcatggcagaaggcaaggaggagcaagtcacatcttacatggatggcagctcacaaagagagtttgtgcwctaaaactcccccttataataaccacca

SEQ ID NO: 198780 - DNA, 656 bp, Homo sapiens
gggatttaatatatttttaaaatttctatacaggaagcttattttaaaaaaccttagggacttttacatatgcaaatgttcactaacaaaaaaataatcaaccttctaacactttgcatggaaaaggtgagtgtgatgtgcaatatgaaactaaaagaaatctcgaaaacatcttgacctggtagagcgcagacatgatttacaggctgtgaaacacaaattgccactaaacctcctttctctttggggtctgctgacttagaacaaggattctaagccctctgcttggactctacctcctctatgccctcactccctgacttcactagcaccactctcccattccttttgctcatgttacttaaaaagatttagcartatttaagacaagactattggccatccagatttcaaaggtgagagctaacttcagctaggactggggatttggagctatcaccctccctggagagcccaagataatttcactatttccaaagaagcttaatcagtgtatacccaaggtgaatattggctggagtactttgaaaattccaggtctgataagaaataattctatggagatgcctgaacttaggctttctttcagtcaatattttctcataaatatggcagaaacagacttagaaagtttg

SEQ ID NO: 198781 - DNA, 596 bp, Homo sapiens
ttataataagggcctcgtcatgactggctgcttgggcattcatttaagaactcatcacaataattaggatgatcacktttaattctggacaatgtcattttgtaaaccattgtaattttccattaattataaatgttgacctcttgaccaatcagaacattttcaatcagtttaattattcctcaagaatcccaattactttgtcaataatcaaaataaatgccattagtcataaactttttacgtgccatttagtgaaatctacattcatttgaaagttaaaccgcctttcccatgtttcctttaaatttgattctcatgatgctcaatggcatgacaagagctaagaggacgttggggacccaaagtaccaggaagcaggaagtcatctaaacagactctaaaaaggtttccacatcatcagatttctcagcagaatccagtgcactgataagaattaggccttgccttcctattttaacaaaacactttattcaatatgtatttaatgagtatttaatatgtaccaagcactgtagtcatctttgaaatttcagagaaaagataaggtagacaatatctctgactacaaagaa

SEQ ID NO: 198782 - DNA, 515 bp, Homo sapiens
aatttctattgtttaaggcttcagcctgtggaattttgttatggcaacctgagcaaactaagacagagaggccttcctctgaagtcccgaaattactaagtctgagatgggtcctaagtgttcatcttgtttttgttttgttttgttttgttttaagctactgaaatggtttttatgatctggcaaatttgggaggcacgagttgatgcgattatttttatraacattttagtgtgtacctatttcagaattattttctcactctttatggatgtttctccatttcaacaaacatttacggattcttacttttctaggtagtgagaatacagtggtgaataaaaataagagaagattcctccctttcagaatttgtcattctaatggagataaagataatattgaataacatacatctattatttaatgtccagtagtgataagtgatgtaaaggaaaaaaaagacagataaagtgttcagagagataggagaggtggcagaatggctctttctt

SEQ ID NO: 198783 - DNA, 515 bp, Homo sapiens
aatttctattgtttaaggcttcagcctgtggaattttgttatggcaacctgagcaaactaagacagagaggccttcctctgaagtcccgaaattactaagtctgagatgggtcctaagtgttcatcttgtttttgttttgttttgttttgttttaagctactgaaatggtttttatgatctggcaaatttgggaggcacgagttgatgcgattatttttataaacattttagtgtgtacctatttcagaattattttctcactctttatggatgtttctccatttcaacaaacatttacggattcttacttttctaggtagtgagaatacagtggtgaataaaaataagagaagattcctccctttcagaatttgkcattctaatggagataaagataatattgaataacatacatctattatttaatgtccagtagtgataagtgatgtaaaggaaaaaaaagacagataaagtgttcagagagataggagaggtggcagaatggctctttctt

SEQ ID NO: 198784 - DNA, 421 bp, Homo sapiens
gaattcatcaattcacttcttagtcccaagagcaggggaataaggatggcaagtggatttggaagggcagagagattatccagcacagttcctcaatagctcactgcaagaagttattcccattgaagcatctaggctaatgcttctgaaattttattggacatacttatcacctagggattaaaatgcagtttctgattcagtaggtctggggtgaagcctaagagccaggtgatgctgatgctgctggctggagactaccctttcagtaacaggatcttaggctatccctgacctccatcctaagccccactgagcttgtctagctaaggggatcagggycaaaaaaaaaacccttagtgcttcccttcccacttcctacctctctttcctctccttctaccaaaatgtcttcctgatg

SEQ ID NO: 198785 - DNA, 423 bp, Homo sapiens
agcaggggaataaggatggcaagtggatttggaagggcagagagattatccagcacagttcctcaatagctcactgcaagaagttattcccattgaagcatctaggctaatgcttctgaaattttattggacatacttatcacctagggattaaaatgcagtttctgattcagtaggtctggggtgaagcctaagagccaggtgatgctgatgctgctggctggagactaccctttcagtaacaggatcttaggctatccctgacctccatcctaagccccactgagcttgtctagctaaggggatcagggtcaaaaaaaaaacccttagtgcttcccttcccacttcctacctctctttcctctccttytaccaaaatgtcttcctgatgcagcccaactacctagtaacaatccagaattc

SEQ ID NO: 198786 - DNA, 589 bp, Homo sapiens
ttcctgttgctccatatccttaccaacatttggtattgcagtctttttatttttagacattctggttgatgtcatggcccatgcattttttaaattatgaaaataattgatagatatatttttattgtaaaatatttgcacaacatagaagtatatagaatatttggtggggtggttgtttgtttcttggggttttttagagacaagttctcattctgttgtccaggctggagcgcagtggcacgattacggctcactgcagccttaatcttccaggctcaagtgactctcccacctcagcctcctgaatagttgggacaacaggtgcatgccaccatgcccagctaattatttttatttttagtagagacgagagtcttgctgtattgyccagtctggtcttaaactgctgagctcaagcaatcctttctctccccaaatgctgggattacgggtgtgaggcactgcacccaccctggtttgtttttattgttgttgttgtttttttttaccatagcagtgttggagactttttcatgcaaatcaatctatccatctatctatgtgtatatatatttaaactgctaca

SEQ ID NO: 198787 - DNA, 443 bp, Homo sapiens
tcccatactgagaatgagcctgccttggggtgggtgagacccctagacgtctgcagggtgataaagggagggctggggttttygcactgacaaaaactcacgtcaaccacctggccttggcccatggggatcccatgagcccctcgcagccccctggagagcctcggggacctctaagcaggaaggtttggggtcttctgtgagaggtgaggaagtcgtggctggggaaggagggggacgggaaaccctacagatgtagggcagtcctttggagaaagggacaggtcggagaccaggcaaggtggcatgggggaccaagaacctggcctgaggactttagaagccggggaggtgaagtggaggcgtggaggtgcctcaaggcaaaagaagatgtgggactccagggagtgaaaggggccctgaggtgagaggatggaaagctg

SEQ ID NO: 198788 - DNA, 589 bp, Homo sapiens
ttcctgttgctccatatccttaccaacatttggtattgcagtctttttatttttagacattctggttgatgtcatggcccatgcattttttaaattatgaaaataattgatagatatatttttattgtaaaatatttgcacaacatagaagtatatagaatatttggtggggtggttgtttgtttcttggggttttttagagacaagttctcattctgttgtccaggctggagcgcagtggcacgattacggctcactgcagccttaatcttccaggctcaagtgactctcccacctcagcctcctgaatagttgggacaacaggtgcatgccaccatgcccagctaattatttttatttttagtagagacgagagtcttgctgtattgtccagtctggtcttaaactgctgagctcaagcaatcctttctctccccamatgctgggattacgggtgtgaggcactgcacccaccctggtttgtttttattgttgttgttgtttttttttaccatagcagtgttggagactttttcatgcaaatcaatctatccatctatctatgtgtatatatatttaaactgctaca

SEQ ID NO: 198789 - DNA, 357 bp, Homo sapiens
cacctggccaattttctgaatttctttaagaggtttattctgaatcctctatctgacatttaatagattgtctgggttcattagaggagctttgttggtttcttttggtggtgtcatatttctctgagttttcataattcttgcatctttatgttgatacctacaaatttgagaaaacagacacttmttccagtttttctgggtgttccttggtggtgtttatttattgcagacagagtctcactccaacatccaggctggagtgcagtggcactatctcagttcactgcaacctctgcctcccaggttcaagtgattcttatgcctcagcctcccgggtagttgagattataggct

SEQ ID NO: 198790 - DNA, 357 bp, Homo sapiens
cacctggccaattttctgaatttctttaagaggtttattctgaatcctctatctgacatttaatagattgtctgggttcattagaggagctttgttggtttcttttggtggtgtcatatttctctgagttttcataattcttgcatctttatgttgatacctacaaatttgagaaaacagacacttattccagtttttctgggtgttccttggtggtrtttatttattgcagacagagtctcactccaacatccaggctggagtgcagtggcactatctcagttcactgcaacctctgcctcccaggttcaagtgattcttatgcctcagcctcccgggtagttgagattataggct

SEQ ID NO: 198791 - DNA, 543 bp, Homo sapiens
tggtgctcacagcttttccttctyccgtctttggaggagactcaggaccatgtcatttctcaggctctatgctgcagctgtggatggcagatttgttgccctttctagactggacattgtacctctctatgggctgctcctaccaaaggacctcccagcttgttagggaaaatatgacttgcttcctggggtgggtcacccactgattccttaccatcctttgcattttctacactgatttcagtaactggcctcatcactcttatgggtttacatgatatagatatctgatacagttgggcatgacatttgcagttcaccatttaggatcaggagggtgaattgaaagaatccagcactacctctacaggtggcttcaccagaaaaataagtggttctttttcaatttcaatggaaagaggctatggtctaatgtttaaagaaatcgaacctggttaactataaggccatgcagagtgagggtgctgctttgccagtcatgagtgcttatttagttaatcttgctgctggcttgctcagtta

SEQ ID NO: 198792 - DNA, 543 bp, Homo sapiens
tggtgctcacagcttttccttctcccgtctttggaggagactyaggaccatgtcatttctcaggctctatgctgcagctgtggatggcagatttgttgccctttctagactggacattgtacctctctatgggctgctcctaccaaaggacctcccagcttgttagggaaaatatgacttgcttcctggggtgggtcacccactgattccttaccatcctttgcattttctacactgatttcagtaactggcctcatcactcttatgggtttacatgatatagatatctgatacagttgggcatgacatttgcagttcaccatttaggatcaggagggtgaattgaaagaatccagcactacctctacaggtggcttcaccagaaaaataagtggttctttttcaatttcaatggaaagaggctatggtctaatgtttaaagaaatcgaacctggttaactataaggccatgcagagtgagggtgctgctttgccagtcatgagtgcttatttagttaatcttgctgctggcttgctcagtta

SEQ ID NO: 198793 - DNA, 290 bp, Homo sapiens
ctgacttcttgtcattggtttcactgagaactgtgttagtgaagtatttttggtgttgaagttgtggggtgtgatccagtaggtggcacttaagcataatggtcagtagataggctcttgctcagttatatggctcttctgtatttcctcacagttgcacttctgctctctcttaaaggtctgaatgtgtgggctactcccccacttgagtgctggctgcagattactactttagtactcctgggctacacagcgcagttgtgaggygatgtcagggtttctgttccctc

SEQ ID NO: 198794 - DNA, 597 bp, Homo sapiens
aatccctaatgcattactaggaccatagtacatacttactaggtattgctgagttgagtaacatcacaaatagacagctaggaggacagcacaatatcaacatactttctcacaattcttgcacagttacatcatcaggtacaaaaacctccgtcttcagccttttgtkgcttgagccaaaagatctttcctttatttttgatgggtggctgatatcagtgggatcataattacagccctctgtgccaaacatcaggttaatagaaactattgttgaagagaaaaacatcctgtagttctttgtctccaaaattccccagcagacatgaggacttcccacgagctgaagagcttaaaagaaagtctccattcgcaaaataattataaccatactttttgttaccctcagtggtttgatgagtggattaaaagaagagaatacacctaggtatattttcactttcttctcagctctaaaaactagatgtccctgttgataccaataacaggagaaaatagtttcattccctatggccattagctttttcaatacttattttaaatagtaaataaaattccttcagataatgaacatat

SEQ ID NO: 198795 - DNA, 542 bp, Homo sapiens
gttggggaactccctcccctagccaagggaagccgtaagggactgtgccatggggtatggtgcactctggcccagatactatgtttttcccacagtcttcacaacccacagacgaggagattccctaggttgcctacaacaccagggcccagggtttcaagcacaaatctgggtggccatttaggcagacaccaagctagttgcaggagtgttttttcataccctggtggcatctggaatgccagcragacagaactgttcactcccctggaaagggggctgaagccagggagccaagtggtctagctctgtggatcccacccccacagaacccagcaagctaagatccactggcttgaaattctcgctgccagcacagcagtctgaagtcgacctgggatgctcgaccttggtgggggaaggggcgtctgccattactgaggcttgagtaggtggttttcccctgacagtgtaaacaaagccaccgggaagtctaaactgggcagagcccactatagctcagcaaagccgctgtagccagg

SEQ ID NO: 198796 - DNA, 394 bp, Homo sapiens
agggcccagggtttcaagcacaaatctgggtggccatttaggcagacaccaagctagttgcaggagtgttttttcataccctggtggcatctggaatgccagcgagacagaactgttcactcccctggaaagggggctgaagccagggagccaagtggtctagctctgtggatcccacccccacagaacccagcaagctaagatccactggcttgaaattctcgctgccagcacagcagtctgaagtcgacctgggatgctcgaccttggtgggggaaggggcgtctgccattactgaggcttgagtaggtggttttcccctsacagtgtaaacaaagccaccgggaagtctaaactgggcagagcccactatagctcagcaaagccgctgtag

SEQ ID NO: 198797 - DNA, 434 bp, Homo sapiens
cttcagggcagaagaggtggacacaaacctcagaggctgttttctagccaataaaggtagctatgacttgtgttctcgcctacatactattgccacactaacctctccaaaatgccattttgttaaamgcattccaatattcaaaaactctcctcctagatttcacaggccattcacagtatgatctccaacccaatgattcagctttctcacttgttccctaacaaacatccctttagttaagatcttcacaggccttttctctaccctactcaaatgtatcactcgctcttttccctaaacttgttgattctcacagacagcaaaaaatacctttccatgtgtgcccaaatccaaagtcccggctctcacttttaagcccatatacacctttcttctagaaaatattactggtttcagagagaacagaattc

SEQ ID NO: 198798 - DNA, 432 bp, Homo sapiens
tcagggcagaagaggtggacacaaacctcagaggctgttttctagccaataaaggtagctatgacttgtgttctcgcctacatactattgccacactaacctctccaaaatgccattttgttaaaagcattccaatattcaaaaactctcctcctagatttcacaggccattcacagtatgatctccaacccaatgattcarctttctcacttgttccctaacaaacatccctttagttaagatcttcacaggccttttctctaccctactcaaatgtatcactcgctcttttccctaaacttgttgattctcacagacagcaaaaaatacctttccatgtgtgcccaaatccaaagtcccggctctcacttttaagcccatatacacctttcttctagaaaatattactggtttcagagagaacagaattc

SEQ ID NO: 198799 - DNA, 434 bp, Homo sapiens
cttcagggcagaagaggtggacacaaacctcagaggctgttttctagccaataaaggtagctatgacttgtgttctcgcctacatactattgccacactaacctctccaaaatgccattttgttaaaagcattccaatattcaaaaactctcctcctagatttcacaggccattcacagtatgatctccaacccaatgattcagctttctcacttgttccctaacaaacatccctttagttaagatcttcacaggccttttctctaccctactcaaatgtatcactcgytcttttccctaaacttgttgattctcacagacagcaaaaaatacctttccatgtgtgcccaaatccaaagtcccggctctcacttttaagcccatatacacctttcttctagaaaatattactggtttcagagagaacagaattc

SEQ ID NO: 198800 - DNA, 430 bp, Homo sapiens
gaattcaatactttggtttgaatacttcagggcagaagaggtggacacaaacctcagaggctgttttctagccaataaaggtagctatgacttgtgttctcgcctacatactattgccacactaacctctccaaaatgccattttgttaaaagcattccaatattcaaaaactctcctcctagatttcacaggccattcacagtatgatctccaacccaatgattcagctttctcacttgttccctaacaaacatccctttagttaagatcttcacaggccttttctctaccctactcaaatgtatcactcgctcttttccctaaacttgttgattctcacagacagcaaaaaatacctttccatgtgtgcccaaatccaaagtcccrgctctcacttttaagcccatatacacctttcttctagaaaat

SEQ ID NO: 198801 - DNA, 549 bp, Homo sapiens
taatgcaccacttcaaaaaataaaatggaacaaaattatgtggggagtaactctcacaatgtgagatctttatattaaagatctttttgcttactttaaatatttactgatcatcaccattgtaattactaccaacaaaaacttttttaaaaggctaatgggtgcgaggtattgtgtgtgatatgtttaaattacaaaacaacttcttccctcaaggaaattattatgtagccggtgagaaaaaaaggcaataatcataacacatatacatttaaacaggaattcagaaagggcaaggcatgtataaccagaggggtgtacaaagcctcccacttaaaaggatttgggatgagacttgagtaaatagacaggagaaggagaactgctaggcacagcaggaccaaagcttcaaaggtaggaaagtracaagcacagacagtcccaagttatggtttgacctaacgatttttcaaatttatgatgatgcaaaagcaatacatattcagtagaaaccatacttcatgtacccatactaccattctgtttttc

SEQ ID NO: 198802 - DNA, 517 bp, Homo sapiens
gctttctacctggaaggggaggtggccttgtagattgtgagrcaggttcaggaacaaggagaggctgatgctttccaatactacctcaaatggaagcacatggattaccagcgtatattattccagattggcaatgcctgcctgagtctaaaagggttgttgcactacaagggtttagctgttttctcaacattgacgaggacctacctggacagagaatgacaccagtcccttgagtactataggcaagtcaggagccaggacaaacctctccgggtctctcacccactctctgggagcctccttgtttctgttaatttctctctcttcgccgaattcaattgggaaatatagcaggtgtatgggaatgtgtgtatttctgagggggaatgtcacttctcactgatctacaacccaccttaaacactgcagcattacatcatgaacaatttccctggtcaaaacaacaacaacaacaactcagtctaatgaatacacaagattttactacatggcc

SEQ ID NO: 198803 - DNA, 533 bp, Homo sapiens
ccagtcaatataatctcaccttctcctgtgtttctttaccactgggacacttaattacattcagctactgtgtatgaagcatggataggacttctgttgaggtgagagaggagctgactctgaaaccaagtaaggcagtaaagttccgacgatgagttatagtrtgttgaggttcagaggaaggagggggaactaaggagatcaactagctttcttctgcacacacagtccagacttcagggataggtagattttgagataggagatgggaaaacacctttagttaaaggaaaaagtgtgaagtaaagcttcaaagtaatgtgtcactacttctagtacagctgataatgttaaaattcttatagcagcagattgaaagcttgatgtcttggatcaacaaacaggcacctgtgagattctcatatctttaaattcaaggccaaggttgattgcatatgatcttgagagaagcatgtgtatacttctaggtggatgaagtcttaaatgtgtttgtccttgggaagttgaactct

SEQ ID NO: 198804 - DNA, 558 bp, Homo sapiens
tttcagtagagacggggtttcgtcatgttggtcaggctggtctcaaactcccgacctcagatgatccgcccgcctcagcctcccaaagtgctgggattacagacaggagccatctcacctggccaggatagaaattcttaagcaaagtgtttataacacacagaggttcctcattgagttttcaggtatgkccagtaatctgttgcaactaataaactaaagactatatacagtttaccttttcatatagtggcaatcttgctcatctatcatatttaaaaataattttactgcttttaccatataatccacccttttaaagtatacaattcaatgacttttttagtatagttatagggttgtccacctgtcattacaatctaattttagaacattttcgttccccctaaagaaattctatacccatgcacaatcattctctatgtgttctcactctatctgtaagcaaccactaatctttctgtctctatctatttacctattctagatatttatttatttagttttgagacagggtcttgctctgttattcaggct

SEQ ID NO: 198805 - DNA, 537 bp, Homo sapiens
ctttcttgaaatttcacttactgctaatgaaaaacatctgtgggaaccaaagcagaagtgagtgttatgtcttaatgttgctgagtccctagcacagtgctagtgttccaattaatcacattaaagtgatatttctctgaccaggctcacacctgtaatcttagcacttggagaggctgaggtgcgtggatcgcttgagcacaggagtttgagaccagaatgggcaacatgacaagtctctactaacaatacaaaaattaaccaggcatggtggcatgcacctgtagtcccagctactgaggaggtcaaaagatcatttgagcccaggaggctgaggctgcagtgagctataatcgccactgcacttcagcttgggtgacagagcgagactctgtctcaaaaaaatttaacaaataaataaataaatmaatcaataataagataaagtgggatatctcttctggcttcagtagcaacaataaaaacaactattattattgtcattgttcttgctatctttcatcctgttctcctgct

SEQ ID NO: 198806 - DNA, 470 bp, Homo sapiens
aaggacttgctgaatcactatggtatatacttgttatgatgctgcagtgtcttttcatgtggcaactgtattagtccattctcacactgctaataaggacaygctcgagactgggtaatttataaagaaataagcgtttaatggactcacatttccacacggctggggagacctcacgaccaatggcagaaggcaaaagaggagcaaaggcacatcttgtatggtggcaggcaagagagaagtgagagccaagtgaaaggagtttccgcttataaaaccgtcagatctcatgagacttattcactaccacgagaacagaatggaagaaaccacgcccatgattcaattatctcccactgggttcctcccacaacacgtgggaattagctgcaattcaagatgagatttggctgtggagacggccagaccatatcatggggatccaacctttctgcagtcagtgggttttg

SEQ ID NO: 198807 - DNA, 470 bp, Homo sapiens
aaggacttgctgaatcactatggtatatacttgttatgatgctgcagtgtcttttcatgtggcaactgtattagtccattctcacactgctaataaggacatgctcgagactgggtaatttataaagaaataagcgtttaatggactmacatttccacacggctggggagacctcacgaccaatggcagaaggcaaaagaggagcaaaggcacatcttgtatggtggcaggcaagagagaagtgagagccaagtgaaaggagtttccgcttataaaaccgtcagatctcatgagacttattcactaccacgagaacagaatggaagaaaccacgcccatgattcaattatctcccactgggttcctcccacaacacgtgggaattagctgcaattcaagatgagatttggctgtggagacggccagaccatatcatggggatccaacctttctgcagtcagtgggttttg

SEQ ID NO: 198808 - DNA, 470 bp, Homo sapiens
aaggacttgctgaatcactatggtatatacttgttatgatgctgcagtgtcttttcatgtggcaactgtattagtccattctcacactgctaataaggacatgctcgagactgggtaatttataaagaaataagcgtttaatggactcacatttccacacggctggggagacctcacgaccaatggcagaaggcaaaagaggagcaaaggcacaycttgtatggtggcaggcaagagagaagtgagagccaagtgaaaggagtttccgcttataaaaccgtcagatctcatgagacttattcactaccacgagaacagaatggaagaaaccacgcccatgattcaattatctcccactgggttcctcccacaacacgtgggaattagctgcaattcaagatgagatttggctgtggagacggccagaccatatcatggggatccaacctttctgcagtcagtgggttttg

SEQ ID NO: 198809 - DNA, 478 bp, Homo sapiens
cctttggggaaggacttgctgaatcactatggtatatacttgttatgatgctgcagtgtcttttcatgtggcaactgtattagtccattctcacactgctaataaggacatgctcgagactgggtaatttataaagaaataagcgtttaatggactcacatttccacacggctggggagacctcacgaccaatggcagaaggcaaaagaggagcaaaggcacatcttgtatggtggcaggcaagrgagaagtgagagccaagtgaaaggagtttccgcttataaaaccgtcagatctcatgagacttattcactaccacgagaacagaatggaagaaaccacgcccatgattcaattatctcccactgggttcctcccacaacacgtgggaattagctgcaattcaagatgagatttggctgtggagacggccagaccatatcatggggatccaacctttctgcagtcagtgggtttt

SEQ ID NO: 198810 - DNA, 605 bp, Homo sapiens
tcagcagccagtagggatcatacttgagcagatagtctgctagaagttgcttcatcttccaaatggtccctaaagttatgtccctaatagcacaaacagtgctattcactctacttaaggacgttgaggtcttctattttccrtaggataaaatctaacatattttaaaattccctcacaatcttattcaaactactctctgtagtcttatctgccataatccagaatatcctctaccttttactggtcaaactgaattacttgtgaaaattttatgtaatcatccataaaatttctaattatgaaatccagaggtctttctgaatacatcaaaagccaaaaaatgagtttttgacccagaaattccatttttagaaatttatcctaaggaaatagttaaggatgtgagtaaagattttgctaacaggatgttcaatacagtgttgcttaaaatacttttattgacatgaagggaaaaaagagcctttgctctggtagtttcttttttctagaatattattactgcctggagaatgttatctctacatgaagaaaacatgacataactttcacttgaccaaataagagtactgttaatgacttcc

SEQ ID NO: 198811 - DNA, 574 bp, Homo sapiens
ctgatgaacttgacttccttcaccatctcctattgagtaataaatattatgttaagaattcatgaaaaacatttcagtttttttcatcctgccttctgaagatttcttgttggatttcagagacatgcaaacttgaatgaactcacttggtaacaggagcgaatgcacagtgagagctcactctctcctaggtgctattccaagtgctttacagacattatttaatttagtggtggcaagaacccatgaactacttgtatttcttaagtcagttttatcaagacataatttaaatgcagtaaaattcactctttagacgtacaagatgatgagtttttacaaatgtatatagagtcatatagccacaccacaaccaaaatatcaaatatttccatcactccacaaygtgcccttatgcacctttatatagtcaatcctgtcactgccccctaccccacccccttgccatgaacctccaaataactactgatctgttttatggctgtttctagaatgtcataaatggaattgtatagtatgtagccttttgttctggcttcttccactcagccta

SEQ ID NO: 198812 - DNA, 581 bp, Homo sapiens
gtatgcttgtaatcccagctactcgggaggctgagtcaggagaatcacttgaacccaggagtcagaggttgcagtgagccaagatcgtgccattatactccagcctgggcaacaagagtgagaatctgwccaaaaaaaaaaaaggcaggtaaattaaaataaaaggataaaaaaatacatcatgaaacattagtcaaagatgtccagaatgactatattataatcaaacaaagcagactttaaaataaggaatattaccagaaacaagaagagacatttcatagtgataaaagggtcaatttatcaagaataaaaatcttaattttagtgaatacatctaataaaagtttcaaatacaggatgcaaaacctatatttgaaactaaaaataaaagaaattgacaaatcaacaaatatagctggaaacactagcattactctcacaataattgataacaaaaatagatatatcagtaaagatatagatgacttttaaaaggctattaaccaaacctgtcctaattgacatttatagaactacacacaacagcagaatatgtattcttttccattgttcataaa

SEQ ID NO: 198813 - DNA, 474 bp, Homo sapiens
gtatgcatatatttctctccctcactttttattggacttaagtcttagttatttttatatatttttcttcagaacctcaagtagcacctggattttgttgcattgccttacatcatctatattacctgagtgaccactacgtgcacagcatcatcttgggtgtagagaaacaaagtcaagtcagtggggtagtctgttaagcacttcacagaagtctggggtttcactcctcctaggcacataagaagaagattgtatgtttctgccttctcaaagttcagtgtggccatgtgacttgctttggccaagagctgagaacaaatgctttatccttctctcctttctctgcagcatgctacctggcaacrttttagatggtgtggggtctggcagcttgcatctttactgattgtggtgtgtggaatctgttggctggctcacagtggacatgtattgaaagtgagaaataatctt

SEQ ID NO: 198814 - DNA, 617 bp, Homo sapiens
ctgttttactgagctgtatgtctatacttatgccagcactacactgttttgattcttgaaggtttaattttgaagttaagtagtataaattccccaacttagtctttctctttcaaaattgtttattctcttctatgtcctttgcattttcatattaattttggattagcttgttaatttatacaaatagatctgaaggaattttataaaatttgtgttgagtttacaaatcaatttgaagggaattactattttaaaaatactgagtccttcaagctatgaggagggtgtggctttcaatttatttggatctctawtttctctgaggaatattttgttggtttgagtattatgttgtactatttatgttaatttattcctaagtattttgttcttttttgataccattattaattaaattattttcttaatcttatttttggattgttcattgctaataatataaaaagacaattagacaattagttgtgtatcttgagtttgtatcctgtgaccttgctcaatttgtttacttgttttaatagtttttttttctaatacaaagccacctgtcttcaaataaaggtcatcttacttcttcctgtctgatctatatg

SEQ ID NO: 198815 - DNA, 523 bp, Homo sapiens
tagactatatatatttaaagttaaaaacatatcttaagcattgctttagctgcaatccataaattttgttacactgtgtttwcattttcttttagctcaacatacttttaaatttcatttgtgacttcttcttatacctatagggtgttttgaaatgtgttaacttctgaatagttggagatttccaatatttctttcgattgctgggttttagtttagtttcattagggtgcagagagcatacatctaataattttgattcttttacatttgttgagacttttaaatggtgtagaatatggtctatcctggagaatgttctaagggtgtttataaagaatgtgtactttactgctgttgggtggagtgttctatacatatgtgtatgttggggtgcaaggtgaaggaatgaaatgataattaagatataattcttgccttttaaagttgtttcattcttgcaaagtggtggttttcaactcagggctattttggccccctgctgacctttggcaatgtctgg

SEQ ID NO: 198816 - DNA, 635 bp, Homo sapiens
tccctccctaagtacctcatctctgttcccatctacttctgagtgacttggcaaagatcacatctgtgaatcaatttgctaacttttaaagtggtggttgaaggtgaagctttgccaacttgatatcttactatgtttgcttttgatggaggagtcatagtgaaagaaaggacacctccagccctaacagagccccttggtgtataaagaaggattcacatggtaccagagaacctaagcagccaggaagacacagagcaaaagctgaagttgagaagagagaagrgttcattcagttcatttaacacagggcacttgcctccattttactatctggttcctactgtgccctgaggttggtaaacaaaatatggagacttcctttttatcaacatttatttataggtcactgatcgatgtcctcaaccctcataaccgaaagaagccatttttgcctacacacttagtttctctgtatgtttacctagaagcttgccttctctagtgacaggatacagcagagatcaagactaagcaaggacaaagtgacctgaatctaaagaaataaacgtatatgcagcagaaagcattggggatagagtgtttgctttatttttaaaaaatcatgaaaagga

SEQ ID NO: 198817 - DNA, 682 bp, Homo sapiens
aatttacagcaataaatgcctatataaacacaataataatctcaagtaaacaatctaatgttagacctgtaggaactaggaaaagaaaaaaacaaactaagccaaagacagtaaaagaaatgaaataataaagatgatggcaaaaataaataaaatagactagaaaaacaatagaaaagatcaacaaaattaagagttggttttccaaaaagataaacaaaattaacaaacctttagttaaactaagaaaaaaagagaagactcaaataaataaataaatgaaaggggagacattacaactgatacctcagaaatacaaggagtcatgagaccactgtgagcaattatatcccaaaaaatggaataacttagaagaaatgaataaattcctcaacacaagcaacctacmaagactaaatgatgaagaaacagaaaatctgaaagaaaaaaacaacccactaacaaacaaggagattgactgaataataaaaagttccccaacaaagaaaagcccaggacctgagggcttcactgccaaattctaccacacatttaaagaactaatattaattctcgaactttttcaaaaactgaagtaaaggaaatacttccaaactcatcttatgaggctagtattaccctgttaccaaggccagacaaggacactacaagaaaagacagg

SEQ ID NO: 198818 - DNA, 381 bp, Homo sapiens
attgaagagtattatgaatgttaagctgcatgaaaaggaataataattttgtcctacctgtaagacttagggtcactgctggctttataaattcgtgtggtttttcttggcagctacctaatagtttttctagccaccatgactttaaccccacattacagcatcattgagctatttattcagtttagttcagttggctgaggaactgtgccasaaactgctattaggaagctaattttatttaccccaaagcaaccaaaggattctcaaaatggttttcactgcattttttttattcttaaaaaaatctcacttttgcttctcttgttgaagtgagataaggaaacaaatttccaaagaggttaagtcactccataatag

SEQ ID NO: 198819 - DNA, 554 bp, Homo sapiens
  misc_feature (1)...(554): n = A,T,C or G
catgaaaaggaataataattttgtcctacctgtaagacttagggtcactgctggctttataaattcgtgtggtttttcttggcagctacctaatagtttttctagccaccatgactttaaccccacattacagcatcattgagctatttattcagtttagttcagttggctgaggaactgtgccagaaactgctattaggaagctaattttatttaccccaaagcaaccaaaggattctcaaaatggttttcactgmattttttttattcttaaaaaaatctcacttttgcttctcttgttgaagtgagataaggaaacaaatttccaaagaggttaagtcactccataatagtaggtgatgaggacagaactggaattcaccataatcctcaccatctctgagacgttaagatttgaatttaagtttaaaaaaatagtgaggtaaatgaagagttgagagtccatttcaggtgaaactcagagtaaaagtgattttgtgattctgcatatatcatgtacaggtgagggaatgtgaattccttttggatnnnnn

SEQ ID NO: 198820 - DNA, 582 bp, Homo sapiens
tatggtgactcagttccctacattcaagcaacttattttcttcctcctgaagacttttctttcctgtaattttattcatccccaattcttcactattaaaaagtgtgcaagaggttcttttgatgtttgtttcactccaatcaacacatatttctttcaagtatcagagtgaatagacttcccaaaacatgaggagaaatgaaactgatctttggagtctttaggaactaccactactccttgtccatagatgggtcacagtgaggaatgttgaccccagtttgcctgccagacattgttctgtgcaataggggaaaattgctaacctaaattcacataggaagccaatatgtatcccagaacatgaattctaaggcaaatagawctggatttattacaaaatgtgcaactttcagaaagcaactgaacatcttacagcctcagttttctcttctgtaaaatggatatgataatatttgcttcatagggttactattaggaatacataagatcatggatataaggtagtaagtgagtactgtcactttgtaagcaccagtttaacatagctactacaatata

SEQ ID NO: 198821 - DNA, 582 bp, Homo sapiens
tatggtgactcagttccctacattcaagcaacttattttcttcctcctgaagacttttctttcctgtaattttattcatccccaattcttcactattaaaaagtgtgcaagaggttcttttgatgtttgtttcactccaatcaacacatatttctttcaagtatcagagtgaatagacttcccaaaacatgaggagaaatgaaactgatctttggagtctttaggaactaccactactccttgtccatagatgggtcacagtgaggaatgttgaccccagtttgcctgccagacattgttctgtgcaataggggaaaattgctaacctaaattcacataggaagccaatatgtatcccagaacatgaattctaaggcaaatagaactggatttattacaaaatgtgcaactttcagaaagcaactgaacatcttacagcctcagttttctcttctgtaaaatggatatgataatatttgcttcatagggttactattaggaatacataagatcatggayataaggtagtaagtgagtactgtcactttgtaagcaccagtttaacatagctactacaatata

SEQ ID NO: 198822 - DNA, 537 bp, Homo sapiens
ttcttcaaaaagcccagctgggatctgacagcctttaatttatagattaacatgggaataactattaccattaagatacaaggttgcccattcaagaacatggaatatttccatttattcagatcatttttatgttttccattagaatgttaaagttgtcttcatagaagttatgcatrtcctaagttaaataatttgtagataccttataatctttgctgctttgtgtatgtcccttaatttggatgaggcttgggttctggatcttgctgtgtcactgattatgctgcatgattttaggcaagttattcactgcttctcagtaccagttttctcacccattaaaggaccggattgaagtttatgttcttcatggtaacacgggtaataacaataacaaacccagattaaagtttcataatatgccagccactgtactgggcacactccctgcagatatatcgcctgataggaaggtgactacatgtacagcacttatcatgcctggtacattgtaagcactcaatacatggtagc

SEQ ID NO: 198823 - DNA, 554 bp, Homo sapiens
atgcatccaacaaaggtctaacatctagaatatataagaaacaaacagttgaacaagcaaaaaacaaatagccccattaaaaaatggagaaaatacatgaagagacacttctcaaaagaagacatacaagcagccaacaaacatttaaaaatgttcagcatcactagagaaatgcaaatcaaaaccacaatgagatgccttcttataccagttaaaatgggtattattaaaaagtcaaaaatcaacagatgccrgcaaggctgtagagaaaagggaatgcttatacaccgttggtgggaatgtaaattagtttagcccctgtggaaagcagtttgcagatttctcaaagaacttgaaacagaactaccatttgacctagcaatcctattactggtatgcatccaaaagaaagtaagttgctctactaaaaagacatatgtactcatatgttcatcacaatgctattcataatagtaaagacatggagtcatctaggtgcccatcaaaagcagattagaaaaagagaatggggtattatacaccatggaatacta

SEQ ID NO: 198824 - DNA, 554 bp, Homo sapiens
atgcatccaacaaaggtctaacatctagaatatataagaaacaaacagttgaacaagcaaaaaacaaatagccccattaaaaaatggagaaaatacatgaagagacacttctcaaaagaagacatacaagcagccaacaaacatttaaaaatgttcagcatcactagagaaatgcaaatcaaaaccacaatgagatgccttcttataccagttaaaatgggtattattaaaaagtcaaaaatcaacagatgccagcaaggctgtagagaaaagggaatgcttatacaccgttggtgggaatgtaaattagtttagcccctgtggaaagcagtttgcagatttctcraagaacttgaaacagaactaccatttgacctagcaatcctattactggtatgcatccaaaagaaagtaagttgctctactaaaaagacatatgtactcatatgttcatcacaatgctattcataatagtaaagacatggagtcatctaggtgcccatcaaaagcagattagaaaaagagaatggggtattatacaccatggaatacta

SEQ ID NO: 198825 - DNA, 482 bp, Homo sapiens
ttgtagcactattcacaatagccaagattttgaagcaacctaagtgtccatcaacagatgaatggataaagaaaatgtgctacatataacaacggtgtactattcagccacaaaaaggagatcctctcattttcaacgacgtgggtggaactgaggtcattgtgttaagtgaaataagcaaggcacagaaagacaaatttcacacgttctcacttatttgtgggagctaaaaatgaaaactgaactcgtgaagatagagagtagaatgacgattaccagaggctgcraatgagagggggagaagtggggatgagtattggttataaaaatataattagatgactagagtcaacaataatgtacattaaaaaataatgaaaacagtacaatttgtatgtaacacaaagaaaagataaatatttgagattatgaatatctcatttatgcaaatgtgatcattacacattgtatgcctgtatcaa

SEQ ID NO: 198826 - DNA, 482 bp, Homo sapiens
ttgtagcactattcacaatagccaagattttgaagcaacctaagtgtccatcaacagatgaatggataaagaaaatgtgctacatataacaacggtgtactattcagccacaaaaaggagatcctctcattttcaacgacgtgggtggaactgaggtcattgtgttaagtgaaataagcaaggcacagaaagacaaatttcacacgttctcacttatttgtgggagctaaaaatgaaaactgaactcgtgaagatagagagtagaatgacgattaccagaggctgcgaatgagagggggagaagtggggatgagtattggttataaaaatataattagatgactagagtcaacaataatgtacattaaaaaataatgaaaacagtacaatttgtatgtaacacaaagaaaagataaatatttgagattatgaatatctyatttatgcaaatgtgatcattacacattgtatgcctgtatcaa

SEQ ID NO: 198827 - DNA, 421 bp, Homo sapiens
gcaggctgagtctgaaaagagagtcagtgaagggagacagggrtggggccattttataggatttgtgtaggtaatggaaaattacagtcaaaggtggttgttctctggcgggcagggatgggggtcacaaggtgctcagtgggggagcttctgagccaggagaaggaatttcacaaggtaatatcatcagttaaagcaggaaccggccattttcacttagtctgtgactcttcagttacttcaggccatctggatgtatacatgcagtcttgggctgagaggcctgacattcctgtcttcttatattaataagaaaaataaaacaaaatagtggtaaagtgttggggtggcgaaaatttttgggggtggtatggagagataatcggcgatgtttctcagggctgcttcaagcaggattagg

SEQ ID NO: 198828 - DNA, 421 bp, Homo sapiens
gcaggctgagtctgaaaagagagtcagtgaagggagacagggatggggccattttataggatttgtgtaggtaatggaaaattacagtcaaaggtggttgttctctggcgggcagggrtgggggtcacaaggtgctcagtgggggagcttctgagccaggagaaggaatttcacaaggtaatatcatcagttaaagcaggaaccggccattttcacttagtctgtgactcttcagttacttcaggccatctggatgtatacatgcagtcttgggctgagaggcctgacattcctgtcttcttatattaataagaaaaataaaacaaaatagtggtaaagtgttggggtggcgaaaatttttgggggtggtatggagagataatcggcgatgtttctcagggctgcttcaagcaggattagg

SEQ ID NO: 198829 - DNA, 567 bp, Homo sapiens
tttaatccatcgtattagttctgtgcctctagagaaccctgactaatacactcctatttgacataaatatggcatttgaaaaaattatattttatttaatcctcagaacaaacctgtgatgtatatatttttatctttatttttatagaggagaatacaagtttgagatggrtgagtaatctgctgaagatcactgaatgaatgtgcaaggaaaccataacataaatccatgtctctttctactactcaattttttcctgttactaatatcatttttaaaaataatatttatggggttacaatttatgtttaataagctttacccattttaccacgttatgacccaacaagaaagccttcaccagatgcggccacttgatgttgaacttcccagcctctagaaccacaaggtaaataaatttctattcattataaattacccagtatatgatattctattaaagcagcacagaacgaaataagacagagaatattgtcattttaacaatattaattcttttgcttcatgatcatggggtgggttttcaattatttaaattttattta

SEQ ID NO: 198830 - DNA, 592 bp, Homo sapiens
agacatttagattgattctagggttttgttctgaaccacactccagtgaatgtatttctttgtcctcttctacacagatctgtagttgtagaattttggtttaaaaggttgtacatttttagttttgatggacagtgccaaattcctttttaaaaagtcttctcctgttttcacacttctaactaatattagaatgcctatttctacaactcatctctgtttttttttcccaatctaagggatgaaaatggcaactcaaygttttaagttagtatttcccctgcctttatttcttcttgtattccttctttcatgtctctctttatgcttttttctctctttttaataaatatgtatttagcatctaataggtacaaggccatgcattagatgtagatgaaaataagtgtatatatacttatgtatttaaatattatgtaaataaatatatggcatatctattatatatagattatattttatatattgatatatttatatattgattatatatatatatatatatatatagtcaacacatatgttattttgtgaagcacttttgaaaaagatggttttgtgccaatatacc

SEQ ID NO: 198831 - DNA, 501 bp, Homo sapiens
tgggagtaaaagctttggtagggtgggtacccagatacttaggatttcctgaggcacactggatctgtagtttaggaaagcactctacttctaaatgcacctagcaagtagactttactctcttgataactgtctgttacttaatgttactgtctgttacttaataactgtcatgttactacatgccatttgctaaaatatagacctcctttttgaaggttgaaaatgaggtcraatatctgttaaaaccagatgactccccagtcaagtgtttcaacaacaatcacaacaaaagttgtttatatacttctggtcactaagttaatcaatgaatatttattgagcacttattataagtcataagcactattttaggcagtagaaaaatagcagtggagcaggataaacccttgactttaagaagtgcacattctggtggattctacagaagttagagaactgcaataaattttaaaatacacaatttggttttattgtttg

SEQ ID NO: 198832 - DNA, 513 bp, Homo sapiens
ataacacgactggctcctacagtgatatagaaacaaataagagagttatcaactcttttgtggcccagtccttaactaaacctatatttaagattacttgcactgtgagaagtcaatatattatgtgactgaggcaaatccacaataatatatggccctgtcttctcatttttaatcctaaaagataaccatatcttctcactgtagaaaacttttccagtagacaacakgggaatttatacccaagattcatagaaacatcatgtgatacatgctacaagtcctttattgaatatttactcacaattattgctaattcattaactgctgaagggatcaatggcagaaagtttacattaattacatgtggatgttatgtatttaattctgttgtagcacaacacaaacacctgtggaataagtggctatttagaccaccaaaataagcaagggtatagcattatctcagacattaatcaatactaatcatatgtaacgaagaaattaacaaaa

SEQ ID NO: 198833 - DNA, 570 bp, Homo sapiens
taagaactctggagcgggaatgttagaagtcgggtgagggataaaaaactacatattgggtacagtgtacattgcttgggtgatgggtgcactaaaatctcaaaaatcaccactaaagaatttatacatggaaccaaaatctacctgtaccccaaaaactattgaaacaaaacaaaacaaaaaagaatatttgcttaaggaatgaaaagaaatcttaattaaagtcactgaaagggagtggggccacatgtctttgtttgactgagactattctggtttatkcctgctgtcctagcatcctgctccatttcatattcacatgagattttatttttaattaaatattaataagaaaataagctaggggtcatgtagttgatacagagaagtatcccccaagtgcctcttcagtgaagaacttgttgcccagctgtggagagcgcagttggcaggcaatctccatctgtcacttccatcagggtcggcctcagatgcaaagcaaatacctctcacagagcagctcacatccattgactgaacaaggcaaggatatttcagcactacacaggc

SEQ ID NO: 198834 - DNA, 592 bp, Homo sapiens
ccgggtggtcataggtgaatctcttaaacttctgattctcagtttcaaagttttatgagaatgattaaatcttctctacctactttatagagttataataagtagaatatcaaatgcaccttaaaacaaaatgcactaaacatagaaattatgtagttaagttccctccattattaaccaatctacagaatatgttgatccatttgatcagtcattatgcaagtagtaattgaccacccaccatatcaagaagtgggatagataatggagatccatcaataaggcaatccagtttctgtcggcaaggacctatggtccccacatggraacatgggaaatgttaacgacatgagggcaatgagagaggcttatatatgctgtgaagacctgggtgtcaaggtgctatgtctatgtgattgcatgttccttgaatctagagaactcatgcattgtatatattaatttatccatccatttaatatgttaatttatccatccatttatttatgaaaaaatattgcctgcctgctaggtgttaggtactataccaaatcctagagatttagagataaaaaagtagagttcttgtctt

SEQ ID NO: 198835 - DNA, 592 bp, Homo sapiens
ccgggtggtcataggtgaatctcttaaacttctgattctcagtttcaaagttttatgagaatgattaaatcttctctacctactttatagagttataataagtagaatatcaaatgcaccttaaaacaaaatgcactaaacatagaaattatgtagttaagttccctccattattaaccaatctacagaatatgttgatccatttgatcagtcattatgcaagtagtaattgaccacccaccatatcaagaagtgggatagataatggagatccatcaataaggcaatccagtttctgtcggcaaggacctatggtccccacatgggaacatgggaaatgttaacgacatgagggcaatgagagaggcttatatatgctgtgaagacctgggtgtcaaggtgctatgtctatgtgattgcatgttccttgaatctagagaactcatgcattgtatatattaatttatccatccatttaatatgttaatttatccatccatttatttatgmaaaaatattgcctgcctgctaggtgttaggtactataccaaatcctagagatttagagataaaaaagtagagttcttgtctt

SEQ ID NO: 198836 - DNA, 592 bp, Homo sapiens
ccgggtggtcataggtgaatctcttaaacttctgattctcagtttcaaagttttatgagaatgattaaatcttctctacctactttatagagttataataagtagaatatcaaatgcaccttaaaacaaaatgcactaaacatagaaattatgtagttaagttccctccattattaaccaatctacagaatatgttgatccatttgatcagtcattatgcaagtagtaattgaccacccaccatatcaagaagtgggatagataatggagatccatcaataaggcaatccagtttctgtcggcaaggacctatggtccccacatgggaacatgggaaatgttaacgacatgagggcaatgagagaggcttatatatgctgtgaagacctgggtgtcaaggtgctatgtctatgtgattgcatgttccttgaatctagagaactcatgcattgtatatattaatttatccatccatttaatatgttaatttatccatccatttatttatgaaaaaatattgcctgcctgctaggtgttaggtactataccaaatcctagagatttagagayaaaaaagtagagttcttgtctt

SEQ ID NO: 198837 - DNA, 409 bp, Homo sapiens
tgtatatacagacagtggtgggtgggggagtagcattgtgtttttaaaagaaaatcacatcttaatgaaagaattactgagaacttggtgggcagaatagtggtggttttaattgtattttggaaatataaaaaatacaaggttgtaggtttatggggccttagaaaacaacagtaacaacatcttcagattacccctgcactctagggacaggctgtgatgagtagaggtgcatgcactgcacagagttctaactggcaggactttgtcctttgctgtgcttggctgtgtggtgtggactcagggtgagaggggttcattgctgtgggttgatgatgtagtttcccaaagaagtgcacaaaataataaaatgaagrcttattttgtctttctaactaaaccaatcata

SEQ ID NO: 198838 - DNA, 511 bp, Homo sapiens
ccagatctgcaagctgtggggagggcaggccatttggccgtaacccacccactcaagggatcgctcctttccacttgtctgggcagagtgggaaggagagcctccagaaaccggcggggaggaagtttgctggggctccactgtgtcactgatttatggaagcctttcagggccagaatgacaccatccgcctacctcctgctaattcatattctcagagctttaaatcatggtgacagccccaccaggcgctctgatcagttgagggcttccagggcctgccagagcaccccacagccgcactgcaggttacacccccacctgccccaaatacatcccaactcctgctgctctcrggccctctgctcaatccgataatccacggagaaatgaccttcctttcactgatgtagaagctctctcaactgaaaaaattgcagaagttagaaaaaaataattgacattatgactcacccctacctcctactattgctaagcttcgaagtaaaca

SEQ ID NO: 198839 - DNA, 565 bp, Homo sapiens
tacacctacgagattggcaacaagtcaaaagctgggcatgaggctccaggaggctaattgcattgctggggcagggatggagtggacgggtgcagccactctggggagcaacttggtggttgttattccatctgggtatactcatacttcatgactcagcaatccagctcattcatatgtatatttatgtatkcaggtattcaggagctggatatatatgtaaatcttccagggaagttctcacagatgtcctagaggggaatgaatgtgtgaatgttctcatcccagtttggtcctggtactggggagttgagggggacctagatacctgtttctaggtgaagcaacgtataccatgtggtgggtactcactgtggaatcctatgcagtggtgtgaaaccacacactgggtgtacacacaaaaacacagacagagaaacattgtgctgagtaaaaaaggaaacagaattacatctatagcacattactatttatgtaaattgaaaagcacacacacaaaatcacagtatgtgttttataaaatatatttattgtcttttttttt

SEQ ID NO: 198840 - DNA, 565 bp, Homo sapiens
tacacctacgagattggcaacaagtcaaaagctgggcatgaggctccaggaggctaattgcattgctggggcagggatggagtggacgggtgcagccactctggggagcaacttggtggttgttattccatctgggtatactcatacttcatgactcagcaatccagctcattcatatgtatatttatgtattcaggtattcaggagctggatatatatgtaaatcttccagggaagttctcacagatgtcctagaggggaatgaatgtgtgaatgttctcatcccagtttggtcctggtactggggagttgagggggacctagatacctgtttctaggtgaagcaacgtataccatgtggtgggtactcactgtggaatcctatgcagtggtgtgaaaccacacactgggtgtacacacaaaaacacagacagagaaacattgtgctgagtaaaaaaggaaacagaattacatctatagcacattactatttatgtaaattgaaaagcacacacacaaaatyacagtatgtgttttataaaatatatttattgtcttttttttt

SEQ ID NO: 198841 - DNA, 595 bp, Homo sapiens
ggtaacaaaaccttgacatgttttgtgacagatttcccacttccctgtaatatctatgtgtcttcagggttaactgagctgctatacctcacaaagaacagtcaacaatggaatttaacatttgttgaatatttaaatgcaatcattaatttagggaatatttcaaatatcatataggcaatagaattttgtcagcaggtacacttatggtccatcaatataatttcaattagtgcttctcaastggcaggcaaatgtgcaatgctgtgccattaatgggccataggagtactttccttggcccttatagcagtcatgtgggaccctgagttcctgggccagtggcaatggcatctttatccatttgtccaaatagcataaaatattatcattttctaagtttgcatgatttgaaaaatgtttgagaagccttagtttgtactagaagttcgttaacgagcctgaccaatgtgtctttgacctctcattgtgctggacatagggtaagatgcagacaaacccccatgacccgaaaagctctcagaaacactaagctgagctttatgatcactcattccaaccatatgcgaagagt

SEQ ID NO: 198842 - DNA, 595 bp, Homo sapiens
ggtaacaaaaccttgacatgttttgtgacagatttcccacttccctgtaatatctatgtgtcttcagggttaactgagctgctatacctcacaaagaacagtcaacaatggaatttaacatttgttgaatatttaaatgcaatcattaatttagggaatatttcaaatatcatataggcaatagaattttgtcagcaggtacacttatggtccatcaatataatttcaattagtgcttctcaagtggcaggcaaatgtgcaatgctgtgccattaatgggccataggagtactttccttggcccttatagcagtcatgtgggaccctgagttcctgggccagtggcaatggcatctttatccatttgtccaaatagcataaaatattatcattttctaagtttgcatgatttgaaaaatgtttgagaagccttagtttgtactagaagttcgttaacgagcctgaccaatstgtctttgacctctcattgtgctggacatagggtaagatgcagacaaacccccatgacccgaaaagctctcagaaacactaagctgagctttatgatcactcattccaaccatatgcgaagagt

SEQ ID NO: 198843 - DNA, 609 bp, Homo sapiens
tgtgtcatgttccatacattctaccttcctatagttcctgtgaggaagtgaaattgagagtgtgaycatgaatccaaatccagatgctgatataaagtagctctgtgaacttgaagtctttggagctgattttcttttctttccactagtatggttgcctttaactctcatgtgtgtcttgaggatgaaggtaagataagataaggtaatgtgtttgagaccacccgtgctgggcaaatagttgactttctcagtatcccatacttgttggtggctctgtcaaagtgtttctcctaggcctgtacttccttgctaactatatatatgtgtgtgtgtgtgtgtgtgtgattttatgaagcaagggagggtgactgcctgcttgccctaaaggctctgctgccttcctgactcaatatccccattaaagtcccatcttaccccctcagggctctctacttgggaaatgacaatgtatttaccacagatcctagtatgcattctcagtgacacgtctatattttcattgagtcttctgcatagatcctcactccagaaggtaagggtggggaattttggaggttacaacaatttgtggggggaatttttaca

SEQ ID NO: 198844 - DNA, 617 bp, Homo sapiens
agatgtggtagcagcaacgtttccattcacaaagagttacaccacccctcacacaggatgcctcaaaatctggagacaaatctatacttgggcttagcttgtgtgagtgtaagcaatgggaatgtggagtcaaatcttcaggcacgctgctggtgatagaggcctgggctgtttcctgctaacttcctggcatatggtttattcagggaaagaattacctggcattgccagagagtaatcaactgtatctgtaacagaatggaaaagctgagactgcgatgctttcttcagctggtaaagaaaacctcccaaggccatgaggttcaacttatcygtagcatcttcaaagagcctggatgcaaacagaaagagatgtgttctttggaaacaattcagcaaggtctttatggcagaatgattatggtaattttgttgatgtgattaatggaaatgctgtgtaaacactgtagacaaatgtatggtattattctatctattctaactgtgtacaagtctgctctaactgtgagattttaattcaaaggcacaaagaatatatttaaaaatatctttgtgccctcatggtctagctccgctatggtaggcactcataaaat

SEQ ID NO: 198845 - DNA, 633 bp, Homo sapiens
taattattttccttctttggagtatatacccagcaatgggattgctgattgtatgatacctctatttttagtttgaagagcctccaaactgttctccatagtggttgtactaatttacattcccaccaacagtgtacgagggttcccttttctccacatcctctccagcatttgttattacctgtcttttggataagctattttagstgggatgagatgatatctcattgtacattcaatttgcgtttctcttatgatcactgatgctgagcaccttttcatatacctgtttgccttctgtatgtctttgagaaactgaaccagaatactttgtataatgtcttatacaatacacatttgctgactgaacactgaaatgaagaattattagcacagtcatttttaattacaaaagtctacttacagaaagcaatccaaaaagtcgattcctaccacaaagacaatttaatttctttagatttttaaataaaaactccagctttgtggagagtcaggaaagcatttcctcacctaatacaggagcagcccactctggagatggtttcagtgggcttggccacacaggcgaccagcaactcaaagaggtccttcagcatggtattgatcatgctc

SEQ ID NO: 198846 - DNA, 610 bp, Homo sapiens
tcatgttaatgtttctagaaaaaggaaagtttccggtaatttctttttctgtaacatgacagttttcttgaatggtacagaacatgctcactgtaaagacaccagaacccagtctaggaatggctcacagtttcatctgagctgtgccccacatgtaggaagatcagatgagtcatttgtccctcagtgaggtgagggacaaattgccacagtagctctaattggtttacagacctcctggtatccatgctcttgagtaatcctttcctgtactggccctgggcttggatgtgtgagttgctttggccagtggaacacaagcaaacatcatgtaagaacagaattaaaaagtacttgtgatttggggtttgccctgttgttgctctttggaaccctaagaatgccaygtgaacaagctggggctggtctgctggagtctagtctacatgagagaccatgaaaagagagacctatttgtctagccttcccagttaaggtcatcatgaaccatctggccccagactttgcaccagctgaccatagatacacaattaaagccagtgagatctgccacccctggccaacaccagaactacccagagaagcctac

SEQ ID NO: 198847 - DNA, 599 bp, Homo sapiens
ttttctcttccctgttagcctatccttgtaatttttttggaagttggacgtgacatactgagttacaggaatagggtaaaataggctttcaatgtgagtttttaagtttgttggggtaggagcttggctatgcatagtatttccaatagctgtaggttctaggatctgcaaattcctctagtgtccttgtttttgtctctcctgttgtctttgagtttcccccaagaacttcttggagtctgtgtcttacagttctttcatctgtatccactggtatcagactggagctagttggtgtagtggtaaggaaaggatgaggtgaaggagctttaagtgttaagtaattttaggattaaatctgtcttttagtaggcttcgggcctggkgtatgacctttacaagtatatttaacacttttctccctgattttctcacactaggtgactctagagtggcctggagttgggtaatagcccttcctctggagagcaggccttcattatggaatgtgtatttccagatggccactttcacctcctcctgccagagccaagaagggattttttttttttttaactctttaccatgagaatattgta

SEQ ID NO: 198848 - DNA, 599 bp, Homo sapiens
ttttctcttccctgttagcctatccttgtaatttttttggaagttggacgtgacatactgagttacaggaatagggtaaaataggctttcaatgtgagtttttaagtttgttggggtaggagcttggctatgcatagtatttccaatagctgtaggttctaggatctgcaaattcctctagtgtccttgtttttgtctctcctgttgtctttgagtttcccccaagaacttcttggagtctgtgtcttacagttctttcatctgtatccactggtatcagactggagctagttggtgtagtggtaaggaaaggatgaggtgaaggagctttaagtgttaagtaattttaggattaaatctgtcttttagtaggcttcgggcctggtgtatgacctttacaagtatatttaacacttttctccctgattttctcacactaggtgactctagagtggcctggagttgggtaatagcccttcctctggagagcaggccttcattatggaatgtgtatttccaratggccactttcacctcctcctgccagagccaagaagggattttttttttttttaactctttaccatgagaatattgta

SEQ ID NO: 198849 - DNA, 454 bp, Homo sapiens
aagtttcatacatattattgcccctcccgaacttttgtaaggcatgttaagatactaaaatctctgatgaaactttttgtttcacatttgttctaactttgtttctgtcagcatttctcaaaaaggctttatcgtgtgtccatgtgtwctcattgttcacaggaaggggaacatcacacaccggggcctgttgtggggtggggggagcggggagggatagcattaggagatatgcctaatgtaaatgacgcgttaatgggtgcagcacaccaacatggcgcatgtatacatatgtaacaaacctgcacatggtgcacatgtaccctaaaacttaaagtattaaaaaaaaactttgacagaagtaaatgtaaatatatatatgtacacacacacatatatataatcatataatggagattctgcacctatggaaaatgtgccttaatattactgc

SEQ ID NO: 198850 - DNA, 454 bp, Homo sapiens
aagtttcatacatattattgcccctcccgaacttttgtaaggcatgttaagatactaaaatctctgatgaaactttttgtttcacatttgttctaactttgtttctgtcagcatttctcaaaaaggctttatcgtgtgtccatgtgtactcattgttcacaggaaggggaacatcacacaccggggcctgttgtggggtggggggagcggggagggatagcattaggagatatgcctaatgtaaatgacrcgttaatgggtgcagcacaccaacatggcgcatgtatacatatgtaacaaacctgcacatggtgcacatgtaccctaaaacttaaagtattaaaaaaaaactttgacagaagtaaatgtaaatatatatatgtacacacacacatatatataatcatataatggagattctgcacctatggaaaatgtgccttaatattactgc

SEQ ID NO: 198851 - DNA, 454 bp, Homo sapiens
aagtttcatacatattattgcccctcccgaacttttgtaaggcatgttaagatactaaaatctctgatgaaactttttgtttcacatttgttctaactttgtttctgtcagcatttctcaaaaaggctttatcgtgtgtccatgtgtactcattgttcacaggaaggggaacatcacacaccggggcctgttgtggggtggggggagcggggagggatagcattaggagatatgcctaatgtaaatgacgmgttaatgggtgcagcacaccaacatggcgcatgtatacatatgtaacaaacctgcacatggtgcacatgtaccctaaaacttaaagtattaaaaaaaaactttgacagaagtaaatgtaaatatatatatgtacacacacacatatatataatcatataatggagattctgcacctatggaaaatgtgccttaatattactgc

SEQ ID NO: 198852 - DNA, 268 bp, Homo sapiens
ggttttcctgaccgcaaataccttgcagttaaacacaatagtatgtttcctttgagaatgtcatacttgtagagagttgttgaggtaggcgtgcttttatcctagcttggtccacctctgacwtttttttttttaatacagctttggcaccctagcttagtatgtgaatattcacacaaaagagcaggacgaagtctattcccactacgaattttatttgtaaaagactcctgaaagattttcctctgaaacattcattttcagtcaa

SEQ ID NO: 198853 - DNA, 353 bp, Homo sapiens
gaattgaacatgagatgacacacatacttatggtgtctgaaggtcatgatcatgttaccatatcaagctgaaaatatcaccactatctggagagtttgacatgttttcctctctgaacctgttatgaacacgttggttggctgggttcagtaataaatatgtgaggcctttcatttcaaaaaaaaaaaaggcaatttatcctaatagatttaagagctctgaaaggtagaaaagatccctacatttatgtgagaaaaataaacttgataacarcgaaacacagggcagtactgcaatatgctcaccagcttatttggtgaatcataaaaggacaattgaaatggaggtgtgct

SEQ ID NO: 198854 - DNA, 606 bp, Homo sapiens
tttagacatccatttaaacttcaataataacttcaataacttcaatccttatctcacatcatataaaaaattaaattggctcatagacctaaatggaaaactaaaactattaaatttctgggagaaaatcgaggataaagtctttgtaactttgggtttgacattaaaagcacaaatgataaargtaaaatttggcaaacttgacttttcaaattaagaaattcttctctccaaaggattataaaaagataagtcatgggttgggaacagacatttgcacattacctacttgataaagtacttgagtctagaatatataaagagctttcaaaattcaacaataagaaaacaaaccaatacaaagggtggggctagaatttgaatagccgtgtcacaaaatagatgataaattagaacgttaaaaaggtctttaacatcactagtcattagggaaatgcaaattaaaatcatgagacattaaaatgaataaaatacacttcttaaaataaaatatcaggccatattaactcctgacaaggttgtagagcaactggaacttactgttgatgaaaatataaaatgataccatcgctttggaaaatgctt

SEQ ID NO: 198855 - DNA, 489 bp, Homo sapiens
tgaaaactgacacatacatgtttgtagcagcgttatttgtaatctcacagaaacataaataatgcaaatgcccatcaagagaagaatgaacaaagaaattatggcacattccaacaattaaatactacctagcaataaaaaatctactgataaacctaaaaagataattatgcttagtgaaaaagacacataagagtatgtattgtatgattccatttttaaaattctagaaaatggaaattaatctatgataacatagagcaaatcagtggttgcctaagaaaagagaagggatgaaagaaagactctagtttattgtaygtcaattctacctcattaaacccatgaaaaaatatataaatgagcattatttcctgcatgatatcaaaagaataaacagtatagtattggttaaacataaataaatcaatgacagtctagaaacaacaaaagtttacatgagtttaatttataatagggtagcagtaa

SEQ ID NO: 198856 - DNA, 600 bp, Homo sapiens
catctggggaacagagctgcaccaaagaatggtgctcagtgctcctgctgtgagaaaaaatgaggatcatttgtataggcaaaaatcgagttggtgaacaaaattacaacgtttttccaacacagacatgcagataataagatttggttggctagtactgattacactctaagaaggttatgtaacattttatcataaagaggtaacaatcacaaggatctctctaatatcgtttagtctaggtttgaataaagaatagggagtctggttaatgtttaacatcttaacacaaaggtcaggaagcaaaggccagacaccagagaagaaaaacagccatgtcaaatgagtctgtttctagggcatcattttttcccttggcataataaattggggtgatcctgaaattttcattctttttacatttccctctttctttcaaactctaagaggaagcattgcaggagaattatttagtcagatcgcatatttgatcgaatctcacattgctaggaagactcatttttaggaagtcatgtaycatggaggagagaaatattagaaaggaccaaggccgaattacaaagaaacaaaaggaaagta

SEQ ID NO: 198857 - DNA, 572 bp, Homo sapiens
tcaaaatgacattatgtagaatttctcaataaaccagatttacttgattccaggactgagatgaactcaaaaataaataaatgaataaaatttaaaaagtagtgaaaatttatcaccactgtcagaaaaaaaaaacaaaaaacccaggttgtctggttttttggtgatattcaaggtcagcacaatttatcattaatattgtgtgacaaaagtgttattagatgacaaaaatgtatgttaataaaatggtcaaaaaagtgagaatttattccctaggggaaactggctgcttgtaattacaaacagaaaaaggatgctaggacagcggctccaactattttagtggaaacaatccatgctaccaagtagatacttctagagtgtacaaaaacttgatttcatgcatrgacatatgtcttctttgctccaatccgggctcggaagcacaagaggaattaaaggttcacaggacatctaatgggagttccagaggagtctgataatttatttcattctcagtcctaattagagaggccagagaaaagcttatcctggcttttcacaggaggaat

SEQ ID NO: 198858 - DNA, 430 bp, Homo sapiens
taagaggtcccagtgtttccttttgctctagaaatttctcatgtgtaattagttcgattattaatttccatccttttttctttctataggctgctaatgggtattggcttgcctggttttgccaagcatgtactttaccattttctatgtgttttagcctttccctttcccataattttaataagagtgggtcatcacaaattcagtttctagaactatccattttgttactgaattattactgagctattaagttttgcaatcatgctttctatttccaagaacgcttcttgctctgattgcctcactttctttgcaagttgctattgtttttatcactgcaattctcttaaatccaactatgaacactaattagatatttttaagtccgttcatttctttctttamatttgctttccttggtgaattc

SEQ ID NO: 198859 - DNA, 524 bp, Homo sapiens
gttaaaaacctaagaaaggtcactgccagtgaatattcctttcagaagcctcaccctccccacccgccccaaactccagaactatgtgtcaaggaaacatgactgagagccctgggctctcacgcccccggctcagcccaggctgccactgggcccagggtgaacacaggacccaagcaatggccagcaggaacgcatggtggtcggcaggcagcgcaccttcttgccggcccagcacccaaggtcttaccagcaccccaattcyctacacggtcacgatggtggcgcctgaactgggagggacgtgacgtgcagagctcatcccagcaagtctgtccttcagttcccgctaggtcagtccctctggcctccccaaagcccttccttccagcgtgctccttctgcaagctacttagatcctcacaacagaatccctgtttagcttaatttagctagagttggtttccacggcttacaacaaaggaaacttaactgcatcgcagcccaatcgctttctccaaacc

SEQ ID NO: 198860 - DNA, 489 bp, Homo sapiens
aaaggatttctttttgttgtttcttcacttgcttttccagctttctaaaagcactamtactgtaaaacttaggttattttttaggagcttcttttaaaaccttcaaaataacttcataattaccaagataacagaatttatcatcagaaacctggggtaggcagtattcgaaaagacttgaaggtgggtaggcaggtagctggataggcaggtagacaggtagacaggcaggtaggcaggcagactgtgacactcagctttaaggttctgctgttttcagctacttgagccaaacggatatgaagaaggagtggggagactattgttcatgctaccctttcaaaaaacattgaaaaattagaatatgcttctatatgccctctccactgccacccaaactttaaaagagcttcctatatgtcaagacatgaacagatacttcagataaatgccaaaaataaaacctatgcattctacaacttttaggtg

SEQ ID NO: 198861 - DNA, 548 bp, Homo sapiens
tccatctgcatctaccatgttcactgttgtttacttagcacttagtcctgtgcctggcccatcggaggcaccagcaagcgtgtctgtaggagtgggcttccgcaggacagtgctgctttttattattatttttttaaatagaagggacttaagggccaatgacttttaattctgctgagtaagatgtagaaaaattacagctaccatatatcatcaacatgttgtaaaagttggaaggacatactcttagaataaagaacagttcttttcttttcttctctttttgttttgtttcgtttcgtttcatttcaagacagagtctcgctgtgtcactcaggctggagtgcaatggtgcsatctcggctcactgcaacctccgcctcctgggttcaagtgattctcctgcctcagcttcccaagtagttgggactataggcgcataccaccatgcccagctaatttttttttttttgtttgtttgtttgtttgtttttgagatggagtgttgctgtgtcgcccagctggagtgcagtggcgtgatctcagct

SEQ ID NO: 198862 - DNA, 381 bp, Homo sapiens
gaaaagagagatttatatttgcaagttctttaaagtaaatgctgtaagaaaagagaggtcgtggcctgcagtcaagttttggctggagcaaacaaattattttggcaacattgagctttcccagacaggaattttaagagaagagctgaggttattttagggacacagcccacatatctatgctagagattggtcttttagtgtttgcctgtatgtgtgtggtgggtgagtagggatgagggagttggacagagttttttgtactcagagtttgcagctctcaaatgtaagcttcawgataagggacaaattgtgtctaatttcccttggtaatcccaaggagtgattcttatattattgtgtgaatgaaagataaaactc

SEQ ID NO: 198863 - DNA, 555 bp, Homo sapiens
gcttctgttattccttaataaattttaggtatcatacatataascactgaattcagaaaaggtgataatgcctaacttgacagaacattgtagaccaatccattaattatacagctgcccccaaacactcctctaaaagcatcactgatgtgatatttctgctgagaaaatttggaaatggtttaagtcatattatattatggtcaaaattacctgtaatcattatttgccaaaatgtgtcctacaaaaactgcaaattttaaattttgtataaaatattacattattcctttcaaaatacaatgccactttcaacagaaatagaaaaatgaaattattctaaaattcaaaaaagagcccaaatagccaagtcaatcctatgcaaaaagaacaaacccgaggcatcatattacctgattttacactatactataaagatatagtaaccaaaacagcatagtattggtacaaaagcacacatacagaccaacagaacagactagagagcccagcaataaagtcacatacctacaaccacctgatctgcaacaaagt

SEQ ID NO: 198864 - DNA, 476 bp, Homo sapiens
actcctctaaaagcatcactgatgtgatwtttctgctgagaaaatttggaaatggtttaagtcatattatattatggtcaaaattacctgtaatcattatttgccaaaatgtgtcctacaaaaactgcaaattttaaattttgtataaaatattacattattcctttcaaaatacaatgccactttcaacagaaatagaaaaatgaaattattctaaaattcaaaaaagagcccaaatagccaagtcaatcctatgcaaaaagaacaaacccgaggcatcatattacctgattttacactatactataaagatatagtaaccaaaacagcatagtattggtacaaaagcacacatacagaccaacagaacagactagagagcccagcaataaagtcacatacctacaaccacctgatctgcaacaaagttgacaaaataagcaatgggaaaaagactccctattcaattaatggtg

SEQ ID NO: 198865 - DNA, 604 bp, Homo sapiens
ctatatccacatctgaggagactttgaaacacaactaatattcagtaggcttaccgcattagagtttggattgaccattctgattacatacgagcgtaaacaccatcttgaacaatggaggaaatatcatacaggcaataatgttatttcttctacggtacactactagaattgggcactggtctgacatatagaacaggaaaagttactaagatataaattgagatacatatctgcaattctctttcatagctatcttttaaaactgaatctgtagaacaaccaaagtggtgtgaaacattctctatacatcaccccttttatctaactggctgacagaaactgtttaaaaaatgctacttctccacatcgtctccagcacctgttgtttcctgactttttaatgatcgccattctaactggcgtgagatggtatctcattgtggttttgatttgcatttctctgatggccagtgatgatgagcattttttcatgtgtyttttggctgcataaatgtcttcttttgagaagtgtctgttcatgtccaatgcccactttttgatggggttttttgtttttttcttgtaaatttgtttgaattca

SEQ ID NO: 198866 - DNA, 531 bp, Homo sapiens
tcaattatataaataggtgctattaactgaactgttattacacatcaaatattatgttgcaaaacatacattggacaagtcaatctcaattttggctgatagtagaatcacctagggccttttaccaactgtaatgcccaggttcacctaggccaattaaactaccatctctgggggtaagaaycatgtctatgtatactttaaagctccccaagtacttctagtgtgcagccaagtttgagccctactatctcagacacattttaaataagcattttttattggatatagacatttgaaaattgggtctatatttagcttttctatatactgctagagctgaatagtagcagagagtgtgatatgtgagaacagaaatgtggtttcagaataaattaatggcatttcagtgtgcttcctgcagctggctcagaaaagcagttcattcataatagaaggacatgagaatatatgattcacattcaaatgaagcagagctctctccatattatgaccatgtagaaactgcaa

SEQ ID NO: 198867 - DNA, 496 bp, Homo sapiens
aagctcttttgcaagctgtattaactcttacaggtcacttgagtattatttattgcacagaagcagggacttgcagacaatccatcytaaaatttataaattgttcaaccttgaaaattctgcctacatattcactttgggattgttatttttggttataaaaataggtgaatttgtatcaagtagagaattgtaaacataagcagaaatataatgttcataaatacaaggcaaagtagaaattaaaggataccaaattgcaagtcagcaaagctggttcctagtcccatcttattccccaaatatctaaccttggatggttctcctaaattttcctggatttaatttatcatttctgagatgctgtggctgtgaatcataaagttctggaaggctgtacaatatttataaagaatctgcacatttgcattgatatcaaacattatctacaaacatagtaaactactggtgcactactatcagtctgagtatagtc

SEQ ID NO: 198868 - DNA, 487 bp, Homo sapiens
tatagcagtctccacttttaggaaatattaagactgtgattttggacttccaaaaggactcaaacttaatttaggattcagcaatatcatttgctgacgattgaactaatctgctataagccttttacaaatttctgggataaatatttttaagaaaagaaaacaaaaaacaaagaaycaaacaatgcttgatttttctcaaatatgttttagagtttttttttttttagaaactgaaaagtagtatgtaatatgtataataaagacttcgcaaaaagttacacttttcttaaactaaactttatacatacacatatgcatattgcactcattttatatttaaaattcttctcccaaatggaaatgctcatcttcactttggcacaaagatagcattaggactcaattttaagccactaaaattttgaatttacataaaagtaatacctacaagtattattactagatgttccaataatgctaagta

SEQ ID NO: 198869 - DNA, 487 bp, Homo sapiens
tatagcagtctccacttttaggaaatattaagactgtgattttggacttccaaaaggactcaaacttaatttaggattcagcaatatcatttgctgacgattgaactaatctgctataagccttttacaaatttctgggataaatatttttaagaaaagaaaacaaaaaacaaagaatcaaacaatgcttgatttttctcaaatatgttttagagtttttttttttttagaaactgaaaagtagtatgtaatatgtataataaagacttcgcaaaaagttacacttttcttaaactaaactttatacatacacatatgcatattgcactcattttatatttaaaattcttctcccaaatggaaatgctcatcttcactttggcacaaagatagcattaggactcaattttaagccactaaaattytgaatttacataaaagtaatacctacaagtattattactagatgttccaataatgctaagta

SEQ ID NO: 198870 - DNA, 575 bp, Homo sapiens
ttctttttgttttaaaaaagtatggcatgtaaaaaaatgttctgacacagtaatggctatcataagattgaattattgtagtaataccataaaatgtaataatggtgagtgggattagcaacaggaaggattagaagaatgtcataataatgttgaggtaaactgagttaaaaagatttgctgtgatttcatgatcatgatctaggtgattaagtatacctgcatattgctaaaagtaggcaatactgaagagtcatacaayagaataaggtataacttccaagccaattgaactactatttaaaaagtcaccattgagaagttagtaatttaaataattcccaatatctggaattcagattgtactctggccaaattctaacttctctacatatattaaatgaactaggtgacgggcatcggggcaaccagaaaacttgtaaaatcttttagttcaagggtagaaccatcagacacctgactgtgtgagctactaaccttctgattcaaatgtatgatgtaattaaaaatatcctgggaaagcatttagaatttaaggtgattaatgaaatagt

SEQ ID NO: 198871 - DNA, 483 bp, Homo sapiens
atggacgcatataggggaataatacacaacggggcctgctggaggatggagagtgggaggagggagaggatcaggaaaaataactaatgggtactcaacttaatacctggtgataaaataatctgtacaacaaacacccatgacacaagtttacctatataataaacctgcacatgyacccctgaacttaaaataaaagttaaaaaagaaaacaatggaaatacttgggagattggcccatggcaataggaaagtgggtaaatgcctattggaatgtgatctgaggaccattgataaaaaggttttcaatgccatgtagctcactcatccccaggaatttccactcgattttcaggatttctgttgccagaatcttcttgaaacaaattgagagaggtaacccataagccagagaacatttaagccttaaggaaatggaaggcagccagatggatttggggaaattatttagggtagcaaaaa

SEQ ID NO: 198872 - DNA, 483 bp, Homo sapiens
atggacgcatataggggaataatacacaacggggcctgctggaggatggagagtgggaggagggagaggatcaggaaaaataactaatgggtactcaacttaatacctggtgataaaataatctgtacaacaaacacccatgacacaagtttacctatataataaacctgcacatgcacccctgaacttaaaataaaagttaaaaaagaaaacaatggaaatacttgggagattggcccatggcaataggaaagtgggtaaatgcctattggaatgtgatctgaggaccattgataaaaaggttttcaatgccatgtagctcactcatmcccaggaatttccactcgattttcaggatttctgttgccagaatcttcttgaaacaaattgagagaggtaacccataagccagagaacatttaagccttaaggaaatggaaggcagccagatggatttggggaaattatttagggtagcaaaaa

SEQ ID NO: 198873 - DNA, 583 bp, Homo sapiens
aagtgacttgtggagccagtattttgaagtctgaatctttggatattaaatttcatgtgtagtgtggctacaaatttaatgcacatcataactctgaggtacaggtctagtcttgctagtacctcctcatttttcagggtgctgagtgtggaatgaatgaggagagaagtacaggtcctatttggttaaaacttagcccacacagataatttaaatagttattttargtagtctctgtggggaaaattaaagtgttcactagctcttcctcccctctaaaatgtcactttattgcatggaataaagtatgtggttcatagtactgtttgattaaggggaggatagtgtcctctggctctactggacccccagccaatgtcacttgtccaccctatggctggtgtcatcttctttctgcttggcaagagccctgtaccaacctggttaattagagaacccctcagccctccctgaggctagagaacccttgaaattctgactgctcctcccatctgccttgacctggaaaaatatgctctgcaaccttttctcaaaaccactataccctttgataaagtcactc

SEQ ID NO: 198874 - DNA, 583 bp, Homo sapiens
aagtgacttgtggagccagtattttgaagtctgaatctttggatattaaatttcatgtgtagtgtggctacaaatttaatgcacatcataactctgaggtacaggtctagtcttgctagtacctcctcatttttcagggtgctgagtgtggaatgaatgaggagagaagtacaggtcctatttggttaaaacttagcccacacagataatttaaatagttattttaggtagtctctgtggggaaaattaaagtgttcactagctcttcctcccctctaaaatgtcactttattgcatggaataaagtatgtggttcatagtactgtttgattaaggggaggatagtgtcctctggctctactggacccccagccaatgtcacttgtccaccctatggctggtgtcatcttctttctgcttggcaagagccctgtaccmacctggttaattagagaacccctcagccctccctgaggctagagaacccttgaaattctgactgctcctcccatctgccttgacctggaaaaatatgctctgcaaccttttctcaaaaccactataccctttgataaagtcactc

SEQ ID NO: 198875 - DNA, 713 bp, Homo sapiens
tgcctacataaaaaaaagaagaaaaacttcacataaataaccagatgtgcccatcattattatttggaaagctccttaaataactagaaaagcaaaaataaaccaaacccaaaattagtagaagaaaagaaataataaatattagagcagaaataaatgaaattgaaacaaagaaaagaatacaaaagattaatgraacaaaacttggttttttgaaaagataaacaaaattgacaaaaatttagccagactaagaacaaaagagagaaaagacaaataaataaaatgagaaatgaaaaagaaattcaaaggattattagtggctactatgagcaactatatggaaataaattggaaaatctagaagaaatgaataaatttctaaacatgcacaacctggcaagattgaatcaggaggaaacccaaagactgaagagacctataataagtaataggattgaagttgtaataaaaagtctcctggcaaagaaatgcctgggactcaatggcttcacagttgaaacataccaaatatttaaataagaactaatagcaatcctactcaaactattctgacaaatagaggagaatacttccaaacttattctatggagccagtattaacgtgataccaaaaccagacaaagacaaatgaaaaaaagaaaactacaggcaaatatctctgatgactattgatgcaaatatcctcaact

SEQ ID NO: 198876 - DNA, 295 bp, Homo sapiens
atcacagtgaatatatctcttgtaatgggacctctgattctcttctgtgtaccttcagaagaagcctgatgacttgatggaagggtttyataaacaggaaagccttaccctaatattactattatttcattgatagttcagctctattcagggaatgtttattaattgtttttatgtgcctggcatattctggatattttggagagttaaaaataatcacaggacttagttgtttctctcaaagaggtcataatttactggggatatcagggattaatgaaagaaataagccaga

SEQ ID NO: 198877 - DNA, 421 bp, Homo sapiens
agtagggtgctttcctttgcaggtcaatttttggggcaatttttaaatttccccaatttggagagtcagttggtaatctccttttcttccatgccttcctggccacactgctgaaaatmccaagcaggctattgttgttggtagttcggtagcactcaactggctcctgggcctgtgagggttttctgtcatgaggttttcttgataataccctctagatattttctccctttgctatcaaggttgatctatttggtttgttggtggtgttttgggacactgaaaaactacaccatcaccatgatcatgttgttctcttttgccttctattaaatgaacttgcttcctactttgacaagaaattgaaatcattatatatttcatctctaaactttcttcctacttccccatatataaaaat

SEQ ID NO: 198878 - DNA, 434 bp, Homo sapiens
gctaaggtttctcccagagtagggtgctttcctttgcaggtcaatttttggggcaatttttaaatttccccaatttggagagtcagttggtaatctccttttcttccatgccttcctggccacactgctgaaaatcccaagcaggctattgttgttggtagttcggtagcactcaactggctcctgggcctgtgagggttttctgtcatgaggttttcttgataataccctctagatattttctccctttgctatcaaggttgatctatttggtttgttggtggtgttttgggacactgaaaaactacaccatcaccaygatcatgttgttctcttttgccttctattaaatgaacttgcttcctactttgacaagaaattgaaatcattatatatttcatctctaaactttcttcctacttccccatatataa

SEQ ID NO: 198879 - DNA, 568 bp, Homo sapiens
tactgttaattgttctgtgactcactcaaagagtgctttgtgtgaattttactttacttattttccccttcaataagctaagaaccttgattctatcagttggagcttgtcagagagaggggcttgatggggaaggaaaattatgaataatggagtagtcagaaaggagatacctcagtcctaatcctcctttttagggaggaaaactgaagattcaacaaagccaccaggtgaatggtctgaccygtcttttgtgtaataaaaataagctatgaagcatttcccactggaactattgagagatacatcaattaccattcttgtgggcagcaggctaatccttccaacttggatcatactgaataggtcatgtgtccacggtaaccctgtcttcttgtcaaaccatctatgttgatacatgtagctgtgtagggtccccctcatctgccttacaccctggaagaaacagaggcctctgacctcactctttcctaaagagcagctctttcaatcaacagactttcactggaacacctaccttgcaccaactattctgaattcagagtcc

SEQ ID NO: 198880 - DNA, 639 bp, Homo sapiens
tttttacagcttaaatctgcagtctctttgaatatgaccttttcacttcagaaagattttattaatttgcaactcagtgatggtctccaggccctacattgcaattaaaagcatcaactgtgtaatwtcagaactgttcttcggtgttcccaaaacgtcaatattgaaatggtacttcatttaacttgaagaaaacaaaggctcctgcaaccacagtgtcaacaaataagtaatggccctagctcaccagagaactgaaacccaaagtgtgattttgaaagcagtaactgacagtcatgaaagagttgaattactttatactataacatgaagagagtctactagtgaatctgaggggaggaataaaagagtagggtttataagtaatacattatgtagattcattttagaatatgaatagcagagattgttactatgacgcatgctccaaaccaaggcttttgccattgaatgaagtaattatcattcattaatctttacaaggattatgaaaacgtgtttatgatcaggcttccaagtatttgtagccatgattataaggatagatttgtctttccaaataagcagataatcttcctgtttaatgagtctttcttcttagagatcaaaatgcattgt

SEQ ID NO: 198881 - DNA, 431 bp, Homo sapiens
gagtgtgagcaactctgctcttatcttgttgctaccagctgtccctgaaagtgatgagcctatccatgtggttgatggctcatcacagtaagaaggggagaaagagaaaggaaacccaaggagctgctttttaaggacatgacagtgaacttgcgcatagctctcatcttcatcctccattgaacaatatttggccaatggccacacctaactgcaagggaagtggaaaaatcgaatatttagctgtggagggtagagagaagaggagggcacgtgtctctctaaaacttgagggatccattatacagagaaagaagggaagagtgggtcctgggcaagagcaatccctcctacagtagccatatttgaaatcagagsatttcatatgaaatcctagattactggctcctttccaaaaaaatagaaagatc

SEQ ID NO: 198882 - DNA, 220 bp, Homo sapiens
gcctctcctcagtcctatcccagataatatcaagcttgaaattttcagaccatctccaattcatttccattctgtaatttatctaartattgctgggagttgatgtgaaaagatcaaaggctatgcagtcagaaaggtgtggattcaatcttacctctgccactttgttgcttaaccttgggtgagttcgtcttaatttcctcattgtttaaatggacat

SEQ ID NO: 198883 - DNA, 550 bp, Homo sapiens
tactaaaaatacaaaaattagccgggcatggtggtgggcgcttgaagtcccagctactcaagaggctgaggcaggagagttgcttgagcccaggaggcagaggttgtagtgagctgagatcgggctactgcactccagcctgggtgacagagcgagactccatctcaaaaaaaaaaaaaaaaaaaaaaaargtgaatcaaatctcacctgcaagcaatgcaaatctaaaccacaatgcaataccagctcactcctgcaagaatggccataatcaaaaaattaaaaaacaattgatgttggcatggatgcggtgatcagggaacacttcttcactgctggtgggaatacaaactagtacagccactatgaaaaacagtgtggagattccttaaagaactagaagtggaactaccatttgttccagcaatcccactactgggtatctacccagaggaagagtagtcatcatatgaaaaagatacttgcacactcatgtttatagcagcacagtttgcatttgcaaaatcatgggaccaaccccaatgcccat

SEQ ID NO: 198884 - DNA, 578 bp, Homo sapiens
tggttggtgcttttggacagagaaagggcaaaggattagagagtggagcatctgacagtaaatcacagtgtggcactgcattattattattattgttttcattattgttttaaagggaagtctaatattggctttgcataaagcatgtcttactaggtaagtggtcacgtaatatgaaggtaaataatttttgtcattctcagagtccaggaattttgttcttccatggactaagaccacacaaaataaaacaaaagattcrgggtctactttttcctatcctgtcttatgccacttttccttcacttccagcctcctccttatccaggccttctgtaagaaataaatggaaatatagagacctgtaagatgccctcctctaaaagacctgtacccattcagattctccaccatttttattctgctgtaatttcaagctgtcacatttctttcctgaatctgggcagcacaatatcctcaatattagtgccttcctgacttccagccagagagctggtctgttttaacagtaactgccatattcatgcataagggttgaagctgaaacccattgtcta

SEQ ID NO: 198885 - DNA, 547 bp, Homo sapiens
cattaataaaaatacaaaaattaaactctgacattcaccaattcttggtgaggatacattgacaagacaaccctcatacatggataggtgcgactataattgaatctaacttatttgaaactagtttatattactcttaagtctgaaaatgtgcagaccttatggaccacaatcccactttctgatgcgtatccaacawacacttgcaaatgtacactggaaaacagagcagtgttgagtgtcaacgagcaacaaaatgaaaacaactcacatgctcatcaccaaggaaacagataaattgtggcaagtgaatactacataatactctacagcagtgaagcaaatgaattacagctacacacatgaatgtggatgaatgtcaaaaacaatagtgaggaaaagcaagtcacagacatcacatacagtataatgccatctatataaatggcaagatgtaattaatgataacagtgatacaaagcatcatgggagttctgaggaaggatttctgtctatgggagtcaaggaatacattatagggaaggtg

SEQ ID NO: 198886 - DNA, 571 bp, Homo sapiens
tacttatatttataattggtattcctagagtaaatgaacccatatgctatatcttttctataatcatatactatatagtacatcatatactataatcatatggctgtttgatagtcaatactatggtaattgttaggttagcatgccaataaatgtgtctgatcaatgacagttaacactgttttacacccattattagaattcagggacaaaacatcagcatgcattttcattgtaatttatcatttttgaattagtttatgtgatttgacatggtactaaataatccattgccctctggaaagagcatgcttgaggtactgtttaataattctctgccatatatttgttctgaacattgatcaaagatggttatgtggtctagttctttttagttttatttaaaaattacaatacaataatgtactaaatgagtgaaatatagaacattcctcttggtgctatttaaggaccagagtgtgttaagaaataatggctagcatttgcatagctgacaagcatagycctaaacacaaagagatgtgtaatgtcacatttgcatgaagtatta

SEQ ID NO: 198887 - DNA, 395 bp, Homo sapiens
tctgtagttgattggcatcaccatgatttctcactctgaatttatacactattgataagcaatcatcttcttacacttattygcacataagtacttaacagcaaaaaaatgtgacatggtattttcagcttattttctaataaatacttattagtcatataactgctatcctaatgtttatgttgttagatcaaaaaaatgaataagtatgttaaaggacctcggacttccaaaataaattggtgggcattattgatgttttatttctctgaagcctaccaactccatttcctgattcttcataggactttttgacatattgcttcaaactcttagatcaatgacatattaatccctagatttaaaagaattattgctatattaggcagtatgca

SEQ ID NO: 198888 - DNA, 575 bp, Homo sapiens
tcccttgggctaggggagggatagcattaggagaaatacctaatgtagatgacgggttgatgggtgcagcaaaccaccaaggtgtgtgtatacctatgtaacacacctgcacgttctgcacatgtatcctacaagttaaagtataattttaaaaaagtgatggatatcccaagttacactaatatgacctttatacattatatgactgtattcaattaccatgatgtacattcactactcattaatacaaatttttttaaagaaaataaaatagatatttaaaatgtggtatgataagtactgtaacagtggatggtagatcttccaaaacttactagttccttttcagtttggcatctacttcttcattttgttaaaataaaacataattgaatatttttgtgtttatcttaatgatattgtaatttacgatttttacaagtatgcaactttatgattttaataaaccttacttaaatattattgtagccaattaagtraagctaatccagacatctatgcatcaagtttgttataggtggtgacacactgtaaaaatgtgtacacatttatgt

SEQ ID NO: 198889 - DNA, 587 bp, Homo sapiens
tgtacagtggggtgttccagaaatgtcaattaggacaagtggattatgttgtygtttacctcttttatatccttactgattttctctctgtcctgtcagtcattgagacatgaatcttgaaatctctaactgtaattgtggaattgtctgtttctcattgcaattctatcatttttgacccatgtatttttcttaatttttaggcacataagcatttatccttctgataaattgacccttttaacccatggtaatattgtttgctctgaaatctactttgtctaatattaagatagcccacacagctttttgttgttgttgttgtttaatgctggcatagtttgtatttttttttatttctttaattttaacatatttggggatagcagattaagatggcagataggagacaggactagccttgtagctcacgcttggaggaacagagcaggatgtggaggctcacatcctcaacttttgctccaagaactactgcaagaatgtaccaggaaagctaagagaatccacacaccctttgaaagaattggatcattgctgcaggctccctgagacactgaaaacctgtg

SEQ ID NO: 198890 - DNA, 444 bp, Homo sapiens
ttttgtattttgagtaaagacaggttttgccatgttggcgaggctgatctcaaacttctggcctcaagtgctccacccgcctcagcctcccaaattgctgggattacaggcgtgagccaccacacttggcctaatattttgaacacattttactcttggctattgatgcacggagtgttagagytgaaatagttcttaattttggtctctcctactgtagatcaggaaggcaagagatagagaggacaaatgagctattcaaagagcagagggtcacaaatagaactagcgttctcctcaagccatcttgatccatcagtttcaattcatgctataatctattgtatagtatctgctctatgttgatatttccttactggtagcagtattcctcttcccacctcatagtgtatacttgtatatcattttgaagttgcagctaat

SEQ ID NO: 198891 - DNA, 444 bp, Homo sapiens
ttttgtattttgagtaaagacaggttttgccatgttggcgaggctgatctcaaacttctggcctcaagtgctccacccgcctcagcctcccaaattgctgggattacaggcgtgagccaccacacttggcctaatattttgaacacattttactcttggctattgatgcacggagtgttagagctgaaatagttcttaattttggtctctcctactgtagatcaggaaggcaagagatagagaggacaaatgagctattcaaagagcagagggtcacaaatagaactagcrttctcctcaagccatcttgatccatcagtttcaattcatgctataatctattgtatagtatctgctctatgttgatatttccttactggtagcagtattcctcttcccacctcatagtgtatacttgtatatcattttgaagttgcagctaat

SEQ ID NO: 198892 - DNA, 445 bp, Homo sapiens
tttcatgtgaaacccttggacttcatgatattttgaatgttaaataatttcatcattttaatagtttatctcagcaatggcgtatgcaaaattagctggatgaagagtgttatctgaccaaggccaaaatctgtagcccagagacatagtacattttccctggcccagtggtgctggaatatatttaagcctttacagcaaactaaaacaattcatttaaggaattatgagagccaaactatttttttwgagcctctgactgatacttcatgtgctaatagagaaaaatattatgatgtcaatgtttttctctttaaaatataatgtaatgtggcatgactgatatagccaatcttgaatattagaaatgatgcatcatcacctaattcatcaaaatcaatctcgaaaaggtcagtcttacttgaaaaataagttgattggcctt

SEQ ID NO: 198893 - DNA, 445 bp, Homo sapiens
tttcatgtgaaacccttggacttcatgatattttgaatgttaaataatttcatcattttaatagtttatctcagcaatggcgtatgcaaaattagctggatgaagagtgttatctgaccaaggccaaaatctgtagcccagagacatagtacattttccctggcccagtggtgctggaatatatttaagcctttacagcaaactaaaacaattcatttaaggaattatgagagccaaactatttttttagagcctctractgatacttcatgtgctaatagagaaaaatattatgatgtcaatgtttttctctttaaaatataatgtaatgtggcatgactgatatagccaatcttgaatattagaaatgatgcatcatcacctaattcatcaaaatcaatctcgaaaaggtcagtcttacttgaaaaataagttgattggcctt

SEQ ID NO: 198894 - DNA, 550 bp, Homo sapiens
tcacgcttctgcaggctgtacaggaagcatagcatcttctggggaggtctcaggaaacttacaatcattgtagaaggtgaaggggaagtaagatgcctcacatggccagagaaggagaaacagagagagaagggagaggtgccacacacttttaaaagaccagatctttttttttaattttattattattatactttaagttttagggtacatgtgcacaatgtgcgggtttgttacatatgtatacatgtgccatgttggtgtgctgcacccactaactcgtcatttaacattaggtatatcacctaatgctaaccagatcttacaagagctctatcatgagaamagcactggaaggatggtgctaaacaattagaaactgcccccatgattcaatcacctcccacctggtgccccacctccagcattggggattacatttcaacatgagattttggggagaacacagatccaaaccatatcaacctgttatactatcaaatattagatcttattcattctatctaattatatttaggtactcgttaac

SEQ ID NO: 198895 - DNA, 607 bp, Homo sapiens
caaatacaataataagtgatgaagtattataactcataatgtgctatgttactgtrttttgtcgttgctgataaaaatagttgattgatgactttttaagtgacttttaggcagtctagagtgagcagtaaaagaaattaaagctgaaacagtgaacctaaaattctgttgtagaagttgttaataactgtcttttcttcagcagaagttacctagttctacattgcctctggctttttgccacccattaagataaaaagctagaagataggaactaggaaatagtagagataaggtgaaagtctagcttgaactcagtgaagcaaaccaaaataagcaaagatccctcacttggagatgtggtagaagacttgtgtgaattattacagtgactaactacacagaggaataaagttatacatataaagttaaaagatatgtaatatgagtgctcctgttgaatcagccaacatgaattcagtcatatagtcacaacagtgtgcatcataaaacagtatcataaatagcaatgagttataaatggaattgaccaatatacttagtgagaccaatatacttggtgagaaactacactgtgttattactt

SEQ ID NO: 198896 - DNA, 607 bp, Homo sapiens
caaatacaataataagtgatgaagtattataactcataatgtgctatgttactgtattttgtcgttgctgataaaaatagttgattgatgactttttaagtgacttttaggcagtctagagtgagcagtaaaagaaattaaagctgaaacagtgaacctaaaattctgytgtagaagttgttaataactgtcttttcttcagcagaagttacctagttctacattgcctctggctttttgccacccattaagataaaaagctagaagataggaactaggaaatagtagagataaggtgaaagtctagcttgaactcagtgaagcaaaccaaaataagcaaagatccctcacttggagatgtggtagaagacttgtgtgaattattacagtgactaactacacagaggaataaagttatacatataaagttaaaagatatgtaatatgagtgctcctgttgaatcagccaacatgaattcagtcatatagtcacaacagtgtgcatcataaaacagtatcataaatagcaatgagttataaatggaattgaccaatatacttagtgagaccaatatacttggtgagaaactacactgtgttattactt

SEQ ID NO: 198897 - DNA, 607 bp, Homo sapiens
caaatacaataataagtgatgaagtattataactcataatgtgctatgttactgtattttgtcgttgctgataaaaatagttgattgatgactttttaagtgacttttaggcagtctagagtgagcagtaaaagaaattaaagctgaaacagtgaacctaaaattctgttgtagaagttgttaataactgtcttttcttcagcagaagttacctagttctacattgcctctggctttttgccacccattaagataaaaagctagaagataggaactaggaaatagtagagataaggtgaaagtctagcttgaactcagtgaagcaaaccaaaataagcaaagatccctcrcttggagatgtggtagaagacttgtgtgaattattacagtgactaactacacagaggaataaagttatacatataaagttaaaagatatgtaatatgagtgctcctgttgaatcagccaacatgaattcagtcatatagtcacaacagtgtgcatcataaaacagtatcataaatagcaatgagttataaatggaattgaccaatatacttagtgagaccaatatacttggtgagaaactacactgtgttattactt

SEQ ID NO: 198898 - DNA, 654 bp, Homo sapiens
taattttgaattgaccagctgttttcatgtaaaagcaatgataatcaacattttggtgagatagggaggtaacttaagattctagtaattaaccaaggtgtaagcaacttaaaattatttccatctgtaaaattatcatttcaacaaattatattgttttagagcaatgaccatgtcagcaatgacaatgacaatgtagcaatgacaaggacaaagttaattctggttacaaaagaaataattcttgtttagtgaatcaaagatctccactcaaaatcacaccatttgaattcttgcagactttgaagcttaaatagattcttagccttcacaacccctgggcatttttaataagaagcatagtgtgattctctgcttgggtaaggaaataaaacagaaatttttctcraaagggccataaggtatattacatccaattagtcctatcttgactctgtgaagttgtcccaaataagagtgggtgataactgtttgtaatttccaaccacagaattcaccttagtttgtactttgaatagttaatgcttggcagtagcagcttactttaatataggggacatctggaaaataccttgtaaacgatgaaaccaaaacattcaattgtccaaaaatattatggagtgaagaacacaa

SEQ ID NO: 198899 - DNA, 531 bp, Homo sapiens
tattatgtaaaagtcattataaatgcatttattgttttaactcctctattttgctatctgatttaaaagacaatagcaagaacaataattataaatctacgctagtggacacacaatataaaaagacaatttatggcagtaacataaagtttcagttaggatgaataagctctagagatgtagcatacagcacagtgactatagttaggaattatgtattgtacacctgaaaattggtaagagagtagatctcaaatgttctcataaccaaaaaaatgataagcatgtgaggtaatgaagatgttagcctgatttaaccatcttacaatatgtacatatatcagaacatcatgttatacaccgtgtatgcatacatatacawtttttgtcagttatacttgtaaaagctgagaaaataaaattaaataaagaattcgagttcagaaataaatcctagtacttatgttcaattgatttcaaccaaagtgctgagaccactcagtaaagaaagaatagtcttttcaacaaaca

SEQ ID NO: 198900 - DNA, 531 bp, Homo sapiens
tattatgtaaaagtcattataaatgcatttattgttttaactcctctattttgctatctgatttaaaagacaatagcaagaacaataattataaatctacgctagtggacacacaatataaaaagacaatttatggcagtaacataaagtttcagttaggatgaataagctctagagatgtagcatacagcacagtgactatagttaggaattatgtattgtacacctgaaaattggtaagagagtagatctcaaatgttctcataaccaaaaaaatgataagcatgtgaggtaatgaagatgttagcctgatttaaccatcttacaatatgtacatatatcagaacatcatgttatacaccgtgtatgcatacatatacaatttttgtcagttatacttgtaaaagctgagaaaataaaattaaataaagaattcgagttcagaaataaatcctagtacttatgttcarttgatttcaaccaaagtgctgagaccactcagtaaagaaagaatagtcttttcaacaaaca

SEQ ID NO: 198901 - DNA, 520 bp, Homo sapiens
ctttttaaattgtctcatccatattaattcatctaattctcatagtgatcttggaggttgatccccttatcatccccacattgcagaaactgaggcctggagaggttaagcaatttacctgttgtcatacaggcagtaaggaattaagctayggtttaaccccagatattctggctccagagcccatgctttgacttaaccactcttacaccgcctctccatgcaaattgctgttggatgattgaaatggtatgggtgcttagaatcaagtgacatataaggctgcagacaaagacagacctaagattttatcattttaattcactaccactaaacaattggccagaacttggactttctggccctgtacttatttctttcatagtctacaccaacatatttgacatgattccattatgctgccacaagtgatagactataaagagaagtagttatttgcttctaatattttgccagataattaatatagaaaatgatacattttttctcatcaaatgca

SEQ ID NO: 198902 - DNA, 520 bp, Homo sapiens
ctttttaaattgtctcatccatattaattcatctaattctcatagtgatcttggaggttgatccccttatcatccccacattgcagaaactgaggcctggagaggttaagcaatttacctgttgtcatacaggcagtaaggaattaagctatggtttaaccccagatattctggctccagagcccatgctttgacttaaccactcttacaccgcctctccatgcaaattgctgttggatgattgaaatggtatgggtgcttagaatcaagtgacatataaggctgcagacaaagacagacctaagattttatcattttaattcactaccactaaacaattggccagaacttggactttctggccctgtacttatttctttcatagtctacaccaacatatttgacatgattccattmtgctgccacaagtgatagactataaagagaagtagttatttgcttctaatattttgccagataattaatatagaaaatgatacattttttctcatcaaatgca

SEQ ID NO: 198903 - DNA, 520 bp, Homo sapiens
ctttttaaattgtctcatccatattaattcatctaattctcatagtgatcttggaggttgatccccttatcatccccacattgcagaaactgaggcctggagaggttaagcaatttacctgttgtcatacaggcagtaaggaattaagctatggtttaaccccagatattctggctccagagcccatgctttgacttaaccactcttacaccgcctctccatgcaaattgctgttggatgattgaaatggtatgggtgcttagaatcaagtgacatataaggctgcagacaaagacagacctaagattttatcattttaattcactaccactaaacaattggccagaacttggactttctggccctgtacttatttctttcatagtctacaccaacatatttgacatgattccattatgctgccacaagtgatagactrtaaagagaagtagttatttgcttctaatattttgccagataattaatatagaaaatgatacattttttctcatcaaatgca

SEQ ID NO: 198904 - DNA, 573 bp, Homo sapiens
tgtgtgtaatgtctacagctttatccttccataaaatgcatctgtatttggtaattttcaaatttaatcattatacgagcataattaaaatataggtgtttacatttcattttaaaaataaacacaaacacttatgagtttttagaatgcacaagtaagtggaatatcttgattctcaatctcagattaactaaagatatactttgtgatgcggcagtcaatttatatggttaaatagtgtatcattgaaatgtttgcacataatatgtgtaacaacgtttgaaataatgaaaccacaaaagcaaaggaaataattttgattaaaagtgaacatgtctttttggaagttaaaataatcaaatggtaaaatttacttctaataattgccatatttatttttttgccttccttttatttagagactagtaaacctatcccacaaacttctaaaagcatacagatgtgagaaaaactgaaactgaaatggtcattatttctaagtgcaggtttccttttcaactacagctgggttttgarcatatcttaattaacaaaaaaacttaaagaaagctt

SEQ ID NO: 198905 - DNA, 484 bp, Homo sapiens
aaaagtcacctggtcctcctctggcactagtttgatcctgaggcctgaaaaagtgagtgatgagagatgattcgtatcttgcagagctgggggaactcacagataaatttcttttctatattttaattcgattctaatgcagaaattygggagtttctttcattctcctaaaagaaacttaaaagtaaacaactttttgttctaatatttaattggaatatccacatagaaaataggttaatgagcataaagtactttgaaaaaaacagtgaagtaaaacaaacaaacaaataaaaaccaatagtgctcacatgcagctttaactggcgagcacttaaaaagcagaaagtagtttgtctgtttagctgccagtgtgaaaataagagcaagcatctcactccttatcctcaggtttcctttggtatccctttacaatggtgcgataatcaaaagccacttataaagtgtttgtttaaaaggagac

SEQ ID NO: 198906 - DNA, 484 bp, Homo sapiens
aaaagtcacctggtcctcctctggcactagtttgatcctgaggcctgaaaaagtgagtgatgagagatgattcgtatcttgcagagctgggggaactcacagataaatttcttttctatattttaattcgattctaatgcagaaatttgggagtttctttcattctcctaaaagaaacttaaaagtaaacaactttttgttctaatatttaattggaatatccacatagaaaataggttaatgagcataaagtactttgaaaaaaacagtgaagtaaaacaaacaaacaaataaaaaccaatagtgctcacatgcagctttaactggcgagcacttaaaaagcagaaagtagtttgtctgtttagctgccagtgtgaaaataagagcaagcatctcactccttatcctcaggtttcctttggtatmcctttacaatggtgcgataatcaaaagccacttataaagtgtttgtttaaaaggagac

SEQ ID NO: 198907 - DNA, 507 bp, Homo sapiens
  misc_feature (1)...(507): n = A,T,C or G
ttccattggtctatatgtctgtttttatgtcagtaccatgctgttttgattcctacaatattgtaatttttttgaagtcaggacatataatacctctagctttgctcttcttgctagagattgctttggctatgtagggtcttttgaggtttcatttgaattttggagttatttttctctttctgtaatgaatgctattggaattttgatagggaattgcattgaatctgtaaattgcttttggtagtatagatgttttaaaaatattaaatattcctatccatgaacacagacaggtctttttatttatctatgtcttctttaattttatttatcaatactttataatttgcagtgtataactctattacctctttgattaaatttattgctaagtattatatttnttggttgatatcatgaaagatattgttttcttttttatttatttatttttaatttcaataagttttgrgagaacaggaggtgttttgttacatggataaa

SEQ ID NO: 198908 - DNA, 220 bp, Homo sapiens
tttgcttgtttatatatatagtatatactgagaatcactgggcaggtaaattaaagtgattataaaatctgggtttatggttacataataatcattgtttaagtaaattgatgttataagattgccaagtgcttaaaataatttatcaagcaaagtagacatggggccttgaaagwagaatgctgaagccaaataagaaaaagatacataaatattacaa

SEQ ID NO: 198909 - DNA, 473 bp, Homo sapiens
gggaaatgtggggttggagcctcacacagagtccccactagggcattgactagtggagctatgagaaaagggccaccgtcctccagaccccagaatggctgatccaccaaaagcttgcaccatgtgcctggaaaagccacagacactcaacgccagcctgtgaaagcaatgggagtggggctgtactctgcaaaccacaggagcagagcttcccaaggccatgggagcccacctcttgcatcagcatgccctgatgtgagacagagtcaaaggagatcattttggaactttaaggtttaatgactgccctattygattttggacttgcatgtggcctatatcccctttgttctggccaatttatcccatttgtaatgggtgtatttatccaatgactgtacccccatcatatctaggaagtaactaacttgcttttgattatgtaggctcatagatggaagggacttgccttg

SEQ ID NO: 198910 - DNA, 629 bp, Homo sapiens
ttcattatcatcagacgtgtactgagagcaatattataaggagctgttattgcaaaaggaaaatctgatggaaaagtagaatacaggaaaagaataaagagaaagagaatgagaaatttgtggagccgaatcaataaatatatacatacatactataacatagaagtaagtgttttaatcacattaacaacaaaatgaaaataagatatttttaaaaatgcaatgaccctctatacaagtcattttgaaggtcataacatttagacaaatggaaaggtagaacatacttttgggaaaatatttaacatttattatcataaaaatactcatttacarttaataaaaaataattatttgtaaatcagacaaaagagaagaaaatcagttttacaatataaaaatacttaaaaactagtattgtttaaaataaaataacattaagcatattttctaataaaatttacacattaaataataaaaacaaaatacctcaactatctttttactgaaacaattggccacaatatataatatctaagtaatggatgttatattcaaagtggcattatttgggaagcctacagaaactagaaatattatacattgggaatctttttttataatgtaag

SEQ ID NO: 198911 - DNA, 389 bp, Homo sapiens
attctgccaaaccataatgatggaatatttttccatttgtgtgtgtcatctgcagtttcttttggcagtgttttgtagttatccttgtagagaactttcatctccktggttagatgtatttctgggtattttacttttgtgcatatggctattataaatgggattgcattattgatttggcactgagcttgaatgttattggtgtatagaaatgttaccgatttttgtatgcgttgattttgtatcctgaaactttaatgaagttgttttattagttccaggagcttcagagttgctaggcttctctaggtatagaatcatattctcaatgaaaacagataatttgacttcttttcttttttcttatttggatgccttttgtttctttc

SEQ ID NO: 198912 - DNA, 555 bp, Homo sapiens
tcaaaatatactacaaagctatagtaatcaaaatagcatgatactaccataaaaacagactcatagaccaatggagcagaatagagarcccagaataaactcacacatttacattcaattgacttttgacaaagttgccaagaacacacaatgggaaaaggacaccctcttcaataaatgatgctgaaaccctgaatattcacttactgaagaatgaaattggatgtttatctcacactgtttacaaaaatcaatcccaaatggattaaagacataaatgcaaggcctgaagctgtaaaactaacaagaaaatgggaaaaagctccatgactttggtctgagcagtaattttttggaaatgcacccaaaagtgaaggcaagaatgcaaaaatagacaaatgagtttatataaagctaaaaagcttctacaaaggaaaaaaatagagagaagagataatctacagaattggagaaaatatttgtaaaccatacctgtgataaggggttgatacctaaaatatatgagaaaaacacaatcaatgacaatataataaa

SEQ ID NO: 198913 - DNA, 624 bp, Homo sapiens
acaacacagaatacttctgtgaccccagttattgcaagaggtcggggacagtttcccaacacatcaaggaagcaatgttttctgcagtggacaccagctgggtgtcctctaattcagttaagttttgtcactatctacctggaggtagcatcagaccccagaggttgacagctcagacccacaggactgccacctcctagttagacactagttgcaaatagttgagtgttacctatacttctgacccatgagctataaatcsggggtccctcccaaatcccttcttgagtttgattaatttgttgctagaatgcctcactaaactcagggaaacagttacttctatttactgttttattatgaagatattacaaagaatacagataaagagactgtaatccaaaagaccaccaagatggctaaatagtagaaaagagaactttactggtgatatcagtttgcaaaccaataatggaaagtctccatcaaggaccaaagatgctctctccaaagagaggaagagcagattggattttatatctcacagggcctgtatgactcaataacgtcatacatattcagaaagtttggaagaaaagttgcacatatttatgagaggggtaa

SEQ ID NO: 198914 - DNA, 596 bp, Homo sapiens
agttctctatttactatttgtggctgaatggtatttcctggctagatttaacaaaatttatatactcagttatctacctattttctttacatttcttcttttagttttttaaatggataactcagttataattttgcttgtacctagcttttgtgtacttttctacttcatacaaatacatttatagcattgagctaaaataatttagaatttttcaactatactaattcttagaaagaacaaagaataaagcaagtgttgactgtttatcataattctagaatattgtattatactgtgrtttaattgcttttaacttgcattatagcacaaatttaaagtgagacattttgcaaaaactttctaatttcttcacgtattttctcctttttgaatcatttgatattcaaataagtctgatttaaagcacctattatttcaacattattgccaagtttcttgtcttcaattattggaatcatcaattgtagacttttgtgtgattgacctttatcataaaacataaattgcaatcatattttttaagaagcatggtggacatgagtagatggaaaattaagatgctttgtgaaatg

SEQ ID NO: 198915 - DNA, 595 bp, Homo sapiens
agaattacatttttcatatgagaccagtgtatatgttaccacgattctgttgattacagattggattatgttattacttcatgaggaagggtagtgatttgagggaggcatcttatctctggtgccacttactcttaattatttayaagaagaaaaaggcagaagttgcagctgaatgccacaagactcaggctgcatagacatattcccctcaaggctcagaagaatgtaaagttccaacagtgttaagtttgaattattttgtttgaattatttaattttacaacatccatttatttatgtataaatgtgtataatatctctagaaatcacagaaagtgatggctatctctgctgggatttgagtagctagcaacaggggaaagacagaggctgaactctttggcaaatataatttaaaatattgtactataattacattacagcacaataaataaagtgtaaatattgcacttataataacaaaacaaaaatgacaaaaaaaagtctgaatgaaaaaaattggaaattttttaaaatgttaagtaacaaattatcaacctcaatagaaatcaaatttgtatgatattctttg

SEQ ID NO: 198916 - DNA, 595 bp, Homo sapiens
agaattacatttttcatatgagaccagtgtatatgttaccacgattctgttgattacagattggattatgttattacttcatgaggaagggtagtgatttgagggaggcatcttatctctggtgccacttactcttaattatttataagaagaaaaaggcagaagttgcagctgaatgccacaagactcaggctgcatagacatattcccctcaaggctcagaagaatgtaaagttccaacagtgttaagtttgaattattttgtttgaattatttaattttacaacatccatttatttatgtataartgtgtataatatctctagaaatcacagaaagtgatggctatctctgctgggatttgagtagctagcaacaggggaaagacagaggctgaactctttggcaaatataatttaaaatattgtactataattacattacagcacaataaataaagtgtaaatattgcacttataataacaaaacaaaaatgacaaaaaaaagtctgaatgaaaaaaattggaaattttttaaaatgttaagtaacaaattatcaacctcaatagaaatcaaatttgtatgatattctttg

SEQ ID NO: 198917 - DNA, 595 bp, Homo sapiens
agaattacatttttcatatgagaccagtgtatatgttaccacgattctgttgattacagattggattatgttattacttcatgaggaagggtagtgatttgagggaggcatcttatctctggtgccacttactcttaattatttataagaagaaaaaggcagaagttgcagctgaatgccacaagactcaggctgcatagacatattcccctcaaggctcagaagaatgtaaagttccaacagtgttaagtttgaattattttgtttgaattatttaattttacaacatccatttatttatgtataaatgtgtataatatctctagaaatcrcagaaagtgatggctatctctgctgggatttgagtagctagcaacaggggaaagacagaggctgaactctttggcaaatataatttaaaatattgtactataattacattacagcacaataaataaagtgtaaatattgcacttataataacaaaacaaaaatgacaaaaaaaagtctgaatgaaaaaaattggaaattttttaaaatgttaagtaacaaattatcaacctcaatagaaatcaaatttgtatgatattctttg

SEQ ID NO: 198918 - DNA, 595 bp, Homo sapiens
agaattacatttttcatatgagaccagtgtatatgttaccacgattctgttgattacagattggattatgttattacttcatgaggaagggtagtgatttgagggaggcatcttatctctggtgccacttactcttaattatttataagaagaaaaaggcagaagttgcagctgaatgccacaagactcaggctgcatagacatattcccctcaaggctcagaagaatgtaaagttccaacagtgttaagtttgaattattttgtttgaattatttaattttacaacatccatttatttatgtataaatgtgtataatatctctagaaatcacagaaagtgatggctatctctgctgggatttgagtagctagcaacaggggaaagacagaggctgaactctttggcaaatataatttaaaatattgtactataattacattacagcacaataaawaaagtgtaaatattgcacttataataacaaaacaaaaatgacaaaaaaaagtctgaatgaaaaaaattggaaattttttaaaatgttaagtaacaaattatcaacctcaatagaaatcaaatttgtatgatattctttg

SEQ ID NO: 198919 - DNA, 575 bp, Homo sapiens
gagcttggcaaatgtagtgccattttcaaatgactaaaaaacataaaattcacttttattaatgatatttttaaaggactctggattcaaattattggaatatttcatgttgacgtttaaaaataatttggctcacaaataaactttttaacctaaagacttttaaaaaatcagatgactgattgtgaaaattagtatcaaaatgtatgatatgtaaaatagactatctgatttcagaattcacacagaaattcaatgggccaaaaattgcccagataatcttgaagaacaaaattggagtgtttatcctatcaagtgtcaattctggagcagaattgacagtccaaaatgatccacagagatatgtttacctaattcatcacaaataatatgtgagagcactaaagtgagaaagcgatggtctyagtaacaaattctatttgaactatcagatatccatgtgagggaaaatagatgttggcacctagatgacacagaaagcaattccatatggattataaatggtatatgtttagctttgtgaaagtaaaacaataaagcttttggaaaatagc

SEQ ID NO: 198920 - DNA, 540 bp, Homo sapiens
catatatatatatgtcttaaatagtgttgttttttcaacttttaagctcaggagtacatatatatatgtctatgtctcctaggaatgaaattcctatatatctatatatgtgcgtgtatatatatctgtatgtgcatatagatacacatatataagaattttcatcttagcactattttaatagccagaaatttgaaataactaaaagccctaaaagtccatcaacagtaccatgaataaataaatgttgttatattgaaacatggaatgtgacacagcagtaaaaagaaagaactaaaagctgcatttgatacaggcaagaggcagggagatactgggtagaagagggcggttccctgacaaaggccccaccctcaagcctggaaacccatggcccctaaatcagaacaggcattcctgtttcatgcccaratgttgcctttcagcctgccatgccaccctgctcaatagccatataaattccaaacccccggctccatgagcagaagataagaagagcagaggagcagaagagcagtg

SEQ ID NO: 198921 - DNA, 580 bp, Homo sapiens
aagggataggctgcttgcttgagtgagayacaggaacagaggaaagtagaagaaagaaaattatttcacaatattataaagccatgttagtgtaatttttatataagcagtggtcacttgtcctaacacaatcaataaaatatgattcttcacttacgttgctttttagatacatagtaaattttcccttcaaacattttagttgctgtattagtttgtgtttatttctctaccaataatactaaattaattcttctaaaagagtcaaagtgtgtatttagcaagaagctgaggacattcatagggcagaggtttgctagctaaattttaggcagacaaggttgaaattgttggcttctggcaaatttgcactcattgtaatgggaaaaaattatatataacaagacacattttgacttgataagagcttctcctagttttgttccatgttctgcgttttaatttttgctagggggaagaagaacaaattttcatgggtgaaaatgtattgcaggaaggtgtaaccacctgatgggttcttcctgccccctgcacagatgaaaacaatttactgagacca

SEQ ID NO: 198922 - DNA, 580 bp, Homo sapiens
aagggataggctgcttgcttgagtgagatacaggaacagaggaaagtagaagaaagaaaattatttcacaatattataaagccatgttagtgtaatttttatataagcagtggtcacttgtcctaacacaatcaataaaatatgattcttcacttacgttgctttttagatacatagtaaattttcccttcaaacattttrgttgctgtattagtttgtgtttatttctctaccaataatactaaattaattcttctaaaagagtcaaagtgtgtatttagcaagaagctgaggacattcatagggcagaggtttgctagctaaattttaggcagacaaggttgaaattgttggcttctggcaaatttgcactcattgtaatgggaaaaaattatatataacaagacacattttgacttgataagagcttctcctagttttgttccatgttctgcgttttaatttttgctagggggaagaagaacaaattttcatgggtgaaaatgtattgcaggaaggtgtaaccacctgatgggttcttcctgccccctgcacagatgaaaacaatttactgagacca

SEQ ID NO: 198923 - DNA, 401 bp, Homo sapiens
aaagttgcaacaccatgacattggaaaacgtcaaagagaattatttcttatgtttctataaagaccaatttacaacatctatttagagacagatgaagggatcacacacacaccaaattctggttttttgtttgtttgtttgttttgtttttactttgattgttttgtttcggaatgctggaagtaggcaactgggatctatcccaggagmgaaatgtacatactcttgcaaatgcctctccctttctctccccatccaagaaaaggattcttcataatttggaataaagactgtcattggttatactaaggggaagtataagaagaccccaaaaggaggactcacatcttaaacctataatacaactatgttgggaagactttcaatgaagcccaataaa

SEQ ID NO: 198924 - DNA, 605 bp, Homo sapiens
ggtttgtgaagatttgactacaatgttgaattttccaatccatgaataggaaatatgcttccatttctgtaggtcttatttttgtattttaaaatatttaattgacaaataaagattgcacatattcaaggtgtgaatgcatatgcatcagaacatgatgatttgatatgcatatgcattatgtactgattattrcaatcaaactaattaacacatccatggccacccatgctgtacattggatcccccagacttgttcacttatcactgaaagtttgtaccttttgaccaacatattctcatttacctgcattccccagtccctgacaaccaccattttactattgccatgagtttgacttttttagattccacatataagtgaaatcgtgcagtatttttttttctgtgcccagctcatttcactgaacataatctcatcctggtttacccatgttgtcacaaatgacaggataccattcctttttaaggctgagtaatattccattctgaatatataccacattttttatatccattatatcctttatccattcatccagtgatggacacaaattgactacatgttgtattagtccattctc

SEQ ID NO: 198925 - DNA, 611 bp, Homo sapiens
tcagtttactctctccctctactaatttcctgctgaaaataacacaacaaaaatgtaacaggggaaattatataccgtgactgaaaactagagtcctacttacatagttgaaatatcaaggaggtcagaagaaaattggactggtgaaaacagaaaaaacactccagtctgccatatcaccacacaataggatcccccttcttgccctccacccccataagattgtgaagggtttactgctccttccatctgcctgaccccttcactatgactacacagaatctcctgatagtaaagggggctggagrcaaggataagttatagagcagttggaggaagcatccaaagattgcaacccagggcaaatggaaaacaggagatcctaatatgaaagaaaaatggatcccaatctgagaaaaggcaaaagaatggctacttttttctatgctggagtattttctaataatcctgcttgacccttatctgacctctttggaaactataacatagctgtcacagtatagtcacaatccacaaatgatgcaggtgcaaatggtttatagccctgtgaagttcttaaagtttagaggctaacttacagaaatgaataa

SEQ ID NO: 198926 - DNA, 569 bp, Homo sapiens
tggtgaacatgctaggcgaaagaagccagtcatgccaggtgaaaaaagaccacatactgtatgatttcatttacatgaaacatccagaatagacaaatctatggagacagagtggattattgcttcctcagggctggggatgggattggattaaatcagtgatgactgttatagggtgcagggtgatgtaaatgttctgtaatcgattatgatgatggctacagaaccttgtgaatatattgaaaaccattcaattgtccactttaaaagagtgaattttatggtatttgaattatatctcaaaaaagtgttattaataaaaaagaataaataaatcactagctagcattctgtagactccatgtattaaaatgcctttagtcaaaggattaataagtagatataattaattgttttaccagattctcttgctaacgacatttcctaatttcaaactttttgtgtgaacttaattagtaatttctaatttaatagatartataccttccctttatgcattagaagcccagaaagggataataaggtacttgaggccatagtttgggaat

SEQ ID NO: 198927 - DNA, 575 bp, Homo sapiens
cagtcattctgtcccactcccctgcaaaccatcactttggtggctgacagcttycaggaccaggacttatgggttccaccaatcttacaggaacacacctctgaaaatgttcatctctatgtcaccaatgaacctatataccagtaacaaaagtgatgatgatgatgatgatgatgataatgacttctattattgagccacctactatgtgccaggtcctgtactaggtcctgagaacaaaaagatgaacaagtcagtcatagattacagacggtctacgtagaactcctatctcagtgcctgacacaaagtaggtgttcaataaacatttgaagggagaaaagtgatgctcagagtttcagtgacctccaagaaggtcttctggatcctagaaataaataatacctttgtatgggtccccaaatacacccaactccatacctgatccagctccttgatgagtgacatagctctgagattctattgcatttggggcctatccagttcaaacagtcttacacaagcttgactttgggttcgtccctcattagtcccttcaaatttcttggtgtgct

SEQ ID NO: 198928 - DNA, 411 bp, Homo sapiens
cttctgacaaacaactctgcaataagttatctattacataaattatacaaatgcataggtatatctataaggtaaattgctagatgttgaagtgctgcataaaagggaatatttttaattgtcattccattgccaaattgccctccagaggattttcaccaatttatactcccacaagcaatttatgaaagtgatcatttctctacatccttgcccaggacgtgttagcaaacttttagcctttgcctaagtggtaaaaaaaaaaaaaaaaaaaaaaaagattcctacagggcagttttaatttacctgtctcttctattatgtgcaaggkggagcatctttgcatgtatttaagttttatctggggctccttttggtaaactttctaataagtattttgttattgacatt

SEQ ID NO: 198929 - DNA, 411 bp, Homo sapiens
cttctgacaaacaactctgcaataagttatctattacataaattatacaaatgcataggtatatctataaggtaaattgctagatgttgaagtgctgcataaaagggaatatttttaattgtcattccattgccaaattgccctccagaggattttcaccaatttatactcccacaagcaatttatgaaagtgatcatttctctacatccttgcccaggacgtgttagcaaacttttagcctttgcctaagtggtaaaaaaaaaaaaaaaaaaaaaaaagattcctacagggcagttttaatttacctgtctcttctattatgtgcaagggggagcatctttgcatgtatttaagttttatctgkggctccttttggtaaactttctaataagtattttgttattgacatt

SEQ ID NO: 198930 - DNA, 386 bp, Homo sapiens
taattagtaactacagtcgtgtatgtaaattctctctttgatgatgagatgggttrcatttcctgggttcctaattttcagctggcattgactaaacccttgctgattatagttttccaattattgagaagacttcaaggagacagctcatattccgtcattttacaccttacagcctatctgcatcctactaaatttctcagttctttggaatctgaagtaatctaattaaatatattttcttataacataccaacatgtaagttaatatttcaaacatttggtattttctccaaaacagccagtatgagataactagatttttcaaaaggtttgtttgtttttaattctcttcccataagcaagtttggtttttgaaattttcc

SEQ ID NO: 198931 - DNA, 617 bp, Homo sapiens
gacacatccctctggagatccttagaacattgcccaaggtggtcaggctataagttggttttatacaatttaaggggacataaaacatcaatcaatgcatgtaaaatgtacattggtttggtctggaaaggtgggacaactggaaatggtgggtgggggtagtggggggaggcttccaggtcttaggtggattcaaagattttctgattwgcaattggtcgagttattgactgaagacttagaatcaatacaaaggaatctctgggttaagataaggggttgtggaggccaaggttttatcatgcagatcagcctccaggtagcaggctttagagaatagattgtaaatgtttcttatcagatgtaaaaagttggttctatctgtcttaagatctctgtgctgatgttaatgctggtcaactgtgagacatgtctgacacccacccccttcctatcatggcctgaactaatttttcaggttaactttggaatgcccttggctgaaaggaggggtccattcagatagttgtgaggcttagaatgttattcttggtttatattctttaatttgaatgtctcctgagacacaagcactcattctgctacctagagcatgc

SEQ ID NO: 198932 - DNA, 410 bp, Homo sapiens
gaattcttccagcttttggccattcagtacgatattggctgtgggtttatcataaataactcttattattttgagatacgttccatcaacacctagtttattgagagttttttgcatgaaaggctgttaaattttgtcaaaggccttttctgcatctattgagataatcaggtgatttttgtcattggttctgtttatgtgatggattacttttattgatttgcatatgttgaaccagtcttgcatcccagggatgaagcccacttgatcatgttggataagctttttgatgtgctgctggatttggtttgccagtattttatagaggattttcacatcaatrttcatcagggttattggcctaaaattctcttttttttttgttatgtctctgccaggctttggtatca

SEQ ID NO: 198933 - DNA, 353 bp, Homo sapiens
catatacatatattgactatgttgatgttgaagcatataaaaaagtaatagtatagtttatttcagtctttaatttatacatgctgcaactttcattgtttcctcctaaatcacaagagtgaatatgggtttttattgtgaaatgctgcccaagaaatatttactacatattactgattttgaagctcatgatttcacttacacaraaaatttcgcagtgagttttaggacttacagaagtaaatttcttttaatcacggttcaaggaatcccatgcctatctacacctgagtcctgaaaagaaataaatctaacagaaaccaagagtttttcttcaaaagattacctatatg

SEQ ID NO: 198934 - DNA, 587 bp, Homo sapiens
aggtactcaaggacttctctcactctcagtattgctrcagtatatactccactcatggcagcatagtcagactcaaatatggtagagatcagccaggaaactgcataactgttttttgcccaaatgtcagttttcttgtgttctctttccttgtaaaaataagttttgtcacaattgtcaatacacctgaaagaagagaaatatctattttctccctcaactgtattcttttctctcttctattaactttggcaagcatcctgacacattcaaatggagtatataataaacttaaggctgaaaaaggaaaccaagagaggaaaagtgatgagaagagtgttttacaataagtaggaagaaatgatgttaatatatatgtactctacagcctgtttatcttgatatgctggattccctggtgtgtataacttccgtaggaatccaagtccagttaaaatgattgctgtttctgtatgaatggtaaagtttaagaatagaagcttttaaatgaaaacatatatttgcagtggttctttgagaaattactcttcattttctaatgaaggccaataaatgagcaccaccac

SEQ ID NO: 198935 - DNA, 587 bp, Homo sapiens
aggtactcaaggacttctctcactctcagtattgctacagtatatactccactcatggcagcatagtcagactcaaatatggtagagatcagccaggaaactgcataactgttttttgcccaaatgtcagttttcttgtgttctctttccttgtaaaaataagttttgtcacaattgtcaatacacctgaaagaagagaaatatctattttctccctcaactgtattcttttctctcttctattaactttggcaagcatcctgacacattcaaatggagtatataataaacttraggctgaaaaaggaaaccaagagaggaaaagtgatgagaagagtgttttacaataagtaggaagaaatgatgttaatatatatgtactctacagcctgtttatcttgatatgctggattccctggtgtgtataacttccgtaggaatccaagtccagttaaaatgattgctgtttctgtatgaatggtaaagtttaagaatagaagcttttaaatgaaaacatatatttgcagtggttctttgagaaattactcttcattttctaatgaaggccaataaatgagcaccaccac

SEQ ID NO: 198936 - DNA, 415 bp, Homo sapiens
tgaattcctaggtatcccagcattagtgactggagctccagcagtaggagaggtcgggctcccttcattcccccaggaaagtggctgaatccagagggctgagcagcagtggactccaggcttcacctccactgcatttcacaggatgaggcccastggtctgggtctccagccaccccctgtctgtgctcttgggctggtagcagctctgcacttccctgggatggagctcccagaaagagaggctggttacctttgtcgtctgtcagcccctgccaatatagccttcaggctctgcagagtacttaatgtttagggagtggtacagatctcctgtacagcacagccatcccatggaaaagtggccagagtgttctacacatgagtcctggaccttacttgtttcttactaggc

SEQ ID NO: 198937 - DNA, 414 bp, Homo sapiens
gaattcctaggtatcccagcattagtgactggagctccagcagtaggagaggtcgggctcccttcattcccccaggaaagtggctgaatccagagggctgagcagcagtggactccaggcttcacctccactgcatttcacaggatgaggcccagtggtctgggtctccagccaccccctgtctgkgctcttgggctggtagcagctctgcacttccctgggatggagctcccagaaagagaggctggttacctttgtcgtctgtcagcccctgccaatatagccttcaggctctgcagagtacttaatgtttagggagtggtacagatctcctgtacagcacagccatcccatggaaaagtggccagagtgttctacacatgagtcctggaccttacttgtttcttactaggc

SEQ ID NO: 198938 - DNA, 536 bp, Homo sapiens
tcaaggaggtaccagagaaaggtgaagtccaaataaaagaaatttttaaaaaagatacaggataggaatggaaaaatctccagtgaaatacatagaataaataaaaaacaatcgcaacttctgaaaatcaaggacacacttaaagaaatacaaaatgcactaaaaagtctcagcaatagaattgaacaagtagaagaaagaacttcagagctcaaagacaaggctttcaaattaacccaatccaacaacaacaaagaaaaaataattttttaaaaatgaacaaagcctccaagaagtttgggattatgtgaaacgaccaaacctaagaataactgatgctcccaaggaagaagagaaatctaaaagtttggaaaacatatttgagggaatacctgaggaaaacttccctggtcatgmtagagatctagacattcaaatacaagaagctcaaagaacacctaggaaattaattgcaaaaagagcatcacacaggcacacagtcatcaggttatctaaagtcaagacaaaggaaagag

SEQ ID NO: 198939 - DNA, 536 bp, Homo sapiens
tcaaggaggtaccagagaaaggtgaagtccaaataaaagaaatttttaaaaaagatacaggataggaatggaaaaatctccagtgaaatacatagaataaataaaaaacaatcgcaacttctgaaaatcaaggacacacttaaagaaatacaaaatgcactaaaaagtctcagcaatagaattgaacaagtagaagaaagaacttcagagctcaaagacaaggctttcaaattaacccaatccaacaacaacaaagaaaaaataattttttaaaaatgaacaaagcctccaagaagtttgggattatgtgaaacgaccaaacctaagaataactgatgctcccaaggaagaagagaaatctaaaagtttggaaaacatatttgagggaatacctgaggaaaacttccctggtcatgctagagatstagacattcaaatacaagaagctcaaagaacacctaggaaattaattgcaaaaagagcatcacacaggcacacagtcatcaggttatctaaagtcaagacaaaggaaagag

SEQ ID NO: 198940 - DNA, 584 bp, Homo sapiens
ctattttacatatgcttagctatgtaaaactaaggtcagaaagaagctagaaaagtggtgtcctctcctgggaacaaattcagagctttaactttaatgcataattaacacctaaactgaaaatctcatatgtactattcaattaaaaaaaaagtttgagtgcttcatatatgccaagcatcatgctaggtaatggggttacaacaatgtaatgtgttcatagggtattagagaaagatcagaattagcttttataattttaatgtaatttatttataaaattttcagaataactgttaagtgccctgtcaattaatgcttctttaaatcatagtattgatggcagcattaagagactttctcatgatactctttaaaataatcttacagcccaagagacratgaagatattatctctgaaaaagaagaaaatattttatctttatctttgaagcatctagagttcactgaagagaagaatcttgatgtaaccaaagaaacaatgttacctgagaatgttgcatatctctctaatgcagatttaaacaaaagaagaaaagaaataagtgatatgaatcctagca

SEQ ID NO: 198941 - DNA, 551 bp, Homo sapiens
gtcccctccctttgcggttacttttcattccacttgcagtggtttttcccagaatagagaagcgaaataacctcatgacaaagtgtccctttgcatcgaagatacattgttggttgttatggcagttgctttaaacagagtgtaaatttggggcaagtgcaagtggtttttgtcgtttaggtctaactggaacacttattcacaatgagaacgttgtagtgctttttcaagaaactagtaatatataaggagagaactcaagaagataaattttctgatgaaaccatccatatagaaaaataggggaatttttccttttgtatgaattttgtatttagaggtctcgagtcccagtgttaaatcacagacttcatgttcatccttaaaaaaaaatcactatacaaaaaccccttaatgcttttattaaatttcaaaaacaaaaaatkgtaataacccagaatctcaagagataaatagctgttgctgagaagctaacattaactctgcctctaaacaaccattataagagactaaaaactgtaatatatgcc

SEQ ID NO: 198942 - DNA, 486 bp, Homo sapiens
agatcttggtattgcattgagtcttccttctaccggcaatgctctttctmgatttagaatttttagcttcaagattctgctcagatgtcacctgttcttttttttctgaggcagactctcactctgtcgcccaggctgaagtgcagtagtgtgatcttggctcactgcaacctcagccttccaggttcaagtgattcttgcacttcagccactggagtaagctgggattacaggtatgcaccaccacacatgacttattttggtacttttagtagaaatggggtttcgccatgttgcccaggctggtctagaactccgggcctcaagtgatacaccagcctcagcctcccaaagtgctgggattacaggtgtgagccactgggcctggccgacagatgtcacctgttttgcaaccacttcttcccttattaccgcagctgctaacacgtaccatgcgtacaacggtggcgtgtctactggctctgc

SEQ ID NO: 198943 - DNA, 594 bp, Homo sapiens
gtggtcatacttgcagtcagagaatactttcacttcttattttttcataaatctgaaaagaagaaaacataataattgatgagccattaacgtttcaagtagggaaaaatgtatttgaacttagattggaacacccaagtgccccctcctttgggaagttcctgtctccatgtcattctaaactaatgrgtgttagttaagcacctccagtgagccttgtagatctaaaatctgaacatgattttccctaccagagtacatgaagggagtctttaaatgcccttgaactgcacgaaaatgcctcacagagctaaagtaccgtggcacaaagctttttacatcactgtaagctggtcgtaaaacaaatgaaaaatgttgaggaataatctgtagaatgcaaaatcgcagaaaagtattttgagagattcatgtatctgtggagatttttatctccatatgcatatgagacacagcaaggtcttgattggccaaaatgaataggactaatgatccgtcagaaattcaaaggcttagtattaattacttctcaacagctggctgtatttatagtactgcttggcataagttcctgag

SEQ ID NO: 198944 - DNA, 594 bp, Homo sapiens
gtggtcatacttgcagtcagagaatactttcacttcttattttttcataaatctgaaaagaagaaaacataataattgatgagccattaacgtttcaagtagggaaaaatgtatttgaacttagattggaacacccaagtgccccctcctttgggaagttcctgtctccatgtcattctaaactaatgagtgttagttaagcacctccagtgagccttgtagatctaaaatctgaacatgattttccctaccagagtacatgaagggagtctttaaatgcccttgaactgcaygaaaatgcctcacagagctaaagtaccgtggcacaaagctttttacatcactgtaagctggtcgtaaaacaaatgaaaaatgttgaggaataatctgtagaatgcaaaatcgcagaaaagtattttgagagattcatgtatctgtggagatttttatctccatatgcatatgagacacagcaaggtcttgattggccaaaatgaataggactaatgatccgtcagaaattcaaaggcttagtattaattacttctcaacagctggctgtatttatagtactgcttggcataagttcctgag

SEQ ID NO: 198945 - DNA, 634 bp, Homo sapiens
acactcctcccctcatgccaggatgacctataagccacccagtaacttagatcatctataaggataatcaaagaagggaccaggaagagaaygtagaatttgactgaataaactgtatgtgactaaattaaattgaaacagcaaaagtaactgttttcagccaactgaacaaatggggacttgacctaagttcagtaacagaaaaataaaatgtttcatttctgtatacctgagttatgactgtaaattttaaacccattacaatgtctcatcaattatatatttccatgtcaagtagattcactgagacctcttcaaaatttactgcttattccttctaagatactttcaagttaacaaaaacatgcaatcaatgctacatactgcagccgataactgccacagtgggacaatcctagaaatgcacaaatctggcccacagcaatatatagtaatgattttgaggagttgttacaggagtggatagtcatttatctttccagagtaagtttgcattaagcagaagagagatgaagtgattactatggttcctcctctttcaaaggtgcccttcatccctttcccagcacaagtgaagatacaccagaagggagcagaacatccatcaatcact

SEQ ID NO: 198946 - DNA, 617 bp, Homo sapiens
gaatatattaggtaatgaagtatcatgttcatacttaccacgatacttcatgggtaagtatggacattgaacgtgtccataagatggacaataacaaataatttattaatattatgctagtaaacataacaaagaacaaatagaaggttctattaaggcactcagaaagggacttatcctggtcagggatatcaggaaacacttcytgaggaaattgcattaaagttggacctgaaagatggccccaggttactccttccaaatctatttttctgtcattgccagtttaatatttaatagaactttcaacacttctctcacattcaaaatctctacccactaagaaaataattaaactgaggtgacatcaggaaccactagactaggtgatctcttagatcccttgtagatctaaagatctcatgtttagttttcaatatgtgcataatgttccatcttatgggagtcctgcagttagctggaggtcccttatatttttgtatgtaagaaaagtaaattgcaaagaaatgtatgtgactggcctacatttctaggaaaatgatcaacttagtataggtgtttttgtttatatagtatcttatgaacatagagaaata

SEQ ID NO: 198947 - DNA, 359 bp, Homo sapiens
tgagaactggaacaagacaaggatgcctattcttaccactccaattcaaccaattcaacatagtactagaagtaccaagcagaccaatcaagcaagataaggaaataaaaggcatccaaataggtaaagaagaagtctaactatctctcttcactgattatatgattctatgcctagaaaaccctaaagaccctgccaaagcttctggaacagataaacactttcagtaaagtttcacaatayaaaatcaatgtacaaaaatccagagcatttccatataccaataatgttcaagctgagagcctaatcaagaatgcagtctcatttacaatagctacaaaaaaaaatacctaggaata

SEQ ID NO: 198948 - DNA, 611 bp, Homo sapiens
ggatgtagctggaggccattatcctaaatgaattaatgcaggaacaaaaaaccaaatactgcatgttcttacttttaagtgggagctaaacattgggtactcatgaacataaagatggcaacaagagaaactggggaatactggagtggggaaggaggcatggggacaaggattggaaaattgttgggtactatgcccactatctgggtgatggtatcatttgtatcccaaaccttggcatcacacaatatacccatgtaacaamcctgcacatgtaacgtctgaatccaaaataaaagttgaaaaaataataataaaagaaaaacataagtaaatatttgcacacataaaagtcaccatccatgtttcgggctttagaaacaatgcagctggttttgtcattctctgaaatgtggtctctaggaaaatgaagagggctagggaaaaatggtaagttcacttttaatgatgtccaacttgagctgcctgtgggtggtaaggaaatatcaggaggcaattaattggtgaatctgaaatttggctcaatttggggttcaatgactcatgtagaataagacttaagagaaattctttaactagagaatgatgtt

SEQ ID NO: 198949 - DNA, 413 bp, Homo sapiens
gaattctgggagcagaggcccaagcagccccgggcggtaagcttatagggggaggcmcaagtccatcacccaaaaccatttgtgccagagctctgggcctgtgatgagaaagggaggctcaaaggtctcggaaatgccttgagggtctttctcccattgtcttgatattcccttccattaagtattactctctttagcaaaaattgctgcgccacaccttggtttcctctcccaaaaagttttttcactctttacatggccaggctgagagttttccaaatctttctgctttctttcccttttgattataaatttcatcttcagtcatttttttccctctcacagctttatgtaagctattaaaagtagccatgcagcagcctgaatgctttgcggattagatagatcttctt

SEQ ID NO: 198950 - DNA, 555 bp, Homo sapiens
ttattagtctttgatttcttttcccaaccatttaaaaatgcggaaaccattcttagcttacagggtatataaaaacaggcagcaggctggatttggcccacatgctgtagattgccaacccatgctacaaaatataccttaaaagcctgtcacctcaaaatttcaaatcactgcttcccaaagacttaaagtgattattcaaatcttcctcagtaacttcttttagatcagctggtttccattttggactctggtctttatcaattaaaactgtcaagagaagatacaaatgttaataccattatttttgtctaatattgctagattttacttactgaattgacagaaattcttatactaggcacatttttctatcatacttttttcctgcaaaatttttatatgtattctatttttcttttaaattaaatctccagggatggacagcaatatacttttgatgactggggtggatattttctaacttcctaagcctcatgtyttagctttaataaagcctactgaattaatccagtggtttaaacattagaattc

SEQ ID NO: 198951 - DNA, 554 bp, Homo sapiens
atcagatcttaagggaagggtgttttaggatacggcaaggaaagctataaaaattaaattagaaaatttatgttacatgcttagcccagtaactgacaaatagtaaacactcaaaatttaactattattaataattttaatgcagttttatatttttagaggttgccrgatttttcattgagagtctcttgtatgttacaaaggatggccctttttatcctcatatctgtaacattcttctgttttgggtaaggatgccagagattatactgacagttagactatcatgtgagtcccccaaggactttttacaaatgatgatgatttattctcacacgtcctctttggccattgaagtaaaacagctggatagcataaaaatgtactgtttggtcactaatagaattctcttcataaactttataaattggctgtggaaatttttatgttgatgagctttggtcttgtttctcacactgttacagattctgtaaaatgtatgaagcatacaaaattgaagattgtctctgtaaactgttatgaaggcctttcta

SEQ ID NO: 198952 - DNA, 591 bp, Homo sapiens
gcttttactcatggcaggtgaagcaggagcagccacatgaagtggccagagcaggagtgagagacagtgtgtgttggggggaggtgccacagactttcaaatgaccacatctctcaagagctgactcactactgtaaaggtagcaccaagacatgagggatctgctcccatgacccaaatacctcccacaaggccctgccgcacttccagcaytggggattaccatttaacatgaaatttgggcaggggcaaatatccaaactatatcagtctgctttgtctgaaattagaataggaatccctgctttcttctgtttacaatttgcttgatggatttttctccatccctttactttgactctatgtgtgttgatattgatatatgtggatttgatcctgtcattatgttattagctggttatgatgcagacttgactgtatagctgctttacagtgtcaactgtctatgtacttaagtgtgttttttgtggtggccagtaatggtctttcttttccatatttagcactcccttgaggacctcttgtaaggcaggtctgatggtaatgaattcccttggcaattgcttatct

SEQ ID NO: 198953 - DNA, 591 bp, Homo sapiens
gcttttactcatggcaggtgaagcaggagcagccacatgaagtggccagagcaggagtgagagacagtgtgtgttggggggaggtgccacagactttcaaatgaccacatctctcaagagctgactcactactgtaaaggtagcaccaagacatgagggatctgctcccatgacccaaatacctcccacaaggccctgccgcacttccagcattggggattaccatttaacatgaaatttgggcaggggcaaatatccaaactatatcagtctgctttgtctgaaattagaataggaatccctgctttcttctgtttacaatttgcttgatggatttttctccatccctttactttgactctatgtgtgttgatattgatatatgtggatttgatcctgtcattatgttattagctggttatgatgcagacttgactgtatagctgctttacagtgtcaactgtctatgtacttaastgtgttttttgtggtggccagtaatggtctttcttttccatatttagcactcccttgaggacctcttgtaaggcaggtctgatggtaatgaattcccttggcaattgcttatct

SEQ ID NO: 198954 - DNA, 564 bp, Homo sapiens
tgataatttccctaaaagcaaaattttgaactgcactgaagagcttcaaattatgcaatctctttcaagactggagggcaaaggaaggaaatgggacaattaacaaagaagtctcgagaaagggaagtaactgatgatgggttccacagtcagccttgtatgtagtacaagcactgcttcaattatgaatcctcatttttgcaatacttattatcaggtcatgtactgctttctctttctaccccttcaaagctctttcatacagcacctaaactgccagggccatctggtggccaatactgggagctagctgacccagtgtttctttacctcaacaccctccaccaaccttgttccccattagactaaattgcctaacttctgaatttcaactaagtcaagtattttataaaatatcttatcaaatatttccagatagatttacaactgagttctcaatccacccgattctggatccttacattatgagctaagaattactatgtcccttgttcgtccactccaaaccaactacaactgkcaacactatctaagccactgcag

SEQ ID NO: 198955 - DNA, 518 bp, Homo sapiens
gaccataagttccttagaaacaaagaccttgtttgatttatttatgtggtcttggcagttgttgcagtgtctgaaccagtaagagggatcggcaaacctggctgaatggataaatgaatgaacacggaacctgttcttttgccttaacctggtcttraattggaactgccaaaaaattactttaaatcttttttctttccttttttttgagatggagtcttgctctgtcgcctaggctgcagtgcagtggctcattgcaacctctgcctcccagattcaagtgattctcctgccttagcctcccaagtagctgggattacaggcacctgctatcatacccagctaatttttgtatttttagtagagacggggtttcactgtgttggccaggttgatctcgaactcctgacctcaggtgatctgcctgcttcagcctccaaaatgctgggattacaggtgtggccgctcctggccaaattactttaaatctattcagtgctactgcatatggccacaca

SEQ ID NO: 198956 - DNA, 576 bp, Homo sapiens
cagtttgtggtacgttgttaaggcagtcctaggaaaccaatacacctaactagaccataagttccttagaaacaaagaccttgtttgatttatttatgtggtcttggcagttgttgcagtgtctgaaccagtaagagggatcggcaaacctggctgaatggataaatgaatgaacacggaacctgttcttttgccttaacctggtcttaaattggaactgccaaaaaattactttaaatcttttttctttccttttttttgagatggagtcttgctctgtcgcctaggctgcagtgcagtggctcattgcaacctctgcctcccagattcaagtgattctcctgccttagcctcccaagtagctgggattacaggcacctgctatcatacccagctaatttttgtatttttagtagagacggggtttcactgtgttggccaggttgatctcgaactcctgacctcaggtgatctgcctgcytcagcctccaaaatgctgggattacaggtgtggccgctcctggccaaattactttaaatctattcagtgctactgcatatggccacacaggctag

SEQ ID NO: 198957 - DNA, 493 bp, Homo sapiens
acattcccttttgccccttttagtcaactcctccctccattccaaaccatggcaaccactaaacataccattttctgttcctatactttcagttttccagaacatcataaaaatggaaacataagatatgtatgtagccttttgagtctggtttgtttcacttggcataatgctttgaggttcatcaaagttagaaaacttatcaaagttcctttttactgctaagtagtattctgttgtatggatgcagctcaatgtgcttatccatttaacaaaaggacatttgggttgtttccagttttggccattgtgaatgaacaaagctgctataaacatttgtatacaatgtgaaaataagatttcatttctcttgaatagatacctagaagtgaaattgctggtttrtaggttaagtgcacgtttaactatatgagaaattgtcaaactatattccaaagtgaccatactattttgcattcttacaggcaatata

SEQ ID NO: 198958 - DNA, 446 bp, Homo sapiens
gaattcttggaactgggattaatcagaatatggcagattagcctccaagatggaattgctttactctcattcaaggtttccctcattcttcactctccccatgctggtcaccttgctgtttgttcctcaaacacatatgaaatgcgtttctgtcttggcagtcatcctgctacctgtaatgtcagcactgctttctgttgtcccttcagtcaggtcaytgttcaaatagctctctagacaggctcttccttatcattctacttaaaatagcccccaatcactctgtgtccctttagcctgcttcctcttcctgctatttcatactacctgaaaaaatacttgaacttcctagaacataagctcctaaaagcaagaactgggctccacctctcctctcctctaccccagcactcagaagagcaacagagtcagcatccagtgagtgt

SEQ ID NO: 198959 - DNA, 318 bp, Homo sapiens
agtcatcctgctacctgtaatgtcagcactgctttctgttgtcccttcagtcaggtcattgttcaaatagctctctagacaggctcttccttatcattctacttaaaatagcccccaatcactctgtgtccctttagcctgcttcctcttcctgctatttcatactacctgaaaaaatacttgaacttcctagaacataagctcmtaaaagcaagaactgggctccacctctcctctcctctaccccagcactcagaagagcaacagagtcagcatccagtgagtgttcatgaatcaagtcactgcttggcagaattc

SEQ ID NO: 198960 - DNA, 318 bp, Homo sapiens
agtcatcctgctacctgtaatgtcagcactgctttctgttgtcccttcagtcaggtcattgttcaaatagctctctagacaggctcttccttatcattctacttaaaatagcccccaatcactctgtgtccctttagcctgcttcctcttcctgctatttcatactacctgaaaaaatacttgaacttcctagaacataagctcctaaaagcaagaactgkgctccacctctcctctcctctaccccagcactcagaagagcaacagagtcagcatccagtgagtgttcatgaatcaagtcactgcttggcagaattc

SEQ ID NO: 198961 - DNA, 461 bp, Homo sapiens
tcctattaagctcaacatgagagactttaaataatataaacaaatgacacactttttactcaactttttgttgtagaaaagttttttttcaatgaaaaacttctgttaacaatactgttctcaaggaatattttctgtttttataamctgggtcatgggttactactgacatctagttggtagaggccatgaatactgctaaactctctgcaatgcacaagacagtccttacaacaaagcattatctagcccataatatcaacagtggtaaggctgtgaaatctaaactaaaaatagattttgaaaaaatttcaattgtataattctaccacactaaatatcaatataatcaatataagcatatactctttgagattctcaatcatttaagaattatgagagtcttaaggaacaaagaaaatacaaataatttgcttcgatattttagtaggcacaataca

SEQ ID NO: 198962 - DNA, 461 bp, Homo sapiens
ttgtctcctattaagctcaacatgagagactttaaataatataaacaaatgacacactttttactcaactttttgttgtagaaaagttttttttcaatgaaaaacttctgttaacaatactgttctcaaggaatattttctgtttttataacctgggtcatgggttactactgacatctagttggtagaggccatgaatactgctaaactctctgcaatgcacaagacagtcctyacaacaaagcattatctagcccataatatcaacagtggtaaggctgtgaaatctaaactaaaaatagattttgaaaaaatttcaattgtataattctaccacactaaatatcaatataatcaatataagcatatactctttgagattctcaatcatttaagaattatgagagtcttaaggaacaaagaaaatacaaataatttgcttcgatattttagtaggcaca

SEQ ID NO: 198963 - DNA, 443 bp, Homo sapiens
aacatgagagactttaaataatataaacaaatgacacactttttactcaactttttgttgtagaaaagttttttttcaatgaaaaacttctgttaacaatactgttctcaaggaatattttctgtttttataacctgggtcatgggttactactgacatctagttggtagaggccatgaatactgctaaactctctgcaatgcacaagacagtccttacaacaaagcattatctagcccataatatcaacagtggtaaggctgtgaaatctaaactaaaaatagattttgaaaaaatttcaattgtataattctaccacactaaatatcaatataatcaatataarcatatactctttgagattctcaatcatttaagaattatgagagtcttaaggaacaaagaaaatacaaataatttgcttcgatattttagtaggcaca

SEQ ID NO: 198964 - DNA, 487 bp, Homo sapiens
gagtaatcactaaatgtctgtagtcagccaagtctcttaaatctttgagcacacatacacaaaaattactttgactagagtccctggcttcttctgagttccaaagattttgataagttagcatataattcaaaagcagctttgaagattaattttgctgaaactaatttygtgcttttttcctcattattctactttttagaagtctacttttgagagtatagtaagttttaatttgccaccagcaagtttgagaaataatcatttggtgtattcactattggtgaaataaagttattgaacaaattaatagggcaaattggcttcaagaagatattttgaaaaatgttttatcatgaatcagtagtgcactgttgtcagtgggataggtggcactcgctgagatcacttatgcaaggtttttttcaaaatgcaagtctgcaaatacatgtatcttcccatctccactttccctctatctgtaggc

SEQ ID NO: 198965 - DNA, 487 bp, Homo sapiens
gagtaatcactaaatgtctgtagtcagccaagtctcttaaatctttgagcacacatacacaaaaattactttgactagagtccctggcttcttctgagttccaaagattttgataagttagcatataattcaaaagcagctttgaagattaattttgctgaaactaatttcgtgcttttttcctcattattctactttttagaagtctacttttgagagtatagtaagttttaatttgccaccagcaagtttgagaaataatcatttggtgtattcactattggtgaaataaagttattgaacaaattaatagggcaaattggcttcaagaagatatwttgaaaaatgttttatcatgaatcagtagtgcactgttgtcagtgggataggtggcactcgctgagatcacttatgcaaggtttttttcaaaatgcaagtctgcaaatacatgtatcttcccatctccactttccctctatctgtaggc

SEQ ID NO: 198966 - DNA, 487 bp, Homo sapiens
gagtaatcactaaatgtctgtagtcagccaagtctcttaaatctttgagcacacatacacaaaaattactttgactagagtccctggcttcttctgagttccaaagattttgataagttagcatataattcaaaagcagctttgaagattaattttgctgaaactaatttcgtgcttttttcctcattattctactttttagaagtctacttttgagagtatagtaagttttaatttgccaccagcaagtttgagaaataatcatttggtgtattcactattggtgaaataaagttattgaacaaattaatagggcaaattggcttcaagaagatattttgaaaaatgttttatcatgaatcagtagtgcactgttgtcagtgggataggtggmactcgctgagatcacttatgcaaggtttttttcaaaatgcaagtctgcaaatacatgtatcttcccatctccactttccctctatctgtaggc

SEQ ID NO: 198967 - DNA, 440 bp, Homo sapiens
cctcacatttgggtggcgctcatttgtccctcctggggcagagcttctctaggaacacacggtcatggagcgggcgcccggcagcattgaaggcaggtgcytctgctttgccgttaatactacaattaaagaagaaatagcgggaagttctttcaactgtgactcagctggtcagagagcaattagggttgccactgctgctgccttcctgagctgattgcatgggacagaggcactctgccttttacctacctgccgcctcgggacctcaggtgagcgcaccttcctggggaggcagccgctgtgccgtcttctccagctgctctctgggctctggggtttggggacttggaaggctgtgtttgggatggaagcccacccatgtgggatccttggtcttcctcccattttacagactgggaatctgcgccttggaatgc

SEQ ID NO: 198968 - DNA, 632 bp, Homo sapiens
taattttacccagatgttattaaatccataacccatctaccaagaagggaagtgacagaaaaccagacactgattygtctgggtattacagtccccagatgcatggcagaaatgaatttgaatgcacgtattgattattcatgaaaaatccatattccagtaaaaacattatcaattagggccaggtgtggtggcttacacttgtaatcccagcactttgggaggctgaggtgggaagatcacttgagctcaggagagaccagccttggtaacgtagtgagagagacctcatctcttctaaataaataaataaataaataaataaaataaataaataaataacattttaaaaatcacgcctctaatcccagcactttgagaggctgagactggcagatcatcaggtaaggagttcgagaccagcctcgccaacgtagtgaaaccccatcatctctatgaaaaatagaaaaattagccaagtgtggtggcatgcacctgtagtcccagctactccggagtctgaggcaggagaatcacttgaacctgggaggcggaagttgcagtgagccaagatcacgccattgcactccagcctgggtgacagagtgaaactcagtctccaaaagaaaaaa

SEQ ID NO: 198969 - DNA, 230 bp, Homo sapiens
cactcactcatccatggaaaaagccttccatgattgctycagtttttccttccttttctgaagtctatagcagctgaaagttttatcatacaattttaactatacattaccttaatttatttgatatgacctcactgactttatttttgtctctctgataaaattgttaggtcttgaaggcagggataatatctcatatttgcttttgtgttcagccacaattgggcata

SEQ ID NO: 198970 - DNA, 557 bp, Homo sapiens
catccatggaaaaagccttccatgattgctccagtttttccttccttttctgaagtctatagcagctgaaagttttatcatacaattttaactatacattaccttaatttatttgatatgacctcactgactttatttttgtctctctgataaaattgttaggtcttgaaggcagggataatatctcatatttgcttttgtgttcagccacaattgggcatagagtaactgtttgatttacacttactggttgaggagaatactgggctgttgcagtttcatggaagagctattttatggccagcagggccttgttgtacatctcaaattatgccacgtaggtggttgtcctccttcctacacaggctggcactgggctgacttacccagcctrcaaaaaccttcatccaaaatgcagcacctgccaatgatttctctttcactcactgtctggctggttgtagaccaaaaccccaaaaccacagtttgttttatttaattgtatcactagtgttcactatttctcctttccacctttcctcccttcattaaaaata

SEQ ID NO: 198971 - DNA, 613 bp, Homo sapiens
ggccccagagtagtgctgggcgcttggctgcatccaagtccacatgtccagaacagatagcacagcaatgtcaggggcagccagcaagggcccaggaggaaaaggagccaggatggtcacagcaggaccaccagcgcgtcctcagtgggtgttaaattagctgtgygggtgcttcatgcatatccttggagagcatgtctagcatgtggccaggggctgccaagggatccccagaaggcagaacgagtgtggtgactacagtagtagagatcactagcaggagtgttgtgaaaacagcaaaagggccagtagggagatctctcctttcaatcttatagagtaaaggctgcatctgtaggtctggatctgaaaataataataataacagaataaaggctgcataaatgaatgggatgagagagagtttcccaggtcagtgctgaggtccagatggaaagataggaagcaaggggaaggtacagaacatagaactctaaattagagaatcctccattacaggaggttatgtgaagatagcagcaagacaaatgaagataagtaaatctgaaaattatcttcctgccagtcgttagccatgagaccattagaaatt

SEQ ID NO: 198972 - DNA, 530 bp, Homo sapiens
taataccattctccactaaaaggatccagggattctcagagaaatgtctgattacaggaacaggacaggataggtgcaaaagaacctggaatatctggctattccagaaaggaagaaaatgctccaaamaataatgaaggcatattacaaggacacaagagccagcttggctgattctggccaaatcgaggacaatgtgagtatgaaatgtcctagcaccaatcatgaattagaaaccattgaatgaatagaaattcacgtccattgcaaaaacacaaggaaaagtgatgatgatgatgatggtgaagatagaagatagatggacagacagacagacagaaaatagatagattaggggttttcactttgttcgaatcctcccccaccccgtctctgtatgggggagctgttttcttcttccttccttctttcttgcctattaaactttttgttccttaaaaccacacacacacacacacaaaagatgatagatagatagatgatagatagatgatagatagatagataga

SEQ ID NO: 198973 - DNA, 530 bp, Homo sapiens
taataccattctccactaaaaggatccagggattctcagagaaatgtctgattacaggaacaggacaggataggtgcaaaagaacctggaatatctggctattccagaaaggaagaaaatgctccaaacaataatgaaggcatattacaaggacacaagagccagcttggctgattctggccaaatcgaggacaatgtgagtatgaaatgtcctagcaccaatcatgaattagaaaccattgaatgaatagaaattcacgtccattgcaaaaacacaaggaaaagtgatgatgatgatsatggtgaagatagaagatagatggacagacagacagacagaaaatagatagattaggggttttcactttgttcgaatcctcccccaccccgtctctgtatgggggagctgttttcttcttccttccttctttcttgcctattaaactttttgttccttaaaaccacacacacacacacacaaaagatgatagatagatagatgatagatagatgatagatagatagataga

SEQ ID NO: 198974 - DNA, 530 bp, Homo sapiens
taataccattctccactaaaaggatccagggattctcagagaaatgtctgattacaggaacaggacaggataggtgcaaaagaacctggaatatctggctattccagaaaggaagaaaatgctccaaacaataatgaaggcatattacaaggacacaagagccagcttggctgattctggccaaatcgaggacaatgtgagtatgaaatgtcctagcaccaatcatgaattagaaaccattgaatgaatagaaattcacgtccattgcaaaaacacaaggaaaagtgatgatgatgatgatggtgaagatagaagatagatggacagacagacagacagaaaatagatagattaggggttttcactttgttcgaatccycccccaccccgtctctgtatgggggagctgttttcttcttccttccttctttcttgcctattaaactttttgttccttaaaaccacacacacacacacacaaaagatgatagatagatagatgatagatagatgatagatagatagataga

SEQ ID NO: 198975 - DNA, 527 bp, Homo sapiens
ggaacaggacaggataggtgcaaaagaacctggaatatctggctattccagaaaggaagaaaatgctccaaacaataatgaaggcatattacaaggacacaagagccagcttggctgattctggccaaatcgaggacaatgtgagtatgaaatgtcctagcaccaatcatgaattagaaaccattgaatgaatagaaattcacgtccattgcaaaaacacaaggaaaagtgatgatgatgatgatggtgaagatagaagatagatggacagacagacagacagaaaatagatagattaggggttttcactttgttcgaatcctcccccaccccgtctctgtatgggggagctgttttcttcttccttccttctttcttgcctattaaactttttgttccttaaaaccacacacacacacacacaaaagatgatagatagakagatgatagatagatgatagatagatagatagatagatagatagatagacagataaatagatatagatagatagatagatagatga

SEQ ID NO: 198976 - DNA, 527 bp, Homo sapiens
ggaacaggacaggataggtgcaaaagaacctggaatatctggctattccagaaaggaagaaaatgctccaaacaataatgaaggcatattacaaggacacaagagccagcttggctgattctggccaaatcgaggacaatgtgagtatgaaatgtcctagcaccaatcatgaattagaaaccattgaatgaatagaaattcacgtccattgcaaaaacacaaggaaaagtgatgatgatgatgatggtgaagatagaagatagatggacagacagacagacagaaaatagatagattaggggttttcactttgttcgaatcctcccccaccccgtctctgtatgggggagctgttttcttcttccttccttctttcttgcctattaaactttttgttccttaaaaccacacacacacacacacaaaagatgatagatagatrgatgatagatagatgatagatagatagatagatagatagatagatagacagataaatagatatagatagatagatagatagatga

SEQ ID NO: 198977 - DNA, 405 bp, Homo sapiens
cccgggttcttgtgcctcagcctcctaagtagctgggactacaggcatgcaccactatgtctggataattttttgtatttttagtaggaatggggtttcacaatattgcccagactggtctygaacctctgagctcaggcaatctgaccacctcggcctcccaaaatgctaggagtgcgggcgtgagccaccgtgccccgccagtgtatcattttgtgcctatctttttccactcaccatgctagtgaggttcatctgtgttgtgtgtatactgaccatatattaagtagcctacttacagagaatacaaagttggtaataaaggcaaacattgaaaattgtgtttttcatcttctcacatatgaaagaaaaaagatataagtaatccaaataggatatatctca

SEQ ID NO: 198978 - DNA, 439 bp, Homo sapiens
gccacagaaatcagtcaactaaattcctttacagcccctcacttatttggtgaatggcacgtgctgctcatgataaacagaaaaatggcttggatttctcatcctcaaattcttacctgagagatggtaacattctaaataaaggtacatttcttattacaacctgagtttgagccccaaagcccaacataatctgctggtgaggtggggtgtgccattgtgagccctggttcccatgtsgtttctaagagcagccaagcagcagatagtcctgggccttctcatcaccctgatactcatgaggcactctcagtctctgttgagagtaagagcttttagcttttgcatctcctagaggagcttttgctccagtccctagcattatttcctagaaaagagatgtggccaagttgtgtccttggctttcatacccaagtac

SEQ ID NO: 198979 - DNA, 496 bp, Homo sapiens
tgttacccctgaaatcttattttcacttttatttttgccccacaattgttgccttttctgtgttccatacgaaaccagaaatacccccactaaaaaaaaggggcgtgttgagtacagcaaactccactcaaacattggtgagaagaaggggacccacatcaaagaagagctaataggtaaaaagtgtttgatttctatatttttaaaagtcttttaactatttccaacaattcaggccacagcattctgtcatgtatttcagccctctacttttttcactgcttatcagtaatctaccccatgttactatgcaaagcaatctaggtttcgtcaatgcagctgcagcactcccttggtagaaccaaacactcactagytgttggacaattgatcacctacttcctcatcagtctctacaagagaactggatcagattttttcccaggggtatgaatcctgccacccatccttaggggcgtcaaggggggcagaaatg

SEQ ID NO: 198980 - DNA, 574 bp, Homo sapiens
agctgagcccatcacattctctctcctggttttggatgtgcagactagaaacaccatttgtaatcagaggtgggtgctgctcttttaggagcactggtaatgggaatttttccaaagacaaaagaatgaaacaggtgcagcagagacaaggaaccaggggccagagggacaggaagaagaggaaagtgagagtaaaagaattttactgataaccttctggttctataaaattttttagttcttgctaaaactggacaccttgagatgctgtatccttacaataaacttctctgtaattagccgagcttaagtggatttcttctggcaactatgcatatgaaactgctcaaccactatgttaattttcaagtcttctaaagatggyaacaacttaaatttccctgccagaattttggagagaggcaagcaaatctgacatcagaaatgtagttgtctcacttttggtttaaatcctgaatcagtttagggaagcagtgggtgaagattatttttaaacagcccacagtcaacttatcctactcaaaagtatgaccaaaacactgaggaggcagaa

SEQ ID NO: 198981 - DNA, 465 bp, Homo sapiens
attcccatggctttgaaaacatcatttggctcatcttgaagtggtagagagagtgctgggctaacaatgggttacaatagacctactgagcatgcctgaccaagttttgaaaaagaaaacttccataatcaagtaagatacatccatctaccaaaaaacataatttagggtggaagaaagaagggctcttttaaaatgccaaccggttagtttatggcctgtatcagtgctgcagtgatggaaaaggaaggtgtcaaaaaagyaaaatagctgatttactatctacaaaagattaacagcttgctaggcctgggtgagtatggaagtagcagcgagtgaaatgttcccattggagacacactgatgaaaaggagctgggtgagcagattgaccagcttctttttgtggtgaggaaaaagttgccatccatcatgattgaactcttcattctagggaagtgtttgg

SEQ ID NO: 198982 - DNA, 596 bp, Homo sapiens
aactattattgagcagaaattgaagaatgtatcttttaaggaaattatacataatatggggatatttttgccaagtttctctattactgttggaaatagttggagaccttagacgttttttgtcctccaaaagaaattatcttaaaaccagtttatacaaatacaaatgtatacaaattttcaatccctggatattgattmttttgtttctggggttttttttgtttgtttttttttatgcaccctctcttgtctgtcacccaggctggagtgcagtggtacaatctcagctcactgcaacctccgcctctcgggttcatgcaatcctcgtgcctcaggctcctgagtagctgagattacaggaatgcaccaccacccccagctaatttttgtatttttagtagagatggggtttcaccatgtgggccaagctgatcttaaactcctggcctcaagtgatccgcctacctcagccccccaaagtgctgggattaagacatgagccactgtggcagcgggccaatattgattctttatagcagtcccaagtgagtttatcaagtcaaagccagaatcaaaatgaatcaggcattata

SEQ ID NO: 198983 - DNA, 531 bp, Homo sapiens
attcacagtagagaacatcatcacttacattgatgaaaatagtttgagtggctcccacgtctcaaatagaaaatatttatgtttcagatttcctaacttgaaggaaacaattgagtattttaaagctgcactttatatggaaggaatgaggggtaaaagaaaatcaaattagatattgtcagctaaagacaatttgaaaaggttaactgcagaactcccaaattggatctatttgagaataatgaaaaaagttggtaggaaatttagtggttatctggttcttcttgtctgaggcatacattttccctatagcattcctgataattcactgtttgttcctgatacatacaaagttggccctctgtatctgggggtttcgcatccacagatttaaccaatctagggtaaaaaatattwaaaaaaaatagttgcatctgtacttgaacatgtgcagtttttttcttgtcattattcctcaataatacagtataacaactatttacattagcatttacattgtgttaggtatta

SEQ ID NO: 198984 - DNA, 666 bp, Homo sapiens
acttggtcagcctcaaccttgcacatgtgcatgagtcattgttgtcaactgcaaaagtagttgccacaattcttcactactctctgtatctatrcactttttaacgtcactttacagctctctttcaccatgcattttatctgagctggccttgtaacttgcttaggccaacaacatttagtgaaagcagtgtgctgccagttctaattctaggccccaagagcccttgcacaccttcaccctccctcttggaaacctgtgactgctctgcaaccaaacccaagctggccagctatagaatggagaccacatggagaacagaggagccaacccccagaaggcgagttgcctactaaccttagctaattacagacatgaggaagccctgctgaaactagaactatcaaactgcagcacagacccacaggcaatagtcatttctggctattttaagtcacaacatttgagggactttgttatgcagcagcacataactgatacagtccaaacaccatttgagaaaattgttcaagtcaccattttcatctgcttggccatcaagctcagttcttactggttctgaacatgtctatggcttctaccttggtagtgatttagcccctctaagattaaaataatcaaactctggagttaactacccaatag

SEQ ID NO: 198985 - DNA, 507 bp, Homo sapiens
catcatagtggtaggatctcacaccagagtttaactgtgggatatgagggccagcagagaagagattcaggatggaggccatgtggtctcttgacttragccacattctgtattccagcttttatcacagttttgcataggctaaatgggcaattgtttggaaatttgtaaaattgatgtttttttttttctcatttagcgattgaacttatgtgtaatctttggcatggcggggagttcatcagggtatctatagggctgtgtgggaggatttgcacacagaactcacctgagtccctgacccagttttaaatggctttcttctgggtttgctgtaaaagggaaagggaggtgaaagacaggccatgtggtccagtggcaagagcaaagtcttatatgtttgaacctgtagttctgaagcataactagtagtgtggtcatgggcaaggtaattgattcctctgagaattactttttaatctgtaaaacagggattttttaagccta

SEQ ID NO: 198986 - DNA, 518 bp, Homo sapiens
ttaactctactatgatctgagaacatactttgtgttatttttcttcttttaaatttatgaaggtgtattatggcccagaatggggtctaccttggttactgttcatgtgagcttgagaagaatctgtattcttccattgggtggaatagtctattaatattgattaggtaaattcaggttatctatatctctaatgatttcctgcctacatgatgtattaattactgacagagggatgttgaagtctccaactataatagtgggtttayttatttttcttttcaattctatctgtttttgccttatgtagtttgacattctcttgttaggcacataaatgttcatattgctcgttcttcttagagaattgattttttaatcactatgtaatttccatttttatctctgataattttccttgttctgagtctatttggtgtgaaattgatatagctacttaagtttttttttcattaatgttagcatggtatatttcttcatttctttaacttatttga

SEQ ID NO: 198987 - DNA, 550 bp, Homo sapiens
ccaatagttgcagtaacatcttcctaatcctcagatcaagactatggtagtgtcagtttgtaaccgactgctgaaaatccaattccccaaaaatagctgacacttgtcctgctccatgctacatcccctcatctgacctggttttagcatagctagggtgggaagctgcctgcattctacctcaagcccctgccatgccaagtcactgtttctstgtatcaaccttcagactttctccaaagtcataaaatgtggtccagctcatagagatgtaacccaagttctaactgttcacacacttgagaccaacccttaaccctcagggagcaggtgtcatggagaaatgccccagcctctcattgtagaagggagagttatcaggtgcattccattaaattcctcagagggtcctcagaggtctacagtggaaaacttcacactaaatgtgcactttcttgccattccccactcttctctgtctcagtctccccaggccctcatcctggctttctaggataaaactgcacacaagaactatcagcacccaagt

SEQ ID NO: 198988 - DNA, 561 bp, Homo sapiens
gacatagctctcagccaatagttgcagtaacatcttcctaatcctcagatcaagactatggtagtgtcagtttgtaaccgactgctgaaaatccaattccccaaaaatagctgacacttgtcctgctccatgctacatcccctcatctgacctggttttagcatagctagggtgggaagctgcctgcattctacctcaagcccctgccatgccaagtcactgtttctctgtatcaaccttcagactttctccaaagtcataaaatgtggtccagctcatagagatgtaacccaagttctaactgttcacacayttgagaccaacccttaaccctcagggagcaggtgtcatggagaaatgccccagcctctcattgtagaagggagagttatcaggtgcattccattaaattcctcagagggtcctcagaggtctacagtggaaaacttcacactaaatgtgcactttcttgccattccccactcttctctgtctcagtctccccaggccctcatcctggctttctaggataaaactgcacacaagaactatcagcaccca

SEQ ID NO: 198989 - DNA, 561 bp, Homo sapiens
gacatagctctcagccaatagttgcagtaacatcttcctaatcctcagatcaagactatggtagtgtcagtttgtaaccgactgctgaaaatccaattccccaaaaatagctgacacttgtcctgctccatgctacatcccctcatctgacctggttttagcatagctagggtgggaagctgcctgcattctacctcaagcccctgccatgccaagtcactgtttctctgtatcaaccttcagactttctccaaagtcataaaatgtggtccagctcatagagatgtaacccaagttctaactgttcacacacttgagaccaacccttaaccctcagggagcaggtgtcatggagaaatgccccagcctctcattgtagaagggagagttatcaggtgcattccattwaattcctcagagggtcctcagaggtctacagtggaaaacttcacactaaatgtgcactttcttgccattccccactcttctctgtctcagtctccccaggccctcatcctggctttctaggataaaactgcacacaagaactatcagcaccca

SEQ ID NO: 198990 - DNA, 550 bp, Homo sapiens
ccaatagttgcagtaacatcttcctaatcctcagatcaagactatggtagtgtcagtttgtaaccgactgctgaaaatccaattccccaaaaatagctgacacttgtcctgctccatgctacatcccctcatctgacctggttttagcatagctagggtgggaagctgcctgcattctacctcaagcccctgccatgccaagtcactgtttctctgtatcaaccttcagactttctccaaagtcataaaatgtggtccagctcatagagatgtaacccaagttctaactgttcacacacttgagaccaacccttaaccctcagggagcaggtgtcatggagaaatgccccagcctctcattgtagaagggagagttatcaggtgcattccattaaattcctcagagkgtcctcagaggtctacagtggaaaacttcacactaaatgtgcactttcttgccattccccactcttctctgtctcagtctccccaggccctcatcctggctttctaggataaaactgcacacaagaactatcagcacccaagt

SEQ ID NO: 198991 - DNA, 550 bp, Homo sapiens
ccaatagttgcagtaacatcttcctaatcctcagatcaagactatggtagtgtcagtttgtaaccgactgctgaaaatccaattccccaaaaatagctgacacttgtcctgctccatgctacatcccctcatctgacctggttttagcatagctagggtgggaagctgcctgcattctacctcaagcccctgccatgccaagtcactgtttctctgtatcaaccttcagactttctccaaagtcataaaatgtggtccagctcatagagatgtaacccaagttctaactgttcacacacttgagaccaacccttaaccctcagggagcaggtgtcatggagaaatgccccagcctctcattgtagaagggagagttatcaggtgcattccattaaattcctcagagggtcctcagaggtctacagtggaaaacttcacaytaaatgtgcactttcttgccattccccactcttctctgtctcagtctccccaggccctcatcctggctttctaggataaaactgcacacaagaactatcagcacccaagt

SEQ ID NO: 198992 - DNA, 633 bp, Homo sapiens
tgtttttaattcagggaggcaacaaaatagacttaataagagcatcagttttgctggtcctaacagcaccttgtaggtgatgtgctgggagggagtctccctcacaaacccaccctctttttagtctaaagtttggaagaggcaatgacagtgaagtggctatgttgtctggggtagatacccaaggttcatcacctcatgccaggaaaatttaggatatggacacacatgaggggtgtaggagtggagatttaataggcaaaagaaagagaaaggaaaacagctctctctctattgagagagaggggactcctgagaggaaagaatgatcagggacagatgcatcagattttataatcaggtttgaggaaacagtgtctgatttacatagggctcacagattaattcaatcaggtatgacatcatatcatrtggggaaagctgacccctccaccctaatattattatgaaaatgggctttccagttgactggtgccatcttatctgctccttactgtacacgtggctgacaaagagaagggaagatggagccaccattttgaacatgattgtcacaatgtcagcatctatgtctgcagcttgatttttacaggctttcctttgttagaaagg

SEQ ID NO: 198993 - DNA, 603 bp, Homo sapiens
aatatcaatatattaaataatattatcaatactattctctttaaattgggatacatcattactttaatcattcactagttcatctaataggcattgcatycagtcaatctatatttagtaatgtctgacataccaggcactgtgctaaattctaggatacagcacagaacaaaacagacacagacactgccttcatggaacttatggtctacacggccaaagagatagagatattaaacaagtaaagcatttataaaagttgtgactagagcaaggaaaggaaaatatggaatactatggaggtgacaaggaaagccattctgaagagaacacatgtaagatgagaagatgtaaaacatgaagatttggaagatgtaaaagattgggaagttttacatcttcccagagattgggatcttccccctgaacaagggaaggtggaatgagatgaggtcagagagaagggctagatattacatagctatctatgccatgggaaggagttggattttgttgtgaagtgcacataaaaagtcaacacagagggctgccatgacgatatttctgttatagggcaaacgctgtatacacacctgtgataga

SEQ ID NO: 198994 - DNA, 474 bp, Homo sapiens
cacaatttcactttccatggcttcagttacccacggkgtagcacaatacgatattttgagagagagggagaccacatttatataacgtttattgcagtatattgttataattgctttattgtattattagcaattgttaatctcttactgtgtctaatttataaattaaactttgtcataggtatacatgtataggaaaaacatatatatggcgatcagtactatccgtggtttcaggcaggtagtggaggtcttgggacatattccctgccaataagggggaattactgtaggtcggtattaatatgtctcaaatatttagcattttttgaggaaagaagaagcattgtatgtgacagattgatttttaaaacatgctcaattctttgtccctccttatgcaaataactttgcaggtcctcttaacaaaagtctctctctctgtttttttatttaaatccctttaatctgggc

SEQ ID NO: 198995 - DNA, 525 bp, Homo sapiens
tgttaaagaaagtagctaagtcagaaaggttacgagacttttcttttgagtgctggtagctttctattaaaaaatacctgagtccttgcctgatttataggtgtttggcatactctaatatgaaaagagggcagcatcagatgaatgggtgtaagttccagggataactttcactctcacctggacaattgcagtaaccttctgactggtctcctgctttcacttccctcctcttcaatccattctccacatggattgtggagccagagtgattctcttaaaatcacatgtcatcgcttacctcagcaaaagcaagttcccgttacagtgggtaaaatcacattcattgcttaagacttcasggcattgtctgcttatacctgtatctttaaatgtattatcatttgcttgtctcttctttgtttaccaagctccaggcaccatggtgtctttttagctcctgcaacaagataatcttattcctgcatctgcaatgttccatctcataactagctccctgtcctt

SEQ ID NO: 198996 - DNA, 664 bp, Homo sapiens
aatttatagcactaaatatcttcatcaagaagttagaaacatcttaaattaataatctaacatggttcctagaggaactagaaaaaaagaacagcctgaccccaaagctagcagaagaaaaggaataactaaaatcaaaagagaaagtaatgaaattgagatccaaaagcctcaacgaaagagcaataaaaccaagttttttttgaaagaataaacaagactgatagaccgctagggatagrtaaagaaacaaaaaaacaaaacagaagagcacaatcagaaatgaaaaagatgactttacaactgattccatagaaatacagaagatccccagactattatgaaaacctctatgcacacgaagtagaaaatctagaggaaatggataaattcctggaaacacacaacctcctaagattgaaccaggaagaaagtgaaaacatgaacagaccaataacaagttctgaaattgaattagtaatgaaactctaccaaccaaacccggccctggaccgaatggattcacaaccattccatgagatatacaaagaagacctgataccaatcctactgaaattatcccaaaaaactatgaggagggatttctccctaactcattctacaaaacaagcatcatcctgacaccataatctggcagaaacac

SEQ ID NO: 198997 - DNA, 664 bp, Homo sapiens
aatttatagcactaaatatcttcatcaagaagttagaaacatcttaaattaataatctaacatggttcctagaggaactagaaaaaaagaacagcctgaccccaaagctagcagaagaaaaggaataactaaaatcaaaagagaaagtaatgaaattgagatccaaaagcctcaacgaaagagcaataaaaccaagttttttttgaaagaataaacaagactgatagaccgctagggataggtaaagaaacaaaaaaacaaaacagaagagcacaatcagaaatgaaaaagatgactttacaactgattccatagaaatacagaagatccccagactattatgaaaacctctatgcacacgaagtagaaaatctagaggaaatggataaattcctggaaacacacaacctcctaagattgaaccaggaagaaagtgaaaacatgaacagaccaataacaagttctgaaattgaattagtaatgaaactctaccaaccaaacccggccctggaccgaatggattcacaaccattccatgagatatacaaagaagacctgataccaatcctactgaaaytatcccaaaaaactatgaggagggatttctccctaactcattctacaaaacaagcatcatcctgacaccataatctggcagaaacac

SEQ ID NO: 198998 - DNA, 487 bp, Homo sapiens
gtaaccctattaaagggaccactagtacaatttgaacaacagttacgttagggatgttgctaaacttacccmctagatggactaaagaagcttttaggttatgtaaagatttgggtttcacacgacagatccaacagttcatcagattgcccccgcaggagctgctgactgtgccaagcgaaaaagatgggcaaaaaaaaaaaaaaaaaaaaaaaaagttcagaggggcaagagtcttattatgataggcagtcttgtgctgacaccttgggaaaagctgtttacaacatgaagttgtcaacctctttccctggtttgcagtttgaatgtctctggttatggcatcaggcgttttggtgaactctgtgtggccaacacatcaggaatggcacttgtcccttgaaatttacaacgagttgtctggtttcagcttagagggctttgggtacagagcagttcttgttcttagttggagaattgtagccag

SEQ ID NO: 198999 - DNA, 487 bp, Homo sapiens
gtaaccctattaaagggaccactagtacaatttgaacaacagttacgttagggatgttgctaaacttaccccctagatggactaaagaagctyttaggttatgtaaagatttgggtttcacacgacagatccaacagttcatcagattgcccccgcaggagctgctgactgtgccaagcgaaaaagatgggcaaaaaaaaaaaaaaaaaaaaaaaaagttcagaggggcaagagtcttattatgataggcagtcttgtgctgacaccttgggaaaagctgtttacaacatgaagttgtcaacctctttccctggtttgcagtttgaatgtctctggttatggcatcaggcgttttggtgaactctgtgtggccaacacatcaggaatggcacttgtcccttgaaatttacaacgagttgtctggtttcagcttagagggctttgggtacagagcagttcttgttcttagttggagaattgtagccag

SEQ ID NO: 199000 - DNA, 454 bp, Homo sapiens
tgaacaacagttacgttagggatgttgctaaacttaccccctagatggactaaagaagcttttaggttatgtaaagatttgggtttcacacgacagatccaacagttcatcagattgcccccgcaggagctgctgactgtgccaagcgaaaaagatgggcaaaaaaaaaaaaaaaaaaaaaaaaagttcagaggggcaagagtcttattatgataggcagtcttgtgctgacaccttgggaaaagctgtttacaacatgaagttgtcaacctctttccctggtttgcagtttgaatgtctctggttatggcatcaggcgttttggkgaactctgtgtggccaacacatcaggaatggcacttgtcccttgaaatttacaacgagttgtctggtttcagcttagagggctttgggtacagagcagttcttgttcttagttggagaattgtagcca

SEQ ID NO: 199001 - DNA, 546 bp, Homo sapiens
gtggtgctaagtacatgaccaattatctcctcaagtccttagccagccagaatttcacaacttccacatcgcatggcccyggcagcagcagtccatcacctcccgcagtgcaaaagtatcccagacatattctaattacagacagtatttgcagttatccaatattatctgacagataaaagctctaacagtggaattcctgggacaaaggatggacatatttaaagacatttgatacatactaatgtttacttatctaattatattttataaaaactagtttttctgtatgttttgccagccaatatatattttgtcaagttacaatgtacttggagttccaaagggcatttttctaagtgaactccaatttccatgatcaccaaatacacaaaagcaggagaaataaatccaggggtggcacaagctaaggcaaaaccaaaacaagcctgctcttacggcaaagtagttaagctgtcctcttaagctcactctagcagagttattgccgcttattcataagggcaccagcaacagctgttcacc

SEQ ID NO: 199002 - DNA, 602 bp, Homo sapiens
tgacttcaaatacagagctatagtaaccaaaacagcatgttactggcataaaaatagacacatgggccaatggagcaaaacagagaaccaagaaataaatgcacatgcacataaactcattttcaacaaaggtgtcaagaacatacacaagggaaaagacagtctcttcaataaatggtgctgggaaaacaggatatttatgtgcagaaaaacaaaacgaaacccctatctctcaccatatacaaacaccaaataaaaaatgaacgaaygacttaaatctaagacctcaaactatgaaattcctacaagaaaacatggagaaaccctccgagatatggatctgggcaaaaatttcttgaggaataccctacaagctcaagcaaccaaagtagaaatgaacaaatggggtcacatcaagctaaaaagcttccacacagcatgggaaacaatcaacaaagtgaaaagacaagccacaaaatgggagaaaatatttgcaaactactcatctgacaagagattaataaccagaatatataaagagctcaaacaactctgtcaggaaaaaaatgcaataatctgatcaaaaaatgggcaaaagattt

SEQ ID NO: 199003 - DNA, 602 bp, Homo sapiens
tgacttcaaatacagagctatagtaaccaaaacagcatgttactggcataaaaatagacacatgggccaatggagcaaaacagagaaccaagaaataaatgcacatgcacataaactcattttcaacaaaggtgtcaagaacatacacaagggaaaagacagtctcttcaataaatggtgctgggaaaacaggatatttatgtgcagaaaaacaaaacgaaacccctatctctcaccatatacaaacaccaaataaaaaatgaacgaatracttaaatctaagacctcaaactatgaaattcctacaagaaaacatggagaaaccctccgagatatggatctgggcaaaaatttcttgaggaataccctacaagctcaagcaaccaaagtagaaatgaacaaatggggtcacatcaagctaaaaagcttccacacagcatgggaaacaatcaacaaagtgaaaagacaagccacaaaatgggagaaaatatttgcaaactactcatctgacaagagattaataaccagaatatataaagagctcaaacaactctgtcaggaaaaaaatgcaataatctgatcaaaaaatgggcaaaagattt

SEQ ID NO: 199004 - DNA, 602 bp, Homo sapiens
tgacttcaaatacagagctatagtaaccaaaacagcatgttactggcataaaaatagacacatgggccaatggagcaaaacagagaaccaagaaataaatgcacatgcacataaactcattttcaacaaaggtgtcaagaacatacacaagggaaaagacagtctcttcaataaatggtgctgggaaaacaggatatttatgtgcagaaaaacaaaacgaaacccctatctctcaccatatacaaacaccaaataaaaaatgaacgaatgacttaaatctaagacctcaaactatgaaattcctacaagraaacatggagaaaccctccgagatatggatctgggcaaaaatttcttgaggaataccctacaagctcaagcaaccaaagtagaaatgaacaaatggggtcacatcaagctaaaaagcttccacacagcatgggaaacaatcaacaaagtgaaaagacaagccacaaaatgggagaaaatatttgcaaactactcatctgacaagagattaataaccagaatatataaagagctcaaacaactctgtcaggaaaaaaatgcaataatctgatcaaaaaatgggcaaaagattt

SEQ ID NO: 199005 - DNA, 598 bp, Homo sapiens
taactggtatatgaccttctagggacagtcgactggtaagggaataatatctcaagtgagcacatgtacaactccagtaaacacactgcacatgtggcccctccgaagtgctggcaggccactgtgcatgtggacagcccaccgcaagggaagaatcaggggagaagtaaggcaaccctggaagcattccaacatataacaccccaagtcaaaggtcaaaccatacgcttgaatctctcaaattgcccacttggccctcttccaagtgtactttactttcattcctgctctaaaactttatttatttttttttttttttgagacagagtctcactcccaggctagagtgtagtggcaagatatcaactcactgcaacctccacctcctgtgttcaagggattctcatgcctcagcctcctgggtacctgggactacaggcacgtgccaccatgcccagctaatttttagtagagacagagtttcaccatgttggccagactggtctcgaactcttggcctcaagtgatcygtctgtcttggcctcccaaagtgctgggattacaggtgtgagccactgtccttggcctcttaaagctt

SEQ ID NO: 199006 - DNA, 580 bp, Homo sapiens
aaacttcatgcctacatcctgcaggtttaaaaattgcaacagaaagagtctctttccagacaactccagcaaaaggacctgcaattgcacttcattgtgctggctggtcacgtgttcttctctgagccaatcagtatggccagggggccctggactgctctgattggctagctctgattatgttttcactcacaaagccaagcgatgaggtcagtccaccaaaatcacatgacctgagggcatggggacrgttcctcaagggaaaattggagtagtgtaacctaacagggatggacatgctggacaggtgcaggcaaaaacaactacaggggttgagatgggcacaggcacctagtggggtgttttaggggtaatggggacacagtgactggtggtgaagaaacactaggactgaagacacagagtcgttctaattcctgctctttctgtaactactgatgtgactttgaacaagtcattgagcctctctgggcctcagttcctcaaatgtaacaggggataataatttaaataatagtaataacaaaagctccccgggttgctgtgaggatcatgatat

SEQ ID NO: 199007 - DNA, 623 bp, Homo sapiens
ctggggttgtaatccccctaccccatgtcacctacttgtcctgggtagggtctgtacctctcctggattatatatgaatagtgatgatgaagtgttagagacagagggaggtgcagggagtctcaggttcatggcaatagctccgttttcttaaaggctttgatgcaaagcctctgatacaatttgttagtccacccaaccctgcaaatcggaaattgggtttgtatttgatcagtttggctgggccactgaagcttcatgtgtcaacagcagcactgacttatcatcataaagctctcagatgcctgacccgctgctccagcttctggttcacacctcccatgatcttgaactggaaagaaatcaggccacacttctaggggttgtttctgggtctgaaattgtcatagacaacctggtcattctttggaaacagtagccctggtaacttgagagagagagagacaaatatagcagcatttgcagctgaagttttttaaaaatcactttgttttcatacattttctgttagcgtgtaaagcataacataaaatgttgtgtatattttaaagcaaacctgaagttttrtaacttgtggtaaacattaagaaggggcagttccc

SEQ ID NO: 199008 - DNA, 609 bp, Homo sapiens
tgacaggcactgaaggtgaagcttagtcatgggtattagaggcaaattgtaaaacttgactcagcctgctgtgtccccttcttcttcagcatgtgatgtggtttggytgtgtccccacccaaatctcaccttgaattatagctcccataattcccatgtgttgtgggagggacccagtgggagatgattgaatcatggcggtggtttcccccataccgttctcgtggtagtgaataaatctcacagaatctgatggttttataaggggaaaccccttttgtttggctgtccttttatctcttgcctgccaccatgtaggacgtgtcttttgccttccactgtgattgggaggcctccccagtaatgtggaactgtgagtccattaaacctcattttctttataagttgtccagtctcaggtatgtctttatcagaagcatgaaaacagactaatataccatgtcatcactcacatgcctcttctgctctgagaccagccccaaaactgctgccatagctcagggcatcttaaaatctctgcctgccttctatcctaccactgcacacccacccaagagagttctcatatagctggaagaggtccaagga

SEQ ID NO: 199009 - DNA, 609 bp, Homo sapiens
tgacaggcactgaaggtgaagcttagtcatgggtattagaggcaaattgtaaaacttgactcagcctgctgtgtccccttcttcttcagcatgtgatgtggtttggttgtgtccccacccaaatctcaccttgaattatagctcccataattcccatgtgttgtgggagggacccagtgggagatgattgaatcatggsggtggtttcccccataccgttctcgtggtagtgaataaatctcacagaatctgatggttttataaggggaaaccccttttgtttggctgtccttttatctcttgcctgccaccatgtaggacgtgtcttttgccttccactgtgattgggaggcctccccagtaatgtggaactgtgagtccattaaacctcattttctttataagttgtccagtctcaggtatgtctttatcagaagcatgaaaacagactaatataccatgtcatcactcacatgcctcttctgctctgagaccagccccaaaactgctgccatagctcagggcatcttaaaatctctgcctgccttctatcctaccactgcacacccacccaagagagttctcatatagctggaagaggtccaagga

SEQ ID NO: 199010 - DNA, 559 bp, Homo sapiens
ggtcagactggtgtctaactcctgasctcaggtgatcttcctgcctcagcctcccaaagtgctgggattacaggtgtgagccaccatgcccagcctagacatataatttagaaagaccactctaagagcagtatgcaggataccttagaaaggggtaagaccaacaaaaataagcaatggggctgggatagctggctagccatatgcgaaagaataacactggacccctaccttttgccatatacatgccaaaattaactcaagttggattaaaggtttaaatgtaagacttcaaactataagaatcctagaagaaaacctaagaaacaccattctggacacaaagatgaatgactagtagcctcccgaggactccaagggctctactagctaggagacagaatgataaccaacaattagagcagcatgtgacaggtgctaagagaaagtctttgcattggcctttggaaagaatttatgactaagttctcaaaagcaattgcaacaaaaccaaatattgacaagtggaacctaaagagcttaaagattttaagagctt

SEQ ID NO: 199011 - DNA, 397 bp, Homo sapiens
aggaaacctaattgagctagggtctttcccaaggtcacagaggaaatgagtagaagtgctggaactggaggctgaccagccctgccacatcctcagccaatccccaaatggagaaaggagggatattcaaggttcagtggaaccygtccccaccaccgatgaacaacaggaaatcagaagagcaggtgcactttgcagcttccaggtcagtccttgcctggcaggtgcagcccaggtgcagatgtttgtcaacacagccaggcccctatcctggcctgggggagggtggcagccactctctattgttatgcttagctcttcttgcaagaggaatctttgctgtctgttcctgagagcaaggagcctttgattctggaggagtgatgcatttcctgac

SEQ ID NO: 199012 - DNA, 407 bp, Homo sapiens
aagactgttgaggaaacctaattgagctagggtctttcccaaggtcacagaggaaatgagtagaagtgctggaactggaggctgaccagccctgccacatcctcagccaatccccaaatggagaaaggagggatattcaaggttcagtggaacctgtccccaccaccgatgaacaacaggaaatcagaagagcaggtgcacttygcagcttccaggtcagtccttgcctggcaggtgcagcccaggtgcagatgtttgtcaacacagccaggcccctatcctggcctgggggagggtggcagccactctctattgttatgcttagctcttcttgcaagaggaatctttgctgtctgttcctgagagcaaggagcctttgattctggaggagtgatgcatttcctgac

SEQ ID NO: 199013 - DNA, 408 bp, Homo sapiens
cctaattgagctagggtctttcccaaggtcacagaggaaatgagtagaagtgctggaactggaggctgaccagccctgccacatcctcagccaatccccaaatggagaaaggagggatattcaaggttcagtggaacctgtccccaccaccgatgaacaacaggaaatcagaagagcaggtgcactttgcagcttccaggtcagtccttgcctggcaggtgcagcccaggtgcagatgtttgtcaacacagccaggcccctatccyggcctgggggagggtggcagccactctctattgttatgcttagctcttcttgcaagaggaatctttgctgtctgttcctgagagcaaggagcctttgattctggaggagtgatgcatttcctgactttgatctatcacaaat

SEQ ID NO: 199014 - DNA, 533 bp, Homo sapiens
ataaaccaaaagctaggcctcttgggccaaagagccaagttgtgaatgcaaaggaaaagttcttgaaggaaattaaaagcacaactccagtgaacacatgaatgataagaaagcaaaacagccctattgctgatatgaagaaagtttgagtggtctatatagaaaatcaaaaaagccataatgttcccttaagccaaaggcaaatacagaacaagcccctagctctcttcaattctgtgaagtctgagagaggtgaggaagctgcagaagaaaagttagaagccagcagaggttggttcatgaggttaaggaaataagctgtcttaatatcataaaggtgcaaaaagaggcagcaagtgttgatatagaaactgctgcaagttatccagaagatctaactaggatcattgatgaaggtagctgcactaaacaatagattttcaatggagrcaaaacagccttctattagaagaagatgctatctaggacttccataactatagaggagaagtcaatgcatggtttgaaagctt

SEQ ID NO: 199015 - DNA, 535 bp, Homo sapiens
cgccctgctttggctcatggtccgtgggctgcacccactgccctgcacttactgtccgacaagccccagtgagatgcacccggtacctcagttggaaatgcagaaatcacccatcttctgcatcgctcatgctaggagctgtagactggagctattcctatttgtccttcttggaacctccccctcagaactcaatagatttagcagctaattatacacagcagaagataggattgtagaactacatgacattagaaaatatccaaaatggattaaacctaccacccagagtttcaagaagctctgtgaagcccagtaggatgaatacacagaaaatacccagatacatcatggaagwactgaaaaccaaacagaatcttaaaagcagccacaagtggaaaagattaattatattcaaagcaacaacactaagatgaagatggatagtgggcttctcagtaataattactcaacctggaagacaatagaatggcacctttaaaatgttaaaagaataactaccaacctagaattc

SEQ ID NO: 199016 - DNA, 561 bp, Homo sapiens
tagtacttagggggattggtgtttttgggaataaaatgtgacatttatagtgaaaaaattaattgttgaaactgaatattactgtctccagtaatatkaaaggggatatttgcaatttcacatgttgcataaatgaattatttcacaaatttatttcgagattacatagtacttatacaggttgagcatcccaaatctgaaaactcaaaatttgaaatgcttcaaaattggaaactttttgagtgtcaacatgatgctctaagaaaatgctcattggagtattttggactttagatttttgcatttgagatgcttaacccgtaggtataatgcaaatattccaaaatcccaaaatatcccaaatatgaaacacttctggtcccagcatttctgattagagatattcaacctatatgtttaaaataaattttacacagttcccaaattattgttagggtcttatagtaaaaacaaataacaaaactctaaaacctcttattttaatggtatcttttctagatatttatgtaaacatgtaattattaattatagtgtgaaaaa

SEQ ID NO: 199017 - DNA, 591 bp, Homo sapiens
cgcctgccaccaagcctggctaattgttgtattttcagtagagatggggtgttgccatgttgtccaggcttgtcttgatctcctgacctcaggtgatccaccaccttakcctctcaaggtgctgggattacaggtgtgagccaccatgcacagcctgctgttggatttggatcgctagtattttgttgaggatttctgcatctatgttcatcagggatattggtctgtaggttgttgttattatgtccttgcctggttttggtattaggatgatactggcttcacagaatgattaagggaggattccctctttctcttttgaaatagtgtcagcaggattggtaccaatactttgaatgtctgacagaattcagctgtgaatccgtctggtcctagacattttttgttgataatttttttattaccacttcaacctcactgcttgttattggtctgttcagagtttctatatcttcctggtttaatctagcaggtttgtatatttccaggaatttatccgtctcctctaagttttctagtttatgcacataaaggtgttcatagcagccttgaataatcttttgtatttct

SEQ ID NO: 199018 - DNA, 397 bp, Homo sapiens
gaattcctcatgcataaatgtataaactcaaagctccagaaatctaatttccttttgtccatgtgattaggtatggcctaataaaattaggcttcaaaactagaaataacatgttatatattaaatatcrctttggttctataagaggaattaatataatatataaaattaagtaagtttaaatttaatgaaataaagtaataaaatagagctttggagctgaacatcttagagatcatctatcccattactcccaatctgggttttacgacatctacctatcctctctttattcatgcctcttctgagagcgtgaatgaaactctctcctccacttcctcacttctattatccagggtagagaatgcagacactgttttacaaaatggtcttgttt

SEQ ID NO: 199019 - DNA, 507 bp, Homo sapiens
ggattcaaatgattgtttggaggcattagccaggcattgaaccaattataaagagtgaggttttgccatattctaaccstaagaaacagaaacggtagagggtaaaaatagaatagaatgtcaatacaactttagccttttccctggattctgagagttcataacctgaaaatcagagattcaaactgggagagatgggctaacaggtatgagcatgggaaaagcatgtttcaagaatttgagatgtatttcccagaaaagcaacatgatgaaaatggtcagaaaaggcaatttccttcctcttttctaatttggctctggagccaccagcagaacctcttcaatatcttgcatgttacagatttcactgctcccaccagcttggagacaacatgtggttcttgacaactctgctcctttggggtaagttggactcagaggggacagttagaagggtacaggctgtggctgttgtgagtcaagagttttgtcttcctgtggtaactc

SEQ ID NO: 199020 - DNA, 400 bp, Homo sapiens
ctgtttttgtttcaaccaacttctgagatctggaaagggaagataagaaagggctgtgtacgcagttgccagtaaagattgcttttctttccaccaaagctaaagatatttgaggaactggatataggcctgagatttrgcagagctctgaggctggatgttgcaaggagaaaaaataggaagcccacagggccaagcttgggcctccttgtacctcctccactgtatacatacattttgggttcatatttttcaggctggctactactgcaggtctccagcagagtcttcacggaaggagaacctctggccttgaggtgtcatgcgtggaaggataagctggtgtacaatgtgctttactatcgaaatggcaaagcctttaagtttttccactggaatt

SEQ ID NO: 199021 - DNA, 400 bp, Homo sapiens
ctgtttttgtttcaaccaacttctgagatctggaaagggaagataagaaagggctgtgtacgcagttgccagtaaagattgcttttctttccaccaaagctaaagatatttgaggaactggatataggcctgagatttggcagagctctgaggctggatgttgcaaggagaaaaaataggaagcccacagggccaagcttgggcctccttgtacctcctccactgtatacatacattttgggttcatatttttcaggctggcyactactgcaggtctccagcagagtcttcacggaaggagaacctctggccttgaggtgtcatgcgtggaaggataagctggtgtacaatgtgctttactatcgaaatggcaaagcctttaagtttttccactggaatt

SEQ ID NO: 199022 - DNA, 530 bp, Homo sapiens
aggaaaatgggaacaaataaaattgcttgctgtccttctcyctttattctccacttcttgttttttctaaatgtggggtcaaaacttccatgagggtaagaagttcagttttctgcctttccccttcatctccctatcacacatgtatactactcaacacttagagaagattaaaaaaagaataaattgtggagagggagcatatgtgaaagtaaaagattcccagacataatatgggagttaatggagaaagaaaatctctaaggaagactagaaataattgggttagggattctcgagaagtaaattaaattccccaaatgtggtattctctgagaagataattttgaagaagcaatggcgtgatatccagtgaaacagcagtcctctggagcctggctgtgacttcaaggcccagttcttctggaagggcagaaaaatacttcgaagaggagaaatgagcatttatataggtttataagtaccatctttattttagaaaataatcattttctaccttgaattctagt

SEQ ID NO: 199023 - DNA, 530 bp, Homo sapiens
aggaaaatgggaacaaataaaattgcttgctgtccttctctctttattctccacttcttgttttttctaaatgtggggtcaaaacttccatgagggtaagaagttcagttttctgcctttccccttcatctccctatcacacatgtatactactcaacacttagagaagattaaaaaaagaataaattgtggagagggagcatatgtgaaagtaaaagattcccagacataatatgggagttaatggagaaagaaaatctctaaggaagactagaaataattgggttagggattctcgagaagtaaattaaattccccaaatrtggtattctctgagaagataattttgaagaagcaatggcgtgatatccagtgaaacagcagtcctctggagcctggctgtgacttcaaggcccagttcttctggaagggcagaaaaatacttcgaagaggagaaatgagcatttatataggtttataagtaccatctttattttagaaaataatcattttctaccttgaattctagt

SEQ ID NO: 199024 - DNA, 591 bp, Homo sapiens
taatttaaagagtttacttgagccaaagtgagcacagctgcccaggacacacttccaagttaactcagggagtgctcaatcagcttttgttacaagcaggtttttaaaggcaaaggtaagaagaagtggatggatacaaagttctttgatagaaattttcattggcttacagagatgacatggattagttattggttatacactgttgaactataggatatgagtcgtggtgtccagcatatgktattttatggctgcttggcatcagttagtctggagcccgtatagcaagtggctttacaagataatcactcaagggggagtgatgtgactgcagtttcattccaatgcctctccgagcctgataatttaaaggggctcacattcctcagataaaaagtttcttcttctttttttttttaatttcacaggtgcatgtgtgtgaaaaaactaccccaggaaagaaccacttgaaagcattagctagaacagtacccaacagtcacacagggctggaaatagtgccagttcccaaaaaaggagagcacaattcacaaggcatgtgatagagaacccagaagggtcttacct

SEQ ID NO: 199025 - DNA, 591 bp, Homo sapiens
taatttaaagagtttacttgagccaaagtgagcacagctgcccaggacacacttccaagttaactcagggagtgctcaatcagcttttgttacaagcaggtttttaaaggcaaaggtaagaagaagtggatggatacaaagttctttgatagaaattttcattggcttacagagatgacatggattagttattggttatacactgttgaactataggatatgagtcgtggtgtccagcatatggtattttatggctgcttggcatcagttagtctggagcccgtatagcaagtggctttacaagataatcactcaagggggagtgatgtgactgcagtttcattccaatgcctctcygagcctgataatttaaaggggctcacattcctcagataaaaagtttcttcttctttttttttttaatttcacaggtgcatgtgtgtgaaaaaactaccccaggaaagaaccacttgaaagcattagctagaacagtacccaacagtcacacagggctggaaatagtgccagttcccaaaaaaggagagcacaattcacaaggcatgtgatagagaacccagaagggtcttacct

SEQ ID NO: 199026 - DNA, 630 bp, Homo sapiens
acaagatataatttaaagagtttacttgagccaaagtgagcacagctgcccaggacacacttccaagttaactcagggagtgctcaatcagcttttgttacaagcaggtttttaaaggcaaaggtaagaagaagtggatggatacaaagttctttgatagaaattttcattggcttacagagatgacatggattagttattggttatacactgttgaactataggatatgagtcgtggtgtccagcatatggtattttatggctgcttggcatcagttagtctggagcccgtatagcaagtggctttacaagataatcactcaagggggagtgatgtgactgcagtttcattccaatgcctctccgagcctgataatttaaaggggctcacattcctcagataaaaagtttcttcttctttttttttttaatttcacaggtgcaygtgtgtgaaaaaactaccccaggaaagaaccacttgaaagcattagctagaacagtacccaacagtcacacagggctggaaatagtgccagttcccaaaaaaggagagcacaattcacaaggcatgtgatagagaacccagaagggtcttacctcaattaagacatggaaaatagaaaaacacta

SEQ ID NO: 199027 - DNA, 518 bp, Homo sapiens
atcagtcttttagagataattttaagcttatttatcatcaaaggatttcttcatagtcaatttccccttagactataaatccgcaagagatggcaaagctggaagaactgcctagaatttcagcaaacttgaattcaatagtctctctgttctttcctgttttggcacctacccttttcttccagttaagattggacacaatagaaaaataattaataaatgtaataaaaatgtaagcctggacgttttgctcacagtgttctcactgggtctaaattttgtgaatgtggttccttggatrgtctcatgggtatgcttgagactttaggcccttgggacacctggtgcacagaagggtcccaaaacccatctttggaagtgttggcagagtaaataggcaccagtaataaaggcaacggcgcctgaagacctaaggctggtttaaaccaaagcagatttttcaaaaccagagagggcttgtgttcataatttaataatttaatttttattttgatgaa

SEQ ID NO: 199028 - DNA, 566 bp, Homo sapiens
tctcttttcctttggtcattagagtcctagagaccaagaggatgttgggaaaagaattaccatggatcagctctcagaggcagtaggttctggactcatgctggctttgatacgtgtgcattggaaaagctcaagtaccyggcaatacttggagattaggaagaaaggatgaaaataaaccactgcactaaataacatgacaataatcacttatacaaaaattttaaagataaggaatatttaaagatttattagtttattatagctttatagttggagagtgaagaagaaaataccaaagctttttgtcttaacaaaatggtgcagacagattaacatatattgtcacctatgataaccagtcagcataaaaagtatttagaaaggaatggttatattctctaagagatatattctgatgtcatgttttttgctttagagtctattaatatagccacctttttgttaatgttttcagtcaagctccttttctcgcctttcatttccaacctttctctcactttctggtttagatacaactcctaaatatatcatatagttaattt

SEQ ID NO: 199029 - DNA, 445 bp, Homo sapiens
ggttctaggccacaagatcaaaaactccggtctcaaaatctaacaacccccagctggtaatctcacacatgytcagattttactttgtaaaagagaatcaagccacatcatataaaattaaacatttattatttttcttaatagtctaatagagatatacatttgtgtatattggccggaaattgggctaaaattttcacaaatggaaatcaagaatgttaccatagaactatcaatgccaactttaactatttgaatcagatggcatagcctagtttcctctacaactgacagcacactctttggtattttggtatttttcagtgtccttgaaatgtttaactacccactaaagaacaggtcacatggaattaataaacaaagggcttcagtttccatcaagcaccttcaagtgacaggaacagggatttaaataaaaggatct

SEQ ID NO: 199030 - DNA, 445 bp, Homo sapiens
ggttctaggccacaagatcaaaaactccggtctcaaaatctaacaacccccagctggtaatctcacacatgttcagattttactttgtaaaagagaatcaagccacatcatataaaattaaacatttattatttttcttaatagtctaatagagatatacatttgtgtatattggccggaaattgggctaaaattttcacaaatggaaatcaagaatgttaccatagaactatcaatgccaactttaactatytgaatcagatggcatagcctagtttcctctacaactgacagcacactctttggtattttggtatttttcagtgtccttgaaatgtttaactacccactaaagaacaggtcacatggaattaataaacaaagggcttcagtttccatcaagcaccttcaagtgacaggaacagggatttaaataaaaggatct

SEQ ID NO: 199031 - DNA, 559 bp, Homo sapiens
cttttgtcgcccaggctggagtgcaatggtgcgatgtcagctcactgcaacctccacctcccgggttcaagcgattctcctgtcagcttagcctcctgggtaggtgggattacaggcgcccgccaccaagcccggctaatttttttttttttttttktgtatttttagtagagatggggtttcaccatgttggtcaggctggtctggaactcctgacctcaggtgatccgtccgcctcggcctcccaaagtgccgggatttcaggcacgagccaccgttcccggcgattttcttttctttaagactaatctgaaagtgcggaactctgtgtacctgaaatgattacattttgatattgacatgaaaaaattgggtactactttgccccagtttctcaacccaacaaagacattccaaaagtttcctatggggcctaggaaggttggccttcacaggatagtggcaggagtgttaactttgtcctattaccaaaaggtgtcaaagctgttactaaattgtctgtgtcagtatcggaaaccccgacagcactggagaattc

SEQ ID NO: 199032 - DNA, 438 bp, Homo sapiens
cataccatgcagcttctaagaggaccgartgccttcactggaatagtgaatctccttctgtggacatggacagggaacggctcgataaagcccagattcacaaaattccgcccacaccccgtgcccccgggaattttggcttaggggcaggatatgggggttaccactgtgctagtggaggtggcgcggggactgaacggcagccccagcgcagttctccccacgtttgtccgcagaaccccggcgaggccgaggtggtcatttccctccctagccggatggccgcgccgggtgaggccggtttgggcgcgaagcacgggcgtgtggcgctccacttccgcaaaggccagccgcgctcaggaccgcgagccctgagcgtccccctagtgacccctggcctcgtgcccgacgccccgtctctcctgccccggccccccc

SEQ ID NO: 199033 - DNA, 589 bp, Homo sapiens
tagtcataagtagcatacctgggatccaggtagtgagctgttgctctctgtattgttcttgttggttatggattcaggactccaccctatgggcacatgtccctacccagaagacacccttggcctaggggatggagtataagggagatggctacactttagtcaggagtaagctgaggcagccttctggggaagcatgactcagcaagtttggagcacaggtgccaaccttacacattatgtaaccatgccacatgaggcacattaggtaaccactcatgggagctcatggttggctcagagccactattgtctgtaaaaggtataattaccctgctaatgctgtacatacagcttgtgaccagagagagaataaagccatgttgcaactacctatgattyctccagtgtttatccagctacccaccaccaacccactgactccccttggacctcggcttgggctcaaacctgaaaacacggttaacagagaacttcacattaagacctatttacctcacttccttttgctcaatacaacattgaaaaaaatatataaaaggaaattgccaggcacactagaagacaa

SEQ ID NO: 199034 - DNA, 627 bp, Homo sapiens
ccagctacccaccaccaacccactgactccccttggacctcggcttgggctcaaacctgaaaacacggttaacagagaacttcacattaagacctatttacctcacttccttttgctcaatacaacattgaaaaaaatatataaaaggaaattgccaggcacactagaagacaagaacaaaaacctataatttcaagagacaaagcaaatataagaaacatatatgacacaaattttggaattatagcacagcagatttaaaataactgcaatagcacaaattattatcagaaatgaaagagcagacatcactacagatcccatggacattaaaatataatacaaawatactatgaacaacactgtgtccacaaatttgatactctagatagtattgaccaattatttgaaggacacaatctgccaaaactcatacaatgggagatagacagtttgaataacatgtatttattaaagaaattgaagaaataattaattaccttccaaaaacaaaaacaccagacccagatggaagcagtggtgacttctacaagatgtttaaggaagaaattataccaactcttataatctttttcagaagatactggaagagagaatactttttaa

SEQ ID NO: 199035 - DNA, 627 bp, Homo sapiens
ccagctacccaccaccaacccactgactccccttggacctcggcttgggctcaaacctgaaaacacggttaacagagaacttcacattaagacctatttacctcacttccttttgctcaatacaacattgaaaaaaatatataaaaggaaattgccaggcacactagaagacaagaacaaaaacctataatttcaagagacaaagcaaatataagaaacatatatgacacaaattttggaattatagcacagcagatttaaaataactgcaatagcacaaattattatcagaaatgaaagagcagacatcactacagatcccatggacattaaaatataatacaaaaatactatgaacaacactgtgtccacaaatttgatactctagatagtattgaccaattatttgaaggacacaatctgccaaaactcatacaatgggagatagacagtttgaataacatgtatttattaaagaaattgaagaaataattaattaccttccaaaaacaaaaacaccagacccagatggaagyagtggtgacttctacaagatgtttaaggaagaaattataccaactcttataatctttttcagaagatactggaagagagaatactttttaa

SEQ ID NO: 199036 - DNA, 605 bp, Homo sapiens
gtataaaaatgtaaacagaaaatattaatgcaagaatgcaaaagtaatgaggttcttccagcttttattatcagctcttcaatcttgactatatgttagctctgtcaccatttcatgtagctaaacctttttcttcctaaggattcaacattgaacatacagttttaataaacggcatctgttttcccttttattccccagtttcacaaagacttctaagctttggaaatgtgtgtgtacctaggaactggagatcaaaggcataagaagatattcctctaatatttattagattttattgcttaataaccattttggaccaayacagaacaaattactttcttattgactaatttatcttaattgcccaactttaaaattacatggtatctttaaaaaactttaaacaaaatagcttaaaaagtaacttctaacatttatgcaacacatcatactatttttaaaatttagtatatgagaatattattcaataaattaatcttcattaaagttaatctgaatgtgtttatcttaacaaaatatacatgtacttataaaaaattacatagtaatattttgttatccatggagaattttttttccag

SEQ ID NO: 199037 - DNA, 450 bp, Homo sapiens
tggtccacatgttgtagtgtgctgatttctgatcaagaacatggtattttcctgtttaaaattacagtatttgtaacatatttagctaacatccaagttttggacatgaagtatttgcacataaactgtacacatactcccatatacattaaatcatctctagattacttataatacttaatacaatgtaaatgctaagtagwtagatcttatactgcaattgtttacattacttgtgttacagtgttgttttcatttatttttaaaaatattttttattcacagttgattgaatgcatggatgaagaatgcatagatatggagggctgacagtgttgataatttttcttttttaattttaggtttgaggatacatgtgaaagtttgttacacaaataaacgtgtcatcggaggggggttgttgtacacatgattacatcatccaggtat

SEQ ID NO: 199038 - DNA, 613 bp, Homo sapiens
agtctgtatacacatttatgtcaggttaattcccttttcatacaaagttgatgagcatatgtgccgtttcttaccaactgatggcacttcacttagctttgtcctttggagacgatcagcactgtcttcgagggacccccatgtgtggagctgtagtgctgcagcagtccaacatattaggctgattcatgcaataamcagacctgagaattttcccgttttgaagctgattaaagggacccatccccaaaaggtcattgctataagttgagtgagaggcaaaaaatgcagcaaaggtaggtgatttgaggcagtgagctatcgattcacatacttataccctctggaccagcaagcttggacctaatttcaagtctactatttccatcataaaatggatttgtactcctcataacttggtagataggataatacccagataatgatgcagtgctctgttttcatggttacttgacctcagacagagctcaatagcatacaagtagctaattttcaaatggtgagtagttctttgggacagaaagcctattctccctctagattctagggatccatactgatatttcgtataacattatgctggtgatttctt

SEQ ID NO: 199039 - DNA, 560 bp, Homo sapiens
ccaagaaccccaggtcagagaacaagaggcttgccgccatcttggaagtagcctgctaccatcttgggagctctaagaacaagaaccccctggtaacaaaaccagtgaggaaactgagattcaaggacagrgcacagattgttaacatcagagcttaggcaaggaagcttttattcgattattcagcatgctttgctagatgttgtagaagcagagacacatcagatgcaatcctattgtattaggctgttcttccgtagctataaagaaatacctgagactaggtaatttaattggcctcatctccaggcctcatctccagcattggggattacaattcagcatgagatttgggcagggacaaatatccaaactatatcattccaccctggcctatcccaaatctcatgttcttctcacattgtaaaatacaatcatgcctttccaacagtcactcaaagtcttaactcattccaacattaacaaaaattccaaagtccaaagcctcatctgagacaaggcaagtcccttccacctatcagcccatgaaatcaaaaaca

SEQ ID NO: 199040 - DNA, 560 bp, Homo sapiens
ccaagaaccccaggtcagagaacaagaggcttgccgccatcttggaagtagcctgctaccatcttgggagctctaagaacaagaaccccctggtaacaaaaccagtgaggaaactgagattcaaggacagagcacagattgttaacatcagagcttaggcaaggaagcttttattcgattattcagcatgctttgctagatgttgtagaagcagagacacatcagatgcaatcctattgtattaggctgttsttccgtagctataaagaaatacctgagactaggtaatttaattggcctcatctccaggcctcatctccagcattggggattacaattcagcatgagatttgggcagggacaaatatccaaactatatcattccaccctggcctatcccaaatctcatgttcttctcacattgtaaaatacaatcatgcctttccaacagtcactcaaagtcttaactcattccaacattaacaaaaattccaaagtccaaagcctcatctgagacaaggcaagtcccttccacctatcagcccatgaaatcaaaaaca

SEQ ID NO: 199041 - DNA, 560 bp, Homo sapiens
ccaagaaccccaggtcagagaacaagaggcttgccgccatcttggaagtagcctgctaccatcttgggagctctaagaacaagaaccccctggtaacaaaaccagtgaggaaactgagattcaaggacagagcacagattgttaacatcagagcttaggcaaggaagcttttattcgattattcagcatgctttgctagatgttgtagaagcagagacacatcagatgcaatcctattgtattaggctgttcttcygtagctataaagaaatacctgagactaggtaatttaattggcctcatctccaggcctcatctccagcattggggattacaattcagcatgagatttgggcagggacaaatatccaaactatatcattccaccctggcctatcccaaatctcatgttcttctcacattgtaaaatacaatcatgcctttccaacagtcactcaaagtcttaactcattccaacattaacaaaaattccaaagtccaaagcctcatctgagacaaggcaagtcccttccacctatcagcccatgaaatcaaaaaca

SEQ ID NO: 199042 - DNA, 451 bp, Homo sapiens
attacattcctgctgtgagattgagaaactggtttgygacaaacactatgggttgactgaatgcaatattcttaacccagtttaatgcttgtttatcaaattctcctgcagctagtaatgaccatgtgatctattcaccaatcagacatcaagcagaatatggctggagaggtgtgtaaaaatagtgatttttctaaggataaagaatgtatggcatatacaaggaagagaaactttaatcttcctttgaagtttgaaacaaactaatctctcaaactaattattatttagctaaaattgataccataatcttttctgtaagaaaacaaataaaccttagggatgaggaatgacgagtacaatttaagtagaggcagagtcagtgagccaacatcatagcaaatcacataaacaccttgtactgatactgttattgttactattcaattca

SEQ ID NO: 199043 - DNA, 448 bp, Homo sapiens
acataattacattcctgctgtgagattgagaaactggtttgcgacaaacactatgggttgactgaatgcaatattcttaacccagtttaatgcttgtttatcaaattctcctgcagctagtaatgaccatgtgatctattcaccaatcagacatcaagcagaatatggctggagaggtgtgkaaaaatagtgatttttctaaggataaagaatgtatggcatatacaaggaagagaaactttaatcttcctttgaagtttgaaacaaactaatctctcaaactaattattatttagctaaaattgataccataatcttttctgtaagaaaacaaataaaccttagggatgaggaatgacgagtacaatttaagtagaggcagagtcagtgagccaacatcatagcaaatcacataaacaccttgtactgatactgttattgttactat

SEQ ID NO: 199044 - DNA, 429 bp, Homo sapiens
tgtgagattgagaaactggtttgcgacaaacactatgggttgactgaatgcaatattcttaacccagtttaatgcttgtttatcaaattctcctgcagctagtaatgaccatgtgatctattcaccaatcagacatcaagcagaatatggctggagaggtgtgtaaaaatagtgatttttctaaggataaagaatgtatggcatatacaaggaagagaaactttaatcttcctttgaagtttgaaacaaactaatctctcaaactaattattatttagctaaaattgataccataatcttttcygtaagaaaacaaataaaccttagggatgaggaatgacgagtacaatttaagtagaggcagagtcagtgagccaacatcatagcaaatcacataaacaccttgtactgatactgttattgttacta

SEQ ID NO: 199045 - DNA, 429 bp, Homo sapiens
tgtgagattgagaaactggtttgcgacaaacactatgggttgactgaatgcaatattcttaacccagtttaatgcttgtttatcaaattctcctgcagctagtaatgaccatgtgatctattcaccaatcagacatcaagcagaatatggctggagaggtgtgtaaaaatagtgatttttctaaggataaagaatgtatggcatatacaaggaagagaaactttaatcttcctttgaagtttgaaacaaactaatctctcaaactaattattatttagctaaaattgataccataatcttttctgtaagaaaacaartaaaccttagggatgaggaatgacgagtacaatttaagtagaggcagagtcagtgagccaacatcatagcaaatcacataaacaccttgtactgatactgttattgttacta

SEQ ID NO: 199046 - DNA, 448 bp, Homo sapiens
acataattacattcctgctgtgagattgagaaactggtttgcgacaaacactatgggttgactgaatgcaatattcttaacccagtttaatgcttgtttatcaaattctcctgcagctagtaatgaccatgtgatctattcaccaatcagacatcaagcagaatatggctggagaggtgtgtaaaaatagtgatttttctaaggataaagaatgtatggcatatacaaggaagagaaactttaatcttcctttgaagtttgaaacaaactaatctctcaaactaattattatttagctaaaattgataccataatcttttctgtaagaaaacaaataaaccttagkgatgaggaatgacgagtacaatttaagtagaggcagagtcagtgagccaacatcatagcaaatcacataaacaccttgtactgatactgttattgttactat

SEQ ID NO: 199047 - DNA, 473 bp, Homo sapiens
acccttcagaactggtgctttgccttccattggggaacctataggtgagcttcttcatcttgggcccccctccgtggctgagcagggagctcagaccactgtgcattccacagatcagcccattacctgaggcaacagagagcttctcccagtaattaaggatcaattatatacacatccacattggctgtagccagttcttacccataagaaccacccactggcctatgacataagcttccagaaatctccaccattttagcccttcargatacagtgagcctgttcaaacatccagtacattgttgctacaatcagcatttgggaaagccaccatacaaaggctatttacaacgaaggaacttatacagactctttgccactgaaagcatccagaaccaaagccaaaggactctatacagcatacattatagacacctccttgagaaggaaaagagcctcatccaaacaaa

SEQ ID NO: 199048 - DNA, 418 bp, Homo sapiens
aaggatttacttccatcacttcaacttcctcttatatgatmatttctcccgaatttatgtatcaatcttggcatttctcttatgtgtcaaactcactcaggtgtttctgctataacacaatatttgggttactgaacacacttcataattcataaaatcacgcattgaaagtaacaggacttaaggtaaaactgtgactgaagtggactactaaaaagctatattactttgtaccagggcactaacaaaataataaaaatagctagcagtttaaaagagatgtcaaattcccaataaataaagtattccagaaaatgtaacatttggccttaaaaatggtagaggcaattttacagtagtataagaaaaggttgactttgctgaattatggagacatcaaaacttacaaacatagtag

SEQ ID NO: 199049 - DNA, 418 bp, Homo sapiens
aaggatttacttccatcacttcaacttcctcttatatgataatttctccygaatttatgtatcaatcttggcatttctcttatgtgtcaaactcactcaggtgtttctgctataacacaatatttgggttactgaacacacttcataattcataaaatcacgcattgaaagtaacaggacttaaggtaaaactgtgactgaagtggactactaaaaagctatattactttgtaccagggcactaacaaaataataaaaatagctagcagtttaaaagagatgtcaaattcccaataaataaagtattccagaaaatgtaacatttggccttaaaaatggtagaggcaattttacagtagtataagaaaaggttgactttgctgaattatggagacatcaaaacttacaaacatagtag

SEQ ID NO: 199050 - DNA, 491 bp, Homo sapiens
ggcaggggcattgctcataaatggaacagagtctctagtaacttctaacatcaagtttcaacagttaataagcatgacaatgagaattaagtttgtgatagaccacctgtggatgggcaaagytgtggaaatatttggagtgaaaggaaaccacaacagaaacacactttctttcttttttttctttatcacaaggtctggctgtatcatccagacttgagagcagtgttgcaatcttggctcactgcaacctctgcctccctggttcaagtgattctcatgcttcagcctcctgaacagctggagttacaggcatgtgccaccatgcccagatactttttgtatttttagtagagacgatgttttgacatgttgaccagggtggtctcaaactcctggcctcaagtgatctgctcaccttggcctcccaaagtgctgggattacagctgtgagccacctcgcccagcccacactttcttaatagctcaca

SEQ ID NO: 199051 - DNA, 581 bp, Homo sapiens
tggcttttctgaaatacgaccctggctagaattgcagactttgtgtttgtaattatctgaagagtttgccctcaagagtaagatatgctactggcaaaccacacagcagttgagctgccttctagagttgcgtgcactcctctccaactgacatcgtcttcatttctggccccaactcatccggatgtgatcagatgcctgccatctagaagatataaagaacaactttatgccgtgtgtgtgtgtgtgtgtgaacttaattcagtatttatatgctaactgatggacaaaacagaacttttttaaaaactttaaaatatgagaactgcactagtttagaagagcttttacatctctttcagcttcttttctccatggtcacccttcaattctgcagtccatactgcttcagtgaaagtgttacmcacaaagctactaataatgacttcttagaaaatataatggataagtttgtagtttttacatgacttgaactcttgagaatatttacaaacactgaccattttatcctttttttaaagctttttatttggagacatcataatttcctatcttatttc

SEQ ID NO: 199052 - DNA, 468 bp, Homo sapiens
tacagacatgttaacagacttaacattttttttcaataaatggaagaattgatatacctccctaataaagatgtatatgaaaactcgcaaaagagagttccaaagtcttcacttcttactaagaaaacaaacaaaaagaagccaaaggcttcaaattatattatcctacaaagctctacatgatctgatcctcccattctttacctattttttattattttcctatgattatttcttttgcttgctccaacatagcagtttttgcctttgttaaatacaccaggcattgcgtttamgatagccatttctgttgctgttcccctgactaaaaggctgtcctacagatgtctgcataattttctcttccacaacttaaagactctacttaaatcttagcatctcaatgaggttttccttggctgactatttaaagttgcaactcattcccatcaaacctcaaacaaatac

SEQ ID NO: 199053 - DNA, 340 bp, Homo sapiens
tacaaatttgttgggagtttttgtcatgaagaaatgttgaattttattgaatgcttttttggcatctattgaaatgttcacatattttgtccttgattstgttaatgtaatatgtatgtttattaatttgcatatgttgaaccatccttgcatccctgagagtatcccacttgattatggtgaataatctttttaatgtgttgttgaatttggtttgttagtgtttttctgaggatttttgaagcagacacaaataaaaggaaagctattccatgttcatggattggaagatgtattagtccattttcatgctgctgatagacatacctgaggctgggta

SEQ ID NO: 199054 - DNA, 594 bp, Homo sapiens
atattacccaaagtgatctacagatttagtgcaaaccctattaaaataccagtgacatccttcacagaaacaggaaaagcaatcttaaaatgaacatggaaatgcaaaagatcccagatagccaaagcaaccttgagcaaaaagaacaaagctgaaggcatcatgctacatgacttcaaaatatactacaaggctataataacaaaaataacatggtactggataaaaaagatgcatagacaaatgaaacctgaatggagaacccagaaataaatctatgcatttacagtcaacagatatttaacaaaggcatgaagtacagatattgggggggcggggamtttctttaataaatagtgctaggaaaactggatatccacatgcagaagaatgagactagattcctatctctcactatatacaaaaatgaattgtaaatgacttaaagacttagatgtaagatcccaaactattaacctactatgggaaaacacaggggatatggttcatgaaattggactcgtcaaaagattttttaaaataagacctcaaaagcataggaaacagaagcaaaaattagtaatattggattac

SEQ ID NO: 199055 - DNA, 594 bp, Homo sapiens
tggtgtctcccaaattttttcactgttarcatttttccttttgtaattaatacgtattcagagtgagatacgttaaagctattaaatgcactgtttctcagacttttgttttctgatttcagcatttgtcttctgatcagcatttactgctggatcttgcctccaatgattactacattgctctaatggtgatattatgtttcctttacttttatatttattaattgaaattcatctataagaaggagttgaccctttttcttcccaattatctttaaatacatttaacaacaggaaaaaattcctatctcccccacatttatccattttggcactcatttctttgcatagatccgtgttttcatatggaatagcttttcctctgctcgaagaaaatcgtttgccatttcttacagtgcagatatgcaaagaacacattcttttagctttgttgttccgaagactttttttatttggactccagtgaaagatattcaccatgcaaagcattctaggctggaagttttattctttcagccctttaaatatgttttttccatcttattctggtttggatagtttatgaagaaaagt

SEQ ID NO: 199056 - DNA, 459 bp, Homo sapiens
catattccctttctcatgtctggttgtaggatgaactagagctgtaaaattcttcataggtaacatagaagtgatttgccctttaaagccttccatcttaatgtagtatagtgtagctgttcgcacagatagagtctaaagtcaggctgctgggaaagggaaggaaaaggaggaaagagataaagaaggggaatgaaaaragaggattatttggtagacaaatgacaagtttaaattaaacatataaagcatatgttttgtttctccaccttcctttctttaaaatggcttcattttctgagttttggtgaacataatttcttttccactttgaatgcctcagaaagcaataatcttcatagtctcaaagccaagctttcaagcactgacatctgtctttgtagttaaggtgttcacagaattgctgttagacacacaaatgaatagatgcactcacac

SEQ ID NO: 199057 - DNA, 459 bp, Homo sapiens
catattccctttctcatgtctggttgtaggatgaactagagctgtaaaattcttcataggtaacatagaagtgatttgccctttaaagccttccatcttaatgtagtatagtgtagctgttcgcacagatagagtctaaagtcaggctgctgggaaagggaaggaaaaggaggaaagagataaagaaggggaatgaaaaaagaggattatttggtagacaaatgacaagtttaaattaaacatatraagcatatgttttgtttctccaccttcctttctttaaaatggcttcattttctgagttttggtgaacataatttcttttccactttgaatgcctcagaaagcaataatcttcatagtctcaaagccaagctttcaagcactgacatctgtctttgtagttaaggtgttcacagaattgctgttagacacacaaatgaatagatgcactcacac

SEQ ID NO: 199058 - DNA, 459 bp, Homo sapiens
catattccctttctcatgtctggttgtaggatgaactagagctgtaaaattcttcataggtaacatagaagtgatttgccctttaaagccttccatcttaatgtagtatagtgtagctgttcgcacagatagagtctaaagtcaggctgctgggaaagggaaggaaaaggaggaaagagataaagaaggggaatgaaaaaagaggattatttggtagacaaatgacaagtttaaattaaacatataaarcatatgttttgtttctccaccttcctttctttaaaatggcttcattttctgagttttggtgaacataatttcttttccactttgaatgcctcagaaagcaataatcttcatagtctcaaagccaagctttcaagcactgacatctgtctttgtagttaaggtgttcacagaattgctgttagacacacaaatgaatagatgcactcacac

SEQ ID NO: 199059 - DNA, 440 bp, Homo sapiens
actaatattcttactgaaaatagattctgtaatcaaatatatataaatcaaatccataagatattacattataaccaagttgtgtttatgctagtaatgtgagatacatttgtcatctgaaaatcaataacattcactgtattaatcaatggaaaaaatatgattatcaaaatagatgccataaaatcatttcagaaaatttaacaaccatgggagacttctattctataacttcaagagttattatagaactacarttttcaaaactgtgtagcagtagcataacaataaattacaagaatgaaagagaagagcccacacatagggttacacttctaccgtgtttgatattttagcaatgaattcaaaacaatcctatgagccaaaaactgtcttttcaagtataatattggaaaaattggacattcatatgggttaaa

SEQ ID NO: 199060 - DNA, 340 bp, Homo sapiens
gaaatgcaaattaaaaccacagtgaaattccattacacaaaacctagaatagttgatactaaaaagtaacaacatcaaatgttgacagctacgtggaatactcctgcctaatagtagtttctacaataatgaaaaggtctgtatctgtgttgtctaataaagtagccactggctacctgtgggtatcgagcacttgcaatgtgtctagtgtgactgaggaactacacttttaatattatttgattaaaagcaatttaaatttaaatagcttatatgtaaayagttgaacaactagaattacaatttatatataaaaatcagaaattatttaaactaaatg

SEQ ID NO: 199061 - DNA, 340 bp, Homo sapiens
gaaatgcaaattaaaaccacagtgaaattccattacacaaaacctagaatagttgatactaaaaagtaacaacatcaaatgttgacagctacgtggaatactcctgcctaatagtagtttctacaataatgaaaaggtctgtatctgtgttgtctaataaagtagccactggctacctgtgggtatcgagcacttgcaatgtgtctagtgtgactgaggaactacacttttaatattatttgattaaaagcaatttaaatttaaatagcttatatgtaaacagttgaacaactagaattacamtttatatataaaaatcagaaattatttaaactaaatg

SEQ ID NO: 199062 - DNA, 603 bp, Homo sapiens
gactgggggatatgagcattatcttccttgatgattacattttaaagggatgactcccagatacttgggaaagacattcctgacttgcaaactggtaagaagcttctaaaaagatttccatttcaaaggggcagagacagaattttaattataagttttctaaagcaaacgctgtaagaaaattgaagtcaggggtctagagtcatggaaaagactatctaaagtttaaccaagccgagcccagcattaaggccttctttgtcaatattaaataataataattatcattactttttataattaattttatatgtttgttttaattctattttaagtacatttaccatttaaacagttggtgatttctatatgaacagacagatatttctctggttaggttcataagtaaacagtctgaggcaaaagcttatagttaaggatttatttctaactatacttayaatagttaagtatagttaagctatacttacaattatagcttaactataagctaagtacaattaagctatacttataattataacttaactataagctaagtatagttagctatactctttagtataaggattatagctaact

SEQ ID NO: 199063 - DNA, 554 bp, Homo sapiens
gaattcgtccctgccccagcttcaagctccactaagaaggctacgtaacaggtttgaagctgagactcagaggcttccaccatttgcccaaagtcccgcagtctgcccaggcctgggccagaggacagcaattcctcaaggacgaaaacaaactgcaaggcggatcacagctgggggagattctcctgcacctgctgtctcccttgggaaaaacagccagttgggtctggaaaggataaataggttcagcttttgaccttcacattgtttttccctcatttggtwaattcataaaatatgtgtagtggatcctcggtgggggggcaggccctgcacctggtgctgggggtcaacgtgaacagtgaccagggccctgttcagcccagcgcagggcacaggcaggttctgagtccggatcatggcgatgagggcggggcttcaggcctggtcagaaccactagcgccggctctgcagggcttcgactgctaaggtgccaacacctacactgcagctggctccttgacatccctaggcttctatgcttttgttttca

SEQ ID NO: 199064 - DNA, 566 bp, Homo sapiens
ttcaagctccactaagaaggctacgtaacaggtttgaagctgagactcagaggcttccaccatttgcccaaagtcccgcagtctgcccaggcctgggccagaggacagcaattcctcaaggacgaaaacaaactgcaaggcggatcacagctgggggagattctcctgcacctgctgtctcccttgggaaaaacagccagttgggtctggaaaggataaataggttcagcttttgaccttcacattgtttttccctcatttggttaattcataaaatatgtgtagtggatcctcggtgggggggcaggccctgcacctggtgctgggggtcaacgtgaacagtgaccagggccctgttcagcccagcgcagggcacaggcaggttctgagtccggatcatggcgatgagggcggggcttcaggcctggtcagaaccactagcgccggctctgcagggcttcgactgctaaggtgccaacacctacactgcagctggctccttgacatccctakgcttctatgcttttgttttcatcatatgtgtgtcaggatatttaaatgaattc

SEQ ID NO: 199065 - DNA, 487 bp, Homo sapiens
ttacttattactatctctccatcataaagacttttactgtttgaatggcagggaagtcctagattcaaattgccttcacctcratattgagaacaatatgtagtgaataagtagttacatacacaggtatagttattagggcttcttttatcatttggtatgcagcataatttaaataatcacagaaaagatttcctctcacattagtaatttctagcttagtaatcttatgagaaaaaataaatcttataatgagaaaaacaattacaaatatacaaattattcaaataatttaccatcagtcttaaaattgcccctgtaaatttgctttttcgaaatcctgcatgtcacttaactgggctattactaatcaaatattaaagatcaatgattgcaagagaattatcctaaactatctgatgaaattaaaatcctttttataatgcagttcaagctttttggtaaaagcatatgaacatgttgagag

SEQ ID NO: 199066 - DNA, 487 bp, Homo sapiens
ttacttattactatctctccatcataaagacttttactgtttgaatggcagggaagtcctagattcaaattgccttcacctcgatattgagaacaatatgtagtgaataagtagttacatacacaggtatagttattagggcttcttttatcatttggtatgcagcataatttaaataatcacagaaaagatttcctctcacattagtaatttctagcttagtaatcttatgagaaaaaataaatcttataatgagaaaaacaattacaaatatacaaattattcaaataatttaccatcagtcttaaaattgcccctgtaaatttgctttttcgaaakcctgcatgtcacttaactgggctattactaatcaaatattaaagatcaatgattgcaagagaattatcctaaactatctgatgaaattaaaatcctttttataatgcagttcaagctttttggtaaaagcatatgaacatgttgagag

SEQ ID NO: 199067 - DNA, 563 bp, Homo sapiens
tcaaagggagtcagtctatagaaatatcaatcaaccagagaaaaagtccactcactacacagagggaggaaattgttccaattgrtaagcagtgttcagcacaataaaaagaagtgagtctaagcagaacaccctgacttacattaccttaatttaactattggagaattgaaataggaaaaatgaacggtacatctaaactgtggtaagactgaataagctggaccaaaatgtttgaatatacttctacttccaagtgatgtggaagtagagagacctaagtgctatgtgaaacaatatcatattattttagttaggtaattgttaccctgaggcttgaacgatccatagagatatttcataatgaatttgaagttctgagtaaatttggatatttttaaagcattttttcactaacatcgaagtgaatttagtgtttccctcaaatatgaatgttggcaacaaaccatgactattagctgtatctgttaattttcaccagccaaaattacaggtatttctcaatcacatcatagctgctgcaagtatcttgacataacatt

SEQ ID NO: 199068 - DNA, 247 bp, Homo sapiens
aatatgtgacttgcctttgaattgcctaaactgtgcctttcacagagcaagacttaaacatgtttaaataaactccgatttatgaaatytttatttaaaaattcatagccttggtgttgtatctacacctcattgctaacacaaagttgcacatatttttctttttctttttccggaagttttataattttacatattgaatttagagctatgatttattttgtgttaactttgtataagatgtgaa

SEQ ID NO: 199069 - DNA, 585 bp, Homo sapiens
gggttttctagatataagatcatgtcgtctgcaaacagggataatttgacatcctttcttcctttttggatgccctttatttctttctcttgcctgattgccctgaccaggatttccaatactatgtttaataggagtagagtttccaaagttatttctgctattgatttctaatttcagtccattatggccagaaaagatgcttgacataaattctgtttttgtaaatttgttgagacttgttttgtgcctaacatgttatctatcttagagaaagtttaatgtgttggtgagtggaatgtgtattgtgcagctgttggatggaatgttctgtaaatgactgttagaaccattttatctagaatgcaatttttttttttttgagagagtcttgctctgtcacccagactggagtgcagtggcatgatcttagctcactgtagcctcygcctcctgggttccagtgattttcctgctacggtgcaatttaaatccactgtttgtttgttgattttctgtcaggctgatctctccattgctgaaagtgaggtggtgaatttccctactattattagattgaagtct

SEQ ID NO: 199070 - DNA, 558 bp, Homo sapiens
tcgtctgcaaacagggataatttgacatcctttcttcctttttggatgccctttatttctttctcttgcctgattgccctgaccaggatttccaatactatgtttaataggagtagagtttccaaagttatttctgctattgatttctaatttcagtccattatggccagaaaagatgcttgacataaattctgtttttgtaaatttgttgagacttgttttgtgcctaacatgttatctatcttagagaaagtttaatgtgttggtgagtggaatgtgtattgtgcagctgttggatggaatgttctgtaaatgactgttagaaccattttatctagaatgcaatttttttttttttgagagagtcttgctctgtcacccagactggagtgcagtggcatgatcttagctcactgtagcctccgcctcctgggttccagtgattttcctgctayggtgcaatttaaatccactgtttgtttgttgattttctgtcaggctgatctctccattgctgaaagtgaggtggtgaatttccctactattattagattgaag

SEQ ID NO: 199071 - DNA, 334 bp, Homo sapiens
gaaagattatatactatcattaaagtaatggattattctgaacttgattatgagtttacctctaccactgagttttatacttttatatgattttatagtgattaacatctcttcacttctgtttgacgctcttctacaatactcagtcttccattattcccaactckgcccccactccccaccgcttgctgcttccagtgtattttttatcttagaaattatagttttcttctctcaaaatttggagaaattttcatctcttttatgttgcaacacattctatctttcctttagcttttttaatttatggcatatagttctaataactgtcctt

SEQ ID NO: 199072 - DNA, 541 bp, Homo sapiens
gatacaaaatgaacatacaagcaatcgtggcatttctttaaaaaatttaaaaagaaatttcaatagctttatgggtacaagtgttttttggttacagggatgaattatatataatggtgaattctgggattttagtgtayctgtcacctgagtagtgtacattatacattagtagatcatttttcattcctcaacaccctcctaccctcccaccttctgagtctccaatgtccaatatacctgtcttagcttatttctcacttgtaagtgagaacatgtggtatttggttttccattcctgagttattttacttagaataatgagctccagttccatctaagtttctgcaaaatacattattttattcttttttatggctgagtagtgtgtgtatgtaaatgtggtgtatatatatctatatatctctctatatatactaatacaaatacataaaatgtaatgtgtgtatatatatgtgtgtgtatattttatatatatatataactttttaaaaatccactcaatagttgatgggcacta

SEQ ID NO: 199073 - DNA, 541 bp, Homo sapiens
gatacaaaatgaacatacaagcaatcgtggcatttctttaaaaaatttaaaaagaaatttcaatagctttatgggtacaagtgttttttggttacagggatgaattatatataatggtgaattctgggattttagtgtatctgtcacctgagtagtgtacattatacattagtagatcatttttcattcctcaacaccctcctaccctcccaccttctgagtctccaatgtccaatatacctgtcttagcttatttctcacttgtaagtgagaacatgtggtatttggttttccattcctgagttaytttacttagaataatgagctccagttccatctaagtttctgcaaaatacattattttattcttttttatggctgagtagtgtgtgtatgtaaatgtggtgtatatatatctatatatctctctatatatactaatacaaatacataaaatgtaatgtgtgtatatatatgtgtgtgtatattttatatatatatataactttttaaaaatccactcaatagttgatgggcacta

SEQ ID NO: 199074 - DNA, 501 bp, Homo sapiens
aatttccttctttcctgttcctcaccctgatcacgcttgatttattgatggcggttccaccaggcctaatggccacacaccagcaaaggcaggytatgctatagtacaagccactagcccgcctcttagaacctctcatttcctttccatcctggaaatctatcctcaaggaaataacttctcagtgttccatctgctattctactactcctcagggattattcaggccccctcccttccctacacatcaagctcaaggatttgccccacccaggactggcaaattagctttactcaacatgccctgagtcacataactaaaatacctcttagtctaggtagatactttcactggataggtagaggcctttcctacagggtctgagaaggccaccacagtcatttctcccgttctgtcagacataattcctcagtttagccttcccacctcaatacagtctgataacagatgagcctttattagtcaaatcagccaagcag

SEQ ID NO: 199075 - DNA, 501 bp, Homo sapiens
aatttccttctttcctgttcctcaccctgatcacgcttgatttattgatggcggttccaccaggcctaatggccacacaccagcaaaggcaggctatgctatagtacaagccactrgcccgcctcttagaacctctcatttcctttccatcctggaaatctatcctcaaggaaataacttctcagtgttccatctgctattctactactcctcagggattattcaggccccctcccttccctacacatcaagctcaaggatttgccccacccaggactggcaaattagctttactcaacatgccctgagtcacataactaaaatacctcttagtctaggtagatactttcactggataggtagaggcctttcctacagggtctgagaaggccaccacagtcatttctcccgttctgtcagacataattcctcagtttagccttcccacctcaatacagtctgataacagatgagcctttattagtcaaatcagccaagcag

SEQ ID NO: 199076 - DNA, 438 bp, Homo sapiens
actacctgacttcaaaatatattacaaaacaatagcaaccaaaacagcatggtattgacataaaaatagacatgtagaccaatggaacagaatagagaacacaagaataaatccatgygcttatagccaacttattagtaagaaaggcacctagaaaacacatgaggaaaaggattacctccttaataaatggtgctggggaaacaagatattcacatatagaaagatgaaactagatccctatctctcaccatatttaaaaatcaactcaaaatgaattaaagacttaaatgtaaaagcccaaactataaaactattagaagaaaacataggggaagtacttaatggcatttgtttgagcaaggattttttgtatacgaactctaaagcacagaaaacaaaagcaaaaataaccaaatggaactacatcaaactaaa

SEQ ID NO: 199077 - DNA, 438 bp, Homo sapiens
actacctgacttcaaaatatattacaaaacaatagcaaccaaaacagcatggtattgacataaaaatagacatgtagaccaatggaacagaatagagaacacaagaataaatccatgcgcttatagccaacttattagtaagaaaggcacctagaaaacacatgaggaaaaggattacctccttaataaatggtgctggggaaacmagatattcacatatagaaagatgaaactagatccctatctctcaccatatttaaaaatcaactcaaaatgaattaaagacttaaatgtaaaagcccaaactataaaactattagaagaaaacataggggaagtacttaatggcatttgtttgagcaaggattttttgtatacgaactctaaagcacagaaaacaaaagcaaaaataaccaaatggaactacatcaaactaaa

SEQ ID NO: 199078 - DNA, 411 bp, Homo sapiens
agaattcatcttcagagtttggggctgcatggcggggtaacagggcatgtgtgtgccgtgataytttgtcaaagggcagtgactcccacatatgatttaccatctcttctgaggcttcacggttcctgtacctgcacttagtacctagaactccagacacatgtgatcggagcatgaataaagggaacttttaacatctgagtcacccacattaattccttctcctcttctgacaggtgaatatttcctcctgttttagaggtaggattccctttcttccctctgggtggctcagcctttacaaaggtggtaatagagtgtttcagagatgtgaatgggtcaggatatccctggttgctgggttgtctggtccttactctctgagtcagtttcaaagaaggtcaggaataa

SEQ ID NO: 199079 - DNA, 393 bp, Homo sapiens
attaattagatgggcagtttagcaacagcattacattactaatttttttccttacctccagcagcttttagaagactgatttaccaagcgtattttctgtccaagctttctttcatggaaaaatttgctttacctagacaaagcacattaaagcaaattaaatcacatgtaagattaaggaggttcttgtttgctttcaaagcatattctttttttttttttttgagacagagtctcgctctgtcgcccaggctggagtgcagtggcgcgatcttggctcactgcaagctccgcctcccgggttsacgccattctcccgcctcagcctccccagtagctgtgactacaggcccccgccaccacgcccgggtaatttttctgtatttttagtac

SEQ ID NO: 199080 - DNA, 604 bp, Homo sapiens
acttaaagatcttttgggcttaaactatggggttttctagatataagatcatgtcgtctgcaaacagggataatttgacrtcctttcttcctttttggatgccctttatttctttctcttgcctgattgccctgaccaggatttccaatactatgtttaataggagtagagtttccaaagttatttctgctattgatttctaatttcagtccattatggccagaaaagatgcttgacataaattctgtttttgtaaatttgttgagacttgttttgtgcctaacatgttatctatcttagagaaagtttaatgtgttggtgagtggaatgtgtattgtgcagctgttggatggaatgttctgtaaatgactgttagaaccattttatctagaatgcaatttttttttttttgagagagtcttgctctgtcacccagactggagtgcagtggcatgatcttagctcactgtagcctccgcctcctgggttccagtgattttcctgctacggtgcaatttaaatccactgtttgtttgttgattttctgtcaggctgatctctccattgctgaaagtgaggtggtgaatttccctactattattag

SEQ ID NO: 199081 - DNA, 435 bp, Homo sapiens
gtcccatttgcatagtccttacagtctaggaaaaaaacactaacagtaaaagacaatgcatgttcaataaataatggtcatttcaagtgacaatatctgtcaagaggtgacgctacattgaaatagccagtgaaggcttttagagaaggtgtgatgggtgctgttggaagggtgggtaaggaattggaaaaaagaaagccctggttctttctacttccctcactgagccactgtccattcctaaaacaaagtaccaaactctatcaggtgaagttctttggttgcaagcaaagacggttacttgggccaactcaagaaagagaacacgtgttatcaggaaaatgccrgggttccttacagaagccaaggacagataaataacaaggtctataaaagcaagtggtcaaaacagtcctagagattatggcagcagga

SEQ ID NO: 199082 - DNA, 568 bp, Homo sapiens
atgggctttatggatataatctccaatataagcttttatatattttaatgaaaaataactgactagctcatggtactatatactatactagttacaaagctttgaaaatacttagtttgtttttctaaaatgagaaattcacgatgaggttttttaaaagttcttaaaaagaatgatggatgttgtgttyaattagtatagcactaaactttttctctaaataaattcagattcagagaacatttattgactgttttctatgggccaaatattgtattatattagcttcttcttcatatatggtcatttaatcttcaaacaatccaacaatgtcatcttcagtcgagagaagaagaatctaaagtctttgagtggagtaactggcctacagctacaaagtttaaaaagttccaaagctggaatataaacccagattttcttattgtgaggtcagcattctcaccagcacatttattcaggatgctgtgaaattagatgccatcatggtagtattataacctttcccaagtctcatgtgctaagaactattgacctcaggcaggaccaa

SEQ ID NO: 199083 - DNA, 554 bp, Homo sapiens
atataataactattcagtaattgttagctattaaatcattactrttattgactgttcactctgcaccagacactttactatgttctaggttcattgcttcattcctcacaaccaccttgagaaacaggtctgtttattctcattttactgatgagggaactaaagctcagggaagatacacagctcacccaagttcacacagaaccagaatatgaactctgttctctcaatcaccaaagcccacatgtttcaagtacattatataatgtagaacaacccacagcagataaaagcaagacagtggccatacttcaaacattgatatatgaagtatttgtcgcttttttccaaaattctgagcttcagcttccaagaacattgataatatcattactgagcaggcgaaaaaggaacccagaaggcagaggttattggcatgtaatttaaaacaagctatacctttgtggaaaatgtcatctaaacttggaaagccaagttccacattaataataatctaattaatatatcatctttttttccagtgagaccataat

SEQ ID NO: 199084 - DNA, 487 bp, Homo sapiens
gatggctgtgggagattatcagtatgcactaatcaatcaatcaattgacttgattgatacttagtaaaagataaagggaacatattacaaacacagtccttagcaaccgataggtagagttaatggattctggggttttacctgaagattgatcaaaagtttggctactatagttgtagacccataaacataagttctgtaggtatctatcatttttagttttctgagctaagattattgaagccaatcaagggaggaaaacccatgcatttgtacagcctaatcagaaatgaaggaggctgaatttagcagcaactaaactttctttttccatccaaatattctgagamtcatgtcccagacatctcaccaacaagtggttgtgtggctctgtcaggggaagaagcaggccctgaattgtgctggtgtggttttacctaataggtggatagaaaatagaagttcagctttgaaaagttcatagggc

SEQ ID NO: 199085 - DNA, 598 bp, Homo sapiens
gtgtggctcagtgttaggtctctcaaacttcagtcatttttattttattttgcactaaaatttactttgtatttttctttaaattatttattttcataagtaaatatattttaaaagaaaactttatattattaccacaaaagagaaacctgtatcatttggcataaataaaaaggaatcatgagaatgaataatacattagggtttccagccaatacaggaaaatggctgtgaaagttcagctcctggaggtaaaaaggattaaatgcrgagaaaagaaactggctcactgattaagaccatagactgaggcaagctgttcactaccacttcatataaatgtgtgtgtgtgtattatatatatgtgtgtgtatatatatttgtgtatatatgtgtgtttatatgtatgtgtatatatatgcatatatatgtaggtgtatatatgtgtatatatgtgtgtatatatacatacatatgtatatgtgtgtatttatatgtatatgtatatacacatacatatatgtatatgtgtatatgtgtacacatgtatattcatatgtatgtatgtatgatgtatgtatgtacatatatgtgtatt

SEQ ID NO: 199086 - DNA, 509 bp, Homo sapiens
aaataattttctcaaaatacagaccctgggattcaaatgcaaattgtctgaaactggaaacaatgttcttaaatagtactctacacaacttctmctttattctcctataaaattgaatgtaaattacaagcacccattaattaattcattcaacaaatatttattgaacatttcatatatctcaggtataccttagcaatgggactaccgcagtgaacaggcagataaagctcctccattatattctagtgggaaattaaaacatcaaaccactcattataataaagtttaatgagcactatgacaagggcaactagtagtctaattaattcctggtatgacgagtcccttctaaatcctattatttttatatattagtctgggcaggacacagttcagatgatcagtgagcactccacacatccactgcatgagagaatcaatctctatttgtttcttactcaatgattgccgtaacctgccacccaggccacagactggaccaagac

SEQ ID NO: 199087 - DNA, 337 bp, Homo sapiens
ttgttaaggtgattatacaaaccccacaaaaaattgttacctctccaagtccccagctatgccaattgaatgctctgaccactacatagcactttctgatttgactttgctctttgggtctagagacaatggattaagagccttaaattttgtagtccctgacaccaccattttgtaactcctcccctatagccacacatccattcttcttggaggatgatctattgagaatatagcactttccagaaatgataatttaaagttcatctgtgtgtcmcatggtgagtaggacaaaccaaactctacgccaagcaaggattatgctacctacaacgta

SEQ ID NO: 199088 - DNA, 408 bp, Homo sapiens
ccttggaaggcagcagctgccatcagaagggcaatttattgagtttgggatgaaatccaactttttatataggtaattatgccagaattcaggtcaacctctaggctgggttgactcatattccgagatatataggaagtaaaacactatttgagctccactgtagcatttcccgtggagctttaaaatgtcttttaattatttgtacatttccattgaactgcaaatgattctgctcttctgagtaccacgctttgtctgcttgaaaaataaagacaccaaamgactgcagatgaaggactgtagttaaaggatggaatgttgtcatgaacactttgagaatggtgacagttggtattttcccaaagtaaactcaaaggttcaaattattaaaaaggctgaggtggc

SEQ ID NO: 199089 - DNA, 645 bp, Homo sapiens
ggctcctgtggatacgaggatatctgtctatgtggaaggattaagatcttcccaggcagctataagaatattttagttttttcttatcaagtttctcaacctttattttcaatgaaggaggtgctgagttttatatctctttttaatcataatcaacaacagtttctgacccaacttaccttgactgtattcaaacttatgagggtagaaaggatctgaaggttggggttatgaatgacaaggattggatgtgtccacctgatgacgttttccctttttattaaactggacacacctgtaaaaaaaaraaatttgaaaagggcaaaaacctaattaggtcatgcacaaagggtaaagacaggcgacttgaagaatacagtttctctcctgtaggtttttgcccggagccttgccacctcttgatctgcttgtgtggtgttttctttcctccttaatctccaaaggatgcagcttcatactctggacaggaaaggggccagctgtagggtgaatgtcagagaaagccagaaaggagaaggggagttctttcaagtcaacacatgatgggcgtacacacaatggaaatgaagctccccactgccattaaaaatattatttctcaccgtgtttaaccaccaaaggggt

SEQ ID NO: 199090 - DNA, 645 bp, Homo sapiens
ggctcctgtggatacgaggatatctgtctatgtggaaggattaagatcttcccaggcagctataagaatattttagttttttcttatcaagtttctcaacctttattttcaatgaaggaggtgctgagttttatatctctttttaatcataatcaacaacagtttctgacccaacttaccttgactgtattcaaacttatgagggtagaaaggatctgaaggttggggttatgaatgacaaggattggatgtgtccacctgatgacgttttccctttttattaaactggacacacctgtaaaaaaaagaaatttgaaaagggcaaaaacctaattaggtcatgcacaaagggtaaagacaggcgacttgaagaatacagtttctctcctgtaggtttttgccyggagccttgccacctcttgatctgcttgtgtggtgttttctttcctccttaatctccaaaggatgcagcttcatactctggacaggaaaggggccagctgtagggtgaatgtcagagaaagccagaaaggagaaggggagttctttcaagtcaacacatgatgggcgtacacacaatggaaatgaagctccccactgccattaaaaatattatttctcaccgtgtttaaccaccaaaggggt

SEQ ID NO: 199091 - DNA, 594 bp, Homo sapiens
cagcctccacctcccaggtgcaagcaattctcctgcctcagtctcccaaatagctgggattacagacatctgccaccacatccggctaattttttttgtattgttagtagagacggagttttactgtgttgaccaagctggtcttgatttcctgacctcaggtgatccactgcctcaacctcccaaagtactgggattacaggcatgagcctctgcacccggcccagcttgggttttttctagttatgtgactttagacatgtcccttagcctccttcacccaaaatggatagaataataatatcctgtctgtctcaagggtggactgtgaaccttttggggactgggatcccctttgctttgcaggtctggtgcctcccactagtacttgaatagcagtgactgggtcgatctttattgaataatgtatcaaacaaaatgtttgatgtaacattacttgtaagcctcatgatgttatactagtgtaaaattttttaaatattctgtttcttgctaaggttwtacttctatgctgcaagtttaaaacttcaaatagagatttcttgcttctaagaactaactttcaagggagaa

SEQ ID NO: 199092 - DNA, 553 bp, Homo sapiens
tacatgtatgctccaaggcctgcyctatgtagaacttttggagccatcaacgtactgcttgaggttgctttgaacaaaaggtatttgacataagctctataagatcagggactcttttttattttattcattgttctttatcttctagagcaataatttgcaaaatgactatttattgaataaactaggacggaggtgaaaaggaaagaacagctcatccttccaaggggaagagagcagtatcccaaatccaaattgaagaaaataaacatatatctattcaccagaagagatagaagggagacagggcagaatttctgtggttcttactatctctgtcacctctacaggccaaaccagtgaggaccttggagactactaatatcactggatttgtgaatgagttcatcctcttgggcttcccctgccgctgggagatccagatcctcctttttgtggtcttctctctcatctaccttctgaccctcctaggtaacacatccatcatctgtgctgtgtggtcaagccagaaactccacacacctatgtacat

SEQ ID NO: 199093 - DNA, 553 bp, Homo sapiens
tacatgtatgctccaaggcctgccctatgtagaacttttggagccatcaacgtactgcttgaggttgctttraacaaaaggtatttgacataagctctataagatcagggactcttttttattttattcattgttctttatcttctagagcaataatttgcaaaatgactatttattgaataaactaggacggaggtgaaaaggaaagaacagctcatccttccaaggggaagagagcagtatcccaaatccaaattgaagaaaataaacatatatctattcaccagaagagatagaagggagacagggcagaatttctgtggttcttactatctctgtcacctctacaggccaaaccagtgaggaccttggagactactaatatcactggatttgtgaatgagttcatcctcttgggcttcccctgccgctgggagatccagatcctcctttttgtggtcttctctctcatctaccttctgaccctcctaggtaacacatccatcatctgtgctgtgtggtcaagccagaaactccacacacctatgtacat

SEQ ID NO: 199094 - DNA, 553 bp, Homo sapiens
tacatgtatgctccaaggcctgccctatgtagaacttttggagccatcaacgtactgcttgaggttgctttgaacaaaaggtatttgacataagctctataagatcagggactcttttttattttattcattgttctttatcttctagagcaataatttgcaaaatgactatttattgaataaactaggacggaggtgaaaaggaaagaacagctcatccttccaaggggaagagagcagtatcccaaayccaaattgaagaaaataaacatatatctattcaccagaagagatagaagggagacagggcagaatttctgtggttcttactatctctgtcacctctacaggccaaaccagtgaggaccttggagactactaatatcactggatttgtgaatgagttcatcctcttgggcttcccctgccgctgggagatccagatcctcctttttgtggtcttctctctcatctaccttctgaccctcctaggtaacacatccatcatctgtgctgtgtggtcaagccagaaactccacacacctatgtacat

SEQ ID NO: 199095 - DNA, 534 bp, Homo sapiens
ctgccctatgtagaacttttggagccatcaacgtactgcttgaggttgctttgaacaaaaggtatttgacataagctctataagatcagggactcttttttattttattcattgttctttatcttctagagcaataatttgcaaaatgactatttattgaataaactaggacggaggtgaaaaggaaagaacagctcatccttccaaggggaagagagcagtatcccaaatccaaattgaagaaaataaacatatatctattcaccagaagagatagaagggagacagggcagaatttctgtggttcttactatctctgtcacctctacaggccaaaccagtgaggaccttggagactactaatatcactggatttgtgaatgagttcatcctcttgggcttcccctgccgcwgggagatccagatcctcctttttgtggtcttctctctcatctaccttctgaccctcctaggtaacacatccatcatctgtgctgtgtggtcaagccagaaactccacacacctatgtacat

SEQ ID NO: 199096 - DNA, 534 bp, Homo sapiens
ctgccctatgtagaacttttggagccatcaacgtactgcttgaggttgctttgaacaaaaggtatttgacataagctctataagatcagggactcttttttattttattcattgttctttatcttctagagcaataatttgcaaaatgactatttattgaataaactaggacggaggtgaaaaggaaagaacagctcatccttccaaggggaagagagcagtatcccaaatccaaattgaagaaaataaacatatatctattcaccagaagagatagaagggagacagggcagaatttctgtggttcttactatctctgtcacctctacaggccaaaccagtgaggaccttggagactactaatatcactggatttgtgaatgagttcatcctcttgggcttcccctgccgctgggagatccagatcctcctttttgtggtcttctctctcatctaccttctgaccctcctrggtaacacatccatcatctgtgctgtgtggtcaagccagaaactccacacacctatgtacat

SEQ ID NO: 199097 - DNA, 600 bp, Homo sapiens
cttccacaaaaccggtccctgatgccaaaaacattgtggacaactgacctaaagtaattcattatcacaagtcttacctggattgctgttttcagaagagatttttagcatctgtttttctttatagtcagaaagtaattcacaaattctatgtataaaaatgtaataaaccaaattactattttaatactgatataaaaaatacttaccaaatgtaarattcttagagtatttcaaacaatatcataatatcagaatttaacagtattatcccatacacttacgagtacattctacaaacttttctttaagcttctaattaaagaagaaaaaaaattaggtgaaatgctcataaatcaagggcactgtgacccagtaaatcagcatgcattagcatgacataatagaaagtgtcccaactctgcataagtcctagctccataatgaacagctatttgttcttggacaactttcttctcttaggctcaatgtcttcttctacaaagtgaggactttgctgccttatttcactaggttgttataaagatttaacaaggtaacattttttaaatgctcagagaaatagtaaagcaatggaat

SEQ ID NO: 199098 - DNA, 545 bp, Homo sapiens
taattcattatcacaagtcttacctggattgctgttttcagaagagatttttagcatctgtttttctttatagtcagaaagtaattcacaaattctatgtataaaaatgtaataaaccaaattactattttaatactgatataaaaaatacttaccaaatgtaaaattcttagagtatttcaaacaatatcataatatcagaatttaacagtattatcccatacacttaygagtacattctacaaacttttctttaagcttctaattaaagaagaaaaaaaattaggtgaaatgctcataaatcaagggcactgtgacccagtaaatcagcatgcattagcatgacataatagaaagtgtcccaactctgcataagtcctagctccataatgaacagctatttgttcttggacaactttcttctcttaggctcaatgtcttcttctacaaagtgaggactttgctgccttatttcactaggttgttataaagatttaacaaggtaacattttttaaatgctcagagaaatagtaaagcaatggaa

SEQ ID NO: 199099 - DNA, 600 bp, Homo sapiens
cttccacaaaaccggtccctgatgccaaaaacattgtggacaactgacctaaagtaattcattatcacaagtcttacctggattgctgttttcagaagagatttttagcatctgtttttctttatagtcagaaagtaattcacaaattctatgtataaaaatgtaataaaccaaattactattttaatactgatataaaaaatacttaccaaatgtaaaattcttagagtatttcaaacaatatcataatatcagaatttaacagtattatcccatacacttacgagtacattctacaaacttttctttaagcttctaattaaagaagaaaaaaaattaggtgaaatgctcataaatcaagggcactgtgacccagtaaatcagcakgcattagcatgacataatagaaagtgtcccaactctgcataagtcctagctccataatgaacagctatttgttcttggacaactttcttctcttaggctcaatgtcttcttctacaaagtgaggactttgctgccttatttcactaggttgttataaagatttaacaaggtaacattttttaaatgctcagagaaatagtaaagcaatggaat

SEQ ID NO: 199100 - DNA, 520 bp, Homo sapiens
tccctaaatttcttcctgtcctcagatttccaccataaagtttcagaccaaataaaaaattgttttttcactaattttctttgaggaaatgtaagagaaaaaaaagaaagaaacaagtgttttgaagggtagaattttggcaattatatgagattgtaaaatccgaatgtggattagcttcaactcatcaaagattcaagaacagctacagttctaagaatgagccaaaaaaaaatgggtatgcattgaggggagggaattaggaagggaatttatagccattcagacatttcccaacattaagccttcatgaattttgcattggaaagaaatatttataaattaagaaactcagtatccagtccaccctgtgataaatactgcaatgtgcccaagcattccaatttgagtatggctttgtgctttgccaatcataacaatggragatagaagtaataagagcctgcatgaagcactgtgctaatgataattttcccagtaagaacaaaagagaggccat

SEQ ID NO: 199101 - DNA, 485 bp, Homo sapiens
aaaacaacacacatctcttccaccaacttctccccagaatattgcatattcgatcagtgtccacaaatgttagatacagaatgttaaattactattaggttygcgcaaatgtagttgtgattaatggcaaaaatcgcaattatttttgcaccaacctaatagtaacattgaaacacaatattagttattcaacatcagaaagatcttccagaacagtcatcaccacagatgggccaaactattatttgtagggcactgcagtaagttagaattttatcaaattcataaattaatggatattttgttaagggatatgaacagcctgtagtataaatttgagctatacattgttgggagaacaaaataataaaacgatataatagtagcaatcaagtggtgacctttctgtcacacttacaattttcaatgcacttgtctacttattatttcatgtgtggatgggttagctgagtggcggggccatc

SEQ ID NO: 199102 - DNA, 485 bp, Homo sapiens
aaaacaacacacatctcttccaccaacttctccccagaatattgcatattcgatcagtgtccacaaatgttagatacagaatgttaaattactattaggtttgcrcaaatgtagttgtgattaatggcaaaaatcgcaattatttttgcaccaacctaatagtaacattgaaacacaatattagttattcaacatcagaaagatcttccagaacagtcatcaccacagatgggccaaactattatttgtagggcactgcagtaagttagaattttatcaaattcataaattaatggatattttgttaagggatatgaacagcctgtagtataaatttgagctatacattgttgggagaacaaaataataaaacgatataatagtagcaatcaagtggtgacctttctgtcacacttacaattttcaatgcacttgtctacttattatttcatgtgtggatgggttagctgagtggcggggccatc

SEQ ID NO: 199103 - DNA, 564 bp, Homo sapiens
tgactcagcttcctgagtacctgggattacaggcgcccaccactgcacctggctaattttgtttttagtagagacatggtttcaccatgttggccaggctgctctcgaactcctaacctcaggcaatccacctgcctcagcctcccaaagtgctagaattaaacgtgtgagccaccatgcctggtccatttttattacctctttattattgtggtatgattactattttgtataaatgggatgatacactgtattatgttttgtgtctggtttatttcacttaatgcatgtgaggtcagttatgtcatttttttttttttactaattttttgtatattttagaaaatgcatttagaagagaataaaaaacttttaaaataacttccgtatttctcaatgttgtgcatttttttcaaaaawtaagcaaatattttatttttttggtttctttgagacagatcttattctatcaccatggctggagtgaagtaacatgatcatggcttactgcagattctacctcctaggctcaagtagtcttcccacctcaggctaccaagtatc

SEQ ID NO: 199104 - DNA, 564 bp, Homo sapiens
tgactcagcttcctgagtacctgggattacaggcgcccaccactgcacctggctaattttgtttttagtagagacatggtttcaccatgttggccaggctgctctcgaactcctaacctcaggcaatccacctgcctcagcctcccaaagtgctagaattaaacgtgtgagccaccatgcctggtccatttttattacctctttattattgtggtatgattactattttgtataaatgggatgatacactgtattatgttttgtgtctggtttatttcacttaatgcatgtgaggtcagttatgtcatttttttttttttactaattttttgtatattttagaaaatgcatttagaagagaataaaaaacttttaaaataacttccgtatttctcaatgttgtgcatttttttcaaaaaataagcaaatattttatttttttggtttctttgagacagatcttattctatcaccatggctggagtgaartaacatgatcatggcttactgcagattctacctcctaggctcaagtagtcttcccacctcaggctaccaagtatc

SEQ ID NO: 199105 - DNA, 428 bp, Homo sapiens
ggctggagtgaagtaacatgatcatggcttactgcagattctacctcctaggctcaagtagtcttcccacctcaggctaccaagtatctgggaccacagctgcacaccaccatgcccaactaatttttaaattttgtgtatagatggggtctcattatgttgcatgggcttgtctcaaactcctgcgctcatgagattctcctgcctaggcctcccaaagtgctgggattacaggtgtgagccaccacacccagcctatttttttctaaagacagggtctcattctgtcctcagctcaagtgctgtggcgtaatcatagctgarggcagactcaatgtactgagctcaagtgatcctccctcactgacccaaagtgctgggattacaggcatcagccaccatgtccagcctgaaataatattttaatt

SEQ ID NO: 199106 - DNA, 481 bp, Homo sapiens
aaccccaaattttcttttgtcagtttaagatgccattacaaactatcatatttggtgactcatgcaacattaattttatttcatttatcagtgctgtgaactccaagatcaagatgctgacaagataggttttattttgaggcttccacttttggctcagagcagccatcatattgttactttttcatatgatcatttcattgtagggcatgtgtgtgtgtgtgcatgtgtgtgagagagagagagagagaaatagagagagagagaggctgtctggtgtctttacttatgaggtcagtaatttcattctgatgtttcaccctcatcatctcctttaaaattcagtactttctttcttatagaaagcagcccgacagaaatttgcaaacttactttgwgatttttattattattattttttagctcatcagctatttttagtgttagtgtattttatgtgtggcccaagtcaattgttctt

SEQ ID NO: 199107 - DNA, 584 bp, Homo sapiens
attccagcagacagtaacctaactttagatgtctactctctacatgtttctataattctcacacaacagcttcaggtaaggcacagctcagawttttttcatgtcttttccactttcctttaaccctgtgttgcatttggaatcaatcacaatcttgaaagacacagttccaaacaccataatcgaatgttgaaaatcaaaagaacaaaatccttaaagtctaaaattccaaaaatcgccatcccaaaagactgaaatcctgaaaatttaattctggaaaaaataattttaaaaattctttaagatatatttatttacatttttaaaaggtatttatttgagtaacatataaaaacacaaaaataaaaacacaacagaacacttcaaagatcaccttacacaataaaataagcgataacacacatttttgcaagcataaacattcaggccttctatcaacagtcacacaagtataagagttataaacagatgaactatattcatgaagaaataggtcaaaaggtgaaatatgtaaatgcatatcattgtggttggtaattgtatgcacccagctctataactgt

SEQ ID NO: 199108 - DNA, 584 bp, Homo sapiens
attccagcagacagtaacctaactttagatgtctactctctacatgtttctataattctcacacaacagcttcaggtaaggcacagctcagatttttttcatgtcttttccactttcctttaaccctgtgttgcatttggaatcaatcacaatcttgaaagacacagttccaaacaccataatcgaatgttgaaaatcaaaagaacaaaatccttaaagtctaaaattccaaaaatcgccatcccaaaagactgaaatcctgaaaatttaattctggaaawaataattttaaaaattctttaagatatatttatttacatttttaaaaggtatttatttgagtaacatataaaaacacaaaaataaaaacacaacagaacacttcaaagatcaccttacacaataaaataagcgataacacacatttttgcaagcataaacattcaggccttctatcaacagtcacacaagtataagagttataaacagatgaactatattcatgaagaaataggtcaaaaggtgaaatatgtaaatgcatatcattgtggttggtaattgtatgcacccagctctataactgt

SEQ ID NO: 199109 - DNA, 584 bp, Homo sapiens
attccagcagacagtaacctaactttagatgtctactctctacatgtttctataattctcacacaacagcttcaggtaaggcacagctcagatttttttcatgtcttttccactttcctttaaccctgtgttgcatttggaatcaatcacaatcttgaaagacacagttccaaacaccataatcgaatgttgaaaatcaaaagaacaaaatccttaaagtctaaaattccaaaaatcgccatcccaaaagactgaaatcctgaaaatttaattctggaaaaaatarttttaaaaattctttaagatatatttatttacatttttaaaaggtatttatttgagtaacatataaaaacacaaaaataaaaacacaacagaacacttcaaagatcaccttacacaataaaataagcgataacacacatttttgcaagcataaacattcaggccttctatcaacagtcacacaagtataagagttataaacagatgaactatattcatgaagaaataggtcaaaaggtgaaatatgtaaatgcatatcattgtggttggtaattgtatgcacccagctctataactgt

SEQ ID NO: 199110 - DNA, 584 bp, Homo sapiens
attccagcagacagtaacctaactttagatgtctactctctacatgtttctataattctcacacaacagcttcaggtaaggcacagctcagatttttttcatgtcttttccactttcctttaaccctgtgttgcatttggaatcaatcacaatcttgaaagacacagttccaaacaccataatcgaatgttgaaaatcaaaagaacaaaatccttaaagtctaaaattccaaaaatcgccatcccaaaagactgaaatcctgaaaatttaattctggaaaaaataattttaaaaattctttaagatatatttatttacatttttaaaaggtatttatttgagtaacatataaaaacacaaaaataaaaacacarcagaacacttcaaagatcaccttacacaataaaataagcgataacacacatttttgcaagcataaacattcaggccttctatcaacagtcacacaagtataagagttataaacagatgaactatattcatgaagaaataggtcaaaaggtgaaatatgtaaatgcatatcattgtggttggtaattgtatgcacccagctctataactgt

SEQ ID NO: 199111 - DNA, 541 bp, Homo sapiens
tctggcaagccttgccgccatgagctggcgtactctagggtcctaaataaatttgacaggcagtctaggccacaaggacagcaagtcctggtgctgagctgggcttggagccaatggacttgggaacacatgacttactgaaacaacagctggggcagctaagagagtccttgcccacacctcccctaaccccagcagcacagctcgtggctccaaaagagatcctttacttctgcttgaataaaagaaagcgaagagtaaagatgatstttgtcttgcatcttagatcccagctcattacagtaagaaagaatattggtccgtcatgaggcaccattccaggccctagctccgagatgacatttctagacacaccctgggctagaagggaacctgctgccttgaaggaaagaaccagtcctggcaagacccatcacctattgactaaagagcccttgggccctgaataatgagaagcaacacccaaatagtatgccatatgccttgggtgagactcaagacatactagcttcaggtgaga

SEQ ID NO: 199112 - DNA, 507 bp, Homo sapiens
tttaagctaaatatcaaatgttaagttagaatttattaattcttctgttaatgagattgctgaatttattaaaataaattttaagaatctattaaaaaattcttaaaaaaagaatctattgattcttaaaacctagtctgaaaggtaatttcatttggactatctaatattattcaagcaaagaaaacaacrttaaatcaaaaatttaaacttaaaattttccatgcctctggctggctattttcactgactttaagcctttgtgactcttcctctgatgtcagctttaagtcttgttctgttgagaaatccatatattcagttaaaatgaaccacttagaacagttaaaaactattgcctttataaaaatagattgaagacaacattttattttatttcataaactgagtgtttagtctttcatgaaatagttacttaggaaataattctccaaaacttcaacaaaccacttggggagacacctgatgtgattcactcacaaattc

SEQ ID NO: 199113 - DNA, 476 bp, Homo sapiens
aacattttattttatttcataaactgagtgtttagtctttcatgaaatagttacttaggaaataattctccaaaacttcaacaaaccacttggggagacacctgatgtgattcactcacaaattcatccacccaacataaatgaacaaaaccaccagaaacacaacttyaaaatacagtagaaacatataaggtaactcagtatgttgttcacttcctaatagtgaagcagtaaatgtaaagaaaaggaaatttagttttaaagagaaacaagttttcctgcacttagctagtctgactctaaggatagtaacaagcaggcccaggaaaggtcatggtgaccctgtctgagaagccagagcccacaggtatgggctccagacatcccagagcaaggttaagaaaacaaattcctttaccatctcccctccccctcagcatttattcatagctatttttacaaatgcatatattttg

SEQ ID NO: 199114 - DNA, 592 bp, Homo sapiens
tcacttcctaatagtgaagcagtaaatgtaaagaaaaggaaatttagttttaaagagaaacaagttttcctgcacttagctagtctgactctaaggatagtaacaagcaggccsaggaaaggtcatggtgaccctgtctgagaagccagagcccacaggtatgggctccagacatcccagagcaaggttaagaaaacaaattcctttaccatctcccctccccctcagcatttattcatagctatttttacaaatgcatatattttgcaaattcttgttttccttcaatgcagctgcaaggtcacaagctatgcagtggttgcaaaactgtcactatatgattaactgcctttgttctgcttctataagtttgcctatataagccaagccctgtctttgttcagggctcagctttttgatgcaaatccgctgagctggtgtgcacctaaacaaaatcctcttgtttgacccactgggtctctcctgcctcctcttttctgcaaaaatagtaccttacaaacgatttccaaaattactactgacacctttattagtgtacaatgtcttcttaacatctaaaatgtttccatcc

SEQ ID NO: 199115 - DNA, 592 bp, Homo sapiens
tcacttcctaatagtgaagcagtaaatgtaaagaaaaggaaatttagttttaaagagaaacaagttttcctgcacttagctagtctgactctaaggatagtaacaagcaggcccaggaaaggtcatggtgaccctgtctgagaagccagagcccacaggtatgggctccagacatcccagagcaaggttaagaaaacaaattcctttaccatctcccctccccctcagcatttattcatagctatttttacaaatgcatatattttgcaaattcttgttttccytcaatgcagctgcaaggtcacaagctatgcagtggttgcaaaactgtcactatatgattaactgcctttgttctgcttctataagtttgcctatataagccaagccctgtctttgttcagggctcagctttttgatgcaaatccgctgagctggtgtgcacctaaacaaaatcctcttgtttgacccactgggtctctcctgcctcctcttttctgcaaaaatagtaccttacaaacgatttccaaaattactactgacacctttattagtgtacaatgtcttcttaacatctaaaatgtttccatcc

SEQ ID NO: 199116 - DNA, 592 bp, Homo sapiens
tcacttcctaatagtgaagcagtaaatgtaaagaaaaggaaatttagttttaaagagaaacaagttttcctgcacttagctagtctgactctaaggatagtaacaagcaggcccaggaaaggtcatggtgaccctgtctgagaagccagagcccacaggtatgggctccagacatcccagagcaaggttaagaaaacaaattcctttaccatctcccctccccctcagcatttattcatagctatttttacaaatgcatatattttgcaaattcttgttttccttcaatgcagctgcaaggtcrcaagctatgcagtggttgcaaaactgtcactatatgattaactgcctttgttctgcttctataagtttgcctatataagccaagccctgtctttgttcagggctcagctttttgatgcaaatccgctgagctggtgtgcacctaaacaaaatcctcttgtttgacccactgggtctctcctgcctcctcttttctgcaaaaatagtaccttacaaacgatttccaaaattactactgacacctttattagtgtacaatgtcttcttaacatctaaaatgtttccatcc

SEQ ID NO: 199117 - DNA, 606 bp, Homo sapiens
agtggtccctggtcctatctgtattaagatgtagatcattttaatgccaaaaccaatattcctagtgagccattattcattaagacaaggtgacagctagctcatgtggacacagctgagatgatactatgtagcaaattcccaataattctcatgaacacttggaaagtcaattctataataagtcatagaaattataataaatcacttaatatttgtttgggaaggtgctttataaagttatagtgtatatgaatataactaatagttgtgaattcagagctgtgagaataaagcaaaaaaatcacactgtgtttgagtcagcaatctttagatttctatctagtcttcctacccagtccataaattctaagtataatcctagtactcgctctcaagtttaagttaaatgctagcctatacaaaaaatactctttctcttacttcttttttgttatttatatgttgctttgtttaaaggaagaacacaaaaatgccctgctaaaggrattctgtttggctgcaggctgcaagaggggaaaaacacaaagcacattttgcagaaaatgattttttagaagtcagaactatgacatgaagtcaagc

SEQ ID NO: 199118 - DNA, 561 bp, Homo sapiens
tacctgaaagtgtaggtataattgtatcgtttcacttaattcaaatgttgtctttagtggtattagtaaaaattataatatcttacaatttttgagctgttatttgtgttaggaactattctatattttgtgtagagtcttatttaagcattacagtggtttcctctgagaaactgactattttcattcccattttattgatgaggaaattgagacacaaaaaggctaagcaacagctaggaagcgacagagcttcaagtaggattccagcccaagttgaatgtcatccaagagctrtgctctttctattcaaataggctgctctttcattaatacagtgactaatgagaggtaataagtagtgtgctttcttcaaaggaaaattgagtttgttttgaaggcagagtaataggctattcagtgtttgcaactacatgaatcattaatgtggcattagctagtgcactacaatttcctgaagtcttctcactctcataggactgctctacatttggcctctgccaatggaaattcagaagtagtacaactcctgctggacag

SEQ ID NO: 199119 - DNA, 561 bp, Homo sapiens
tacctgaaagtgtaggtataattgtatcgtttcacttaattcaaatgttgtctttagtggtattagtaaaaattataatatcttacaatttttgagctgttatttgtgttaggaactattctatattttgtgtagagtcttatttaagcattacagtggtttcctctgagaaactgactattttcattcccattttattgatgaggaaattgagacacaaaaaggctaagcaacagctaggaagcgacagagcttcaagtaggattccagcccaagttgaatgtcatccaagagctatgctctttctattcaaataggctgctctttcattaatacagtgastaatgagaggtaataagtagtgtgctttcttcaaaggaaaattgagtttgttttgaaggcagagtaataggctattcagtgtttgcaactacatgaatcattaatgtggcattagctagtgcactacaatttcctgaagtcttctcactctcataggactgctctacatttggcctctgccaatggaaattcagaagtagtacaactcctgctggacag

SEQ ID NO: 199120 - DNA, 557 bp, Homo sapiens
ggaaggtgggagataaggggcttataagtaaaaagatcaggttggattttgagtttactagaccttgttctactcttacyggggaaaattttgtggtgttttcagcaaatgagtctctctcctactctttcctctttttggccaaatcctcaaatgataaagggaattgtttatgtgatgagagatgagactgaaataattgtctattgcactagcttccagctagagttgtgcattccagttacttcaggaaaatttttaaataatcttcaagtctaggttttcccctgaagattttgatagagtaagtctaataaagcctggatatgtatgtttaaaaatgtttccttgaagccaggcatggtggtgcatggctgtagtcccagctgctagggaggctgaggtgggaggattgcctgagcttaggagttctagtctagcctggtcaacataatgagaccctgtctctaacaacaacaacaacaaatttctcaaaatccggatacactcctgcttaaccactgaatacataagtgtaatatgtaaattcttatatc

SEQ ID NO: 199121 - DNA, 556 bp, Homo sapiens
ggaaggtgggagataaggggcttataagtaaaaagatcaggttggattttgagtttactagaccttgttctactcttaccrgggaaaattttgtggtgttttcagcaaatgagtctctctcctactctttcctctttttggccaaatcctcaaatgataaagggaattgtttatgtgatgagagatgagactgaaataattgtctattgcactagcttccagctagagttgtgcattccagttacttcaggaaaatttttaaataatcttcaagtctaggttttcccctgaagattttgatagagtaagtctaataaagcctggatatgtatgtttaaaaatgtttccttgaagccaggcatggtggtgcatggctgtagtcccagctgctagggaggctgaggtgggaggattgcctgagcttaggagttctagtctagcctggtcaacataatgagaccctgtctctaacaacaacaacaacaaatttctcaaaatccggatacactcctgcttaaccactgaatacataagtgtaatatgtaaattcttatat

SEQ ID NO: 199122 - DNA, 309 bp, Homo sapiens
aaggggcttataagtaaaaagatcaggttggattttgagtttactagaccttgttctactcttaccggggaaaattttgtggtgttttcagcaaatgartctctctcctactctttcctctttttggccaaatcctcaaatgataaagggaattgtttatgtgatgagagatgagactgaaataattgtctattgcactagcttccagctagagttgtgcattccagttacttcaggaaaatttttaaataatcttcaagtctaggttttcccctgaagattttgatagagtaagtctaataaagcctg

SEQ ID NO: 199123 - DNA, 543 bp, Homo sapiens
gagataaggggcttataagtaaaaagatcaggttggattttgagtttactagaccttgttctactcttaccggggaaaattttgtggtgttttcagcaaatgagtctctctcctactctttcctctttttgrccaaatcctcaaatgataaagggaattgtttatgtgatgagagatgagactgaaataattgtctattgcactagcttccagctagagttgtgcattccagttacttcaggaaaatttttaaataatcttcaagtctaggttttcccctgaagattttgatagagtaagtctaataaagcctggatatgtatgtttaaaaatgtttccttgaagccaggcatggtggtgcatggctgtagtcccagctgctagggaggctgaggtgggaggattgcctgagcttaggagttctagtctagcctggtcaacataatgagaccctgtctctaacaacaacaacaacaaatttctcaaaatccggatacactcctgcttaaccactgaatacataagtgtaatatgtaaattctt

SEQ ID NO: 199124 - DNA, 556 bp, Homo sapiens
ggaaggtgggagataaggggcttataagtaaaaagatcaggttggattttgagtttactagaccttgttctactcttaccggggaaaattttgtggtgttttcagcaaatgagtctctctcctactctttcctctttttggccaaatcctcaaatgataaagggaattgtttatgtgatgagagatgagactgaaataattgtctattgcactagcttccagctagagttgtgcattccagttacytcaggaaaatttttaaataatcttcaagtctaggttttcccctgaagattttgatagagtaagtctaataaagcctggatatgtatgtttaaaaatgtttccttgaagccaggcatggtggtgcatggctgtagtcccagctgctagggaggctgaggtgggaggattgcctgagcttaggagttctagtctagcctggtcaacataatgagaccctgtctctaacaacaacaacaacaaatttctcaaaatccggatacactcctgcttaaccactgaatacataagtgtaatatgtaaattcttatat

SEQ ID NO: 199125 - DNA, 556 bp, Homo sapiens
ggaaggtgggagataaggggcttataagtaaaaagatcaggttggattttgagtttactagaccttgttctactcttaccggggaaaattttgtggtgttttcagcaaatgagtctctctcctactctttcctctttttggccaaatcctcaaatgataaagggaattgtttatgtgatgagagatgagactgaaataattgtctattgcactagcttccagctagagttgtgcattccagttacttcaggaaaatttttaaataatcttcargtctaggttttcccctgaagattttgatagagtaagtctaataaagcctggatatgtatgtttaaaaatgtttccttgaagccaggcatggtggtgcatggctgtagtcccagctgctagggaggctgaggtgggaggattgcctgagcttaggagttctagtctagcctggtcaacataatgagaccctgtctctaacaacaacaacaacaaatttctcaaaatccggatacactcctgcttaaccactgaatacataagtgtaatatgtaaattcttatat

SEQ ID NO: 199126 - DNA, 543 bp, Homo sapiens
gagataaggggcttataagtaaaaagatcaggttggattttgagtttactagaccttgttctactcttaccggggaaaattttgtggtgttttcagcaaatgagtctctctcctactctttcctctttttggccaaatcctcaaatgataaagggaattgtttatgtgatgagagatgagactgaaataattgtctattgcactagcttccagctagagttgtgcattccagttacttcaggaaaatttttaaataatcttcaagtctaggttttcccctgaagattttgatagagtaagtctaataaagcckggatatgtatgtttaaaaatgtttccttgaagccaggcatggtggtgcatggctgtagtcccagctgctagggaggctgaggtgggaggattgcctgagcttaggagttctagtctagcctggtcaacataatgagaccctgtctctaacaacaacaacaacaaatttctcaaaatccggatacactcctgcttaaccactgaatacataagtgtaatatgtaaattctt

SEQ ID NO: 199127 - DNA, 571 bp, Homo sapiens
gagataaggggcttataagtaaaaagatcaggttggattttgagtttactagaccttgttctactcttaccggggaaaattttgtggtgttttcagcaaatgagtctctctcctactctttcctctttttggccaaatcctcaaatgataaagggaattgtttatgtgatgagagatgagactgaaataattgtctattgcactagcttccagctagagttgtgcattccagttacttcaggaaaatttttaaataatcttcaagtctaggttttcccctgaagattttgatagagtaagtctaataaagcctggatatgtatgtttaaaaatgtttccttgaagccaggcatggtggtgcatggctgtagtcccagctgctagggaggctgaggtgggaggattgcytgagcttaggagttctagtctagcctggtcaacataatgagaccctgtctctaacaacaacaacaacaaatttctcaaaatccggatacactcctgcttaaccactgaatacataagtgtaatatgtaaattcttatatctcagaaacttcagatatttctag

SEQ ID NO: 199128 - DNA, 361 bp, Homo sapiens
gaaataattgtctattgcactagcttccagctagagttgtgcattccagttacttcaggaaaatttttaaataatcttcaagtctaggttttcccctgaagattttgatagagtaagtctaataaagcctggatatgtatgtttaaaaatgtttccttgaagccaggcatggtggtgcatggctgtagtcccagctgctagggaggctgaggtgggaggattgcctgagcttaggagttctastctagcctggtcaacataatgagaccctgtctctaacaacaacaacaacaaatttctcaaaatccggatacactcctgcttaaccactgaatacataagtgtaatatgtaaattctta

SEQ ID NO: 199129 - DNA, 434 bp, Homo sapiens
atcatcatgtgtaagtgtttacatgaaaaggctagttaatgctaaattgaggtttaaaataattataacaattgcatcttacatatcaggtgagatgtcatagtttggttcaggtagttttagagtggcagtgagttagtcccctgcatcagccagaaatcagacaaaaagcaagacaagttagaagtaccaatgggtgcaggattctttacctcaggacttttaagacctttatccttagagatcccaatattgttcatttcatccaagtataacacctatgcatggsataaaaaagagtatcacatctttgatttttctgattagttatttgggtcttgaaatgtccagtttagcagaaagccttgtactgtcttctggggactgtctcctacatactccttgaatttttcaagaaccaaaggggttcacta

SEQ ID NO: 199130 - DNA, 434 bp, Homo sapiens
atcatcatgtgtaagtgtttacatgaaaaggctagttaatgctaaattgaggtttaaaataattataacaattgcatcttacatatcaggtgagatgtcatagtttggttcaggtagttttagagtggcagtgagttagtcccctgcatcagccagaaatcagacaaaaagcaagacaagttagaagtaccaatgggtgcaggattctttacctcaggacttttaagacctttatccttagagatcccaatattgttcatttcatccaagtataacacctatgcatggcataaaaaagagtatcacatctttgatttttctgattagttatttgggtcttgaaatgtccagtttagcagaaagycttgtactgtcttctggggactgtctcctacatactccttgaatttttcaagaaccaaaggggttcacta

SEQ ID NO: 199131 - DNA, 434 bp, Homo sapiens
atcatcatgtgtaagtgtttacatgaaaaggctagttaatgctaaattgaggtttaaaataattataacaattgcatcttacatatcaggtgagatgtcatagtttggttcaggtagttttagagtggcagtgagttagtcccctgcatcagccagaaatcagacaaaaagcaagacaagttagaagtaccaatgggtgcaggattctttacctcaggacttttaagacctttatccttagagatcccaatattgttcatttcatccaagtataacacctatgcatggcataaaaaagagtatcacatctttgatttttctgattagttatttgggtcttgaaatgtccagtttagcagaaagccttgtactgtcttctggggactgtctyctacatactccttgaatttttcaagaaccaaaggggttcacta

SEQ ID NO: 199132 - DNA, 477 bp, Homo sapiens
tcttgctgtctgaacttcaaagaacagcatctttagaagaaatgaaaaaaaaaaggaatagatctttcttctctccttctcaaacagaaagtctctctgagtattaacagaaatattgcacagaataaaatgtcttatatgtgctaaacatacaacgtaagtaatgatgagtaaaacgttaagtattgacatgtgcaaaaatctgttgaggatttcttatgctctacaaacactttattaactgttttgcctgcattattttatttaaattctacgtaataggcatttatcatctcctttttgcagatgggaaatgtaaggtataaaagactaacttgcccgaagcctctccaggctctcaaagttagcctaataatgtctaaatgtakgtccagccaatgtaactttcattctcttaacatttgaggtcgtttagaaaagctctgtcaataacagatgtgagcactgatagacaaa

SEQ ID NO: 199133 - DNA, 542 bp, Homo sapiens
tgtgttgattggcctccacacagaaggttgtgcaccagctgcggtggtagcagtgatctttgtgtttgccttaygttacccagagaaggtactctggtctttcagacaatgggcatggccatagacctaccaaaagtctgtgttcttttattcagttacgaggctgggtagaggggcaaagctaggtaaggtctaggtcagacaagtctgcactctggttgcccatgtatgggcacaagtagtcaccccagtgaggattggatggcagttccatggccactaggatgatgcttcagtgaggagtacacctgctcctgctgaacagatgagtccacatggggagtggggagtagcaagcagtattaagccccaaccagctcccacatacgtggcaagacaggtctcatacctgcagtattccacctgcagcaggtacctggtttacaggcagccagcactcagaactcaaaatgacacaaggccattcctgagggagacagaccatagctttcagaccatgtccttcccatttgtcccatgaa

SEQ ID NO: 199134 - DNA, 444 bp, Homo sapiens
gggcctgtggtttcattcagttttcctgttaagttcctgtgttgcttcttggaagaaggctcatagcatgtctctgcactatttggtctttgcaagtggaagaagcacactaacaaaaccttcagtctaccrtcttgaaaaactactaacaaggtaattttatatgagaaaaccaatcagttaacggccaaaacagaaaaaagaagaaaaataatagaccttcctaagcaggagggtattctccggcactctgctcccggatttaatctgcaccattgactgtttgggtctctaagctgccagcctgcaggtgctccagcagcattccttggtctcaagtctcctaggccacactgcaggtttagccttgacaggcttcaaaattaatctgtacacacacacacaaacacacacacacacatatcacacacacatatatgcaca

SEQ ID NO: 199135 - DNA, 466 bp, Homo sapiens
agtcgttttatattattcttgaccactctctttcttacactctgtcgcttattaattagcaacatctcctagattctaccttcaaaatgcatctagaacatgactagtttctcccagctccartgttttcactctacatggggccatgattggcctctaattggtcttcctgcttttattcttatcccacttgagtctttccacatggcagccaaaatggtcctgttaaaatgccagttagatcatgttagttttctcttctaagaactccatccaatgacttttccacttattcagagtaaaagttagactcttacaaagatgtgcaagatctttgtgcttttgccctctttactcacttgcttgtgtctcctactcttttcctctttgttcaatccattccaaagggtttctagaataacatggtatgatctagaattcagtttctagaataacatagtatgat

SEQ ID NO: 199136 - DNA, 612 bp, Homo sapiens
tccatccaggttgctgcaaatgccattatttcattcctttttatggatgagtagtattccattatatatatcacaatttccttatacatatattctttatatatatcacaatatctttgtccactcattgattgatgggcatttgggctggttccatatttttgcaatcgtgaattgtgctgctataaacatatgtgtgcaagtatctttttcatataatgacttcttttcctctggttagatacccagtagtgggattgctggatcaaatggtagttctacttttagttctttaaggaatctccacactgtttttcatagtgacggcactagtttatattcccaccagcagtgtagtcgtgttcccttttcacccattcatgtcgacatctattatttttttattatggctattcttgcaggagtaaggtggtagcacattgtgrttttgattggcatttccatgatcattagtgatgttgggcattttttcatatttttgttggccatttgtacatctgacaaaggactaatatccagaatctacaaggaattcaaataaattagtaaagaaaaaataatctcatcaaaaagtgtgcaaaagacatgaat

SEQ ID NO: 199137 - DNA, 636 bp, Homo sapiens
cttttgttgaacttgaactagtgatatatcaattttgagttttgtacatttatctttttaatagggatagtaatgtgtaagtgtggaacattttggatttatagataatataggtgtgctggtgattctccttttccaccctactcccattcacatctattgtcttctcttctgtgccttgcattgttcacctggagttgggctcctatggacctggtcaacagggcacctatggtgtctggtttccagctgaccttggcttttgagaagactctctaggatgtcagaagtgggaaagatagggaattacctcaatttctttctcattcccttcctgcttcattataagtgtgctaaattggctgcatccctccctggagaatgtcttgggatgtgtgtcttgggaagatgttggcaagggatttcttcctggcttcagctctcactgagctctgtgacagaagccactgtccttggtccttcagacctaaagatggaaatggttttctacagttagccttgacttttttaacccctttggctgattcctttaactttacctttttattctctgtcttttcattaaattctcttyagctaaaacatatgagtagaattgtggacatctcagatcct

SEQ ID NO: 199138 - DNA, 518 bp, Homo sapiens
acccataaaaataattacccagttaaacatcttaacaaacccatgtggcttggggtgtttctagagtcaacccagaagtagctacgagaataatattttaattgaaacctagctcttgctgtgttcctggaaaacattatttcattcttccgagcttcagcgttttcatctgtaccaaataaggagtaatatatatatcacaaagatactgcacatgttaaataaactttgtttttcattggcagtaaatgtggctatccatttgtaaatccttygcacacctatggctgttatttaataaacattcagaagtgatagtagttttcagagtaagagttgcaacgtatgtgctgtgctatcagataaggtaaagaaaatgttaaaaaaaatttgcaggttttacaattctgtgtaaaattctatgtaattgctttgttctttcacaggagccccatccagctgagcagagatgtggtaaaacaagttttcaaaatatgttttctatagtgagtgtgcta

SEQ ID NO: 199139 - DNA, 369 bp, Homo sapiens
cgtggtggcacatgcctgtaatcccagctattcgggaggctgagacaagagaatcgcatgaacctgggaggcagaggttgcagtgacccaagatcgtgmcactgcactataggcctctggaagacacagcaggacttcattttacaaaaaaaaaaaaaaaaaatgcaggcctggggcaaatttctccagaagtctttgtatgctctgagtaggcatccaatatgtggtactgtttcttccatagccaggatccaagaatgcaggaatcaaggggtggaagtggaagtggtgccacttaccatcacctctactgacccactagcaaaattttccttcctgtttctgtgacattatgttctgtgggcctag

SEQ ID NO: 199140 - DNA, 634 bp, Homo sapiens
gaaataaaatataatcacataaaaatacataaaatatacttcacagctaatattcattcagtttatatcaaatacctgtagatgaaagatctaggaaaaattttctaaaaagtttgccaacaaagagaacaaagtagaaaacatcgagaacatacactattatttctgagtggtcaacgttattttccttttttgttggcatcatcagaaagtaccagaaagcagtgactctctttgaaaaaaaattgccaattgccatatcacagtattctaaaattccacaagaacacaattgtcttatttgtcttctttttaaatggtttcaggaagagtcatcagttaatcataaaatgtttaatattccccttccagcaagaccactatttgagcttgcctacctgactgcctgctttcctgtcttccttcctgcctgccttctttcttttctttatttctttattccttcctcccttctttccttctgtctttatgakgtaccatgataccctagaaatagtcattgcccaaaatatcaagaggactcaattttagatcaggctgtgtttccaattctgtgacctggaacagattgattttccattccccttactaattccctcacttaacaaagaaa

SEQ ID NO: 199141 - DNA, 671 bp, Homo sapiens
ggaacctattacagaaaaatactgatgatttttccaaggtgatactgaggctccaaggccatcaattgctccatgttccctctctaacaaaatgccttgggcatcattaagactgattgggtgctcagaaatgggcaattaccaaacttgaaartaactatttgccttaatactaaataagtttcagaggaactaattaatcaaaacaatgttaaataagaaaacttcctgggtgatgattgctatccagctctgaaagttactcctgggaccatgcagattgagcagcaaatagggactagcaataggaaatgcctttgtaaattgatgtggtcgggagggccagtttctaacattattggttcgttagttgctatcttgtcttcttgggtcttgttcccttgccctggaaaaaacaaaattatattccaattcagcaaaccccagcaagcctaagggattaaattaatttataaacattggaagctgtaagaaaggctgtaattcacaccctgattatgttgaagagcatgggtctttccatctctaggttggaacaccagctctcgatctcctgtgagttatttaaaattcttgagtttcagttccctcaaatgtaaaagaaggttaaataatagtatgtacaatgggaaaccaagtgaaattatgca

SEQ ID NO: 199142 - DNA, 597 bp, Homo sapiens
gtggttgtatagtctgtgttgctttcctgaaggcctctttgatatctttgtttctcaggctatagatgagagggttgagcagtgggttgatcacggtgtagaacagagcagctactttgtccctctctagggagtaggtggaactaggccttgaatacataaacaacaatgatccatagaagagcatgactgagatgaggtgggaagcacaggtggagaatgccttgtgtcttcctgaagctgagtggattctcaggatagccaggaggatgttgacataggaaatcaggatagcaagaatgctggagagtrctgtgaagcccaccacaccaagcaggactttttcgtagaccctggtgtttgtacaggacatttttaccaatggtggtgcatcacagaaaaagtggtcaatgatatttttaccacaaaaatgcaggcggaatgtattggcagtatgggctatggcattcaaaaatcctcctatgtaggagccagcaacaagcccagtacagagggcggtggacatggtacctgaataaagcaatgggttacaaattgctgcatggcggtcatatgccatggctgccaggagatagc

SEQ ID NO: 199143 - DNA, 597 bp, Homo sapiens
gtggttgtatagtctgtgttgctttcctgaaggcctctttgatatctttgtttctcaggctatagatgagagggttgagcagtgggttgatcacggtgtagaacagagcagctactttgtccctctctagggagtaggtggaactaggccttgaatacataaacaacaatgatccatagaagagcatgactgagatgaggtgggaagcacaggtggagaatgccttgtgtcttcctgaagctgagtggattctcaggatagccaggaggatgttgacataggaaatcaggatagcaagaatgctggagagtactgtgaagcccaccacaccaagcaggactttttcgtagaccctggtgtytgtacaggacatttttaccaatggtggtgcatcacagaaaaagtggtcaatgatatttttaccacaaaaatgcaggcggaatgtattggcagtatgggctatggcattcaaaaatcctcctatgtaggagccagcaacaagcccagtacagagggcggtggacatggtacctgaataaagcaatgggttacaaattgctgcatggcggtcatatgccatggctgccaggagatagc

SEQ ID NO: 199144 - DNA, 597 bp, Homo sapiens
gtggttgtatagtctgtgttgctttcctgaaggcctctttgatatctttgtttctcaggctatagatgagagggttgagcagtgggttgatcacggtgtagaacagagcagctactttgtccctctctagggagtaggtggaactaggccttgaatacataaacaacaatgatccatagaagagcatgactgagatgaggtgggaagcacaggtggagaatgccttgtgtcttcctgaagctgagtggattctcaggatagccaggaggatgttgacataggaaatcaggatagcaagaatgctggagagtactgtgaagcccaccacaccaagcaggactttttcgtagaccctggtgtttgtacaggacatttttaccaayggtggtgcatcacagaaaaagtggtcaatgatatttttaccacaaaaatgcaggcggaatgtattggcagtatgggctatggcattcaaaaatcctcctatgtaggagccagcaacaagcccagtacagagggcggtggacatggtacctgaataaagcaatgggttacaaattgctgcatggcggtcatatgccatggctgccaggagatagc

SEQ ID NO: 199145 - DNA, 532 bp, Homo sapiens
tatctcgttacaagtataaattcaaaaaatgctaggaatggaagattctacagagtttgtattcgccaccccatctgtattacagataaggaaggtgcatctaatgtgtcaatttactragatcaaacaatttattctttaaaaaacataggactataaccaggatctccagactcttgctccactattcttttcatatgaacttgaaaaagcaagtgatacatagaaatctaaagtacatttttcctttatttccataacagaatacttgtgctggtcttttgttaaatatttgagtttattattaacaaagaaatatgcttatttgctgaatattctaccgtttctttaagagtctaatgggctgaacgttggctacatgggaccaaaaagaaaagtgtagaggttttctttccttttgtcttagtcaagctcaattttgaatattacaaccttgtctctaaatatcatttaatggaattactacagaattaaatttatgtctccctaaaagttcaggcagttcgtgata

SEQ ID NO: 199146 - DNA, 532 bp, Homo sapiens
tatctcgttacaagtataaattcaaaaaatgctaggaatggaagattctacagagtttgtattcgccaccccatctgtattacagataaggaaggtgcatctaatgtgtcaatttactgagatcaaacaatttattctttaaaaaacataggactataaccaggatctccagactcttgctccactattcttttcatatgaacttgaaaaagcaagtgatacatagaaatctaaagtacatttttcctttatttccataacagaatacttgtgctggtcttttgttaaatatttgagtttattattaacaaagraatatgcttatttgctgaatattctaccgtttctttaagagtctaatgggctgaacgttggctacatgggaccaaaaagaaaagtgtagaggttttctttccttttgtcttagtcaagctcaattttgaatattacaaccttgtctctaaatatcatttaatggaattactacagaattaaatttatgtctccctaaaagttcaggcagttcgtgata

SEQ ID NO: 199147 - DNA, 519 bp, Homo sapiens
acacatgtgatcaattgaatgttttggggctaatgtctctggtttcagataaaattagtgaatttcttctttatagataaagtgagtgactgagagttacttcccatttctagrgttacacagcttagtgaggtagatagaacaaaaacacccatctgtgtatcacattcatgcttttactccttttataagaaggatgagaagatcaacatccacagggctaagattctcacccaaggaaagaatttagggcaccttgacaaaagttttcatttttgatctcatcgtatatattcttgaggaaaatagaatgaaggaaagataagattcaaatattaaaccaaaaaatgggattaagtgagtaaaaatttttatgcatttttttgtaaatttcaagaggtaacatacaaatttgttccaaatttccattgtgaagcaaacacaaaagaacaaaaacactaggaaaaaagagcagttttaagattctcattgcctgtacaattgaaaaccacttaggaa

SEQ ID NO: 199148 - DNA, 610 bp, Homo sapiens
ggcaattcctcatgaagaagggttcacactggttttacggagtttgatacacagctccatgaggtcaaatattttagctgttgtcttctcatctctggccccagcatttagcagcctggctcactgagtgttatgaatgaatgaataaatgaatgactgtaaaggaactcctcaaggaatgagatgacagagttgattcttcttctayggttccactaatttccaaatttcttgttcagtgtctcactggcttctaggaccaattgaacctctagacagagtaaatatattaaagcactggttctctaattctgtaggttggcataatctcagatttgcaattggtctcatttaaaaatttttaggtctttactatgcgaccaaccaccacctagaaccctattaaactacatttgtaagaatggccatatttctgtttattagtttctcatttctgctgtagaaaattaccataaacttggagacgtaaaacaatacaactaattattatagttctggaggtccaaaataggtctcattgtgctaaaatcaaggtgtcaacaagtctgtgttcctttcagaggcttaggagagaagctgtttccttgcc

SEQ ID NO: 199149 - DNA, 610 bp, Homo sapiens
ggcaattcctcatgaagaagggttcacactggttttacggagtttgatacacagctccatgaggtcaaatattttagctgttgtcttctcatctctggccccagcatttagcagcctggctcactgagtgttatgaatgaatgaataaatgaatgactgtaaaggaactcctcaaggaatgagatgacagagttgattcttcttctatggttccactaatttccaaatttcttgttcagtgtctcactggcttctaggaccaattgaacctctagacagrgtaaatatattaaagcactggttctctaattctgtaggttggcataatctcagatttgcaattggtctcatttaaaaatttttaggtctttactatgcgaccaaccaccacctagaaccctattaaactacatttgtaagaatggccatatttctgtttattagtttctcatttctgctgtagaaaattaccataaacttggagacgtaaaacaatacaactaattattatagttctggaggtccaaaataggtctcattgtgctaaaatcaaggtgtcaacaagtctgtgttcctttcagaggcttaggagagaagctgtttccttgcc

SEQ ID NO: 199150 - DNA, 448 bp, Homo sapiens
aagtagctcaggatgtagagaaaacaggaaggacaaacaaagataaagccattggatgtcatgagatgaggactactgctaattgttaagtaaggagggtagagcccaggcaacgcttctccagcccatgtgggttctgagactgctgaagtgattcaggacaaggtcttgtgagaagaaagamgaatacaccaaagaaaagtgagatttcagatcataaaatgttgttacctacacttagcatcatttcacatcctaactgcaggtaacaaaatgagccacagatactaagggtgaacatctaacagagatcaagggatgtgttgatgaagaagaagctaattttgcaaaattctgaatccgactgcggtatttcttttgcatgtgatttggtgctttgattttggaatatgaggttggtcttaaattatctggcctgcagcggaca

SEQ ID NO: 199151 - DNA, 326 bp, Homo sapiens
gcctcaccagaagccaagcagacgctggtgccatgcttcttgtacagcatgaactgtgagcccaataaacctcctttctttataaattacccagcctcagatatttctttacagcrataaaaaatggactaatacagaaaattggtactgggagtggggcattaatgtaaagatacctgaaaatgtggaaaggctttggaactgcataataggcagagattgaaagagttaggagggctcaaaggaagaaaggaagatgagggaaattttggaactccttagaaacttgttaagtggttgtgaccaaaatactgacacaaatatag

SEQ ID NO: 199152 - DNA, 326 bp, Homo sapiens
gcctcaccagaagccaagcagacgctggtgccatgcttcttgtacagcatgaactgtgagcccaataaacctcctttctttataaattacccagcctcagatatttctttacagcaataaaaaatggactaatacagaaaattggtactgggagtggggcattaatgtaaagatacctgaaaatgtggaaaggctttggaactgcataataggcagagattgaaagagttaggaggsctcaaaggaagaaaggaagatgagggaaattttggaactccttagaaacttgttaagtggttgtgaccaaaatactgacacaaatatag

SEQ ID NO: 199153 - DNA, 568 bp, Homo sapiens
ctatctctatcatgtatgtattttwaattactttttagaacaatgcttatgttttaattgctaattaacagctaattgctgtaagcctgtaacagaaaccaagcttacagtagctcaacacataagttaaaaatgagtcagtcttgtaacttttgtcttttggttttgttgtcttcttttacttaaaataataattttaagaagttatgaatgcctgtctatatccattcctatatgacctagaccaattaatgggctataagtctttgactctaaaggccctcagccatagggagtcctgccaaggaaaaataacactgcagaattatataacttctcctgtgacaaaaccttttctctcccaaataccaatatatggtgcaatacaaaagtggtgggaagaatagatttgtctactgttaacacatctataacaatttagacactgacgaccaggcgtttcttgcgtttaaattttaccctcctcaggatgctatacctatggagagaaattggccagaagagaaattaagtttaataaattctaatttaatgttggccctacaat

SEQ ID NO: 199154 - DNA, 568 bp, Homo sapiens
ctatctctatcatgtatgtattttaaattactttttagaacaatgcttatgttttaattgctaattaacagctaattgctgtaagcctgtaacagaaaccaagcttacagtagctcaacacataagttaaaaatgagtcagtcttgtaacttttgtcttttggttttgttgtcttyttttacttaaaataataattttaagaagttatgaatgcctgtctatatccattcctatatgacctagaccaattaatgggctataagtctttgactctaaaggccctcagccatagggagtcctgccaaggaaaaataacactgcagaattatataacttctcctgtgacaaaaccttttctctcccaaataccaatatatggtgcaatacaaaagtggtgggaagaatagatttgtctactgttaacacatctataacaatttagacactgacgaccaggcgtttcttgcgtttaaattttaccctcctcaggatgctatacctatggagagaaattggccagaagagaaattaagtttaataaattctaatttaatgttggccctacaat

SEQ ID NO: 199155 - DNA, 568 bp, Homo sapiens
ctatctctatcatgtatgtattttaaattactttttagaacaatgcttatgttttaattgctaattaacagctaattgctgtaagcctgtaacagaaaccaagcttacagtagctcaacacataagttaaaaatgagtcagtcttgtaacttttgtcttttggttttgttgtcttcttttacttaaaataataattttaagaagttatgaatgcctgtctwtatccattcctatatgacctagaccaattaatgggctataagtctttgactctaaaggccctcagccatagggagtcctgccaaggaaaaataacactgcagaattatataacttctcctgtgacaaaaccttttctctcccaaataccaatatatggtgcaatacaaaagtggtgggaagaatagatttgtctactgttaacacatctataacaatttagacactgacgaccaggcgtttcttgcgtttaaattttaccctcctcaggatgctatacctatggagagaaattggccagaagagaaattaagtttaataaattctaatttaatgttggccctacaat

SEQ ID NO: 199156 - DNA, 568 bp, Homo sapiens
ctatctctatcatgtatgtattttaaattactttttagaacaatgcttatgttttaattgctaattaacagctaattgctgtaagcctgtaacagaaaccaagcttacagtagctcaacacataagttaaaaatgagtcagtcttgtaacttttgtcttttggttttgttgtcttcttttacttaaaataataattttaagaagttatgaatgcctgtctatatccattcctatatgacctagaccaattaatgggctataagtctttgactctaaaggccctcagccatagggagtcctgccaaggaaaaataacactgcagaattatataacttctcctgtgacaaaaccttttctctcccaaataccaatatatggtgcaatacaaaagtggwgggaagaatagatttgtctactgttaacacatctataacaatttagacactgacgaccaggcgtttcttgcgtttaaattttaccctcctcaggatgctatacctatggagagaaattggccagaagagaaattaagtttaataaattctaatttaatgttggccctacaat

SEQ ID NO: 199157 - DNA, 395 bp, Homo sapiens
tgaattcaccactctcttatgaccagagaatgcccattattttctcagaataaggttttgtttattaacaayggtctctttaattgaatattttaagaacctgtacagaccttcagataagagctcctgtaacatataccttattttaattaaaatagctatcattttagttcagccctattagtgccaagtactaagtgcatttaatgcttgttattgactttaaacccaggccctagcggctattgctatttccttttttattaaaaaggccactcaatttcagctcagtttcataacagtgactctactgataagcagtactgccctcaggcaagtggaacctctacctggggccggtgacggtgctgcccctcagaaacccagtgatttag

SEQ ID NO: 199158 - DNA, 395 bp, Homo sapiens
tgaattcaccactctcttatgaccagagaatgcccattattttctcagaataaggttttgtttattaacaatrgtctctttaattgaatattttaagaacctgtacagaccttcagataagagctcctgtaacatataccttattttaattaaaatagctatcattttagttcagccctattagtgccaagtactaagtgcatttaatgcttgttattgactttaaacccaggccctagcggctattgctatttccttttttattaaaaaggccactcaatttcagctcagtttcataacagtgactctactgataagcagtactgccctcaggcaagtggaacctctacctggggccggtgacggtgctgcccctcagaaacccagtgatttag

SEQ ID NO: 199159 - DNA, 395 bp, Homo sapiens
tgaattcaccactctcttatgaccagagaatgcccattattttctcagaataaggttttgtttattaacaatggtctctttaattgaatattttaagaacctgtacagaccttcagataagagctcctgtaacatataccttattttaattaaaatagctatcattttagttcagccctattagtgccaagtactaagtgcatttaatgcttgttattgactttaaacccaggccctagcggctattgctatttccttttttattaaaaaggccactcaatttcagctcagtttcataacagtgactctactgataagcagtactgccctcaggcaagtggaacctcyacctggggccggtgacggtgctgcccctcagaaacccagtgatttag

SEQ ID NO: 199160 - DNA, 483 bp, Homo sapiens
gtggctggcaggtcccacaagcaatggtgccatcttaggggctcaatgttagtatctgttttggcagattagacactcagcagtaacaacagccaaatcagacaacaaagggatgccatgttgtagacttcatacatatcagacaacaaagggatgccatgctgtagacttcatacatagccttcattgctgccaccatggccactatgtccatgggcccattgagcaagcactggggtggctgatgaaagaggctaactgacatcctctgagtccttcattttgtccttctaattagcaggcccctccttagtaagatgcccttttgtggtattcacatgagacatacctatcttcatagtctgtgccaactccaagcaatccagctacatgcctctcccccagacttccttttcacccatttcacaaycctgtttcttgcaagccactgaccattcaaccagacctagcaactgccctcaa

SEQ ID NO: 199161 - DNA, 203 bp, Homo sapiens
cagtgttcagacagggaccaaatcatagaaactactagggcttgccatgctgaaaygactgacttcaaaccatagggcatacgtaccttccactgaagaagagcacctgagtaaaatgactagaggtgcatttcaaagattattctattggaaatacaaagaatgaattggaggagtaggaggcaaatagtccaagggacaga

SEQ ID NO: 199162 - DNA, 203 bp, Homo sapiens
cagtgttcagacagggaccaaatcatagaaactactagggcttgccatgctgaaacgactgacttcaaaccatagggcatacgtaccttccactgaagaagagcacctgagtaaaatgactagaggtgcatttcaaagattattctatkggaaatacaaagaatgaattggaggagtaggaggcaaatagtccaagggacaga

SEQ ID NO: 199163 - DNA, 203 bp, Homo sapiens
cagtgttcagacagggaccaaatcatagaaactactagggcttgccatgctgaaacgactgacttcaaaccatagggcatacgtaccttccactgaagaagagcacctgagtaaaatgactagaggtgcatttcaaagattattctattggaaatayaaagaatgaattggaggagtaggaggcaaatagtccaagggacaga

SEQ ID NO: 199164 - DNA, 580 bp, Homo sapiens
taccattggttaaactattatcttacttagagggaatagctamataaatcagaatattcttctcaaggacttgccttttgatttataatactttgggacaaaatatattcatcatctccattctaaaatgagtaagttattggtttcatatttttccctgcctagaatatggaaagcatcttcagaagaaattcccaaacacagtgcaaaaagagcttcactttaaaaatgttcaggtccagtgggacgatatgggacgatattcataatctgaagttttaaaattctgatagacattcaaatggcatcattgtggaaaataagcaaattctatttgtcattcaggatcctcacattgcaatttgaacaatctactaatcaacagtttttaattaactgcattactcacaatggactctcaccctggatcactaaacagggttttcaaagctaaaatttggtaacaaatgatctaatacattcctgaaagaacttgtttccttcgactttccaccagaaatccctattacaaagctagcatagctggcattttaccagctcatgctccaatcagcttttt

SEQ ID NO: 199165 - DNA, 532 bp, Homo sapiens
atgatggctggggacctcctatttctccatctttgtctctgttaactattctttaaaaatgccaagatgtgggggctttgttgtctgtatttttttgctctcttaattgctctgaaaagaaatagtatgaaaataataaacttcattgaaaccagagctaaggacagtttggcctatctctacacaacttgcattgtggagttcacagcgttgttcataaaaataaaaaacaaataagatcaaggctaccactaaattcagctatcacactaagagctcattctattgagggaacttttatgtaatggaaaagcaccttcagcatagccttggagtgcgatctctactccttgcagtaggtgaacatcatctttctcaatgagtattctagaatcacagaatttggattacaggagaatccttaaagggcaccatgaatttaaggtcstatgtgctttcaactcaatttccagttaaacaatgcccacacccagggctgttcagctgaatcaggaagagtgtttagaatcca

SEQ ID NO: 199166 - DNA, 526 bp, Homo sapiens
gctcaccaacgtccgggtctcagtatcattccatgtaattgcacttcactgtaatctatttttctggttacatctacttatcttttaggatacttcatatataccctcatccaagaagctgttcctgattcctgtgtgttgaattaaatgctcatcccttatgttgcatatctttctgagaatacctctaaaatagaagttatcacacttattacaaagaaaacgtttggtttacttgcctgttrccccctctaaactctatgcttttggagggcatagctgtcattgattatttctgtatctccagcacatcctacaatatgctgccagaataaatgttgcataaatgctatctgaatgattaaatgaattttaagtgatcacttaactaaagggaaaataccagattaaactcattttcactacaactataaagtgttgggcggcaggccttggaatacattttctgagctaggaaatgccttgtgatatttatagatgtgcatcctgcatcatgacaagactg

SEQ ID NO: 199167 - DNA, 587 bp, Homo sapiens
ggtgttactcacctagcgcactgaatgcttgataaagcgcaaagttgcagaagcaactattgtactaaggatttcatttgtacttccttctatattattttaaaaagaattagagactgttttgtttatcttgttagtcaaaattacataaacctttaaatttgcagtttgtaaatgctatgacaaattcaaatataaatcttagtctagtaataattctttaatgtatttttcataattctattacaaaaaagagataggtaaaaataacaaatactataattatgttgaattattacaaagactgttatgtcctaatactgcttattctcttcatatccaaattatgtaataaaatgattgmgttctgtgttatgaaactgtgaactctttgagaactgtaaacttaacaagtttcctcaaataactttgactctttcagacaggccctccaagagcatctgttgaattaatgttgtagcaaatgggaaggtaaaatgtgcttgcgtgtgttaatgacatgttattattgtcttccctgcagagaaattgtaatgagcagttgcacctattggctggtggttgct

SEQ ID NO: 199168 - DNA, 595 bp, Homo sapiens
attatgaggcatgctgagggaaaagtgggaataatttaagagggaggagtagttaattaatgyagagagatgtggataagagcggagagagagagagagccatgtcaaacaggaatataaaaaaatctgagatcagagattaagaccaaacaagagaaaaaaagtctcaactgcatatttccctggtgcccatgactttaatcagggggagaagctttggaaaactgatgatgaagatgtcaggttgctacttcttgggttccaggagccacgcaagtcttaaaaatagctgaacgatgatcaggaaagggcagaacttcattcaacccaatttaataataaggctgaattttctctgtatattctctatggaattaaaaaataaggcaacaagaaaagctcattttgactttttggcagcagggaaagttaagttccctgcctttcttcctgaagaatgagtaaaatcaagaacaagattagttatggggccaccgttaggtgaaagggtttttggtgtgctgattaaaggtgtttgtgctgtcattgtactgtctttcttcttggtttgacttttgggattaccttctgtact

SEQ ID NO: 199169 - DNA, 559 bp, Homo sapiens
ctaaagatgccaatgtgcttgcttgtgcagagagttctctgaggtgagatttctgaaataatgtgcaccagattgagaagaggttatggactctctattcaaggatgaatagaagatgctgacacagaaaaaggaccactttttcctgaacagaaatgggttgaaacctggcactagtcacactagttctgtgactgtaggtcattccttacttctgtgagcatccttcttcttatcttgaaaatggaggtgaaatacctgacccatagtttgttgtaggtaataaagaaataataagtgtacaactcttgtgcagatgcacagaattttttttttttacatcaagtttctgtctcaaatttcttcccatcaaaaactttggcaaagggaactggaaattgctgaatgagctgggtcatttttgaaacgtggaaaatggaagacatggcaagaaaataccattctgatttttaacgtyggggcaatattcaattcagaaaagcacacattagtttgcttaacagtgatctttggcaggatttttatgtgtattatttaa

SEQ ID NO: 199170 - DNA, 559 bp, Homo sapiens
taatattaaaaatttactgttccatctttatgcatttactttcagtattacctcaggacggattccccacaatgaaagtttcagttcaagagatattaaacacttttatgtttcccatacatacatattgacaaattgactttcaaatatttgttccaatttacctcaacctcattgcaaacgctatttctttgttgctgtcccatcattatttaccttcacaaatttttttaatgagctgcctttttctactattagttcatcttaaattacagaatatgagagatgaggcttaaaaatagacmaaaagtctttattgttgtctctgagtctaacctgaggaagaatgtaaaagagctagcagaaagataatgtgattttgagcttctcacaaaattataagctaattccagtaggctgagtccttaatgtgttaaataataccaagaacaccaagctaggaacatggttcacaacatcatggttactcatatgtaaagggaaaaatcaagtgttgctgtcagtttttcatggcattattttaaaaatatggtttctg

SEQ ID NO: 199171 - DNA, 616 bp, Homo sapiens
tatggatggagggtgtatcaaaagatataatcaggaaaaatactagctatcttcctattttatgagcaacaccttcactatcttcagagtctaccaaaaagcagacattagtgaaaatattaagcataaaaggcttkaagatgttgccatgggaacaataaaagcagtcttgcctgggttctatgtccaagtccaccttatccaggcatttcaagatatttccttaatttgtcaaacactaaaagcaacaggcatcacacgacttagtgcacggaatagcatactatttataggcaaatttctacttctcaaaatgagcagtatgactaattaacctttgttttatgtaacacatgaaattgaaaacagccctgaaattgaggctgtcactaatcagccttagagagccctggctcaaaaccaacctgacctcagctcgtgattgtgcaccctttaccgccatctagagtcgaaaatcccaaacaacaggcaaagccacccagaggatatggaaattagcctaaattagtaagaggtgcacagtatctcctgcattgtccacgttttgtttttcgtttttttgttttgcatttttatcgcccaactaaggtaacag

SEQ ID NO: 199172 - DNA, 635 bp, Homo sapiens
atatatacatatttgaaaaaatgaacaatgctctgacacaataaagtgttatactaagaaaattaatcttgcaaacatataatagtttgaggccaaaatgaactctttctggaagtgcaaataagaggctcctgaaataattttacatgaattacaagatcaagaatgttaggaagaaaacagaaatggctactttacccatggagataagacttttgtcttttaattagtcaaatctaattctaaatcttgaggatcgtcttctgttttgtcagtaaaagttaaaaggcagaagcaatcaatttgatctgtctctcaacatggccaaggatttgcctaattatttattttatttcattttttattatactttaagttctggggtacatgtgcagaacgtgcaggtttgttacgtaggtatacactgtgccatggtggtttgctgcccccatcaacccstcatctacattaggtatttctcctaatgctgtccctcccctagccccccgaccacctgacaggccccactgtgtgatgttcccctccctgtgtctatgtattctcattgttcaactcccacttatgagtgaaaacatgcggtgtttgcctaattatttttatgaaattatgcacat

SEQ ID NO: 199173 - DNA, 635 bp, Homo sapiens
atatatacatatttgaaaaaatgaacaatgctctgacacaataaagtgttatactaagaaaattaatcttgcaaacatataatagtttgaggccaaaatgaactctttctggaagtgcaaataagaggctcctgaaataattttacatgaattacaagatcaagaatgttaggaagaaaacagaaatggctactttacccatggagataagacttttgtcttttaattagtcaaatctaattctaaatcttgaggatcgtcttctgttttgtcagtaaaagttaaaaggcagaagcaatcaatttgatctgtctctcaacatggccaaggatttgcctaattatttattttatttcattttttattatactttaagttctggggtacatgtgcagaacgtgcaggtttgttacgtaggtatacactgtgccatggtggtttgctgcccccatcaacccctcatctacattaggtatttctcctaatgctgtccctcccctagccccccgaccacctgacaggccccaytgtgtgatgttcccctccctgtgtctatgtattctcattgttcaactcccacttatgagtgaaaacatgcggtgtttgcctaattatttttatgaaattatgcacat

SEQ ID NO: 199174 - DNA, 456 bp, Homo sapiens
ccctctttgggtgcaccatcttttcagcacctcaatgtgttcaccaacgtggaagctccctgaacttcattgtttagactttatatggaggttccattacatgggcatagttggttaagttattgttcactggttaagccagtttccaacccctttctcctccccagagatctgagttggggtggtctgaagattccaaccctataatccgtatggttggttttctatgacaagcagctccccactcttaggggctttccaaaagtcacctcattaacataaacgtgaggttgaaaggggcttggtatgartcacaaaacacactcctttctcctttattgctctggagatatttcagaagctggggacaaaaccaaacattatgctgaagatgccataggagcatcataggttccagagctctggccaggagctagggatgaagaccaaaatatg

SEQ ID NO: 199175 - DNA, 608 bp, Homo sapiens
aaaaccttataaggaaagttttgccatgctattttgcctatttatttttaaaaatttcttttattttttagtagagacagggtctcactgtgtttctaaggctggtttcaaacccctgggctcaagtaatcctcctgccttggcttcccaaagtactaggattacaggcatcagccaccttgccaggactattttacatggttccaggtttaccttctttctggaacaaaagtcttagagatgtcccatccgtcatcaatctataattaccctgacctacacagcactgttatggtcagttaatgtccagcaaaagtgtatatcctctcttctataatgtagtgttgctctgaatcgagtgtagaggctagattttgtctctaggttatgagcatgtgactgaacaaaactgatgcaagccactttttgctctgcctcataaaatgccccaygtgcctctgccccagctgttttctctctctgttcccccagggtgaccttagaagccatttctgaaattggtagcatcctctactcccacccccgccaacaccaaagccagaaagtctgtgtgaagagggataccttgctgacctagtcaaccctcc

SEQ ID NO: 199176 - DNA, 615 bp, Homo sapiens
gctgggtgcagcaggtggctgccgtgctccgtggggtgggacggtgtagcctgctcagcaagggagccagtgaaagctccatgactgaagggaccctctagcaggtgcacagctgactgggggcactgcacaaggacctcaagggccagctcagccttagcaacaaaaacagcaaaaccctgactggcagaacaatgttgagccaaccatggatacctggaagaaatctcatttagttgtggtgtataattccttttatatggtgttggatttgttctgctaatattttctcagatatatttgtgcttatgctcaaaaaatcagatatattggtttgcagttatctttttttttttttttttttttttttgaggkggagtttcactcttgttgcccaggctggagtgcaaaggcacgatctcagctcactgcaatctccatctcccaggttcaagcgattctcctgcctcagcctcccgattagctgggattacaggcatgcaccaccacacccggctaatttttgtatttttagtagagatggggtttcaccttgttggtcaggctggtctcaaactcttgatctctggtgatccacctacctcggcctcccca

SEQ ID NO: 199177 - DNA, 540 bp, Homo sapiens
taggtaaggatccagcttcattcttttgcatgtgggtttccagttttcccagcatgaatttgattcttcttttcttctttcttagtcaagtcagctaaaagcttgtcgattttgttgatattttctagaagccaacttttggttttattgattttcctctcttgtttttctattgtctgttctatctctgctctatagatgtcacaattctttatttgtctaaactcaaattcaagtctactcagtccttttcctgccaggagggcagaaaattcaatggtttttcctggagtgccctgctcctggggtatgctgcgccatcaggaaaaccctccagcctccaccatgtggttagcagtgctgacttgctcagagttaagggycccctgaattgtggtgcctctctgttttcctgcccttcaaagaacaagagaatttttgttgagggctggggactctattcacagggttgaccctctttaggacggtatgtggtactctcttcaccggccctgtcatagccacaggtttgcgttccca

SEQ ID NO: 199178 - DNA, 383 bp, Homo sapiens
ctgtctctgtcttgctcttatactctcctctcttcctggtatacacacatacacacacacacacacacacacacacacacacacacacacacacacagagtcactggagatatctgtggcagtgctggcagtgggggatgctggacatcctgtgcagggtgtyaggagtcccaggatacttgtgcaccagccacatcccagcttaggacgtgggggtgaagttaccacctctggcccctggtgtcctccattcccagactctctagccaaagatcatttgcagaccattcacattcattctttgattcacttgtccagatttcccataggatgcatcctggttcattcccttgttccctggccttgaagagtctgtccagaga

SEQ ID NO: 199179 - DNA, 485 bp, Homo sapiens
ttaaatgacaaataaccaacttttggaaaacaatattcaggaagttaggggctacttactatccatctttctatataaagagcttctaaaagtcagtaaagaaaatgaaaataatttaaaagaaaaatgggcaaaggatgccagtggagaattcacagattcagaatctgtgtgtgaaaagatgctcaacttcaaagggaatgtaaattttagcyataatactgtattttgttttgtctctctggtttgcaaaaatgaaaaagactgataatacccactgctggcaagcatgtggagaaacaggccttctcatctgcggtgtgagagagggcagcttggtgaacatcaagcttcttgaatacaagttgccaatctgttcaactgtaaaatgcacatactcttgaagaaattttacttctagggctttagacttaaattaaaaaaaatcttgttatatgcacattaggatgtctacatgagatgtt

SEQ ID NO: 199180 - DNA, 485 bp, Homo sapiens
ttaaatgacaaataaccaacttttggaaaacaatattcaggaagttaggggctacttactatccatctttctatataaagagcttctaaaagtcagtaaagaaaatgaaaataatttaaaagaaaaatgggcaaaggatgccagtggagaattcacagattcagaatctgtgtgtgaaaagatgctcaacttcaaagggaatgtaaattttagccataatactgtattttgttttgtctctctggtttgcaaaaatgaaaaagactgataataccyactgctggcaagcatgtggagaaacaggccttctcatctgcggtgtgagagagggcagcttggtgaacatcaagcttcttgaatacaagttgccaatctgttcaactgtaaaatgcacatactcttgaagaaattttacttctagggctttagacttaaattaaaaaaaatcttgttatatgcacattaggatgtctacatgagatgtt

SEQ ID NO: 199181 - DNA, 485 bp, Homo sapiens
ttaaatgacaaataaccaacttttggaaaacaatattcaggaagttaggggctacttactatccatctttctatataaagagcttctaaaagtcagtaaagaaaatgaaaataatttaaaagaaaaatgggcaaaggatgccagtggagaattcacagattcagaatctgtgtgtgaaaagatgctcaacttcaaagggaatgtaaattttagccataatactgtattttgttttgtctctctggtttgcaaaaatgaaaaagactgataatacccactgctggcaagcatgtggagaaacaggccttctcatctgcggtgtgagagagggcagcttggtgaacatcaagcttcttgaatrcaagttgccaatctgttcaactgtaaaatgcacatactcttgaagaaattttacttctagggctttagacttaaattaaaaaaaatcttgttatatgcacattaggatgtctacatgagatgtt

SEQ ID NO: 199182 - DNA, 485 bp, Homo sapiens
ttaaatgacaaataaccaacttttggaaaacaatattcaggaagttaggggctacttactatccatctttctatataaagagcttctaaaagtcagtaaagaaaatgaaaataatttaaaagaaaaatgggcaaaggatgccagtggagaattcacagattcagaatctgtgtgtgaaaagatgctcaacttcaaagggaatgtaaattttagccataatactgtattttgttttgtctctctggtttgcaaaaatgaaaaagactgataatacccactgctggcaagcatgtggagaaacaggccttctcatctgcggtgtgagagagggcagcttggtgaacatcaagcttcttgaatacaagttgccaatctgttcaactgtaaaatgcacatactcttgaagaaattttacttctagggctttagacttaaattaaaaaaaakcttgttatatgcacattaggatgtctacatgagatgtt

SEQ ID NO: 199183 - DNA, 564 bp, Homo sapiens
gaattctatttggtcagtcatcccttttcttgccagaactacatattgtctccttattcctgatgttgcctctgagcaattttccatccaatgaccaccttgctccttggctgtaaattcctacttgcccacgttatattcagagctggcccaatctctttccccaactacaagacccagttgcagtggttgctgtacctaggctgatggtctcaaataaagtcttccttactatgctttaacaagtgccactgaataactttttctttaacaccttatacagagatttcctgtstctcacctcccatgggcaaaggtggatggaggaggattagggatcaggcactggctaggcaggagtctgaagatccaggcagatgtaggaatagacagaacttcctcatgaggaagaagtgaagcagaacccaaatcccagtcccgtgaggtgtgacagtggcatagacaagacttaagggccagagagcaggagctggagtgggtatgaacctagaaagggaggaagttgagaaagggggccccaaaagaagggcctacaacagtaac

SEQ ID NO: 199184 - DNA, 416 bp, Homo sapiens
aatagtcatttgttcattcattcattcattcattcattcatttgttttgagacagggtcttgctctgtcacccaggctagcgtgcagtggtgcagttgtggctcaktacagcctggaactcctgggctcaagtgatctttctgcctcagcctcctgagcagctggaactataggcatgtgccaccactcccagctaattgttttgtagagacagtatcttgctgtttcccaagctgatcttaaacttctggccttaagtgactcttgtttacttttgttttatgataaattacattttaatacaataagaaataaaattaatgcagagtaatccgtggtaaacaaaatagcaaaaatttgaatcaagacaggatctggcaatgccgtgttgagacatttgaagcctaaggcaaaag

SEQ ID NO: 199185 - DNA, 447 bp, Homo sapiens
tccaggagtcctatattatactttaaaagttaatttaatttagggcattcataaatttatacttgaatgttttccaatattcctgtgttcttcccagacaactctttgatgttgtgcttgaacaatttgttttttgtatctataatggacataaataaaggcgaactccaatgctttgctataaggagatgcagcccacgtattcagaggtctatctgagtctaaaagcacaaatcactgtcaccacagaaattcccaaattggtggtgttattataaaggcattgccatttaataatcctttattttttaatgtcagtgaaggatgaaagtagataaaactgagatataatactctgagatgtaataaaaaaraaattaaaacccctacctgcaccctaaaaaaaaaaaaaatcaggaaacacttagagttcatttaaacaaacct

SEQ ID NO: 199186 - DNA, 447 bp, Homo sapiens
tccaggagtcctatattatactttaaaagttaatttaatttagggcattcataaatttatacttgaatgttttccaatattcctgtgttcttcccagacaactctttgatgttgtgcttgaacaatttgttttttgtatctataatggacataaataaaggcgaactccaatgctttgctataaggagatgcagcccacgtattcagaggtctatctgagtctaaaagcacaaatcactgtcaccacagaaattcccaaattggtggtgttattataaaggcattgccatttaataatcctttattttttaatgtcagtgaaggatgaaagtagataaaactgagatataatactctgagatgtaataaaaaaaaaawtaaaacccctacctgcaccctaaaaaaaaaaaaaatcaggaaacacttagagttcatttaaacaaacct

SEQ ID NO: 199187 - DNA, 459 bp, Homo sapiens
ttaatccattcatgagggcagagccatcaggacccaatcacctcttaaaggctccacctttcaatactgacacgttggggattaagtttcaaaatgagttttggagtggacaaacattgaaatcatagcatcacccccattcaaagttctttagttctaccaaattttctgagtccttgcttttttttcttgcaaataattatatatgcaaataatgtgggctcctttgcttttcccttatctatattttactttgttttgttagttgtataatgtgacaacaactacttttacaattagttgcataatgttgcaactaataaagtattttatttataattctaataaagtatactttattagttgcacttctgaaacaaatctaagtaactctcagtggtgtggactkctgtggtgttgtttccaggctacagttcagaagtgtgcaaatgtgagcaa

SEQ ID NO: 199188 - DNA, 228 bp, Homo sapiens
aatattggctaaaatattttaaatagtgcaactgatactgtattaaaggaaatttaagttaatctcwtttttgtgcacaggcattggaacctgaaaaaattgaaattttgggtcacagaaacatagcaagaggtaagatgccttattcttttagaggtgacaattttttcatgatggtgagtgactaatttaacttcttgactgtataaatttgtatggataaaaatt

SEQ ID NO: 199189 - DNA, 494 bp, Homo sapiens
tgacctggtagcatttctcttgttctctccattgagaacacatgtgtaatataccttgggaagaacatctggaaagacatacactgaattttaatagtagttacccttgggtggtagaattttacatggttctattatttttcttttggttcatttgcatttctgatttttatctacaatgtatgtatgtttcatgtaaaattaaaaaatagtcaaaaatctcagaatgttcaagaattgcttatgataataacatatgcaaacaagtcagaattagacctgagctgcctctttctattaaagtcaacatttaaatttcattgattttagaatttacttgaacttaacttgattcaacttagaacaccctggtgagcatctattatgtgtcctaggtaccatgctaggccctgaataaagatggagagatgcartttctatcctggaggcagcaatagagatatgacaaattttaatgaaagtgaaagagagag

SEQ ID NO: 199190 - DNA, 486 bp, Homo sapiens
atctggcagccctgcagctgctccgcgctggacagttgctgctgattcagctcttctgtctgaaacacagacaccattagagaattcaaaaaaggcagaagtctgtaagcctgacattttttcaatctgggtactgacctgaacagccaaccattcttcagcttctctgcgattgttggcaagcaccgtttcacactgacagcgcatctcatccaggaccctgttgaggtcaagggtgggggcagtgtccagctccacactgaggcggtcgccaagctgttcacgaagcaagtgacttcctgaaagtgggatggtgtaaagaatgtcacagaatgggggggaaaaatcccatttgacatccaatggcattctacttctgttttttggagcaktgggtaaaagtgtgagattttgattcagattgcctgggctgaatctcttttcaccacttagaagggcctcagtttcttcgtctgtaaaatggac

SEQ ID NO: 199191 - DNA, 472 bp, Homo sapiens
tcttttcttttgcctttgggtaattgacctaacagattttatggcttattgaaacaatgytatgctgttattattaatttttgatttgctcaggaaaaagtatctgagataattttttaaaattaaggttattacatccatgtatatttctgtaggtgctttgaaagtacctgtgacattaagttacaggcctttgactcctgggtctaacaaggacaccaaggtctgctaaatcttaagcactgacagcaattaaaacctcatcttcaggcctggtagaagatgccaatcaaaataaactgcattcctgagacataaggccagaagtaaaagctattcaactcctcaaggctcaggaactaccacagaagaggtaggcatgtgagattgtaagggctgattttgagagacaaaataagttcagtttctctgcaagttaataattgatgtcaaaggcacactgatgcaatac

SEQ ID NO: 199192 - DNA, 472 bp, Homo sapiens
tcttttcttttgcctttgggtaattgacctaacagattttatggcttattgaaacaatgttatgctgttattattaatttttgatttgctcaggaaaaagtatctgagataattttttaaaattaaggttattacatccatgtatatttctgtaggtgctttgaaagtacctgtgacattaagttacaggcctttgactcctgggtctaamaaggacaccaaggtctgctaaatcttaagcactgacagcaattaaaacctcatcttcaggcctggtagaagatgccaatcaaaataaactgcattcctgagacataaggccagaagtaaaagctattcaactcctcaaggctcaggaactaccacagaagaggtaggcatgtgagattgtaagggctgattttgagagacaaaataagttcagtttctctgcaagttaataattgatgtcaaaggcacactgatgcaatac

SEQ ID NO: 199193 - DNA, 591 bp, Homo sapiens
aggagggctggtagtactggggattataacagctgggcctggagcaggtggacacactgcagcttgagtggcagcagctagaaatgcagcagctggggcagcacagggactggcagcackggggcctgcaacagctggacacagagcagctgggatggtagcagatggttctgcagtaggtggtctggcagcaactgcagcagcagcaggtctggcagaggccttggccacagctctattcagagcagacagagctacaacagaagctgaccatggtgtcagatgagaatcgcagatgacgagcagaaggaggcacttcttcctgtacaatgtgtctccatgtggttcaaggaagtagccacactcaccaagcaacaagataaatggtctttgacccacacaagattcaccggaaatactgatatcctttcaagtcactaagtctttggtctttcccgccttgtaaaaaagcttggctctttatgccgtacttcacagagccctactcctgattcatcttcttgagaatacaaagtcgcagttatatttgaatttaggccacagtcttatggatggaattgcacccagcaa

SEQ ID NO: 199194 - DNA, 591 bp, Homo sapiens
aggagggctggtagtactggggattataacagctgggcctggagcaggtggacacactgcagcttgagtggcagcagctagaaatgcagcagctggggcagcacagggactggcagcacgggggcctgcaacagctggacacagagcagctgggatggtagcagatggttctgcagtaggtggtctggcagcaactgcagcagcagcaggtctggcagaggccttggccacagctctattcagagcagacagagctacaacagaagctgaccatggtgtcagatgagaatcgcagatgacgagcagaaggaggcacttcttcctgtacaatgtgtctccatgtggttcaaggaagtagccacactcaccaagcaacaagataaatggtctttgacccacacaagattcaccggaaatactgatatcctttcaagtcactaagtctttggtctttcccgccttgtaaaaaagcttggctctttatgccrtacttcacagagccctactcctgattcatcttcttgagaatacaaagtcgcagttatatttgaatttaggccacagtcttatggatggaattgcacccagcaa

SEQ ID NO: 199195 - DNA, 603 bp, Homo sapiens
aagcttagcctagccatggatttgtaccatcaaatacctatgagttgggtgaattcctctcctcttgaggttccaagataaacttggggctcctggaactgttagaaagtgacatgctttacttaccacaggtcaggaaccctgtacagggactgtgtagataaggtatgaggccagttctcccaaggggcttttattggctccataagtcaagtttgattcctcaaagaagagcacaccattcaagtaaaagccttggtaaaatgaccaatttatcgtgtcctgttacaaatgamaacagattcttattgcacttacgcaaataactgtattgccataagttaagaatactcacagatagtttccaattctggggaaaatcaggtagagagaaacaaatatgctccaaatatttttcacaggagtatactaacttgttaaaagctgacaacagctcaaaagaaaagtttccttgactgaaaaaaacaaaataaagggtcagcaatgttttaagcgaaaagtcaaaaagattacttcagtcttctgttagttcagttcatgcagttaattcctgttctgcttgctattcatgaacatttcagg

SEQ ID NO: 199196 - DNA, 603 bp, Homo sapiens
aagcttagcctagccatggatttgtaccatcaaatacctatgagttgggtgaattcctctcctcttgaggttccaagataaacttggggctcctggaactgttagaaagtgacatgctttacttaccacaggtcaggaaccctgtacagggactgtgtagataaggtatgaggccagttctcccaaggggcttttattggctccataagtcaagtttgattcctcaaagaagagcacaccattcaagtaaaagccttggtaaaatgaccaatttatcgtgtcctgttacaaatgacaacagattcttattgcacttacgcaaataactgtattgccataagttaagaatactcacagatagtttccaattctrgggaaaatcaggtagagagaaacaaatatgctccaaatatttttcacaggagtatactaacttgttaaaagctgacaacagctcaaaagaaaagtttccttgactgaaaaaaacaaaataaagggtcagcaatgttttaagcgaaaagtcaaaaagattacttcagtcttctgttagttcagttcatgcagttaattcctgttctgcttgctattcatgaacatttcagg

SEQ ID NO: 199197 - DNA, 227 bp, Homo sapiens
tagaaaacattgttagcatcaggccacaacaaacrgaacttaaggaaaataacttatatgagctgaaaacaagttgaaggggagagaaaacagcaagtaaatagttgaactttgggttaaaaaattaaaatctcttataatttattaagagtaaatcaatcccttaagaaaatttcatcgctgtaactaattatttagtctataagtgttttttttagcatgaagcc

SEQ ID NO: 199198 - DNA, 565 bp, Homo sapiens
tgggctacaaatgattctgtcaccaggtactgagcagtgggtcatttttagcccttcctctctccctctctcccccctttttggagtccccagttgttctcatctttgtgtccatgtgtatccaatgtttagctcccatttgtaagtgacaacatgcaatatttggttttctgttcctggaaaaatttgcttaagataatgtcctccagccacatccatgttgctgcaaaggacaaaatttcattcttttttatggctgtgtagtattccatggtgtgaaaatgtcacatgttctttatccaatgcactgttgatgggcacctagactgattccrtgtctttactattgtgcacagagctgtgatcttttaaaacactgtatttcaatttctttttttttccagtaaaagcagctattaggtggtttagcaaagtccatgtattttctactgagtcatgtgtaatgaatcctcaacacaaacacagtggatctccttcattctgactggcagagtttcaatggggagttcatgctgccatgtagagagggccaccttcacggcca

SEQ ID NO: 199199 - DNA, 588 bp, Homo sapiens
tggcattctagtaggagcacctgctcttgatgtttttacttttatttgactattatcagctctgaaatggccttaagctattgagccaatcaagtttaagatgatttgttcagatatgttcaaatatgaaaaataagcttcatattttttcagatgccttaagaaaaatgttgtccagatctcagtcatagagttatgatgccttcttaaacatgaggcaggataaataaggttaggaggctgtgaaagtaaaataaatattggggyccccaaatcactaagctaaagggaaaaggcaaactcggaactgcttaggacaaacttgcctctcattctattcaaagtcacccctctgctcactgagataaatgcatatctgattgcctccttgggaaaggctaatcagaaactcaaaagaaggcaaccatttgtctcttatatacctatgatctggaagccccctcccagcttcgagttgtcccgcctttgcttcgagttgtcttgccttttctggaccaaatccgtgttcatcttacatatgttgattgatatctcatgtctccctaaaatgtataaaacaaaagtgtt

SEQ ID NO: 199200 - DNA, 569 bp, Homo sapiens
atgctagggccagtcttctcccagtcaagaaactccctcagagggggatcatagcagctgtaattcaggaggctctgcttaagtttacataatgtttatttttgtagttacagatttcagatgtttctaatttttataccactttggagggctactactcttttcattggccaactttacaagttgggcaaatgaccgttctctaaccagaggcaagagttatggcccatagaaggtttgctctgagagaaaagtaccccatacagttaagagcccaaccacatgatttccagayagctcgtatagcctaaagtatgtcagttgaattaccttgcaagttgtaaactaatcgacaaactcagaatcaattggatgttattttaataccctataagagttatgaaatcctaagagtaagaataaatgtaggaatcgagcaaattcaaagttctttaaaggaacaaggacaacatttacacatctttgccaaagagatgcaaatccaatcaagtgatgtgagtggggtaaactcttctgagagaatcagaagggtcttggttttgggctac

SEQ ID NO: 199201 - DNA, 551 bp, Homo sapiens
tttttaaactctggcctccacgcattctaggggcgggggtgtctttttttttttttttttttttgagggagggtggcaggctagctctarttcctgaaacagacgctccgaagtcgagttagttatcccttggccgtcttagtactcctcgggtttaatcttatttccacagagtttcttctgccgggatctccaccgaggttaccgaacaaaaacagcacagagcccagactggaggcagacccgggcgctgtctctgctaggcttatttacgtttagggcttttctttcctttttttaaagtgatgggggaagtctcattgtgtggcatgtgacagttcgtttgcttcaaaacaacaggacgtaaccacgcgaaaactagaaccagaggagggggcatgcgtttcttcaagtcagccaaacagcatctggtctttgaaagcgcaatttcatcaagaaactcctgttggatccctcctaactgtggaccaaaataagccaacaggaacgggtgtttacttaatggctagtttctgtttgaaatgggagga

SEQ ID NO: 199202 - DNA, 539 bp, Homo sapiens
tctgctgcatgtataattatctttttttcttataatttatcttattcataagattcttcttttttttttcattgtctttgaaatttaatagttttaccagtataatttttagggttaaatatttcagataatttccccaggttcccagtgggccctgtcaatatatagattcatgtcttttatttctgaaaaaatttttaaatataattataaatattaggttcgtaccaatgtgttgttttagttttcaggggctccaattatgcaaatattattccttctttgtctgtcttttatttctaccatgttctttctgccccttttcattctttaatttctgcgttctcagttgttaccttcgctgtcctaaattattattgtaaagttttaaaaaattgcmtatatttaaagtgtgcaaaattatgctttgctatacatagtgaaatagttactacagttaagcacattaacatatccagcatttcacatagttacttaacctttttgtgtgtgtgataaaagccacagtagataaaatc

SEQ ID NO: 199203 - DNA, 580 bp, Homo sapiens
agctggctctggcctcagccagccccagagagaggcccccacagcacagcggcaggctgaagggctccttgagtgtggccagagcagattctgaggctgaggaggtgctgagagygaacgagggctgctaccacattgtcacctctcaatcatagtgcagtgagactgtctctgctccatgcccaggcagattgccaggcattcacagcatcaatttgtgagtacccatgcctgattcagtagcctgagccacactactcttcatgggcatagattatggtacaatgcagcattctctgtgacacacccaggcattcagagtagccacttgcctggttcaacggactaggttgccccactcctcctttgcagagttcctggtgcagaggaccctctccatccgtgcccagacagatctccaaacattcaaaacacctgttcacctggatcagcagcctgacctgccccacccttcccatgcagagatcttggtgcaggtatcccctctgctgcatgccttggcagctcaccaggcatccggagcactcactctcctggattaggagtttaagctattatt

SEQ ID NO: 199204 - DNA, 599 bp, Homo sapiens
tccttttatccctcctcactacagcttcatagctcaggcttttgtcctcttttattagcttactaactagtctccctgtcacctaccttgccccaacatttttcatgttatagcttaagtgacctttctaactgtttaagatctttaaagaacttccctatcacctataaaataaagccaatctcctgagtatggcaaatacggaattttgtaatctggtccttrccctcatgttcatccttcattcctgccacatcctttgatatatccagtgtttcagttatagacaactttttatagttcttgagcaagctattcttcctttccggaatacttctattcttccctataatccattttatacatttattacagtagttatcatatgaacctattaaataatgtttgtctttttccacttccaagtactatcttttacactaagtcagagtttattggaattttgtgaattgtcttctctgaaggagagacagtggcagacttggagaaagcagtgttatgtcttatttggccaaagaaagactaaaaccacctggctcaggagattaccaccgtaggatttctcaccctgacacagt

SEQ ID NO: 199205 - DNA, 599 bp, Homo sapiens
tccttttatccctcctcactacagcttcatagctcaggcttttgtcctcttttattagcttactaactagtctccctgtcacctaccttgccccaacatttttcatgttatagcttaagtgacctttctaactgtttaagatctttaaagaacttccctatcacctataaaataaagccaatctcctgagtatggcaaatacggaattttgtaatctggtccttgccctcatgttcatccttcattcctgccacatcctttgatatatccagtgtttcagttatagacaactttttatagttcttgagcaagctattcttcctttccggaatacttctattcttccctataatccattttatacatttattacagtagttatcatatgaacctattaaataatgtttgtctttttccacttccaagtactatcttttacactaagtcagartttattggaattttgtgaattgtcttctctgaaggagagacagtggcagacttggagaaagcagtgttatgtcttatttggccaaagaaagactaaaaccacctggctcaggagattaccaccgtaggatttctcaccctgacacagt

SEQ ID NO: 199206 - DNA, 506 bp, Homo sapiens
agagtattcatttgggcttaagcagcagggagcagaacagaattgagactgagataagttagcatttgggtatactagataatctgtctggaggcagataattggamtttttgagtcagatatgaattgtgactccaggtgaagaagtgaatctgaaaccaggcaggcaggcagaattcaggtttatagataaaccaattgaacattaggggaaggcagaagaccagaaaccaggcagacaagttagcagaacaagacaatgaagtactattaaggcagacactttaatctagacaggtaattcataggaaccgaaaaggcaatagctgactttcattttgaagcatgctcttgataaaaggtgatgattttcataagcttcccattaaaccaaaagccagtctcaagttttggtttttgtaatacttgctggtattaatagaagtagaaaataatgactcagcctagcaggaatagggaaggtgcccacagcatataaggccaca

SEQ ID NO: 199207 - DNA, 506 bp, Homo sapiens
agagtattcatttgggcttaagcagcagggagcagaacagaattgagactgagataagttagcatttgggtatactagataatctgtctggaggcagataattggactttttgagtcagatatgaattgtgactccaggtgaagaagtgaatctgaaaccaggcaggcaggcagaattcaggtttatagataaaccaattgaacattaggggaargcagaagaccagaaaccaggcagacaagttagcagaacaagacaatgaagtactattaaggcagacactttaatctagacaggtaattcataggaaccgaaaaggcaatagctgactttcattttgaagcatgctcttgataaaaggtgatgattttcataagcttcccattaaaccaaaagccagtctcaagttttggtttttgtaatacttgctggtattaatagaagtagaaaataatgactcagcctagcaggaatagggaaggtgcccacagcatataaggccaca

SEQ ID NO: 199208 - DNA, 519 bp, Homo sapiens
tatatacttctttacttatatattgctctccacagtgactgaactagtttacattctcaccagcatcatataagcattcccttttctctgcaaccctgctagcatctgttgttttttgactttttaataatgaccactctgactagtgagagrtggtgtctcactgtgcttttgatttgcatttctctaatgattagtgatgttgaacattttttcatatgcctgtttgctgtgtgtatgacttcctttgagaactttccagtacatgtactttgtccattttttaatgggtttttttttttacttattaatttgttctgggtacttgacatttgttggatgcatagtttgcaaaatgtttctcccattttgtatgctgtcaaagagagaaagtttttaatttggttgaagtccagtttgtcatttttttccttttatcgattatgcttttggtgtcaaatcttagaacctttttgcttaaccctagatcctgattttctactatggttttttttctaa

SEQ ID NO: 199209 - DNA, 545 bp, Homo sapiens
agaattcaccagtgaagccatctgatcctgggcttttcattgggaggtttttggtgactaatttaatcttcttgacatagtaaaggccatgtataaaaagctcacagctaacatcatggtcaatgtgaaaaaactgaaagcttttcgtcaaagatcagggaaaatgcagggatgmccattctcgtcatttctattcaaaatagtactggaagtcctagccagagaaataaggtaagaaaaagaaataaagacattcaaatcaaaaacagaagtgaaattgtctctgtttcttgagaacatgattttatatatagacaaacctaaatatcccaccaaaaaactgctagaataaacaaattcagtattgcaagatacaaaatcaacatacaaaaattatttgtatttatactaacaattagctatctaaaaaagaaattaagaaaacaatcacattgacaatagcatgaaaaaaataaaatacttagtaataaatttaaccaaggaggtgaaagacctgtacattgaaacttacaaaagattgaaga

SEQ ID NO: 199210 - DNA, 446 bp, Homo sapiens
ttttcttttttaatgctaatattaattttttacttatttaaattttttaatgttaatgcccaacttttaattttcctcctttcttaatcactttaagtgtatcttatgcatagcatggggtggtttttgctttgtaagatctgcaaagttttctttttatagttgaggtaagctattttacatttattgttgtaatttgtctgagcttagtttatgtgtcctgtatatctattcttaaaaacatgtttttttttcacattttgagatccctgattttgatttgtgtcytacaactaatgttttacaatcacttttgttcatttttcccctttgaccatctctgaaattaggatgtgtctatttatggcttatttgattcaatccaatatcatatttttaaaaacatttcacaattgtctttgttcttttatttttgtactttttct

SEQ ID NO: 199211 - DNA, 614 bp, Homo sapiens
ataattcaacgtgagattgggtggagacacagatccaaactatatcatggtggcagtgtaaattttagcaatcaaactgataagtgatctggcaaaatttagtataaataacaygcataaaccctgaagcccagtgctaccactcttaaagacataagtcatttaagggaaacagacacatacattcaccatgactttgcttacgtagcggggacttagaggcaaactactagtaggcaaatgtggggggtttttaagcagaatatcatgtggaggttggagataccagatgttcatacagtaataaaactaaaaaatacagtgctgagtcaaaaaccagcgagaaatatataacaaaatactttctgtgcatattaaaagctatatacatataccaacattatatatgtatacgtacatatagataaacacgcacacatgtgcatacacacacacttataacatttgagtagttgtctcttaagaggaaatgggactaatgagaaggaacaaagtagggaaactaaagcaaatcaacacataaacaaaggagagtccttgtgcagacccaaaataccagaaacatagttgacctgttggatttaagccctgaa

SEQ ID NO: 199212 - DNA, 614 bp, Homo sapiens
ataattcaacgtgagattgggtggagacacagatccaaactatatcatggtggcagtgtaaattttagcaatcaaactgataagtgatctggcaaaatttagtataaataacacgcataaaccctgaagcccagtgctaccactcttaaagacataagtcatttaagggaaacagacacatacattcaccatgactttgcttacgtagcggggacttagaggcaaactactagtaggcaaatgtggggggtttttaagcagaatatcatgyggaggttggagataccagatgttcatacagtaataaaactaaaaaatacagtgctgagtcaaaaaccagcgagaaatatataacaaaatactttctgtgcatattaaaagctatatacatataccaacattatatatgtatacgtacatatagataaacacgcacacatgtgcatacacacacacttataacatttgagtagttgtctcttaagaggaaatgggactaatgagaaggaacaaagtagggaaactaaagcaaatcaacacataaacaaaggagagtccttgtgcagacccaaaataccagaaacatagttgacctgttggatttaagccctgaa

SEQ ID NO: 199213 - DNA, 614 bp, Homo sapiens
ataattcaacgtgagattgggtggagacacagatccaaactatatcatggtggcagtgtaaattttagcaatcaaactgataagtgatctggcaaaatttagtataaataacacgcataaaccctgaagcccagtgctaccactcttaaagacataagtcatttaagggaaacagacacatacattcaccatgactttgcttacgtagcggggacttagaggcaaactactagtaggcaaatgtggggggtttttaagcagaatatcatgtggaggttggagataccagatgttcatacagtaayaaaactaaaaaatacagtgctgagtcaaaaaccagcgagaaatatataacaaaatactttctgtgcatattaaaagctatatacatataccaacattatatatgtatacgtacatatagataaacacgcacacatgtgcatacacacacacttataacatttgagtagttgtctcttaagaggaaatgggactaatgagaaggaacaaagtagggaaactaaagcaaatcaacacataaacaaaggagagtccttgtgcagacccaaaataccagaaacatagttgacctgttggatttaagccctgaa

SEQ ID NO: 199214 - DNA, 614 bp, Homo sapiens
ataattcaacgtgagattgggtggagacacagatccaaactatatcatggtggcagtgtaaattttagcaatcaaactgataagtgatctggcaaaatttagtataaataacacgcataaaccctgaagcccagtgctaccactcttaaagacataagtcatttaagggaaacagacacatacattcaccatgactttgcttacgtagcggggacttagaggcaaactactagtaggcaaatgtggggggtttttaagcagaatatcatgtggaggttggagataccagatgttcatacagtaataaaactaaaaaatacagtgctgagtcaaaaaccagcgagaaatatataacaaaatactttctgtgcatattaaaagctatatacatataccaacattatatatgtatacgtacatatagataaacacgcacacatgtgcatacacacacacttataacatttgagtagttgtctcttaagaggaaatgggactaatgagaaggaacaaagtagggaaacyaaagcaaatcaacacataaacaaaggagagtccttgtgcagacccaaaataccagaaacatagttgacctgttggatttaagccctgaa

SEQ ID NO: 199215 - DNA, 425 bp, Homo sapiens
cccgggttcacgccattctcctgcctcagcctcccgagtagctgggactacaggtgcccctttgtcatttctgattgtatttatawggatcgtctatctttttttattagtctagctagcagtctcaatcttatttattctctcaaaaaaaacaactcctggatccattgatctcttgtatgtttttttgcatctcaatttctttcagttgagctctgaattaggttgtttcttgtcttctggggttggtttgctcttgtttctctagttcttgtaggtatggtgttaggttgttaatttgagatgtttgtaattttttaatgtggacatttagagttataaactctgctcttgacactgtattagctgtgtcctagagattctggtattttgtatctttattctcattagtttcaaaaatattc

SEQ ID NO: 199216 - DNA, 535 bp, Homo sapiens
aaacatggaatcaatctaaatgtccatcaatggtatactggataaagacaatgtgktacatatacaccatataatactacgcagccataaaaagaatgagattatgttctttacagcaccacagatggagctggaggccattatcctaagcaaacaaacacaggaatagaaaaccaaataccacaccttctcacttataagagggagctaaacattgagtacacatggacagagagaaggaaataatagacactcggtcctacttgagggtgaagtgtaggagaaaagagagaattgaaaaatttcttattgggtgttatgcttattacctggataatgaaagactctgcataccaaacccacatgatatgcaatttacctatataacaaccctatacacgtaccctgaacctaacataaaaattgaagaagaaaaccaaaccattcaatcaataaacaaaaaaaaaagaaaattcaccagcaagacaattattatttaatattcatactgcatcagagagttacaaagacagaa

SEQ ID NO: 199217 - DNA, 535 bp, Homo sapiens
aaacatggaatcaatctaaatgtccatcaatggtatactggataaagacaatgtggtacatatacaccatataatactacgcagccataaaaagaatgagattatgttctttacagcaccacagatggagctggaggccattatcctaagcaaacaaacacaggaatagaaaaccaaataccacaccttctcacttataagagggagctaaacattgagtacacatggacagagagaaggaaataatagacactcggtcctacttgagggtgaagtgtaggagaaaagagagaattgaaaaatttcttattgggtgttatgcttattacctggataatgaaagactctgcataccaaacccmcatgatatgcaatttacctatataacaaccctatacacgtaccctgaacctaacataaaaattgaagaagaaaaccaaaccattcaatcaataaacaaaaaaaaaagaaaattcaccagcaagacaattattatttaatattcatactgcatcagagagttacaaagacagaa

SEQ ID NO: 199218 - DNA, 535 bp, Homo sapiens
aaacatggaatcaatctaaatgtccatcaatggtatactggataaagacaatgtggtacatatacaccatataatactacgcagccataaaaagaatgagattatgttctttacagcaccacagatggagctggaggccattatcctaagcaaacaaacacaggaatagaaaaccaaataccacaccttctcacttataagagggagctaaacattgagtacacatggacagagagaaggaaataatagacactcggtcctacttgagggtgaagtgtaggagaaaagagagaattgaaaaatttcttattgggtgttatgcttattacctggataatgaaagactctgcataccaaacccacatgatatgcaatttacctatataacaaccctatacaygtaccctgaacctaacataaaaattgaagaagaaaaccaaaccattcaatcaataaacaaaaaaaaaagaaaattcaccagcaagacaattattatttaatattcatactgcatcagagagttacaaagacagaa

SEQ ID NO: 199219 - DNA, 599 bp, Homo sapiens
tgagtatgtagagcaatgaaaactattacccaccaccagaataatagattggtgcaatcactttgggggagaaaataaaattacctaataaatttgaatattttcatgtcttaatatacaacaatttctcccyttagtgcatattctagataaacctaaaacatgtgctctaaatcaggagacaagcagcagaatattttcagtgatagtattaatattagtaaaataccgggtaaaaccctaaatgatcagcccagctgaatgagttaactgtgatgtattcataagacaaaatagtaaccatgggaaacaagaattgatccatatttatagggatgagtctaaaaatataatgttgggtaaaagaagcattattaacctattcaaacaagagtaaaaaccaatcaaaacctatctattaaatagagatacacaagtagatggtaaaatgatagaagaaagcaaggaaagaaagcaaaattcagaaaattcagaggaaaaaaagatgggtaaaaattggatacaaaactgttgggttagtattggctactcagttgtttattttgttataattatttaacccattcaaaatgtgctcc

SEQ ID NO: 199220 - DNA, 599 bp, Homo sapiens
tgagtatgtagagcaatgaaaactattacccaccaccagaataatagattggtgcaatcactttgggggagaaaataaaattacctaataaatttgaatattttcatgtcttaatatacaacaatttctccctttagtgcatattctagataaacctaaaacatgtgctctaaatcaggagacaagcagcagaatattttcagtgatagtattaatattagtaaaataccgggtaaaaccctaaatgatcagcccagctgaatgagttaactgtgatgtattcataagacaaaatagtaaccatgggaaacaagaattgatccatatttatagggatgagtctaaaaatataatgttgggtaaaagaagcattattaacctattcaaacaagagtaaaaaccaatcaaaacctatctattaaatagagatacacaagtagatggtaaaatgatagaagaaagcaaggaaagaaagcaaaattcagaaaattcagaggaaaaaaagatgggtaaaaattggatacaaaactgttgggttagtaytggctactcagttgtttattttgttataattatttaacccattcaaaatgtgctcc

SEQ ID NO: 199221 - DNA, 538 bp, Homo sapiens
gtgaataaagcatcatttttattttttaaaagctcatagactaataggtgtttccatgacaggagggtcagggaatcagtgacatgccaataaaacattatgatgtgctacatccagtgataaagaaagaacaaagtcctttaggaacactttttcctgcctatagaggtcaaggagttttcaacatagaagacatttcatttgtgtttttatcaatgagtagcattggccagatgaagaagcagaaaagaaagttcaataaagggaacagcacatgcaaaaccagggcattacmcaacatcatgaaatgtttgaataatggcaaaaaaaaaaaaaaaaaaaaaaaccccaccttggtatcaaaaacaaaataagtatgttttgtgagcatgtcaggatagggggcagttccagataaatgagtcaaggaaaaaaattataagcaaaatttgaaaggataaaaggatcttcatgttttaccaaagcaccctggatgaaggctttttagggcactggatgccaaaaagcaaagtgtaaa

SEQ ID NO: 199222 - DNA, 561 bp, Homo sapiens
catcagccactgaatcaccatgaagtgatatcaatttcagtcacattctttttttttttttttttcttaagatgggttttcagtcttgttgcccaggctggagtgcaatggcgcaaactcggctcactgcaacctccgcctcctgagttcaagtgattctcctgcctcagcctcccgagtagctgggattacaggcatatgccaccatgcctggctaatttctgtwtttttagtagagatggggtttcatcatattggtcaggctggtcttgaactcctgacctcagatgatccacccacctcggcctcccaacgtgctgggattacaagagtgagccactgcgcctggcccagtcacactcttacctagaacgtaagttgtattatatttcacttggcaccagtactcttcatatatgacagctaggaatgggggactttagcaacaatatatcatgtccatttactgttttctttcccctttcctatgtagtctgaagcctgaatgatcattatagcttcattcttccaccaatcattctatatctcacttcccctctt

SEQ ID NO: 199223 - DNA, 436 bp, Homo sapiens
ggtcggagaagattcgacctcccyagaagactcagaaggctgaactggctgctgctgctcactgatggaaagttcatgctccataggaggaactggaggctcaattggggcctcctgttgggttgcagaaggttccacctcctctggaaactgaattggggtctcctgctgggcttgggaagattctgtctcattggtaggctctgaagttatggtaacctccacatctgcaggtttaactgtaatgttgggcaagtgataataagcttgatcctcacctggaggttgaactgacacctcatgattcggtagagttagactctccatagaggactctggaggcagagctggggcctcctgctgcattgaagaaggttcttcctcaaggagctgtggaagctgtgctggggcttcttgctggagtgaagaggactgg

SEQ ID NO: 199224 - DNA, 641 bp, Homo sapiens
  misc_feature (1)...(641): n = A,T,C or G
cccctttgtagtctccctgatatgtgtgaatctagtgatggtcatgtgtctcagggaatgtgctccgtctccaaaaaccaggggatcattttctagcagtttagcattccttatttaaaatgtggtcgggcgtggtgactcatgcctgcaatcccagcactttgggaggccaaggtggatggattacctgaggtcaggagttcgagaccagcctagccaatgtggcgaaaccccatctctactaaaaatrcaaaaatcagctgggtatggtgatgggcaccagtaatcccagctactggggaggctgaagcaggagaattgcttgaatccgggaggcggaggttgcactaagctgagattcagccattacactccagttgggcaacaagagcgaaactctgtcaaagnaaaaaataaaaaaaaaaaaggaaggaaggaaggagggaaagaagtgaaaaaaaaaaaaagaaagaaaatgctcatagagcatttacctagattgatctgggttctggaaatcccctaagatgaattgtccctgagagatttcctagactttgatggttgggcttgatgaatccacccctccaaaaagagtgagaaaaagaggactttgggccaccactttttctggatcccct

SEQ ID NO: 199225 - DNA, 430 bp, Homo sapiens
ttttctttgttggaaaatatttcattagattacagcatttgttgtacatttattttaacatttgtttacttttttagtcactttggtaatttgcatctttgtagaaacatatccatttaatgtaagttatgcaatttgtgggcatacagttgttcatagttcctttttaatatttttaatttcagaaggkttagggataatgatttttttaatttcagattttagtgatttgtgtcttctcccttttttttttttttttctgagatgtagtctcgctctgtcaacaggctggaatgcagtggtatgatctgggttcactgcaacctccgcctcccgggttcaagcgattgtcctgcctcaccctcccgagtagctggaactacaggcacatgccaccatgcccagctaatttttgtatttttagtagaga

SEQ ID NO: 199226 - DNA, 430 bp, Homo sapiens
ttttctttgttggaaaatatttcattagattacagcatttgttgtacatttattttaacatttgtttacttttttagtcactttggtaatttgcatctttgtagaaacatatccatttaatgtaagttatgcaatttgtgggcatacagttgttcatagttcctttttaatatttttaatttcagaagggttagkgataatgatttttttaatttcagattttagtgatttgtgtcttctcccttttttttttttttttctgagatgtagtctcgctctgtcaacaggctggaatgcagtggtatgatctgggttcactgcaacctccgcctcccgggttcaagcgattgtcctgcctcaccctcccgagtagctggaactacaggcacatgccaccatgcccagctaatttttgtatttttagtagaga

SEQ ID NO: 199227 - DNA, 430 bp, Homo sapiens
ttttctttgttggaaaatatttcattagattacagcatttgttgtacatttattttaacatttgtttacttttttagtcactttggtaatttgcatctttgtagaaacatatccatttaatgtaagttatgcaatttgtgggcatacagttgttcatagttcctttttaatatttttaatttcagaagggttagggataatgayttttttaatttcagattttagtgatttgtgtcttctcccttttttttttttttttctgagatgtagtctcgctctgtcaacaggctggaatgcagtggtatgatctgggttcactgcaacctccgcctcccgggttcaagcgattgtcctgcctcaccctcccgagtagctggaactacaggcacatgccaccatgcccagctaatttttgtatttttagtagaga

SEQ ID NO: 199228 - DNA, 380 bp, Homo sapiens
ggttgccttctcacagtgttaactgtttcctcagatgtgtagaaactttttggtttgatatactcctattgtttatttttgctttkgttgcctgtgcttttgggatctttgctcataaaatcttttcctaaattaatgtcctgaagcattttccctgtgttttcttctagtagttttaaagttttgagtcctatatttagttttttaattcattttgagttgttttttatatagagtgtgaggtggggggtctagtttcatttttctgcatatgggtatccagttttcctaacactgttattgaagagaacttcccccacctttgtaaaaatcagttgactatagacatagattagtttttgtgttctatattctgtttc

SEQ ID NO: 199229 - DNA, 575 bp, Homo sapiens
ttcattgcagcattattcataaaagtcaagtggtggaaactactcaaatgttcaataacagataaatggataaacaaaagttggtaaattattaaagtagaataktattcagccacaaaaaaataatgaagtactgataaacactacaacatgaataaaccttgaacacatgataattgaagaatgaagagtgataaagaccatgttctgtataattccattagggaagttcagaataaggaaatctatagagatagaaagatgattagtggttgcttggggctaggagggacacagaaaaaggacaataataactaaaagacgtgaggtttcttcctgaagtgataaaaggttataaaattgagtgtggtggcagtttcatatatctgtaaatatactaaaatatcaaattatacatattaaatgggagaatggtgttcattctgtgaaatatatactttaataaagctgtttaataaaacaaaacttctcacaagaaaaaccccaggtatgtatgacttcactgataaattctaccaaacatctaaggaaaaaataataccaattctagacaa

SEQ ID NO: 199230 - DNA, 575 bp, Homo sapiens
ttcattgcagcattattcataaaagtcaagtggtggaaactactcaaatgttcaataacagataaatggataaacaaaagttggtaaattattaaagtagaatattattcagccacaaaaaaataatgaagtactgataaacrctacaacatgaataaaccttgaacacatgataattgaagaatgaagagtgataaagaccatgttctgtataattccattagggaagttcagaataaggaaatctatagagatagaaagatgattagtggttgcttggggctaggagggacacagaaaaaggacaataataactaaaagacgtgaggtttcttcctgaagtgataaaaggttataaaattgagtgtggtggcagtttcatatatctgtaaatatactaaaatatcaaattatacatattaaatgggagaatggtgttcattctgtgaaatatatactttaataaagctgtttaataaaacaaaacttctcacaagaaaaaccccaggtatgtatgacttcactgataaattctaccaaacatctaaggaaaaaataataccaattctagacaa

SEQ ID NO: 199231 - DNA, 575 bp, Homo sapiens
ttcattgcagcattattcataaaagtcaagtggtggaaactactcaaatgttcaataacagataaatggataaacaaaagttggtaaattattaaagtagaatattattcagccacaaaaaaataatgaagtactgataaacactacaacatgaataaaccttgaacacatgataattgaagaatgaagagtgataaagaccatgttctgtataattccattagggaagttcagaataaggaaatctayagagatagaaagatgattagtggttgcttggggctaggagggacacagaaaaaggacaataataactaaaagacgtgaggtttcttcctgaagtgataaaaggttataaaattgagtgtggtggcagtttcatatatctgtaaatatactaaaatatcaaattatacatattaaatgggagaatggtgttcattctgtgaaatatatactttaataaagctgtttaataaaacaaaacttctcacaagaaaaaccccaggtatgtatgacttcactgataaattctaccaaacatctaaggaaaaaataataccaattctagacaa

SEQ ID NO: 199232 - DNA, 575 bp, Homo sapiens
ttcattgcagcattattcataaaagtcaagtggtggaaactactcaaatgttcaataacagataaatggataaacaaaagttggtaaattattaaagtagaatattattcagccacaaaaaaataatgaagtactgataaacactacaacatgaataaaccttgaacacatgataattgaagaatgaagagtgataaagaccatgttctgtataattccattagggaagttcagaataaggaaatctatagagatagaaagatgattagtggttgcttggggctaggagggacacagaaaaaggacaataataactaaaagacgtgaggtttcttcctgaagtgataaaaggttataaaattgagtgtggtggcagtttcatatatctgtaaatatactaaaatatcaaattatacatattaaatgggagaatggtgttcattctgtgaaatatatactttaataaagctgtttaataaaacaaaacttctcacaagaaaaaccccaggtatgtrtgacttcactgataaattctaccaaacatctaaggaaaaaataataccaattctagacaa

SEQ ID NO: 199233 - DNA, 622 bp, Homo sapiens
gtctttttctatttattttgarcctatttgtgtcttttgttttttgagacagagtctcaaaaaaggttttttctaagtctgtgaaaaatgagactggtagtttgataggaatagcattaaatctgtcgattactttggaaagtatgtccatttcaatgttattgattcttccaatcaatgagcattaaatggttttgcatttgtttgtgtcatctgatttgttttagcattgttagagtactccttgtaggatctttcacctccttggttaactgtattcctagatattttagtttttgtttccatggctattaaaaatgtgattccattcttgttttggctctcagcttgaatccttttggtatacagaaatgctatggatttttgtacattggtttttgtaccttaaaaacttacggaaaatttttatcaattctaggatctttttgttggagtttctagggttttctgagtaaagcgtcatattgttagtgaagagagataatttgacttccttttgtcctatttggatgacttttatttctttctctggactgatttcccttgctaggatatccagtactgtgttgaacgggactggtgggagtgggcatacttgtcc

SEQ ID NO: 199234 - DNA, 391 bp, Homo sapiens
tgaaatatctcttgcattcaatcattcttactttctccaacttaaaattctctgtccctcttttaaactctgataattacttccacttctgttggttattcatggttttctgtctttcattatatttatttgtgtaacttttgtgttagaatgtcrtttcaatgggttgtatgcaattccatattattcttaattcaaatgggcataactatgatagattcaacatattattcttgtactaaaaactttgtgacatttatgttagctaaaagtaccattatttttaacctcctatgagtagccatgaagacatacatttttcacagagggaatctaaaaagttacataatagtatgaaatttcctcagaaatgaaatgttaaacaatacag

SEQ ID NO: 199235 - DNA, 541 bp, Homo sapiens
tcctcttctgagccctccaaactattccaacttctgcctgttacccagttccaaagttgcttccacattttccggtatccttacagcagcacsccactctgccggtaccaatttaatgtattagtttgttctcacacttctaataaagacatacccaaaactcagtaatttataaagaaaatagttttaattgactcacagttccacatgcctgggaggatgtagggctcaggaaacttacaatcatggcagaaaggaaagcaaacatatccttcttcacatggtggcaggaaggataagaaccaagataaaggataaaaagcctcttataaaaccatcagatctcatgagaaatcactcactatcatgagaacagcagcctgggggtaactgctcccatgattcatttacctccccactgagttcctcccacaacatgtggggattatggcaactaaaattaaagacgagatttgggtggggatatagccaaacaatatcaatgtccaaaagactaggaaaggataggaaatgaaaaagt

SEQ ID NO: 199236 - DNA, 524 bp, Homo sapiens
cagtcaaaaactggaaaaaatccaatgttcgtcaacaggtgaatgaataagcaaattgtgatacaaacagtggaatactactcagcawtaaaaaggaacaaactggctgggtgtggtggctcacacctgtaatcccagcactttaggaggccaaagtgggaggattacttgagcccaagagttccaggccagcctaggcaacataatgaaaccctgtctctacaaaaaacttaaaaaattagccaaaacatttaaaaaaattagccaggtgtggtggcatgagcctgtagtcccagctgcttgggaggctgaggtgggagcattgcttgagtctgagaggtcaaggctgcagtgaggtgtgattgtgctattgcactccagcctgggcaaaaaaatgagaccctgtctcaaaaaaaaaaaaaaaaaaaaaaaaaagagagagaacaaatttgatacaaatgacaacatggctgaatctcaaaataattatactcaatgaaagaagggaaaccaaaaaagagtat

SEQ ID NO: 199237 - DNA, 524 bp, Homo sapiens
cagtcaaaaactggaaaaaatccaatgttcgtcaacaggtgaatgaataagcaaattgtgatacaaacagtggaatactactcagcaataaaaaggaacaaactggctgggtgtggtggctcacacctgtaatcccagcrctttaggaggccaaagtgggaggattacttgagcccaagagttccaggccagcctaggcaacataatgaaaccctgtctctacaaaaaacttaaaaaattagccaaaacatttaaaaaaattagccaggtgtggtggcatgagcctgtagtcccagctgcttgggaggctgaggtgggagcattgcttgagtctgagaggtcaaggctgcagtgaggtgtgattgtgctattgcactccagcctgggcaaaaaaatgagaccctgtctcaaaaaaaaaaaaaaaaaaaaaaaaaagagagagaacaaatttgatacaaatgacaacatggctgaatctcaaaataattatactcaatgaaagaagggaaaccaaaaaagagtat

SEQ ID NO: 199238 - DNA, 596 bp, Homo sapiens
aattgttttgtaaatatgcatgtgttacttctatatggatatataaatatacttaaatagacttatttaaagataaatatgtgtacatatacgtatatgcarccaataatttttcaaaaatataaatgcaccaatatgtatgttatatacactcaaatatgtattttccccaaatgacatcaatttcatggtttttattggtattaagttttaatgttttaaatgttgtcttagtatctctatatatggattaataaatattcatatttatgccatcaattttaataaaatgcatctatctaaataggtagatgtataaatactgtattggtcagtttttgcacaataattattgacaatcaaccacttaaactcttagtgtcttattaacactaagtatttattttcatattcctgaatgttcattttaataatcagttggctgatcccaaggcagggctcagctggttggttcggctgcagggaatcgagcttgtctccagcctatggattgcatttatctgaggccaagcctgaaggacactgactactcagggcagaagattctcatggcaggtcgcaggagtagacaaatc

SEQ ID NO: 199239 - DNA, 596 bp, Homo sapiens
aattgttttgtaaatatgcatgtgttacttctatatggatatataaatatacttaaatagacttatttaaagataaatatgtgtacatatacgtatatgcagccaataatttttcaaaaatataaatgcaccaatatgtatgttatatacactcaaatatgtattttccccaaatgacatcaatttcatggtttttattggtattaagttttaatgttttaaatrttgtcttagtatctctatatatggattaataaatattcatatttatgccatcaattttaataaaatgcatctatctaaataggtagatgtataaatactgtattggtcagtttttgcacaataattattgacaatcaaccacttaaactcttagtgtcttattaacactaagtatttattttcatattcctgaatgttcattttaataatcagttggctgatcccaaggcagggctcagctggttggttcggctgcagggaatcgagcttgtctccagcctatggattgcatttatctgaggccaagcctgaaggacactgactactcagggcagaagattctcatggcaggtcgcaggagtagacaaatc

SEQ ID NO: 199240 - DNA, 569 bp, Homo sapiens
ctaatagattttattgaaaacattttgaaggtatatgtctattctttcagtatcaaacttattttctgttgtgtgtttgtgcaattctattcctgttcatgtacaattaactctataattgatactttgcttttagttgatgcttagaacaattattttggaatataattcagtcacgcacgcttcaactgggacccacgtgtcatgttggagcagaaaaattcctgtcacctagtgacattttagccatcataacagcatagactaatgcattactaatgtgtttgtgccaatgctgatgcaaacaaacytactgcactgccagttgtataaaagtctggcacatacaattatatatagtacataatacatgataataataaacaattatgttagtggtttatttgtttactgtactctatttttaatcagtttagagtgtattcattctgcttattaacaacaaaaagttaactgtagcttagctacaggcaggacctccaggaggtgttccagaaggcaatattatcatagaagatgacagctccatatgtgttattgcccctgac

SEQ ID NO: 199241 - DNA, 569 bp, Homo sapiens
ctaatagattttattgaaaacattttgaaggtatatgtctattctttcagtatcaaacttattttctgttgtgtgtttgtgcaattctattcctgttcatgtacaattaactctataattgatactttgcttttagttgatgcttagaacaattattttggaatataattcagtcacgcacgcttcaactgggacccacgtgtcatgttggagcagaaaaattcctgtcacctagtgacattttagccatcataacagcatagactaatgcattactaatgtgtttgtgccaatgctgatgcaaacaaacctactgcactgccagttgtataaaagtctggcacatacaattatatatagtacataatacatgataatrataaacaattatgttagtggtttatttgtttactgtactctatttttaatcagtttagagtgtattcattctgcttattaacaacaaaaagttaactgtagcttagctacaggcaggacctccaggaggtgttccagaaggcaatattatcatagaagatgacagctccatatgtgttattgcccctgac

SEQ ID NO: 199242 - DNA, 522 bp, Homo sapiens
tggatgctgccacaggctggtacaaggtatgtttctgctgtcgcccgaaggcattcgccccagctcctccacctgctcaactgtatgctcacccttccacaaggggtttgagccaccgctgtctcaagtccctcaagggygtcaagggaactctcacatctcagattctaaattaataccactcaacagaaaatttcaacaatataggattcatctaccatgaagcatgtatctgtaatgaatatgaaatagttgagattgcctgagtggccactttctcacatgcttccaaaaaattttgtatgcttttaaacttcaaaataattatgatgctacttcctcatttttctagcaaattcttggatgatatttatgtccttttacatttgaaagttataaccacagacttgagataaacgaataagatagtgcatctagttgtaagcctatataaaagtacattataaacgacagggaagatatttgagtagataagggcaagcctggaaagaaggacattta

SEQ ID NO: 199243 - DNA, 522 bp, Homo sapiens
tggatgctgccacaggctggtacaaggtatgtttctgctgtcgcccgaaggcattcgccccagctcctccacctgctcaactgtatgctcacccttccacaaggggtttgagccaccgctgtctcaagtccctcaagggcgtcaagggaactctcacatctcagattctaaaytaataccactcaacagaaaatttcaacaatataggattcatctaccatgaagcatgtatctgtaatgaatatgaaatagttgagattgcctgagtggccactttctcacatgcttccaaaaaattttgtatgcttttaaacttcaaaataattatgatgctacttcctcatttttctagcaaattcttggatgatatttatgtccttttacatttgaaagttataaccacagacttgagataaacgaataagatagtgcatctagttgtaagcctatataaaagtacattataaacgacagggaagatatttgagtagataagggcaagcctggaaagaaggacattta

SEQ ID NO: 199244 - DNA, 534 bp, Homo sapiens
atatttttgcaaaattcccatcaattgacagaaaaataatataatttcaattatgttaaatctggctgcacattcaatgccttgccatcactttctggttttttcaaccctggatcttcaattgaaccacaaaattttaaaaaaatgatttgagtaatatatctcaattatcccaagaatgatgcagttctagaagtgtgggaaagaaattaatttattacatacaatgcatgccttggggcgctcaagtttaattttctcaaggtaacttagttgaaagrccatgctcagaccattgaatcacagtctctggaaatatgatccaggcaccatgtgtttgttaatgtgttttttgtttgtttgttttggattcatgcaggttttataagcttttcatatggaaaatcacagattcatagtatttttttaaatatgacagctaacagaagagattaacagatataaaacagagataaacaatttgccaaactaggaaattggaaatctgattccacagatgtctatgaggataag

SEQ ID NO: 199245 - DNA, 727 bp, Homo sapiens
aaattattgaaagaatgaagtgtgacactatatacatttgggacagtaaatggtgattaagtggcagctaacataagaaatcatcttacgctgctcttgtattcccatgcccttatttgattccctatcactcagataagtttctgtttataaacttttgttagttctcctaakttcaagaacttactatgtaagaaaaaaactccctaattctgcttcagaataataaacggaaaaggactaagaatgctttccatataatccaactgaaatgtaacagctgttttctggagataatttttccattttgtgagataataaaaatatatcaaaaacatatcgttcataatttgcttagtgtgtgccaaagaccatgcctaagcctttaagtacattgtctcattcaaccctaaaaataattcttagaggtaagtatcattttcctacagaggctaagtagattttcccaagccacctcactggttagtagtgtattcagtatttaaactcaagtttttaacactctgtacccctaggataaaaggtcaaaatgatgaaaatgagaatccttgtaggaatgaactattttatgtgtctactttgagacagacacagcctttatagacttaaactgtggtctgatttccaaagtaggcaagattatttatacttggattatctataacatttttcttgtatttagcacttatatatttattttaatagc

SEQ ID NO: 199246 - DNA, 657 bp, Homo sapiens
gaatttctcaggagaaaacttgtaggccaaaagcgaatatgataatacatttaaaattctgaaattaaataaaaactgcaaaataaaaatactatacacagagatcttgtcttttagaacaaaggggtgataaaagctttctcagacaaatagaaacagagtttattaccactagacctgccttataagtaatgctaaagagagttctttaaacagaaagaagatgcaaattattatgaaaacatatgaaagtacaaaactcactggtaaacgtacattgtcaaatacaaaacactctaatactgtaattgcagtgggtaaatcaattatatmtctagtaagatggttaaaaggcaaaatgattaaaaacaaccaaagctaaaataatttttaatggatacaaaccataatactcaatgtatgacaaagaaaacataaactgtttaaacatgggtagtcaaaagtgaagtttgcatatgtgattaaaattaagttgttcaaaactcaaagttgcctgttataaataaaatatattttatataattctcagggtaaccccaaagtgaaagtctatagtagatacacaaaagatgaaaagatcccaagcataccactacagaaaattatcaaatcataaagtaagaaagcaggattatt

SEQ ID NO: 199247 - DNA, 516 bp, Homo sapiens
atataattctcagggtaaccccaaagtgaaagtctatagtagatacacaaaagatgaaaagatcccaagcataccactacagaaaattatcaaatcataaagtaagaaagcaggattattaaccaacaaattgaataactcagaagaaatgattaaactgctataaacatakgacctaccaagactgaaccaagaagatactggaaatctgaacagaccagtaatgagtaaggagattgaattagtaattaaaatctttcatcacagaaaagtgtaagtctaaatggctatactgctgaactctagaaaacataaaaatactaatcttgcacaaacttctccaaagaattcggaaagaatacatcaaaactgattttaggaggccagcaacaccctgatatcaaagccagaccaaaaaaaacaaatcaagctacaggccagtattactgaagaaaatagatgcaaacgttctaaaaaaatgcagttgaaccataagcaacataaaggttgactcac

SEQ ID NO: 199248 - DNA, 516 bp, Homo sapiens
atataattctcagggtaaccccaaagtgaaagtctatagtagatacacaaaagatgaaaagatcccaagcataccactacagaaaattatcaaatcataaagtaagaaagcaggattattaaccaacaaattgaataactcagaagaaatgattaaactgctataaacatatgacctrccaagactgaaccaagaagatactggaaatctgaacagaccagtaatgagtaaggagattgaattagtaattaaaatctttcatcacagaaaagtgtaagtctaaatggctatactgctgaactctagaaaacataaaaatactaatcttgcacaaacttctccaaagaattcggaaagaatacatcaaaactgattttaggaggccagcaacaccctgatatcaaagccagaccaaaaaaaacaaatcaagctacaggccagtattactgaagaaaatagatgcaaacgttctaaaaaaatgcagttgaaccataagcaacataaaggttgactcac

SEQ ID NO: 199249 - DNA, 516 bp, Homo sapiens
atataattctcagggtaaccccaaagtgaaagtctatagtagatacacaaaagatgaaaagatcccaagcataccactacagaaaattatcaaatcataaagtaagaaagcaggattattaaccaacaaattgaataactcagaagaaatgattaaactgctataaacatatgacctaccaagactgaaccaagaagatactggaaatctgaacagaccagtaatgagtaaggagattgaattagtaattaaaatctttcatcacagaaaagtgtaagtctaaatggctatactgctgaactctagaaaacataaaaatactaatcttgcacaaacttctccaaagaattcggaaagaatacatcaaaactgattttaggaggccagcaacaccctgatatcaaagccagaccaaaaaaamcaaatcaagctacaggccagtattactgaagaaaatagatgcaaacgttctaaaaaaatgcagttgaaccataagcaacataaaggttgactcac

SEQ ID NO: 199250 - DNA, 701 bp, Homo sapiens
gagacaacctagagattgagagaaaatatttcctaaccatacactggataaggggctaatatccaaaatatacaaggagctccaactactccataacaggaraaaaaaccccattaaaaataagtaaataaattggatagacatttatcagaagacatacaaacagccaattgatatgttagaaaatgcttaacattattaataatcagagaaatgtagattaaaaccacaatgacatttcacctcacacctgttagaatgctattatcaaaaaaaaaaaaaaaaaaatgaaagagaacaagtgttggtgaggacatgaagaaaagaaagcccttatataccattggtggtattctacattagtatagctattttgaaaaataagatgccagtttctcaaaaagctaaaaatagaattaccatataatgtagcaatcccagtactgcaccaaaacatactgtataatctcacttatatgtggaatctcaaaaaagttcaactcatagaagtagcaagtagaatgatggccactggggacaggagatagggtggtgggtggtgattaggggaggcggatagagaaaaggaaacaatggtcagtttctacaaagttgcattttgataggaggaataaatcctggtgctctattgcacagcaaagtgactacagttaataatagagtaacgtatatttcaaaat

SEQ ID NO: 199251 - DNA, 545 bp, Homo sapiens
atatactgcctgacagatcataagtttcttataagaagaaagggagcctggagtggagaattccagcatagtcgtagtgtccctgatactcagacttttctcctgtaggtctttagtgtataattcatgaacaaggcgaagaaaataagagagacaaattccaggttattcaatagtaagtctaggcagatttttttttttttttggaggagtttggcaggtgggaaaatacaaagcaaagagaagaaaaatggagaaagcagacctagaaaaagaggtctccaatagaaggyagcaaaagggacttgagctggggatatgtccacatgtgttctccgttgagaatttgcttcttcccactgtatcagaaagggagttataaagtgctccaacaacctgacatcatagatgttttctaaagtggcatactcaatttcactaatgtatacatagtagatgaagcaatcttgcttgatgttttaagagctggatagaaagaatgtggtggccagtttgcacttttgattgtatgttaaagatagtgt

SEQ ID NO: 199252 - DNA, 403 bp, Homo sapiens
tattaagaacccaattagcatctgagaattgttgccacgagtcaggtgaccagatgccttaagaatatctgttctcttaccttgctgcttcttccatttgggctttacctcttctttcccactcctccatccacggtggaaaaaaagaaaaagaaagaaagaaagaaggaaggaaggaaggaaggaaggaaggaaggaaggaaggaaggaaggaaggaaggaaggaagaaagaaagaaagaaagaaagaaagwgaaagaaagaaaggaaagaaagaaaaagaaaagaaaagaggcgccatgagcttgtcaccttctctaatggaggaagaggtgagttcatagtttttgtaaaacatttccacttcgaatctgctagtttcatgttcatccataattcatttt

SEQ ID NO: 199253 - DNA, 585 bp, Homo sapiens
aaaaacattgaaaagacaacctatggagtggaagaaaatatttgcaaactatatatctgataaggggttaagagattttctacaaattatattatgtaacctataaacagagayaattttacttcttcctttctgatttggatgcctctttttttcctgcctaatttctctggctcagatttccaatattatgttgaatagaagtaacaagagaggacataattgcttctttcatgatcttagaggaaaagctttcagtttttcattaatgagtagctgtgagccttttacttctgccctgttttatgtattggtattttttttctattccctagtttgttgagttttttaaatcattaaacagtattgatttatattaaatgcatttctgcatctgctgagatggtcttgtggtttctatcctttgttctgttcatgtattttatcacattgattgattttcatatgctgaaccatccttatgtcacaggcattaataccatttgacatggtgtattttatttcttggtttgctagtattttatggggatttggtcatcttatggtgtctttgtatgagtttga

SEQ ID NO: 199254 - DNA, 585 bp, Homo sapiens
aaaaacattgaaaagacaacctatggagtggaagaaaatatttgcaaactatatatctgataaggggttaagagattttctacaaattatattatgtaacctataaacagagacaattttacttcttcctttctgatttggatgcctctttttttcctgcctaatttctctggctcagatttccaatattatgttgaatagaagtaacaagagaggacataattgcttctttcatgatcttagaggaaaagctttcagtttttcattaatgagtagctgtgagccttttacttctgccctgttttatgtattggtattttttttctattccctagtttgttgagttttttaaatcattaaacagtattgatttatattaaatgcatttctrcatctgctgagatggtcttgtggtttctatcctttgttctgttcatgtattttatcacattgattgattttcatatgctgaaccatccttatgtcacaggcattaataccatttgacatggtgtattttatttcttggtttgctagtattttatggggatttggtcatcttatggtgtctttgtatgagtttga

SEQ ID NO: 199255 - DNA, 439 bp, Homo sapiens
tcttttctaaacccctctattgggttgaatgatgtccccacaaaatgcatttccccctggagccttagaatgtgaccttgtttggaaattaggtatttgcagatgtatgcagtgaaaatgaagccatactgcattagggtgatccctgatccaataggactggtgacagagagaaaattggacacagaagaaagacagaggcagaaactgaagttatattatcacaaccaagggatgtctggggctttcagaagctggaagaggctgtattagtctgttttcatgctgctgataaagacataccccagattgggaagaaaaagaggtttgattggacttrcagttccacttggctggtgaggcctcagaatcatggcaggagacaaaggcacttcttacatggtggtgacaagagaaaatgaggaacaaacaaaagcag

SEQ ID NO: 199256 - DNA, 410 bp, Homo sapiens
caaactgtactttatctataaacagcgctaataaactggcacaggttgttcctctctgttttggattctagctcaggactacattcatagctacttagtacatttcattcaagttttgccaatgatcagccctgatatggtttggctctgtgtcccaacccaaatctcatctcaaattgtaatccccatgtgatgagggaggaacctggtgggaggtgattgaatcatgagggcagtttctccaatgctgttcttgtgatagggagtgagttctcatgagagctgatggttttaaagtgtggcgcttcttcgctctctctgtctyctgccatcatgtaagatcatgccttgattcctctttccttccgccatgactgtgaagcctctccagccatgtggaactgtgagtc

SEQ ID NO: 199257 - DNA, 624 bp, Homo sapiens
gcttctacatttagctattctctgaggaattaaggtagtatttatttaattttcaagtatttggcattctcattcattttagaaatttgtgatgttacttcttatttctagaaaggtttatagtctcaaaaattcgattctaaccttttttcttattagacttcttcctttttagtagttcaaatgttctttctattctttcaaagacagygttttctttcctgagaccttttagacctttttatctttattggctgataaagcttgacaaaatatatcatcatctcccgcaaattggcttattcttcaaaagtcattaccaagagccatgtttgacccctccctctcaatggtcaccctaattagttaacaaattagttaacaaaacattctgtccaaacaatgccccataaggctaatctgtataaaaccacctattcctaataatcttaaaatgacataattggattaactcctaaacccatttgtaatctttccctatgataactctgcctacacgtagcagtcatatttaggctggagataaaattaacaattaaaatgactactagtcaaatggtaatataaacctatgcttctcttagtgtttactgcttcaacttg

SEQ ID NO: 199258 - DNA, 624 bp, Homo sapiens
gcttctacatttagctattctctgaggaattaaggtagtatttatttaattttcaagtatttggcattctcattcattttagaaatttgtgatgttacttcttatttctagaaaggtttatagtctcaaaaattcgattctaaccttttttcttattagacttcttcctttttagtagttcaaatgttctttctattctttcaaagacagcgttttmtttcctgagaccttttagacctttttatctttattggctgataaagcttgacaaaatatatcatcatctcccgcaaattggcttattcttcaaaagtcattaccaagagccatgtttgacccctccctctcaatggtcaccctaattagttaacaaattagttaacaaaacattctgtccaaacaatgccccataaggctaatctgtataaaaccacctattcctaataatcttaaaatgacataattggattaactcctaaacccatttgtaatctttccctatgataactctgcctacacgtagcagtcatatttaggctggagataaaattaacaattaaaatgactactagtcaaatggtaatataaacctatgcttctcttagtgtttactgcttcaacttg

SEQ ID NO: 199259 - DNA, 587 bp, Homo sapiens
gatatctataagcagaataataagctagacccctacctcttgcaatatacaaaatcaaaatggattaaatactttaatatctcaaactatgaaactactatgagaaaacattgggggcaatctccatgacattggtttgggcraaaatttcttgagtaatatcccacaagcacaggcaaccaaagcaataatagacacatgggattacaccaagtttaaaagcttctgtgcagcaatggatacaatcaaggaagggaagaggcacatttggatcctttggattttgcagtatgagagttttcaggagaaaatatttgcaaactacccatctgacaagggattaataaccaaaatatataaggaatgcaaacaactgtataggaaaataataatctgataaaaatgaacaaaatttgaagacatttctcaaaggaagacatgtaaatggcaaacaagcatatgaaaagatgctcagtatcagtgatcattagagagatgcaaatcaaaattgcaatgagatatcatcttgcccagttaaaatggtttatatccaaaagagaagcaataacaaatgctggcaaggatgt

SEQ ID NO: 199260 - DNA, 569 bp, Homo sapiens
acctttctccaaacaaacagagtctctctctctctcttcgtgccctgctgcctgcagctggrggagggatgactcagcacccctgtggccaccaccactgggtctctgctaagtcagacctgaagccagcacagtactgggccttgctgaaggcttatcgtgactattgcctggctactgctgatatttattcaaggcccaagagttctttagttagaaagtggtgaatcaagccaggcttgtctccttcgctttagagtaataagtttccttctggcccagggtgggtctagaagtgctgtccaggagctagggcctgaagttgtgaacattaggactctacttggtgttactgtgactaagatggtacccaagttgcaagactaagttctttttactcttccttctcctttccttaagcgggagtctctccctgtggccaccacagctggcaaagtgctgggtcacacctgaagtgagtactgcactgggtcttacccaaggcccctggtgagtactgcctgggtatgtactgctgatgtttattcaaggcccaagggctctttagt

SEQ ID NO: 199261 - DNA, 569 bp, Homo sapiens
acctttctccaaacaaacagagtctctctctctctcttcgtgccctgctgcctgcagctggaggagggatgactcagcacccctgtggccaccaccactgggtctctgctaagtcagacctgaagccagcacagtactgggccttgctgaaggcttatcgtgactattgcctggctactgctgatatttattcaaggcccaagagttctttagttagaaagtggtgaatcaagccaggcttgtctccttcgctttagagtaataagtttccttctggcccagggtgggtctagaagtgctgtccaggagctagggcctgaagttgtgaacattaggactctacttggtgttactgtgactaagatgrtacccaagttgcaagactaagttctttttactcttccttctcctttccttaagcgggagtctctccctgtggccaccacagctggcaaagtgctgggtcacacctgaagtgagtactgcactgggtcttacccaaggcccctggtgagtactgcctgggtatgtactgctgatgtttattcaaggcccaagggctctttagt

SEQ ID NO: 199262 - DNA, 630 bp, Homo sapiens
ccaatcatgtcttctttttcttctctgtcccttgtcttcaagacagacacaaaaatgcatacagatgcacacagacatactgagaaatacacaccaacacacatgaacagccacatacacagttttcttttttctttgaattgtttaatggatttaggggacagggtgagatgtaagattgatacaattacaaccgtaactgaattgccagaccataattatatcagaagatttgggtaatagcattagagagcttattttccttcaagtagacacttatggatccactgggtcacagatgcaataaggattaacggatgggccagtgatggcttaaagatagaatggacagatgaccacatccatgtgattgccagccatttaatggtttggctttccaaatcccaggcaaggccttctgttgtcmttttatctctactagccttgagtgcagcctcctctaaccctttctccggatggaaaaagtaatgcattaaaaatgtagttttaaataggttattaagttggtatctttcagaataatagagaactgtttcagaactgtgcttgaatgcatttgaccacatcatcttcatatccaatgagcctcactgagtaccagtttgctac

SEQ ID NO: 199263 - DNA, 483 bp, Homo sapiens
atcactggtcaggaaatgccaggtgtttgttgcatggaagcgaggtgtgatgatcaactcttgaaggtgccaatctgatagattcactcagcaaataattattaagtgcctatcatatgccaaggcctggtctaggtgctagccacrtagcagcagaatcaaaagacaaaaatctctgaacttaaaggggttatattctgggagtagaaagacaaaatcagaacatggtctcagatctgtctgacttcaaagtgcacactttaccattaaactgttctgccttctcatatcagctgagtcacttttttttttttttaacacaacaaaaaactgctcttggtggtggttgtaggggttgaggggggcatagaaggtatggttgatagctggagtgtaacactaaggtttgccttagtttatggaagtgtcataccacctgctgacacgacatctgagaacatgatacactagggagggctccac

SEQ ID NO: 199264 - DNA, 606 bp, Homo sapiens
catttttaaatcaccattcacgttatggctattaaagagatgtctagtaaagttttttaaaaattcaggaaatgtgaatatttaggattttaacattgttctttgtgtgttctagtccagccattatttttggaatttatatggacatctgactagggtctttttctaatcttargttccctataccacttcatcaatgatgaaatcatcagaaatacaactaagctaacaatttttaataatcttccatgttataaactcacacatggatttcaccctagctttgggattcgtatttctctttacagtcttctttggcaggtagtttccagacatacttttttcaagtcaggcgtttttcaattatagaaatatttctaatttttggtcatttctatatttgcaagcatttattactagctgacttggttctagcttttattgtctgttctaatatttcatgatctgttcaatttaacatgtctgtgaatcaaattgttagcaattgtgtatatcctgatatacatgcacgaaattttatctaataggtcactgattattttttaacttgatacaaattagttatgtcaaagaaaacttactcca

SEQ ID NO: 199265 - DNA, 593 bp, Homo sapiens
taatttttgtgtatcccaaattaaattatttaaggcactttctctgctaaaattacaactaaactattgttataaacaatgaaaatacttgttagtctttctcagaaatataagaattgaatatcaatacttttaaaagaataaaggtattgtggactactgtgccccaaaattcaaatagcaaacatagctctaatgaaaagatgaacagaagggcccccaaaaggtcttgcctttcggttttaatatcctaaggagragacgaactgatacaagttatgtcccaggtcactctatacatctgccacagccacagggcccacttcagctctgcactatagaaccaaacaatatcaaatacccctgcatgctgaaactgatcaaaaccagctataaatactaacattgaaataaataaaatatcataggatatagattcattgaataaggtaatggaaggatttattttgctcatgggttaaaaagaggagaaaactcatcctgaaattctaataggagagaaggtgaatcatttgactaggggataaactgagtggaaatctgagaagccaaagtagaaatcagacaaaatt

SEQ ID NO: 199266 - DNA, 552 bp, Homo sapiens
cccttgggacgttcttaggggctcacctgttcctagaaggtcagagctactctgccttgtaattggaaggttgtcttcctacgcacccatccttatccttcctttctttgcttttcctctgtacccatgggtattatttaaagaaacctatgaacttacttagcatggtttgtaatgaaaggcagttgtgtgtttttatgttattctggtttttttatgawgtgtaaagttgacttgaatttttcttttctctagtactgtaaaatcatgcctagatcttttggttaactggctgcacatataccttaataaccaggattcgggaacaaaggcattctgcgatgttgctctccatggaccattttactcagcctgccaagctgtgttctacacctttgtttttagacacaagcagcttttgagcggaaacctgaaagaaggtcagtgttgtgggagtgctggactggattttccttgtgttcttgtcacccttcagaatggtgattcattacttttttgagatttttataaaaactggattcagaaaactgc

SEQ ID NO: 199267 - DNA, 513 bp, Homo sapiens
gaataagttttagtgatctattgcacactatggtgactatagttaatgtgtatttcaaaactgtaccttgcattattcacttaacggttaatcttggaaatggttctatgtcagtagagagtgtcctcattcttcttttatatgtatgtacgagagattatttaagccagcccctactattggaacacagtttgcttccaggttttaggtcattgtaaccagtgctgcacagctttttgcatgaagctttggtgctagttccaaaggattctctgaaarcaaagaatatagtcaaatggcagggatattttggaggccattgataccgttctgaaattctctctccatagggctgctgtttttgctacttcctccaggagaaaatgaaagggctctgtttgtttatttttattttttattttttctgaaatcattcttttattcttttcatgaaatttcagaaaaattccaggagagctaacaacaaggactaaggttaaaaccaaaatttaa

SEQ ID NO: 199268 - DNA, 399 bp, Homo sapiens
ggggccgttcctgtcagctctgcagatgcagaggtggacgcgagctgggggcagcctccggacactcctgggcacgccatacgggaggtggcctgcgcggggatccctgccggtgcccacaggccccgtgggtgggtgctgctgtgagcctgggstggtgggccctgctctccaggctctgagcctcagtttccccatctggaaagggggacagtgatggggctcccagcgggctgctgtgagggtgggaggatggaggagtgccctgagccccctggcatcccacacccgcccccaggagcctagacgtgtggatcggcttctcgactgtgcagcgggtggaggtgggcccagcgccgcagggcgaggccttcagcctggagagctgccagaactggc

SEQ ID NO: 199269 - DNA, 275 bp, Homo sapiens
ttgccttggttgaatagaagtcaaacagtagtggaagagtatttggcttttcttggtaatcttgtatcagcacagactgttttcctcagaccgtgtctcagcatgattgcttcccattttgtgcctcgtaagtcattgcttggaattttattttctttttaatacttctttattaaaatacyaccttccccttatatatgagagactgctaccatggaagattccagatgcatattggcaccaggtctggtagacatatattccccgtaatgacc

SEQ ID NO: 199270 - DNA, 504 bp, Homo sapiens
tccttcctgagctgatgaaaacaattttctatttaaaaatattattttattcttaagataaagatatttgttagaacatgacatctctcatgttgtaactttaggagagcaaaagggacctgaaaacttatgagtgtcagttagtgcttagactagggtatgaccctctgctctttgagtctattttagattytacatctaagtgtttgccaggtgttgtgggaagggggagattgggagatgtcggtaaagttttagttatgaagatctaatgtacacagcatggtgactatagtgaacaatattgtatcatatacttcaaattttctaaaagagtagattttaagtgttcttatctcacacacacacacatacacaaagaaagaaaatgttaactgtgaggtgatgggtatgttaattagttggatagtggtgatcatttgacaaagtatatgtatatcaaaacatcaggttgtataccttaacatgtacaatttttatttg

SEQ ID NO: 199271 - DNA, 504 bp, Homo sapiens
tccttcctgagctgatgaaaacaattttctatttaaaaatattattttattcttaagataaagatatttgttagaacatgacatctctcatgttgtaactttaggagagcaaaagggacctgaaaacttatgagtgtcagttagtgcttagactagggtatgaccctctgctctttgagtctattttagattctacatytaagtgtttgccaggtgttgtgggaagggggagattgggagatgtcggtaaagttttagttatgaagatctaatgtacacagcatggtgactatagtgaacaatattgtatcatatacttcaaattttctaaaagagtagattttaagtgttcttatctcacacacacacacatacacaaagaaagaaaatgttaactgtgaggtgatgggtatgttaattagttggatagtggtgatcatttgacaaagtatatgtatatcaaaacatcaggttgtataccttaacatgtacaatttttatttg

SEQ ID NO: 199272 - DNA, 504 bp, Homo sapiens
tccttcctgagctgatgaaaacaattttctatttaaaaatattattttattcttaagataaagatatttgttagaacatgacatctctcatgttgtaactttaggagagcaaaagggacctgaaaacttatgagtgtcagttagtgcttagactagggtatgaccctctgctctttgagtctattttagattctacatctaagtgtttgccaggtgttgtgggaagggggagattgggagrtgtcggtaaagttttagttatgaagatctaatgtacacagcatggtgactatagtgaacaatattgtatcatatacttcaaattttctaaaagagtagattttaagtgttcttatctcacacacacacacatacacaaagaaagaaaatgttaactgtgaggtgatgggtatgttaattagttggatagtggtgatcatttgacaaagtatatgtatatcaaaacatcaggttgtataccttaacatgtacaatttttatttg

SEQ ID NO: 199273 - DNA, 535 bp, Homo sapiens
gttggttaaatcagatctctatcactgtcataattttctcactgttataactcctgcaaaggcagtttcaatctcatcttgtgttctcaaccttatcttgtgttctcaatcttaccttgtgttctcaaggtccctgatgcttcttgtgtgtcagatctatcagtaagtgtctaatatacatttatcttattaaatatacaggacaaatatatgcagtcaaaatactattaatattttcagtttcctaataagaccatttgcataatggggttgattaatttgccatacatcttagaataagtaatggaagcaaatctgtattggtccacagcatatgctcttgacctcctcctaygtagatgcttttgtaggtctaagtcccacattaacctcagcataatggtctatgcagtagtgacttaataaatgtctgatgttctcataaaaacaagcaatactattttgtttattcaacaaaaatttattcaaacatttagcaagcctctgtgccaggcacagtctataataccatcac

SEQ ID NO: 199274 - DNA, 396 bp, Homo sapiens
tagaaagtacctatcctaaagctccataatggtggtcgtttaacaaatgcttgcttkctttcttctatttcctattgatctggtttcaaggtaagtgaaatgtaactcccaccataaatgtaaattatccagtcatgtcctgtaggcacagaaaacacattgacgacttaagtttgttttctcttttgtgagatgggcttaagattttaagaaatttcaagaaagaaatatttgcctaattggcctctgggaagttctggataagaaatgaggaggtgctcatgttttgattatgtagatatcaatatgaggaaaggtctatgataacaatgagtcccagatgcagtaggcattgtatgagtccacctagcattaaccagtaggaggaaagaattc

SEQ ID NO: 199275 - DNA, 661 bp, Homo sapiens
taggcacttactgacatgcacatcttttcgtttggtttttagcggttgccacatcaccttgctggaaaccattacttctgtcaggtctctggccttgtgcttcatgagtttgtccctacaaccttgagtctggctgtaatgctttggcagctctgcatactttggtggtcatttgatctccctgatacaagtattgtcctgggtgcttaactaaccctcattcttcatataacttcacccactacatctgattggtaagttttcgtcttaaatactcctcaaatccactcacctttactaccttatttctgattgcaattattcacttggatcattatagtagatttcaaattgctccttctacctccagacatgaagatcctgaatccacgtatygaaatgcaatacctggatactcaacgtgtatagaataaaatactgaaattgatgtattttggcatgactggcaagttgcccacctccttggctcctgctacatcctacattatattttaaagttctaaggtgaaggtgctggagtagttacagaaccccatgtacaccactctccttcctggctccaaacattagctcttccctctccctgggatgcccttcctaactttatttatctggacaaattaaacagacactttaagat

SEQ ID NO: 199276 - DNA, 512 bp, Homo sapiens
tggaggagggggccacagggatttcagggacaatttttctgaaaaattataatgaatgggatagaaaatggttccagttcacactatgtatccaagaatgtgaaagtgatggcttcagacttggagcaaaactttaaaaaaatggcttagggtgtaaagagtagagttcagttcttgaagagagggttagaaaaacaactagtctgcgtataataaggtttctccagccccattgagatggtccactcttaggttctgcagatacagcccacagggagaaaagtcactggtcctcaacattccktaaacccatcttgctattgccgatgcggttccattactaggaatgtttctttcctgcccgtactcttttaaaaatatacatctgtaaatgtccaggttgaggtttaaaggaagcctttgttaaaaattttgaccttccatgatctttccttttcttaatctcatttattttcctgatatcacccatttcaactcttagaacacaaaag

SEQ ID NO: 199277 - DNA, 557 bp, Homo sapiens
gatgactgctggcctcatcctttgagtttctatgagcaaaacagaccttcaacattttcataaccctgtatgttcaagagtacatgctttggaagaaatgctgcatcacccaatgtaagaccaaaatgtggctattatccctgccagggccaaccagccagccaactccaaaatcatcctggtgttgccttactcaatatcttcaccttgtaataattacaaatattttgcctttttttttttttttttttttttttgagatggagtctcactctgtcaccctggctggagtacaatggcgcgatctcatttcactgcaacctctgcrtccctggttcaagcgattctcctgcctcagcctcctgagtagctgggattacaggcatgcaccaccacgtctggctaatttttgtattttttagtagagacggggtttcaccatgttggtcaggctggtcttaaactcctgacctcgtgatctgcctgcctcggtcccccaaagtgctgggattacaggtgtgagccactgtgccaggcaccttgctcttagtaaatta

SEQ ID NO: 199278 - DNA, 598 bp, Homo sapiens
aggtggaagctggtccctccccagctccgcctccagggtccgctacagcccaagcggctaccgtcactctgaccagggaagccaccctggcagaccgacggcgagtggaactcgagcacctccccaggtgcgcctaattcgaagggcagtcagaatggcggagccaagttcctggcacccctcttcagtttcccctcaacttgagaggggactcccccgcaggcggggcagagtggaccctgggaccccagcccaagacttttccggagragaacactcgctccagcctcttcccgcggagcacctcccaccagttttcatggcgcccaccctgaacccccgatcgccccaacctttctccggcctccctcaccttgagcggcgctcccagcaggcggtgcaccgcgggtatctgcgcgcccaagggcagcgccccgtccaggctgcaggtgggggcccggcgcggctccggaaagttggcacatgcgaaggggtcggtgtcttccaggtactgcaccctcacggtcaccactgataccggctctccgtccccgcggtcttccccgcccgccatggctctgcggccggctcacgcagc

SEQ ID NO: 199279 - DNA, 598 bp, Homo sapiens
aggtggaagctggtccctccccagctccgcctccagggtccgctacagcccaagcggctaccgtcactctgaccagggaagccaccctggcagaccgacggcgagtggaactcgagcacctccccaggtgcgcctaattcgaagggcagtcagaatggcggagccaagttcctggcacccctcttcagtttcccctcaacttgagaggggactcccccgcaggcggggcagagtggaccctgggaccccagcccaagacttttccggagaagaacactcgctccagcctcttcccgcggrgcacctcccaccagttttcatggcgcccaccctgaacccccgatcgccccaacctttctccggcctccctcaccttgagcggcgctcccagcaggcggtgcaccgcgggtatctgcgcgcccaagggcagcgccccgtccaggctgcaggtgggggcccggcgcggctccggaaagttggcacatgcgaaggggtcggtgtcttccaggtactgcaccctcacggtcaccactgataccggctctccgtccccgcggtcttccccgcccgccatggctctgcggccggctcacgcagc

SEQ ID NO: 199280 - DNA, 372 bp, Homo sapiens
tcagcacttcataatatgacaaagtgaagtctacatatttatcatttaaagaaacttttggaatccgagtctccctctggtgtttctgacagtcttttacattaataacgtgtcccccaatattttttmtctcctcaaatgcaccaatattgaaagtaaataactaatatggcagaaagcagatattctcccctaactcctgcccaggtgagctttttgccacttttattccctctcctttccatatctattagtatctgtgttagtagtgctgacaacttttcattgcaaataaaactagcatatctaatcaatacaaaaaagtttaaagagaccatacaatttgatagtgacctgagttcaccaggccag

SEQ ID NO: 199281 - DNA, 372 bp, Homo sapiens
tcagcacttcataatatgacaaagtgaagtctacatatttatcatttaaagaaacttttggaatccgagtctccctctggtgtttctgacagtcttttacattaataacgtgtcccccaatattttttctmtcctcaaatgcaccaatattgaaagtaaataactaatatggcagaaagcagatattctcccctaactcctgcccaggtgagctttttgccacttttattccctctcctttccatatctattagtatctgtgttagtagtgctgacaacttttcattgcaaataaaactagcatatctaatcaatacaaaaaagtttaaagagaccatacaatttgatagtgacctgagttcaccaggccag

SEQ ID NO: 199282 - DNA, 569 bp, Homo sapiens
gtcttatggagacaaaaagttagtctttaatgaacacctaatatgtgccaagtaccatgctggttgtttggtatagtgatgaataatgcacatagagggcttgcacttgtggaacttaccatttaaaagagtagcacaagcagtgcattccattctttgacttttttccaggtgtccacagccaaaaacagcagttcatttgggcatgttttcaattttctatttctctgggcaccggtccccatggccaggtcaagctgttcaacgctcacaccagcagctgacacagaatggaaggaaagcatgtctgagataccaaatgctacacatttgcctgccataaaatgttaaatatttttctttcttttttttttcgtagagcagaggttatttccagtgttggatactatgttcttttcatttgatcaaggattatttctcctttagcctttcactttgtaagacaaatttaagggtactttggtataatatgagaattaccttgagaagtgtttwtatttcacagaaatattttttccttagactatgtgatcatgagggtcattgca

SEQ ID NO: 199283 - DNA, 569 bp, Homo sapiens
gtcttatggagacaaaaagttagtctttaatgaacacctaatatgtgccaagtaccatgctggttgtttggtatagtgatgaataatgcacatagagggcttgcacttgtggaacttaccatttaaaagagtagcacaagcagtgcattccattctttgacttttttccaggtgtccacagccaaaaacagcagttcatttgggcatgttttcaattttctatttctctgggcaccggtccccatggccaggtcaagctgttcaacgctcacaccagcagctgacacagaatggaaggaaagcatgtctgagataccaaatgctacacatttgcctgccataaaatgttaaatatttttctttcttttttttttcgtagagcagaggttatttccagtgttggatactatgttcttttcatttgatcaaggattatttctcctttagcctttcactttgtaagacaaatttaagggtactttggtataatatgagaattaccttgagaagtgtttttatttcacagaaatattttttccttasactatgtgatcatgagggtcattgca

SEQ ID NO: 199284 - DNA, 627 bp, Homo sapiens
ttgtttctccctctttggaatctgcttatctatccctaaacccctgccatgatgataagaaacccctcaacccagacattctataataaaaggaaggattttagagctcttccttgtatgataaaagyagtaggcagaatctaaagttcaaagtataagattacaaaagccattttttaaaatgtgtagtacatatccaagtttgtttcaagttgcatttaagacagcctataagggtgcatgctatgtagtaaagtcacatagctttgaagcaggtgaacaaggtgagacaaataaacacaggtagagataaattggaagccagaatttggtaaatacagacatgtatattcattatttaaagcccccaaacttaacattaaaggaactgcgagaaaaaataaaaaaaagaaatatgatcaagaaccctgttctcaagttttataaaattaagttgctcaagaaaattgcaaataaataaagatatgaacaccagaggaagtatacagacatatagtgtcttcaataacatcttcactttagacacaaataaaggccaagtattgattatggttttcaaggctaaattgggtgaccattgtcaggtatagtacagaatgccttacc

SEQ ID NO: 199285 - DNA, 619 bp, Homo sapiens
tccttgaactgggagatagaaccagagaaggaatattctcagttcagtaagaaaaaagactctgtgctgactgcaatgtcactcttccatccatttatattcacagatcctattaatggatgtaagataacctacagtcttccatgctttgttctttttgaaattactgttaaagaaaactagatgatcgagactgaaaacaaagggcaaaatcctttcccgagcatgtctttattgtcctttttctcaccttgacagaataatcggaataatgacaatcaccctaagattccttttttttttttttttggattgctattcctgtgtaattattagagctgctgttaccattaggtgataatgaaataatatcaaacaattcccacacgtttatgtatatgtaacacgttacaatgtcaaacttaaatgaaaggagaaataccagtatccgtcttaagagctgctctgacagcaactcacagttctgataaacactatttaagtgccttgtgaargccttttttggggaggctgtcagcgaagcaagtgagaccatgtgatgtgaatctagcactaagaacattagtaacctagatttctcatgaacatagatagtaat

SEQ ID NO: 199286 - DNA, 640 bp, Homo sapiens
cattgcttactccaggtcggttaaaacttcatattatatggcmgggcacggtggcttacacctataataccagcactttgggatgccaaggcaggcagatcacaaggtcaggagttcaagaccagcctggccaatatggtgaaaccctgtctctactaaaaatacaaaaattagcagggcgtggtggtgggcgcctgtagtcccagctactcaggaggctgaggcaggataatcgcttgaacccagaaggcagaggttgcagtgagccgagatggcaccactgcactccagcctgggtgacagagcaagactctgtctcaaaaaaaaacaaaccaaaccagaacaaaaaaaacccaaaaaacctcatattcttctggattttccttcatacaattaattgattgattaattactgtattgctatttctactctcccataaggtctctgtaggtgaaacttgtgcttatattgttccttgttgtttttcggggcctatcacaggactggctggatgcatggcagacatctcagcaaatatgtagtagatgaaaggagggtagaactaagaaaatgagaaacgttctctctgaagatttcaattgcagttaggaaaaaggcaaaagaacttcctgccgaaag

SEQ ID NO: 199287 - DNA, 622 bp, Homo sapiens
cctgaaatgtgacaaatagggaatttattttacatgatatgtgtcttcagtctttctacatgaaccaaattgattcagaaatgaagaaagtgctagctgtttaattgagaaagtgttcatggcctttctcatttgtttttctttagctatccaaatttctccttgctatttaagaggaagtcactttaaacaagaacattcttttacttgatgattcaatataagtaaattttttttwaattgttgtcatcagaggtaagagcataatggaaagcatgagaataataacttagcagtcagcctaccttcgaggaaactaatttgtgtgggatttagacaatgaaatataagattcacatcttttattttttcctggcattataaatttaggcaggacatgggggcaaataagtgaatcttactcagatagaagggatcaaatcttcaagtaatagcttaaaatagcctgttgtaaaatagaatttattgcttaacatggtgcgttaaatggaaactcacgtggggcagcagacagcatgtggtctggagagtgaattgtggatcatggaggccactcattaaacatgcaaattcgactgtgtaaatttccttctctgcacat

SEQ ID NO: 199288 - DNA, 574 bp, Homo sapiens
aatgggttttatgaatgtagtggtctctgtaaaaagaaaaacaaacatcatgctggtaacacagattgaggttaaaggaaatgacacctaatgtgttggtacatttagttcacaattatctttcaggtttcttaaagtttgcatgagattttcatatgttatatagtagtattgtatatctttgttcccaattggttctccatgatggtacagtgaagtgggtaaagcaagtaagtaaattagactcagatttagtgacttgctttaagtctgccatttctacctcttattgactataagacccacatatgctgatccgtataccaaatgtgctttccattaaatctaggataatgcttagattcgaaataagggagaaaggacagacacaaatggaaagttgasagtaatttgttcttggtggttgttcaataaatattcatttaatgaggagagcatcattactgtaagaatgcatgtataagaggattcttttgtatagtcagtatctcatagtgcttgtttcttcttttgcctcctgaacaagactgggaagagaaatgagccaaacccg

SEQ ID NO: 199289 - DNA, 529 bp, Homo sapiens
gtggtcttaagatgtttaataccagactctttttaattgtgaccacacttagctgtaaattgttcaagccagatgtttagtgagtttacctgtcgttctgttaggaatacgattaatcccaaggtaacagttttaaatggtcttgtagggaaagcttctcctaccacctcttccacccggctatcagtaaaatacaacactgcttatataatgcaaaaacaaataaygttttctttctcactcacacgagagagatctcatgccaaaccttttctctagtttatagtacttggaagagatacgcacattttctcagtttgaattcctaccacttcaattactgagagtttattttgttttattttattttaaggctatgcagatatatctaattgcaggtggatatttatcttttttgttttatcatctgctttttcaataattgacctaggatggagaaaaggaagttcttaaagtagatgcttaactgtgcattgtactatttgaaaaactttgcaataggaaacta

SEQ ID NO: 199290 - DNA, 529 bp, Homo sapiens
gtggtcttaagatgtttaataccagactctttttaattgtgaccacacttagctgtaaattgttcaagccagatgtttagtgagtttacctgtcgttctgttaggaatacgattaatcccaaggtaacagttttaaatggtcttgtagggaaagcttctcctaccacctcttccacccggctatcagtaaaatacaacactgcttatataatgcaaaaacaaataacgttttctttctcactcacacgagagagatctcatgccaaaccttttctctagtttatagtacttggaagagatacgcacattttctcagtttgaattcctaccacttcaattactgagagtttrttttgttttattttattttaaggctatgcagatatatctaattgcaggtggatatttatcttttttgttttatcatctgctttttcaataattgacctaggatggagaaaaggaagttcttaaagtagatgcttaactgtgcattgtactatttgaaaaactttgcaataggaaacta

SEQ ID NO: 199291 - DNA, 572 bp, Homo sapiens
aaatatagctatatgtactgaagggctattttgtatgtgttactacagaaacatttacagaatgtttttcatttctgctttgcaagctaagagtcagagagtttaagcaacctctccaaatttgcacagctaataaaagcctgtgttaagttttgtatgcagtacattttgctagagcattttctctgaggaactttcagtcaagtcttaagcataggattaccagtgcagcctttagtagaaaaggagtgttatttttttcaggcactgcagtagattgactcttcagtcaattatgtttatgttagttcttgtctgcattygttaaaggaaaactatagcttttaaaactcacatttcaaatttctcattgtctttaaagtccaggcatctgctggagctcctttatcttactgtcatgcactcagtggagctgggtaggcacataaaccttatggaaatcataggacattggctagatgtttttgtccttccacttacaagccttgtgaccttgaggagttcagttttctagagccctatcattttccccttaaaaacagaatatcctt

SEQ ID NO: 199292 - DNA, 594 bp, Homo sapiens
aaatatagctatatgtactgaagggctattttgtatgtgttactacagaaacatttacagaatgtttttcatttctgctttgcaagctaagagtcagagagtttaagcaacctctccaaatttgcacagctaataaaagcctgtgttaagttttgtatgcagtacattttgctagagcattttctctgaggaactttcagtcaagtcttaagcataggattaccagtgcagcctttagtagaaaaggagtgttatttttttcaggcactgcagtagattgactcttcagtcaattatgtttatgttagttcttgtctgcatttgttaaaggaaaactatagcttttaaaactcacatttcaaatttctcattgtctttaaagtccaggcatctgctggagctcctttatcttactgtcatgcactcagtggagctgggtaggcacataaaccttatggaaatcataggacattggctagatgtttttgtccttccacttacaagccttgtgaccttgaggagttcagttttytagagccctatcattttccccttaaaaacagaatatccttaaaaggacagttttgtaagtgt

SEQ ID NO: 199293 - DNA, 578 bp, Homo sapiens
taatagctgggactacaatcatgcaccaccatgcttggctatttttgtttaaatcttttgtagagatggggtatcctgtgtttcccagactgatcttaaactcctgagcttaagcagtcctctggccttggcttctcaaaatgctgggattacaggtgtgaaccactgtgcccggcctgaaagtcatatwcttagagagtttttccctatcagttcttctaaaatgtaattgttcctcctttaatatttcataccctttgtctatgcttgactgtttttcttcctgataatcattatctaacatactctataccttattatgtttattatttgtctcttctaggatgcaagttccgcaaagaaaaggatttttgagtcctttggtctttgctctgtattcccagaacctagaaccctgcctgcatataggaactgctcagtaaatactttacatgaaaaaataaatgaataatttacctacataatggaagaatgtataatagtcatataagctcagtggcatttttcaataaaggaactttcatgttctctctttcatatgagtattttatagacca

SEQ ID NO: 199294 - DNA, 519 bp, Homo sapiens
ggagggagccagtcttttgagttctgcaaaagaaaagggtgtcaacagaggagattaagattatgaaagataatgcaatcaggaaaaagcaaaacaaaacaaaacaaaataggaggccagatgtggtggctcatgtctgtaatcccagcaatttgtgagggcaaggggggtggatcacctgaggttaggaattcaagaccagcctgatcaacacagtgaaaccctgtctctactaaaagttatccgggtttggtggcacatgcccataatcccagccacttgggaggctgaggcaggagaattgcttgaacttgggagayggaggttgcagtgagcggagactgtgccattgcactccagcctgggcaacaagagtgaagagtgaaactctgtttcaaacaaaacaaaacaaaaagaacaggagagtgatatattctgcaaatcaagaaaaagagagtatttcaagggagaatatgacgctttgttttacttattgtttttcattattataattcaaat

SEQ ID NO: 199295 - DNA, 591 bp, Homo sapiens
ttaatttgtatgaaaatataaccagccaaagcactagtaaagaatgtagctgaggcatgagaagaaatttgggaaactattagatggaaattaaaatgactgtgtcaggagggggccagctaagctgaaacaggaggaggttgccggctggagatttgttacaggcagagcattagaagaagaaagaggctagagtaaggataggaagagattctactttcaagcagattagaacttagtagcttataaaatgatttttgtatcataagttcctaatacastaaaagcttattaattcggactaaaaagggattagatttgttagccacctttctgattttttttattctaaagtattaattgtggggggaaaatatgtagtcattagatcttcagaggctaatagagagtttcagcaattttgacttccaaacatgtgactatagaatccaaggtactaactaaactttgcttgttgaataaccttcactgcctgcgttcagaatctacacgttccatggtatttctgtcaccttctggtgttagatgcagggactgctgattcagtctgagtcgtagcagccagggatg

SEQ ID NO: 199296 - DNA, 503 bp, Homo sapiens
aagaggacagccgttctctgtctctgtcgcaagagagaggcatcggaaaggaaaaagcccacctgcaagggatcacagtagattttataggcaggcttgaggaggtggtgtctgatttacatagggcccacagattggttcaatcaggtgtgagtttacatagtgcacctaccctaatcttattattatgcaaataggctttctacttggccagcaccatcttatctgctccttactgtacatgtgctggcaaagagaagatggagctgcctttttttttgagacagagtctcgctctgtcactcaggctggagtgcattgttgccaacttggctccacctcccgggttcaagccattctccygcctcagcctcctgagtagctgggattacaggcatgcgccaccacatccagctaatttttgtgtttttagtagagacaaggtttcaccatgttggccaggctggtctcgaactcctgacctagtgatccgccggcttcgg

SEQ ID NO: 199297 - DNA, 577 bp, Homo sapiens
aaaagcccacctgcaagggatcacagtagattttataggcaggcttgaggaggtggtgtctgatttacatagggcccacagattggttcaatcaggtgtgagtttacatagtgcacctaccctaatcttattattatgcaaataggctttctacttggccagcaccatcttatctgctccttactgtacatgtgctggcaaagagaagatggagctgcctttttttttgagacagagtctcgctctgtcactcaggctggagtgcattgttgccaacttggctccacctcccgggttcaagccattctcccgcctcagcctcctgagtagctgggattacaggcatgcgccaccacatccagctaatttttgtgtttttagtagagacaaggtttcaccatgttggccaggctggtctcgaactcctgacctagtgatccrccggcttcggccccccaaagtgctgggactacaagcatgagccactgtgcccggccagagccatgatttttaacatgcctgttcccagttaggcttttcctattggcacaactgccggcatttgcctgtgcaagtt

SEQ ID NO: 199298 - DNA, 570 bp, Homo sapiens
cctcacacctgactcaaggccctctagacttatccagatttagctgtattttagcaaggggacatggtaaacttgaaacctgtgctttagacaactccctggattctcycaaccatggttttctgcttgatgcttctgattaccttctaggaagactgcctggaaacaattacactctaataggctgtaggcgacaggtttttagcttctttgcaggaaagactgttaaattctgccactatccttctggtaggagctgtgtcttcatgagctcatgggaatgcattagtaagatgtagttaaggcccactaggggtggagaagcctggctcctattggacatctgagaatataggcgcacagaggtaacgataatcccgagcacctgcctaaagtaaactcttatttaaatggaagttcaaaacaacctgacaaaatttgtcaatatgcacttgcacttggtatttgattaaacctcaccagggctgtaggggtaacctctgacctctgctttgagtcaggaaaatgataacttcttcctggaggataaattattttcttaggcctatt

SEQ ID NO: 199299 - DNA, 570 bp, Homo sapiens
cctcacacctgactcaaggccctctagacttatccagatttagctgtattttagcaaggggacatggtaaacttgaaacctgtgctttagacaactccctggattctcccaaccatggttttctgcttgatgcttctgattaccttctaggaagactgcctggaaacaattacactctaataggctgtaggcgacaggtttttagcttctttgcaggaaagactgttaaattctgccactatccttctggtaggrgctgtgtcttcatgagctcatgggaatgcattagtaagatgtagttaaggcccactaggggtggagaagcctggctcctattggacatctgagaatataggcgcacagaggtaacgataatcccgagcacctgcctaaagtaaactcttatttaaatggaagttcaaaacaacctgacaaaatttgtcaatatgcacttgcacttggtatttgattaaacctcaccagggctgtaggggtaacctctgacctctgctttgagtcaggaaaatgataacttcttcctggaggataaattattttcttaggcctatt

SEQ ID NO: 199300 - DNA, 530 bp, Homo sapiens
gtctcctttaaaaattagaagttagggccagcacagtggctcatgcctgcaatctcagcacttcaggaggccaaggcaagaagatcacttgagctcaggagttcaagatcagcctgggcaacatagtgagaccttgtttctcaaaaaatawttttttaaaaaaatagctaggcatggtggtacacacagccactcaggaggctaaggcaggaggatcagttgagcctgggagattgaggctgtagtgagccataatcactccactgcactccagactgagtgacagagcaagaccctgtctcaaaaattaaaaaaagaagttaaaatattaaagagagaaatttccaaatcagttttagaagtattgatcatccattgactggtgttaaggcaactaaatatatctgtgggggacatggtggggagaaagaaccagaacctcctctcacattattcaccaaaatcaatgtgagatgaattaaaaaattgaagataaaggcataaaacaaaaaaaatgcctagagaaaaca

SEQ ID NO: 199301 - DNA, 530 bp, Homo sapiens
gtctcctttaaaaattagaagttagggccagcacagtggctcatgcctgcaatctcagcacttcaggaggccaaggcaagaagatcacttgagctcaggagttcaagatcagcctgggcaacatagtgagaccttgtttctcaaaaaatatttttttwaaaaaatagctaggcatggtggtacacacagccactcaggaggctaaggcaggaggatcagttgagcctgggagattgaggctgtagtgagccataatcactccactgcactccagactgagtgacagagcaagaccctgtctcaaaaattaaaaaaagaagttaaaatattaaagagagaaatttccaaatcagttttagaagtattgatcatccattgactggtgttaaggcaactaaatatatctgtgggggacatggtggggagaaagaaccagaacctcctctcacattattcaccaaaatcaatgtgagatgaattaaaaaattgaagataaaggcataaaacaaaaaaaatgcctagagaaaaca

SEQ ID NO: 199302 - DNA, 522 bp, Homo sapiens
aaagccgctcctttggattaagctgtttgctctctcagagaccctctggaatccagatagagcgatgatctaatgcataaaaatatctcaccaagttacttccatgcccttgctgcttgaaaccctctcatgcttcctggggtgtgtggaataaaacccgagcggctcccgtctgctctgccctacatctccccttctcccctcctggtcttctcggcttcaggctcagggcccttttccttccttgggyaccccctcccaaggctctcctgcctgggcccgccgtcccctttcctgggaagctcttcccaaccacctcccttccccacagcctgatcaaggtccccttggtcagtcaccatctcctcttgtccctctcccagttggttcccttcctggcacttacaaccatctggaacactcttgttattgatttgctgcttactgtctatttccccactatggggtaagttcctattttggtgactacatatcccagggcatccactagcctgggaggca

SEQ ID NO: 199303 - DNA, 347 bp, Homo sapiens
attttaacctcagggagtttaccaagtctgttcctctgcctggactgctctttgtgagccccatgtacggttgcaytgctgactaagtatatctctatctctatctatatttataactatagctaaagatatcttatcttatgcctgccttagctcaaatgtcacctcgccagagaatcctttcctgacttcccaccaaagttgcttcccagcctctctctccatctcaccccagtccttctctaccacatcaccgtgacttatttcttcatagcatgatctcatttgtgttcatgctattgtccccttcccaccagaacgttggctccatgagggcagggagcatc

SEQ ID NO: 199304 - DNA, 574 bp, Homo sapiens
cagaaaccaaccctggctggcctaggcacagaggggacctctcttgaaaggtgtggggtagctctcagaatcagccaaagtgctaggctcaaaaagggcaggtgtgagggacctggggagcaagagcctgtacaaagtctgctaagattggaaccaagctccaaccattcatttttcatcttgagacagtgaattttttttttttttttttttatgagatagagccttgctctgttgcccaggctggagtgcagtggcacgatctcggctcactgcaacctccacctcctaggttcaagtgattctcctgccttagcctcccgagtagctgggattataggtgcccaccaccatgcctggctaatttttgtatttttagtagagacggggtttcaccatgttggccaggctgggctcaaactcctgacctcaggcaatctgcctgccttggtctcccaaagtgctsggattacaggcatgtgccacagcgcctggctgagacagtggatcataatggctgagctcttatcaggtacccacccattggccaggagacagaggctcaaacaataga

SEQ ID NO: 199305 - DNA, 509 bp, Homo sapiens
tcttaggctcacgatttgcttttaggcatttaaataggatatagctttttcctgctgctgttggcatgctgtctgcagagaaacagcagttactgcccaagctgaagcttgccccagacctggcctagtcctcgcagttcatgtggacacaaatcacctctgagactctgaggctggccttgagtcagacagataaactcctctctgtgcygtccagcacccccagccagcaccccaggccaggatgggattcttatgtcccagggctggacgtttgattactcttattatcttagcttgctttggctataaattttattagtggccataaaattatccatccacagcatttgactcagtgacctcttgcaaaagagaattccacaactggcgatacgcagggcctaggagggctgcctttccttcaccctcaatttatagccctacctccagcactctgccttgcatgatgagactctgcaaacagaagaggctgctcatgtttcagg

SEQ ID NO: 199306 - DNA, 462 bp, Homo sapiens
cagtctcaatatgcacttgataaattgcactaaatacaagttgttttcatgttaaacctagtgctgattcttgaggtgatgaattttatgtgtcaacttggctaggctacggtgtccagttgttttgtcaaatactagtctagatgttgttgtgaaggtatttactagatgatattaacacttaaagtcagtagactctgagaaaagcagattaccctccattcatgtgggtgggcctcatccaatcagttgaaggccttaagactgcctctggactccaggctgcaacatcaactcctgctggaatctccagccatgccgattttggacttgccaacccccacgatcacatgagtcagctctttagctttgcacaccacagtggggaggayggtgggcagttacttctctgaacctgtttacaaaatgtctacattccaaattcaaactctcctttccact

SEQ ID NO: 199307 - DNA, 475 bp, Homo sapiens
agatctgtgtcttcatgtggccattgaccagatgaatgactctgctacgcacagaaggtcctcagccctgtgcacacctctgaacaagctaagctaccccagactcaggcgggtccaccaacccggacaactccagcccagyagtctttggaaccgctggttgaatttccgtaggggaaatgtgatgtgcaagtatttatgaaaaaaaaatatatatatatatactctctgcacttttttgtactcccaatgatgtggtcaggaggttaccaacaagattttaaaaactgctctaagacaaagcctttgggagtatgatcttgtaaatgggttttaggtgcaattccttactgatttttcacaaaagcctgttctcaaaggactgcagaattgtgttcattatacttgaaacaaagatatgctcaatattaactccactgtgttcagaagctgaaaacagagctcagctgtagac

SEQ ID NO: 199308 - DNA, 477 bp, Homo sapiens
ccattgaccagatgaatgactctgctacgcacagaaggtcctcagccctgtgcacacctctgaacaagctaagctaccccagactcaggcgggtccaccaacccggacaactccagcccagcagtctttggaaccgctggttgaatttccgtaggggaaatgtgatgtgcaagtatttatgaaaaaaaaatatatatatatatactctctgcacttttttgtactcccaatgatgtggtcaggaggttascaacaagattttaaaaactgctctaagacaaagcctttgggagtatgatcttgtaaatgggttttaggtgcaattccttactgatttttcacaaaagcctgttctcaaaggactgcagaattgtgttcattatacttgaaacaaagatatgctcaatattaactccactgtgttcagaagctgaaaacagagctcagctgtagacagtggcttgattaataccagat

SEQ ID NO: 199309 - DNA, 597 bp, Homo sapiens
taatatattatgattaagtagtgtttattctaaaaaatatacatgacttaattcagttagaatactagtgtgattcaccatactgacctattgatgggaaatgtaatcaatagatttagaaataatatttgattaatttaaagatgtggttatgattttaggaatagaaaagcatatctttaacctgataaatctatagaataaatttttgtcgaatgattagaaatattttctttaatatttgtaacaaataaaagatgccacttcactgcttctgtacaatgctctactggaagtcataggcatcaatttaaaaataagacaaaggaacataatttaagaactggaaagaacaaattaaactttacacacacacacacacacacacacacacacaggtttctatagcccatttggttctctttgccttaaaaattatttatcatttgatgagacttttaaaaagaaataatttactatatttatactacyataaagaggtagttgtagcaatctggtcctaaattattgatctctatagtagtatagaggtagttgtagcaacctgatcctaaattattgacctagatcagaaac

SEQ ID NO: 199310 - DNA, 528 bp, Homo sapiens
taaatatgcttggctcctgtcaccagcatgcacggtgctacaatctcagaagagactgaggaagacacagctagagtgacccattctccaagtgtgcctgggactgaggggtttccctggggtcaggactttcaggtgtaaaaccaagaaagtcctaggcaaagcaggactagttggtcaacctagacaccaccaaggtcagcagtccccaaataycacttgttcataccccacacgcctaaccacttaggagcacggattctggagtcaggggtctcggttcaaatctcgctccaccagtcagtcacgcaggctgggaaagatactgaagtttctccacctccttttgctcaagtgtaaaatggggctaataatggaactaactgcaatgactatgagaatttaatgagttaataaatagaaaatgcttaaaatcatgcctagcccagggaaaggactcaataaacctttgctcttattatatctgccactacctctagtatctatttaaatattttctagatctac

SEQ ID NO: 199311 - DNA, 528 bp, Homo sapiens
taaatatgcttggctcctgtcaccagcatgcacggtgctacaatctcagaagagactgaggaagacacagctagagtgacccattctccaagtgtgcctgggactgaggggtttccctggggtcaggactttcaggtgtaaaaccaagaaagtcctaggcaaagcaggactagttggtcaacctagacaccaccaaggtcagcagtccccaaatatcacttgttcataccccacaygcctaaccacttaggagcacggattctggagtcaggggtctcggttcaaatctcgctccaccagtcagtcacgcaggctgggaaagatactgaagtttctccacctccttttgctcaagtgtaaaatggggctaataatggaactaactgcaatgactatgagaatttaatgagttaataaatagaaaatgcttaaaatcatgcctagcccagggaaaggactcaataaacctttgctcttattatatctgccactacctctagtatctatttaaatattttctagatctac

SEQ ID NO: 199312 - DNA, 630 bp, Homo sapiens
ttcagatatgttaaaaagtttaaaagaaagcatctccaamtctatacaatatggctttgtcccgctgtccccataagagcacttgtacccttctgaccctctgtcccaatttgggcttagaaaatagagttattttgtttgaaaatctgttctggttctgaagttctgtgattttctctttccttgcagcatcttcgtcatggcaacacaatgcccatttgcatttcaaaaactacccctgcctacttcacaccttaaaacaagaatcgagatcccaccttaatatttaaaaataggcaacttcagccctttagtgtccaggtaccctttttttaggtgacaaaaggagccagtttcttgttcaccatgtcagcatctttaaaatgcacatttattcgttagatgcattaggcactggctaattctgttacaaggagaaagaagaactaacatttattaacggactgctactcccagactccacacgaatggctgtagacgtagcacttcatgcaatccccacagctgatccctgaacaaaagaaactacatcacagctgggttaagtcacttgactaaagccacatagctggcacgttgcaaagctgagataatgctggcaaaattatc

SEQ ID NO: 199313 - DNA, 162 bp, Homo sapiens
aaagaggtggcttggggttagtgtgtgtgtgtgtgtgtgtgtgtgtgtgtgtgwgatgtgcctggcggaaggcatgcatcttgcaaatgcatatttagcagatattatacagcagtgtcatagattcagactggggaactccagagggcagaaccagaattc

SEQ ID NO: 199314 - DNA, 162 bp, Homo sapiens
aaagaggtggcttggggttagtgtgtgtgtgtgtgtgtgtgtgtgtgtgtgtgagatgtgcctggsggaaggcatgcatcttgcaaatgcatatttagcagatattatacagcagtgtcatagattcagactggggaactccagagggcagaaccagaattc

SEQ ID NO: 199315 - DNA, 162 bp, Homo sapiens
aaagaggtggcttggggttagtgtgtgtgtgtgtgtgtgtgtgtgtgtgtgtgagatgtgcctggcggaaggcatgcatcttgcaaatgcatrtttagcagatattatacagcagtgtcatagattcagactggggaactccagagggcagaaccagaattc

SEQ ID NO: 199316 - DNA, 570 bp, Homo sapiens
cagagtgtgggtgaacctgggactttgaactcttgattaatgctttgtttgggttctgggtgtagaggacaaactctggagttgcgatcatggctctggtaggtaccagctctatgaccttggccaagtcacttaactttcccaactcttgatttcctcatctgtaaaatgggcatcattctaaatgtctttgtagggttatttgtaagcatcaatgaaatgatccatatgaagaaagctcttgatccacatgaagaaaactctcccaggacacagttgctgccatgtataaaacycaaatactcctttgcagggtgcagtgcagaacccaaagggatccatgatctcatggccagaacagcctccaggaagaagatgcacagcttcctgaaaccgcacatccctccttcctcctgggagcccaaattccaagaaatgcagctaaaattggccctcaaacagcttttgcagagcacgtcgcagctttttttgggtctagagagccagtttccatgatgaaagtggcacagaaggagagacccagctaaaaacagccaccgcccagactgg

SEQ ID NO: 199317 - DNA, 569 bp, Homo sapiens
attttctgttttaagggttccatgtcctttatgtcactgaactactccttcttattctactatgtagtgtagagagtagagatgaagacaatgggttctggaattgggctgactttaaatcctagctctgcatttactaatggtgtgattgtggataaatgacttaatctttctgtttgtttcctatctgtaaaatgatttgaaaatcttatctaacacagatgacgatgggagaactaactagatatagtacagacacacaagagagagcacttggcatgtggtagccactcaatgaatgttacctcttacccttgacatctgctcatgcagcccagcattgtggaaagaacattagattgagggatcaggagacacaggatctgttctaggatctgacttccatgcagcttcatgaacttaggacagtcacttgatcccaactcatagaatgcaagacatggaagcaagtatttgttccaacctcctcatttaacaaatgaaattkggtcttggagaaaggaagagactcacccaaagtccccagggagtcaatgtccaggccagga

SEQ ID NO: 199318 - DNA, 606 bp, Homo sapiens
acattagattgagggatcaggagacacaggatctgttctaggatctgacttccatgcagcttcatgaacttaggacagtcacttgatcccaactcatagaatgcaagacatggaagcaagtatttgttccaacctcctcatttaacaaatgaaattgggtcttggagaaaggaagagactcacccaaagtccccagggagtcaatgtccaggccaggatcagccagcaccactctcctgacttttgtcccatagttttcccatcattcctctggagacagaagactttgccaagtggtccaagctttgctgaagacctaaggactttgggattgataggtaagtggttcctaacatgctgtcttggggttgtggccatctgagaagcagcagccagtgccttctactatgtcattgttggcataactatcagaagcagagcagcacctttaagatgctactgggtgagagccactgcagtagcagtttacggagcacccagtaaactcattccaggccaatagggcraggctgggtaagctctagagcccaacagcttaataattggctatgtttcttctttctctttcttggctcctgccagaga

SEQ ID NO: 199319 - DNA, 602 bp, Homo sapiens
gctgatggtgagttggtgtgtgagagggtgtgacatccagggaaattactcttgggttggacatttctggtcctcctaacctgatctgagatgtccatcatggtggcttgccttcactgagatcccttgagtgtcttataataaagaatatttcaaaaggctgatagtaccaagggcaaagtgggcttgggaccaggaagacacatcatgcataaggacgagtatttgcctcaccctaggtttggagccacccctattttgctattctttttaatgcttcctatagtctgaatgacaaagataacactagggtgatataatggttgaattkgatagaatgcaaaacttgatgctactaaatttcaattttcaagaatatatgttttatatatctagcaccctcttctagaatgtgaccgatataataatactgctgtgttaatagtgtttatggctaatgtagcttatgtcatttgacattttaactacaagtcaggctgctacatttggctgtgcaagttgcgcattgcctaggtctggtgagctcagttcatgtagactcctgtgggcatggcaccccctggagttgtgcaaggtggcaa

SEQ ID NO: 199320 - DNA, 495 bp, Homo sapiens
gaccaaggaagcccaggcaaactgtggatagctttctcaggcctggttcactgatgggttcaccaggagattcttggttaatgtctagtggatgatgtctgaatgttggaatccttggtggtcactgagcctatctttccatcaccgagaccattctgggagctttcccttttcagaaaggccccgagaaggagaactttgtaggctctgtgaggagatttcctgaggaatgagggggttgggaagttaaacttcaacaacaacctaccttcctcaggttggcagtgtctgctttcagatatctccttcagggcgctggctccacccagcagccttgtcctaccttcactgactctgaaaacccacatgggccacacacacatagttatgtgatcatgttctcttgcaaggaaagttcaggtaccatttcataagaaacataaatattgaagatcttaaccayattgccaactggagcaacccagtcctgtcctc

SEQ ID NO: 199321 - DNA, 621 bp, Homo sapiens
gtgtgtatgtatatatcatattgattttaattcctattcaaggggcttgatgtctatttcgtttgttggatgaaaggtactccaggttaatactgtggtttcaaggtgagatggaaaccctgggactgggagtctgagatccaactgggtgggtccttgcttgaccatgtacttgaccttgaactgttttataatcccatcaagccccagttttctaacctgcagatgatgggccaagactaaatgatctctaagtttcagctgaactctaaccttctaattttttctttttataaaacccttcaagatatgcaatggatggaaagakcaatggaacctcaagtgacatcactttagttcaatgcctcttctattgacctggtcaaaacctgtttctctggttgtgtgacaggggatatctacaaagagagtatatgagacttttttgcccggcccacagcctctttcctgaactctgcccttcatccccatcactcaaagaattagaccctgagcaatcttgtgtgcctgactagtggattggactaagctgggtcaaatggatactctctccttcagatgttggtttgggacagagaaatataagtgattcctagttgg

SEQ ID NO: 199322 - DNA, 621 bp, Homo sapiens
gtgtgtatgtatatatcatattgattttaattcctattcaaggggcttgatgtctatttcgtttgttggatgaaaggtactccaggttaatactgtggtttcaaggtgagatggaaaccctgggactgggagtctgagatccaactgggtgggtccttgcttgaccatgtacttgaccttgaactgttttataatcccatcaagccccagttttctaacctgcagatgatgggccaagactaaatgatctctaagtttcagctgaactctaaccttctaattttttctttttataaaacccttcaagatatgcaatggatggaaagatcaatggaacctcaagtgacatcactttagttcaatgcctcttctattgacctggtcaaaacctgtttctctggttgtgwgacaggggatatctacaaagagagtatatgagacttttttgcccggcccacagcctctttcctgaactctgcccttcatccccatcactcaaagaattagaccctgagcaatcttgtgtgcctgactagtggattggactaagctgggtcaaatggatactctctccttcagatgttggtttgggacagagaaatataagtgattcctagttgg

SEQ ID NO: 199323 - DNA, 563 bp, Homo sapiens
cctctttccaaagctcaaaaatcataatttcaacattctgggggcatctccacctgctgtcccaatattctacaggatttccaagctcaatatccccataggaacctctcttcctatggcgtcccttgtctcatttatgatatcatcacccacagatcttgagccttggtcccctgggtgacatccctggatcttccctttccctcagctccacatgtaactgycatgagttcctcctatagatctcccttacccttctctattccatccttgctgccacatctaccttcatctcctgcgtggacactgcagaagttaaccctttccactgtataggaataagaatcaaccaagctaaggcacaaatgaaacatgagatacacagctttgcatacaatttaggggaatggctcccatagctctaaaataataatagctaatacttgcatagctcttactatatttcaggcacagttctaggtaacttaacttatgatagtgccttggagcctcataattaacctatgaagtaggcattctttctatcattcccatcttacaga

SEQ ID NO: 199324 - DNA, 563 bp, Homo sapiens
cctctttccaaagctcaaaaatcataatttcaacattctgggggcatctccacctgctgtcccaatattctacaggatttccaagctcaatatccccataggaacctctcttcctatggcgtcccttgtctcatttatgatatcatcacccacagatcttgagccttggtcccctgggtgacatccctggatcttccctttccctcagctccacatgtaactgtcatgagttcctcctatagatctcccttacccttctctattccatccttgctgccacatctaccttcatctcctgcgtggacactgcagaagttaaccctttccactgtataggaataagaatcaaccaagctaaggcacaaatgaaacatgagatacacagctttgcatacaatttaggggaatggctcccatagctctaaaataataatagctaatacttgcatagctcttactatatttcaggcacagttctaggtaacttaacttatgatagtgccttggagcctcataattaacctaygaagtaggcattctttctatcattcccatcttacaga

SEQ ID NO: 199325 - DNA, 570 bp, Homo sapiens
attctccctctctgagactcagtttccccatctttcatacaaggagcctggaccagataagctttaactgagtatccagtaagagggtctagagctgaaggggcagtattcatcttcttctgaaacctcccatatgagcattatcagcccaggtatcccacctgaggattctctttccagggaaaaatcgcaagtcattgaggtgaaggggactcacctccatgcagagaagtgaccaagacctccaggataaatcatcttccatttcctgtccaaggagacttcaagggatctgacaacctctctgtattacttatgggctaagaaattgtattgtgaagacttgggtcccagtcctggttccatcaatagctgacagtacgactctgaacaagacccytctcctccagggactttttgcctcacccataaaatggagttaatggcccctggtgacctcctggattgttgagaagatctaatgaagtaaaaggtaagaacatgctttgaacagaataaactctctaccaccattgggggctctcatttttggggagagggaagccaggg

SEQ ID NO: 199326 - DNA, 294 bp, Homo sapiens
acacagatggaagttaagaaaaaatgaaagagaaatggaaaataattccaacagcatgaaaatccatttaacaggaattccagaaattggaaataagaggcatgaaggagaagaaataattgaggcaaagaaaaaaaaacccaaaaaacgatggaagtctttagattgaaaaaaaagatagaagtctttagattgaatggatctatcaactgcagagtaagtaaataaaaagacccacacttggccgggcacgggtggctcamgcctgtaatcccagcactttggaaggccaag

SEQ ID NO: 199327 - DNA, 597 bp, Homo sapiens
ttgaaatctagcagggcagacattaaatcttgaagctccagaataatctcttttcactccacatctccttcaactacatcctgggtacactggtgcaagaggtgagttcccaaggcctaagrcagctgaccctcacggctttgctgagtgcagaccacatacctactcactctcacaggttggagtcaaatgcctgcagcttttccaggccacagttgcatgtttccagtggctctataattctggagtcccagtggtggccccacccctgcagtaccattaggcattgccccaggttggggctttctgggatggctgtgtccctacagcaggtttctgcctggtctcccaggctttccaatacaccctccaaaatctaggtggaagcagctaagcctccacagctcttgcattctgggcacttgcagacttaacaacacatagaagccctcaggcttatcccttgcgtcctccagagcagtgacacaagctgcatatggggctgcttgagccacagctagaataactgctgaacactgtgctggaatttggggagcagaatcctgaggcagtgcaggacagcagtgccccaaacct

SEQ ID NO: 199328 - DNA, 552 bp, Homo sapiens
tgatgaatttgaccgggtttcatttctctctggcatttagaaaagaggaacctccctttatgcccctactgtgaatgtccacgtccaaaccaacacacaagccaatacacggccactacactgcacaaacttcatttatgtgagatcatcggccatgagaccctgtgggcgctcagaggaagggggctgatgcagatgaagaggtcaagagacacttctggaggaggtgataccggggcagaatcctcaaggaagcataggaacccttcaagaccagggatgggggtccagccagaaggatcatgtgtgcaaaggtgggaaaccgccaggagtctcatggraattccatttcccagggtgatgtccacacagttggcaggaggctgaaagggccagtcgggagttgaggggagccccggagggcttttgaaggttggtgcctgatatggtttggctgtgtccccacccaaatctcatcttaaattgtagctcccgtaattcccaagtgttacacgagggacctggtgggagataattgaatcaggagggcgg

SEQ ID NO: 199329 - DNA, 519 bp, Homo sapiens
tgtgtttctcatctggagacctgctcatctgggtgccccttactctgactccaatgaaggttcctgactctgtcgctggggtttcccatccatccaagatttactgagccctgtgctgtcttcgtggggccgtgatggtaaagagaaccccattcccccacctgtgggggacgtttagtctcataccyctttactcttcatgaatacatgcattttttttctccctgagttttgagatgtttaaaaattcctttatcttacttcttgaatgcagcattcaatacattgcaataggtaaaatgttaccgccgtcgatcgtgaattccattgcacaatataaaagccctcatttgctttccttttggattggatttcgaaatgggtcaaatgtttacagaaatggcccaaactgtacaaataaactgtagctctagtgagggaggcagtttacattactctcagtcagatgaatatggaagctgcagcctgtcctttgaaaaccacttcaagcactgtgcg

SEQ ID NO: 199330 - DNA, 482 bp, Homo sapiens
aaacatgcaaagactctgaaatgtggattggagacggcaggctgcttaggmatctcgggacttaagggatgactcagcacaaagtttcctgagtttccatattgagtcccatctgtctcatacagggtgctggagaagcccagagccccaaaccatcaacaggcccagacaaaaaaatcatcctaagaaagcctgttttctccagtcaacataccaggaaaagtgtggattaacagaactgaaaaccttgatgaccatagccaccatgctccagccaaccaaaaccaacggaaacgctccttctttctctacaaccttccaggtctcccacccagtggtgtcaactgagccaaacagtgacctaacctttcatttcctatccagcagaagcaggcatgctctgattcctctgttggggtggtattggtgggctgagtggcgagctaaacctccattcccatctggaaggaaatagactgaat

SEQ ID NO: 199331 - DNA, 482 bp, Homo sapiens
aaacatgcaaagactctgaaatgtggattggagacggcaggctgcttaggaatctcgggacttaagggatgactcagcamaaagtttcctgagtttccatattgagtcccatctgtctcatacagggtgctggagaagcccagagccccaaaccatcaacaggcccagacaaaaaaatcatcctaagaaagcctgttttctccagtcaacataccaggaaaagtgtggattaacagaactgaaaaccttgatgaccatagccaccatgctccagccaaccaaaaccaacggaaacgctccttctttctctacaaccttccaggtctcccacccagtggtgtcaactgagccaaacagtgacctaacctttcatttcctatccagcagaagcaggcatgctctgattcctctgttggggtggtattggtgggctgagtggcgagctaaacctccattcccatctggaaggaaatagactgaat

SEQ ID NO: 199332 - DNA, 482 bp, Homo sapiens
aaacatgcaaagactctgaaatgtggattggagacggcaggctgcttaggaatctcgggacttaagggatgactcagcacaaagtttcctgagtttccatattgagtcccatctgtctcatacagggtgctggagaagcccagagccccaaaccatcaacaggcccagacaaaaaaatcatcctaagaaagcctgttttctccagtcaacataccaggaaaagtgtggattaayagaactgaaaaccttgatgaccatagccaccatgctccagccaaccaaaaccaacggaaacgctccttctttctctacaaccttccaggtctcccacccagtggtgtcaactgagccaaacagtgacctaacctttcatttcctatccagcagaagcaggcatgctctgattcctctgttggggtggtattggtgggctgagtggcgagctaaacctccattcccatctggaaggaaatagactgaat

SEQ ID NO: 199333 - DNA, 482 bp, Homo sapiens
aaacatgcaaagactctgaaatgtggattggagacggcaggctgcttaggaatctcgggacttaagggatgactcagcacaaagtttcctgagtttccatattgagtcccatctgtctcatacagggtgctggagaagcccagagccccaaaccatcaacaggcccagacaaaaaaatcatcctaagaaagcctgttttctccagtcaacataccaggaaaagtgtggattaacagaactgaaaaccttgatgaccatagccaccatgctccagccaaccaaaaccaacggaaamgctccttctttctctacaaccttccaggtctcccacccagtggtgtcaactgagccaaacagtgacctaacctttcatttcctatccagcagaagcaggcatgctctgattcctctgttggggtggtattggtgggctgagtggcgagctaaacctccattcccatctggaaggaaatagactgaat

SEQ ID NO: 199334 - DNA, 603 bp, Homo sapiens
accaagtccagggtaggctacagcctagctgactccccgctgaccctgggggaatgagacccttgctagccatccgtgcacaacattcagcagttaaatctgaatctcgatactgcctctagctagctgtgtcctcttggggcaaggtggtttaacctttccaggcctcagtttcttcatctgttcagtggaaatgatcgtgggctcttgtgacctgctgtaagccagagctgttaccagccattgtatttcgatgagctacgaagctgtgtaaaaacaatgcataaaacagaattgcctgggagcaaagagcagtccctctccccacaaacacttccttcatccttgcattttccarttccccattttgagctgtctcctctcccccaggatgtgccttctagatgggagtatggagagttgactgagatggataccgcccccacccatgctggacagccttacatatttccagttgggtccagcttaaggaggggactgtgacatcactaagggtgcacacaccatgctgtgtaggaaggctcaaatgcctgggtgaaaagtgcttaaagcaaaagaagttggagtgttgtcgaatagagt

SEQ ID NO: 199335 - DNA, 418 bp, Homo sapiens
cacacgactttctgatttctgtcccatcctcagggcagctgtagttgcttaatatttttcttccaaaamacccactcttttttgtttaactgacatcaattgatggacaaaaaaagggcccctgtctcccgaccctaaatggaaaaccaaccaattgcctgaagtacaaatcagcggtgcaaagaatacctactagaataattttcacctttagccggcgccgcttaaaatcagagatgtgcaaatcagacttgggagtctgagttacaggtttcatgcctgaggagctggtggctcagagagactgactcacttgtcccgggtgacacagcaagagaggcgcagagctcgggctggaatgcaggcctggctgatcccagaaacccaggctcagtgctgggctgccgtctccccaccc

SEQ ID NO: 199336 - DNA, 414 bp, Homo sapiens
cagggtgtcttccccaaggcatatracctttgaggccctgcaggtgggtgccccctgtgccagccagcaccctcagagccaggaaagggttaacccctccacatggctgacaccagaggaggagcttactacgcagcctgggatatcacactgggccatctcagagaggagaggcctctgtgagttctgtgaatggaagtggattcactgccttcagattgagaacggggtgaaaaggcatccccacacagaaccgacgccccagtcgctagctggctccttggcacccgtcgcatggccccgaagctctggcagggactctgggcacctgtaccagtgagcacccggccatctcggccaggtctgtgagggagcgattctacccttgccatgtgacagccggcaactagggcc

SEQ ID NO: 199337 - DNA, 577 bp, Homo sapiens
aatttttgtgtttttagtagagacagggtttcaccatattggccagactgctcttgaattcctaacttcaggtgacccacctgcctcagcctcccaaagtgctgggattacaagcatgagccactgtgcccagcctagaaataacttttaaatcagaaaaatacattttttaaaaagatgtaaagcatacatagaggataacttacaaatctgcatttcatgaccacatatatctattgagttgcccctaggatcatttttttcaaagctaatgtctgccacaaatgggagttttaataggttataattcatatgacttagtgttaaacctctacgttggtattcttaaatttaacatggataaactgaacttgatttcctgcattaaaaaaaattaaagaaatgaaagttctgactgttttattgtagctggggaattctttttgcaggtgaygctcatgttacggttttgaacccaggactttgcgttgcagttttgttcaggggttgcagaataccgatctgactttgcaggaatgactgtcttggtgcataagccattaacctctctgcgccc

SEQ ID NO: 199338 - DNA, 582 bp, Homo sapiens
tcttggtatgtgtctgaactattgtgtgggcacttcccatgtctcctctctcagatacacgtgcctgcattgttccctcaagcctgcatcctaaatcactttacagcaaaggtcttctattccacatcgtgaaccactgcaacatgcattttaatgcagcatggttgcactctccaagattaatttctgacactggcaataaccgaggtgtcaattcctgttaacaatctaygccttggcagatttttgtcaatccattaataatgtgtgtaattgatagcaacagagagaggccactgctattaattcactgctgattactgatgcttattaaggatgatagtagtgggtttttttcctagtcagtcaaattgtggcttttcaaaattagttgtagtacataaggaaaagaacacaatattaagttctaaaagttgattcatatttaaattagccactctttagaaagtatttgctctacactaggcaatagactatctactttgcattaattatctccttgcatttttacattgacaatttgagacatgtttcactctcctatatttcagttacttgcta

SEQ ID NO: 199339 - DNA, 561 bp, Homo sapiens
gatagtcataatgtttacagttatctatcctatattaggtaggcatttcacaatagaaataataaattatgtttcagttttactgctgatataataactatcttttttggaagaagtttggtctgtgtatttttttttttttttttagagggagtctcactctgtcaccaggctggagtcacagtggcgtgatctcagctcactgcaacctctacctcccaggttcaagcgattatcctgcctcagcctaccaagtagctgggactacaggtgcctgctgccatgcccagctaattattttttgtatttttagtagagacrgggtttcaccatgttggccaggatggtctcgatctcctgacctcgtgatctgcccaccttggcccccaaagtgctgggattacaggagtgagccaccacgcccagtctggtgtgttttgtttgtttggttttgttttattttgcaaaatggctctaggaaataatagaaaatacaaaattgtacttggagaaattaaacagggctcccgacaatttgagaaaatatatgcagtgggaatt

SEQ ID NO: 199340 - DNA, 531 bp, Homo sapiens
atcaacccaaattcccatcaatgatagactggataaagaaaatgtggtatatatacatatatacacaccatggaatactatgcagctataaaaaggaacgagttcatgtcctttgcagggacatagatggagctgaaagccattatcctcagcaaagtaattcaggaacaagaaatcacacactgcatgttctcacttataagtgggagctgaacartgtgaatacatagacacagagagggaacaacacacactggagcctgtcacgggtgaggttaaggggagagagagcatcagaaataataattaatggatgctgggattaatacataggtgatgaattgatcagtgcagcaaaccaccgtggcacacatttacttatgtaacaaacgtgcatatcctgcacatgtacccccaaatttaaaataaaagttgaagaaaaaaaaatatgaatgggtataaattatacagtagttcctcattatctgtggtttcactttccttggtattagttacccacagccaactgta

SEQ ID NO: 199341 - DNA, 531 bp, Homo sapiens
atcaacccaaattcccatcaatgatagactggataaagaaaatgtggtatatatacatatatacacaccatggaatactatgcagctataaaaaggaacgagttcatgtcctttgcagggacatagatggagctgaaagccattatcctcagcaaagtaattcaggaacaagaaatcacacactgcatgttctcacttataagtgggagctgaacaatgtgaatacatagacacagagagggaacaacacacactggagcctgtcacgggtgaggttaaggggagagagagcatcagaaataataattaatggatgctgggattaatacataggtgatgaattgatcagtgcagcaaaccaccgtggcacacatttacttatgtaacaaacgtgcatatcctgcacatgtacccccaaatttaaaataaaagttgaagaaaaaaaaatatgaaygggtataaattatacagtagttcctcattatctgtggtttcactttccttggtattagttacccacagccaactgta

SEQ ID NO: 199342 - DNA, 575 bp, Homo sapiens
catgattgtaagtttcctgaggcctcccgagaagccaagcagatgttaacaacatgcttcctatacagctctcaaaatcataagccagttaaacctcttttctttataaattatctagtctcaggtacttctttatagcaatgtgagaacagactaacacagtgggcttactgctgcctgtcacccctcactattcctgagaactcttctgtacagtacaggaagcactcctccatggaacactaccccagtggcaagagaactgccctcagatcctcaatggggtttgtcccrtatgtggagagctagagtacagactggcctgacccagccccaacctggctttgctcctttatccaccctggtagcttaacacaaagggcagaaacttttgggagctctatggtcccatccattgccagagacacgagactacctccccagggtaacataaggcaagcacaaatcccacccctaccactgcagctggtattcttttgcaagtaccacctcctggcttgtggccaactgacacaatgcgttacagcagctctaggtagaataaaacagtgggc

SEQ ID NO: 199343 - DNA, 512 bp, Homo sapiens
agcacttcccccactgtcccccatgccccgccttgctcttgcagtgtaagatgtgcctgctcctcatttgccttcctccatgattgtaagtttcctgaggcctcccgagaagccaagcagatgttaacaacatgcttcctatacagctctcaaaatcataagccagttaaacctcttttctttataaattatctagtctcaggtacttctttatagcaatgtgagaacagactaacacagtgggcttactgctgcctgtcacccctcactattcctgagaactcttctgtacagtacaggaagcactcctccatggaacactaccccagtggcaagagaactgccctcagatcctcaatggggtttgtcccatatgtggagagmtagagtacagactggcctgacccagccccaacctggctttgctcctttatccaccctggtagcttaacacaaagggcagaaacttttgggagctctatggtcccatccattgccagagacacgagact

SEQ ID NO: 199344 - DNA, 575 bp, Homo sapiens
catgattgtaagtttcctgaggcctcccgagaagccaagcagatgttaacaacatgcttcctatacagctctcaaaatcataagccagttaaacctcttttctttataaattatctagtctcaggtacttctttatagcaatgtgagaacagactaacacagtgggcttactgctgcctgtcacccctcactattcctgagaactcttctgtacagtacaggaagcactcctccatggaacactaccccagtggcaagagaactgccctcagatcctcaatggggtttgtcccatatgtggagagctagagtacagactggcctgacccagccccaacctggctttrctcctttatccaccctggtagcttaacacaaagggcagaaacttttgggagctctatggtcccatccattgccagagacacgagactacctccccagggtaacataaggcaagcacaaatcccacccctaccactgcagctggtattcttttgcaagtaccacctcctggcttgtggccaactgacacaatgcgttacagcagctctaggtagaataaaacagtgggc

SEQ ID NO: 199345 - DNA, 238 bp, Homo sapiens
aaattcttttgcttttcagctttattgagtacagttgacaaataaaaattgtacatgttaaggtatacaacctgatgttttgatatacatatactttgtcaaatgatcaccacttatccaactaattaacatacccatcacctcacagwtaacattttctttctttgtgtatgtgtgtgtgtgtgagataagaacacttaaaatctactcttttagaaaatttgaagtatatgataca

SEQ ID NO: 199346 - DNA, 543 bp, Homo sapiens
  misc_feature (1)...(543): n = A,T,C or G
taaaaattgtacatgttaaggtatacaacctgatgttttgatatacatatactttgtcaaatgatcaccacttatccaactaattaacatacccatcacctcacagttaacattttctttctttgtgtatgtgtgtgtgtgtgagataagaacacttaaaatctactcttttagaaaatttgaagtatatgatacaatattgttcactatagtcaccatgctgtgtacattagatcttcataactaaaactttacygacatctcccaatctcccccttcccacaacacctggcanacacttagatgtagaatctaaaatagactcaaagagcagagggtcataccctagtctaagcactaactgacactcataagttttcaggtcccttttgccgctcctaaagttacaacatgagagatgtcatgttctaacaaatatctttaatcttaagaataaaataatatttttaaatagaaaattgttttcatcagctcaggaaggatccaaatttgagtctctcaaagacaagtggtagtaagaat

SEQ ID NO: 199347 - DNA, 577 bp, Homo sapiens
aatttttgtgtttttagtagagacagggtttcaccatattggccagactgctcttgaattcctaacttcaggtgacccacctgcctcagcctcccaaagtgctgggattacaagcatgagccactgtgcccagcctagraataacttttaaatcagaaaaatacattttttaaaaagatgtaaagcatacatagaggataacttacaaatctgcatttcatgaccacatatatctattgagttgcccctaggatcatttttttcaaagctaatgtctgccacaaatgggagttttaataggttataattcatatgacttagtgttaaacctctacgttggtattcttaaatttaacatggataaactgaacttgatttcctgcattaaaaaaaattaaagaaatgaaagttctgactgttttattgtagctggggaattctttttgcaggtgacgctcatgttacggttttgaacccaggactttgcgttgcagttttgttcaggggttgcagaataccgatctgactttgcaggaatgactgtcttggtgcataagccattaacctctctgcgccc

SEQ ID NO: 199348 - DNA, 572 bp, Homo sapiens
aatgtaatgactacaaacctggcagctttttaagtttaatttgcattattaacattttcacatcactttcttaagtctaagcatcaacaaaacaatgaatcaaatttttgtttccagcatttgtcaaattctatgatgtaaatatartcccatcatgagtaatttcaatctaccaacatgatgtcacctaacacaaaacagagaagagatgtgcaggaacacatgattatttagtattttaccctccagacataatgagcacaaataactttaaaaacatagatcatagttaacatagtaaacttatgagaaaatgacaaatattgagtatttgccaccttcgtttttaataatgtgtaattgcacattcataagatttcgttttaaaacgtgattgtatttaaaaacatacccatgaaatctatgaaaacttaataattgactttcataagccagcacaagccagctctaatacacatgggttatttacatcattttttctcttaatatttaagttccaaaaaaggctgctttgctttttgcttacaatttttttctactaaaaaagtagt

SEQ ID NO: 199349 - DNA, 639 bp, Homo sapiens
gttttctcctaatccccagtaagcaagagaagaaaaaatatatggaatggtgtcacacacctgtagttccagctactctggaggctgaggcaggagaagagaattgcttgagcacaggagtttgaggctgctgtgagctataatcatgcaactgtactccttcctggggaacacagggactccttgtgtctaaaaaataaaaaagataaaaaaaaaaaaaagggcgggagggctcacgcctataatcccagcactttgggaggccaaggcaggcagatcacctgaggtcaggagttcgagaccagcctgaccaacatggtgaaaccctgtctctactacaaatacaaaaattagccaggtgtggtggtgggcacctttaatcccaactacttgggaggttgaaggaggagaatcacttgaagctaagaggcggaggttgcagtgaccactgcactccagcmtgggtgacagagaaaaaaataaaaactggagagatattggagaaataaaaataacaagattttatgaaagtttttaagtggagagcacaaaaaataggtaggatacacagtgctattcttcaagttaaggagaaaatcaggtttggggaagccttgtggattctgtgataatcatgtg

SEQ ID NO: 199350 - DNA, 541 bp, Homo sapiens
gccaccagtctccttgctaaagcacagcgagagtaacctttacactagttcccaataagttcctcatccccrtctgagaccacatcagttcccaataagttcctcatccccatccgagaccacctcagcctggacttcttgtccatactactatcagcattttggtcaaaattaatcagtaagtccctaggaagttccaaactttctgacatcttcctgacttcttctgagccctctaaattgcttgaacctctgcctcttacccagttccaaagtcatttccacattttcaggtacctttatagaggtgccccacttttttggtaccaattttctgtattaggctgttctcacactgctataaagaactacctgagactgggtaatttaagaagaaaataggtttaattgattcacagttatgcaggcttaacaggaagtatgattgagaggcctcaggaaacttgccatggaagaaggtgaaggggaaaggagcaccgtcttcacatggtgacagagagagagagaagggggaagtgct

SEQ ID NO: 199351 - DNA, 550 bp, Homo sapiens
gggcagaatgccaccagtctccttgctaaagcacagcgagagtaacctttacactagttcccaataagttcctcatccccatctgagaccacatcagttcccaataagttcctcatccccatccgagaccacctcagcctggacttcttgtccatactactatcagcattttggtcaaaattaatcagtaagtccctaggaagttccaaactttctgacatcttcctgacttcttctgagccctctaaattgcttgaacctctgcctcttacccagttccaaagtcatttccacattttcaggtwcctttatagaggtgccccacttttttggtaccaattttctgtattaggctgttctcacactgctataaagaactacctgagactgggtaatttaagaagaaaataggtttaattgattcacagttatgcaggcttaacaggaagtatgattgagaggcctcaggaaacttgccatggaagaaggtgaaggggaaaggagcaccgtcttcacatggtgacagagagagagagaagggggaagtgct

SEQ ID NO: 199352 - DNA, 474 bp, Homo sapiens
gaggatatgtaataaaatctaatataaattgaagacaagtgatgaaaataatgacacagaaaatattaaaagctaattgctaagaattttctaaaattaatgaaatatattaacctacaatttcaggacagcaaattccccgtaatgaaactgcagagaaccaagaacaaatagaagtgaatacagcctcaatgtggtctaagaaactaaccactagccaagaattttctgtacaacaaaaatatattttaaaaataaatataacattaaaatattttcagacaaataaaaactaatakaattttttaatgagcagatacaccctaaaaaaattccaaagactattaattaagaaagaagaaaaaggaaaatggtcatgagcaaatcttttcaaagatgtagggatgaatggagagcagcaagaatgataaatattaagacaataaaacaaagaaactgactaatctaacaatg

SEQ ID NO: 199353 - DNA, 525 bp, Homo sapiens
taatatatttatttattgttacttgatatttatgacattgaagtatttatgttttaattctttattgtacagagtatggtttgtcttacactttttaaattttactgcaaattttacatttctatattatatatataaaaatatatattatataatatattattaatatatattatatatttctatattatatatagaaatataaattatatattctatatctaatttatttcttaagtgtaaacaactttgtcctagaaaatactcaaagacttatccatgttgtyataacagcttcttctatttaataaatatctattttcatgtttttttctacagattataaataaaatcagcattttaaaattaaaatctgtttcaaaatatttattttttattgtacatacgtgaaatttctcttattttaccctaacttgttgacaacttacttaaaaaatacatacaagttccaaaaaaaaaaaaaaaaaactcctttcatgtaccaggcacactgattggaactga

SEQ ID NO: 199354 - DNA, 510 bp, Homo sapiens
ctgagttttacttaatttttaacagatttcttaataatatatattcaatattattttgtataatacataaacaggcaccctgtcagaagcaaatagtcatccactctaccactgccaccccatcccttcacttaataaagttcctgaagatgttacctatagcagaggactttgggttcaacctgagtactttttagaccttttattttcaattaagtatgaaataaaacaagttagcagtaataaaagtcacacttcttggagaatgactcttttttttctgctttttttttttttttttttttttttgcctgcttaacattatgcagcaaaattgagtacacttytttcccataaatcaggggcggcactacaatctcaatgcttgtattattggatttcttattattaccatttgcttataatttagatacaatgaaataatgtacaaaaaacatgccactttctttcccttctcttttttccacactagacaattgtcagttttcc

SEQ ID NO: 199355 - DNA, 510 bp, Homo sapiens
ctgagttttacttaatttttaacagatttcttaataatatatattcaatattattttgtataatacataaacaggcaccctgtcagaagcaaatagtcatccactctaccactgccaccccatcccttcacttaataaagttcctgaagatgttacctatagcagaggactttgggttcaacctgagtactttttagaccttttattttcaattaagtatgaaataaaacaagttagcagtaataaaagtcacacttcttggagaatgactcttttttttctgctttttttttttttttttttttttttgcctgcttaacattatgcagcaaaattgagtacacttttttcccataaatcagkggcggcactacaatctcaatgcttgtattattggatttcttattattaccatttgcttataatttagatacaatgaaataatgtacaaaaaacatgccactttctttcccttctcttttttccacactagacaattgtcagttttcc

SEQ ID NO: 199356 - DNA, 510 bp, Homo sapiens
ctgagttttacttaatttttaacagatttcttaataatatatattcaatattattttgtataatacataaacaggcaccctgtcagaagcaaatagtcatccactctaccactgccaccccatcccttcacttaataaagttcctgaagatgttacctatagcagaggactttgggttcaacctgagtactttttagaccttttattttcaattaagtatgaaataaaacaagttagcagtaataaaagtcacacttcttggagaatgactcttttttttctgctttttttttttttttttttttttttgcctgcttaacattatgcagcaaaattgagtacacttttttcccataaatcagggkcggcactacaatctcaatgcttgtattattggatttcttattattaccatttgcttataatttagatacaatgaaataatgtacaaaaaacatgccactttctttcccttctcttttttccacactagacaattgtcagttttcc

SEQ ID NO: 199357 - DNA, 510 bp, Homo sapiens
ctgagttttacttaatttttaacagatttcttaataatatatattcaatattattttgtataatacataaacaggcaccctgtcagaagcaaatagtcatccactctaccactgccaccccatcccttcacttaataaagttcctgaagatgttacctatagcagaggactttgggttcaacctgagtactttttagaccttttattttcaattaagtatgaaataaaacaagttagcagtaataaaagtcacacttcttggagaatgactcttttttttctgctttttttttttttttttttttttttgcctgcttaacattatgcagcaaaattgagtacacttttttcccataaatcaggggcggcactacaatctcaatgcttgtattattggmtttcttattattaccatttgcttataatttagatacaatgaaataatgtacaaaaaacatgccactttctttcccttctcttttttccacactagacaattgtcagttttcc

SEQ ID NO: 199358 - DNA, 618 bp, Homo sapiens
acgatttctttaaaatataaatcaaatcacactatctctctgttcatatcctgaattcctgtccacaccactcagagaaaactctgtaatccttactatggttttctgtctgattatacctggatctaaacacaaacattttctgcaattcatgaggccacttcacttgagcaaaaccaccctccctattgtttgttattttacctctagacattttgttcccaygggatcttagtaatccctcttgccattgcctggaaacctgtacctcctcacagccacttagcaaactctctcacttcttttaatctcttgttcaaatgtcttttgcttcatgacaagcctgcatatttatacttttcttaatttagcaggtctaatgcatattggtgtctcctcttcccagatgccagctctgttagggcaaagactactatctacttgctttatgaatctatccaaagtgcatattaacagtagcaaggacataaggtgctcttaatatttattaaaggagttaatggttttcaaaaagtagtcattaaccaaatgtggatgtgattacagaaattttaataaattgatagagtgtagctttctgaaatgtaaatcagaaga

SEQ ID NO: 199359 - DNA, 550 bp, Homo sapiens
ttattctttttctgttagcttttgcaaaatactttwcatataaaggttaatacttgcctgtaacaatcaaataataaatgacaagactgagctttccaagcaaatagtaagtagctatgtagataaaactttaaatgcatttagtttttaaaaaatatataattctaactatatggtgcctgctccctttaatttaatgtgattaaatacagaactttaagactatgataccactcgaagttattgattattcttgctttcataaatgtatactaatttgactatgtaaaataaaaatatgggtttttattaaaaatacttaaaaattaattcagatgtaaaacgctttaatgttaatattaactaagaagtgggaagcttgtctgtttcatagggtaacagaatccttgaataataatttagacaagtagcaactgtataaatatactatccatgataataatatcacaattttatctctagaaacaagagttcctggataaatagaaggtggaaaaaaacaaaatactgaaaataaaaataaaaaatg

SEQ ID NO: 199360 - DNA, 645 bp, Homo sapiens
atgttacagttacctttgagagaaacagaaccctaagtgaggtatgatattgaatattttataagttaagaaattttgttgtgggattggggacttcatggattgggattaatctaaaaaatggcaattctayagactgaaaggcttcacaatcactctttgctcccagtggtgtttctacttgggtttattagtacttacctaattatgttaatcaggacctaagcaatggttctagaaaaacaattcgtaccagaaagacatgcattgcaatgttttctgggctcatatccctcagaagagaggcacagacattaaggattttttttttttttgagacagagtctcgctctgtctccaggctggagcgcagtggcatgatcttggctcactgcaacctctgcctcccaggttcaagcaattctcctgcctcagcataccaagtagctgggactacaggcacgctccaccatgtccagctaatttttgtatttttagtagagacagggtttcaccatgttggccaggatggtcttgatctcttgacctcgtgacccaccccccttggcctcccaaagtgctggggttacaggcgtgagcaccaaacccagccacattaaggattttttaaaaaacaattgtgat

SEQ ID NO: 199361 - DNA, 470 bp, Homo sapiens
tgaattccgcatttatacaaagcgaatgatgtgagcaggagggtagaactaactaaaaaaaagcatttacgtcatttttcaccaacttcacaatttrtagaaagtttcttagttcccttatgtgaaagtttaaattattaaaagaaaaaaaaaaccctacaggtatttgtatacttaggacaagtttgacgaagccatactcagcaatatcacttccctctccacaaactatgcatgcattctctctggataaaaataatcgctggctcttattacagtgttggagctctcaatctttataacgacgatttattcctatttcacttatgaagaaagcgaggcacagacaggctggttagttattgggattagacatctatcccaggcaactggctccggggcctgtgctcttagccacctgctgcctttcactggacttgcatacactttccctaggatacacttgccac

SEQ ID NO: 199362 - DNA, 480 bp, Homo sapiens
gtgaagccagacttttgctactacatcaacttctttacttaggtatgccactggttgtggggttgtctcacgagtctgagtaaggattccaagagctatccctgctctctctgtgatgtataaaaagaagttttgtcctgtgggaaggcttaaagctggagcttgtactagggcctgctttaaggttttgaaggctgtttctgcctctggttcccattctactagatgagtatttgccctccgggtctccttgattagagtatagaggggcctggctatctcgctctatccagggatccatagttggcaaaagccggtgattccaaggaayccccgcagccgttttaatgtcttagggcaaggataagccagtataggctgtattcgttccttgctgagggccctggttcctctggctaagattaggcctagatatttgacctgctgtaggcaaagctgggccttcgacctagatgcctt

SEQ ID NO: 199363 - DNA, 354 bp, Homo sapiens
ccgacttcattaagaaaaacttctgtgtatcaaaggacactataaagaaagtgaaaagacaacgcatagaatgagagaaaatatttgcaaatcatatgtctgataagagacttgtatctagaatctatacagagcttttacaaatcaaaaasacgaatacccaaactaaaaatgggcatataatttgaatagatatttctccaaagaatgtattcaagggactaataagtacatgaaaagatactcaacatcattagtcatttgggaaattaaaatcaaaatgataatgagatagcactttatacctactaggatggttattttaaaaaagataaataaaggccaggcatgatg

SEQ ID NO: 199364 - DNA, 521 bp, Homo sapiens
gcaatatgttatcacaaatagaaattccaattttattaaaattgttattttgtgtctaaataaaaaaggaagcaactatataaagcaaagcctattttactgcatctttactggatatttcctagttttgagaaggcatatgaaaatgtagcgatcagaaatggtggattttcctgaaaactaacatgagacagataccaagagctttatttcaattaattctcctagtacttaagatcgctttgggcaagttccctatctgagttttagtttccctaatctaaaaaatggggaaatacattcattccaaaaatatctactgagcccttcctatgaatggtgctaggaatgtagmtgtgaataaaacagacagaactctctgcccctgtggaattaacattctaatggagattggcaagtagacaaactggatggagagattgttggatggattggtagagaatgaaggaaaagatagaaaaaatgaaataaatatagaatacattataagaacgaggcag

SEQ ID NO: 199365 - DNA, 291 bp, Homo sapiens
acacttaaaccgtccgtggacagcaaggctaagayggtgcactgtaacacacacccacttgggtttcaggagtcacaggctcccacccgtggatgctgccatggagccagagcccaggcgtgctcgtccggctcctgcacctgcccatctgcatgctccccatcccgtaaggggttcgagtgccagaacagccacacctctgtatgtcctgcaagaggggccagggaactctcccgtttcattaagagtcctgcacaaccaaaatttactggggcaaaagatggatgaatg

SEQ ID NO: 199366 - DNA, 561 bp, Homo sapiens
tggaaatacaggctgggcatggtggctcatgcctgtaatctcagcactttgggaggccgaggtgggcagatcacttgaggccaggagtttgagaccagcctggccaacatggtgaaactccatctctacttaaaaaaaaaaaaaaaaaaagttaaccaggcatggtgatgcacatctgtagtcccagctacttgggagactgaggcaggagaatcgcttaaacccaggaggcagaggttacagtgagccaggattgcaccattgtattccagcctgggcaacagagtgagactgtgtctcaaaaaaaaaaaaaaaaaaaaaaaaaaaaaaaaaaaaaaaaggaagtacatattttactgkggccacattgagggtcattataaacaatggcttataaagttgattatatttacttattccaaaaaagtaagtagttttttaggtagcttccaaattaaaaaaaaaatgttactaattattcaatagtaattgcaatactgtctttgggactctgatagtttgatatcctatgctactttttaactactgaaatatcaatat

SEQ ID NO: 199367 - DNA, 479 bp, Homo sapiens
ctccttttggtattcctattacacatatattatatcttttgtaattgtcccacagttattgaacattctgttctgctttttcaggtggttgttattgtgtgtgtgggtttttttttttttttttttcagttttggaggtttctactgggatatcctcaaggccagagattctttcctcagctatgcccaatctcctaataagcccagtaacaacgtttttcatttctgttacagtgtttttgatctctagcatttcatttggtttctttttttaraatttccatctctctacttacatagcccaactgttcttgcatgctactttatgcatcagacttcttggcatagttgttttacattcttagcctgatcattccaacatccctgccatatctgaatttagttctgatgcttactctgtctcttcaactgtgtgtgtgtgtgtgtgtgttttggcttttagtatgtcttgtaatttt

SEQ ID NO: 199368 - DNA, 638 bp, Homo sapiens
gttgtaataagataatgagttaaaggtcatgctgtaccaatgtgaaatccaaaaaaggagtcataattaatttttcttggactctgtttamaaatgttaatacagttctttacagaaaatcttcacatataaaaaaatcactgttcaaacatagactatctgttgaaatgtaaagtatatagaatataggtcaacagcttccattgtgaatgcttcttgaacaaggttgagtttcaaccctatcaccaattttctgttgtttttatctcctggttttgtgatgtatcaaatccagaaggctagatttaattacagctttctattgcttcataaaatatcctgtttgatgtagaccattaattaaactgcaggctctccttttggccaaaaaatccagatgctaagatgtcttttttgatatttccctttttgctgaacaccataagctctctttccctaattttaaatttagtatgattgattattaaatgtactctgttttctggtaattaaggaagaaaacaagtttctaagcaggaagtgagtattgataactgtaagaataaatttttgtccccattggctattaaactactttcgtaaattaagttttagtgtctattcaatgttatgagaat

SEQ ID NO: 199369 - DNA, 346 bp, Homo sapiens
  misc_feature (1)...(346): n = A,T,C or G
nnnnnnnnnnnnagtttttccttttactgagggcttttccacaactcagacttggggctgccgggcagtgtcagtctcagactcttctctctccagggattccctgacaggatcccttgtctacatatcaataccacwgtccattcagcacacacaggtggcaatacttttttctttgcttttcaaaagaaatattcacagcaatttattactggctctcttttatttcctcttcagacttctgctgagagctatgacttctatccactagctatgagtgtgaacaaattcactctcactcaagtttccagttccaacatcccagagttgaagggaaatcctacat

SEQ ID NO: 199370 - DNA, 540 bp, Homo sapiens
tagaagtaatcatatcgtccctgctggcaagggtccacagacccccgttggaactttttgtgggggttctccacgtagaaggctcacagcttttgtgcagcaaaaatctactgcagcactacyggctgtggtgggggacaggcattgtacacaggtgggggaatggcctgagctggaaatgccccggtttggaacggggcccaggacaggcccctcatggcatttcctgaaatcgagttcccatctttatcaaacttagagtgacactgattagcccaatgttttccttttttacacttcgggcatagacctggttcatactgattgatagcttgtttaaattctttgagtaatttaaaaggaaaaggcacaaatgtagctataatatttccctgttgatctgggggatgtattctaacagggaactgccaagcctctaaatcaccctctcttctagcttactggattcctgcctgagtagaactgaaagcggtcactcgaggtgctgctcgaacagtcactggggcaactactttttgc

SEQ ID NO: 199371 - DNA, 572 bp, Homo sapiens
tgactatggttattttctccctataagggcagagctgagtaattgcaacagactgtctgccttgcaaaatttaaaatttactccctagtcctttacagaaastttgctgactcttgttttggaggaaaggttttcagtggtctgctttctgatcaaattaatgatggaaaagacaaagtgctttatacagtcgacagagccatttttaaaatcaggttgcagtgagccaagatcgtgccactgcacaccagcctgggcgacagagtgagactgtgtgtcaaaaatagaaaagatagtattaagctagaatgttttatcaggctcagtagtgatagtggtcttgtctctgcttcactcccaagtacactacaaactgagactttgaagcactagtctattataaactatttataaaactgatctatttggcaatccttgctatttaaagagtcaataaatcaaattgatggatataaagcagaatcaagagaagcaagatagcaagatgattttgggatttgttcacattacagctcacgtaatactgatctagtcattagaaattattataa

SEQ ID NO: 199372 - DNA, 561 bp, Homo sapiens
gtcttttcttttgccattttgaaggccccttacgttattagtaaaacatatttgtggatagctgagaagtcaaaatgtgccgctatttcctgccttgtgatatcaggtagtgcatatgatggttgctctcctgcagcactcactatgaattccagtttgtcaaataaatttgtagcatattcacattagaaattcaccactgtttcttaattcaaattccttttgatgagttccaagagaaactattcattttctttttcactgtgcaractggcttggatctgttgttcccatgtctgtgatgaaagtccaggtaggtcccatagactttgtttcctcttatgaagccaaatgtcctgtagccatttgcaatctttatgaagctgattacagtgtataatcaaagtcctaatttttgaatattgggaattatcttccactccctcctgaggcctgcttaaagattggaattctgcatgtgatatttgtgcatgggtgttgggtggaaataggcactcaggttttgccttttttccatgttctctccaactgtgccactgt

SEQ ID NO: 199373 - DNA, 518 bp, Homo sapiens
tccagatttgttttttttgcttagtcttgctttggctgtgcaggctatttttagttccacacgaattttagaatttttttttttttttttgctagttctgtgaaaaatgatggtagtattttgatgggaaccgtattgaatttgtagattgcttttggcagtatggtcattttaacaatattgattctacccatccatgagcatgggatgtgtttccatttgtttgkgttgtctatgatttctttcagcagtgttcacctccttggttatgtatattcctaaggggcttttttttttttttttttttttttttttgcagctgttgtaaaaggagttgagttcttgatttgattctcagcttggttactgttggtggatagaagagctactgatttgtgtacattaattttgtatccaaaaactttattgaattatcagttctaggaactttttggaagagtctgtagggttttctaggtatacaatcatatcatcagcaaacagcgacagtttgactt

SEQ ID NO: 199374 - DNA, 586 bp, Homo sapiens
gagtctgcacactggattcatgccctcccctgagttctggccaggagacttcgcattcggttggaattgttacaaagtccagttggaggtttccttccccctgtggtcttttcccagttcctctggcagccctccccaaggactccagagatacaagtcagaaatggcttccctggggacccagagagtccacagggcttttcctgctgtttcctctaccactgtatttcactcagctttctaaattgactcagctccgggtaagatcatatccttctcctrtgatctaggccttcaggttccccagtgagggtgtttaggggcagacgatccgatccctctttcccactttcacagtttgggcactcacagtatttgggccgtctcctgggtcctacaggaggaatccacttccttcaaagggtctatggattctctcagctttcctgatgtattcctgtagtagctcttggagaaaaagttcacgatgtgagtctccacacactgctctgtcctcccaagtgggagctgctatttaatcctgtctcctatctgtcattttccccaccactcatctctctgttat

SEQ ID NO: 199375 - DNA, 602 bp, Homo sapiens
cctcttccactgtactatctttagttctttcataaagatgcacagaacagtataaaaactctttatttttttcaaccctgaagatagtatcatccttcctttttcatcattctttcttcttcatgatcctctcttctgttgacctgatgatgcttgtttgtcttgtgtttcattcttgaacagagtcgatgaaagcagagtattgtgaagagaaagaagaggaaagcagttgtctttctcatttcttttttcatatttcctttttatttgcaatagaatgatctattccggttgcagagcccaggaggagtggataagcaggggccatctcgagtttgctyattgcccataatgaatttccagtctcaaatggaggttcttgccctttggtcaacaagctttggcttcacatttttcctctgactctgtctaccctttaaaaggatctgtgcaaagctaccatttgatttaagaaatactgctcagcatggcttacagataataaactttactagggaacccagggggttgatctttccctggaaacctgctctttaaaagttttgcagtgttttgttggagagccatagagtttgtacttg

SEQ ID NO: 199376 - DNA, 602 bp, Homo sapiens
cctcttccactgtactatctttagttctttcataaagatgcacagaacagtataaaaactctttatttttttcaaccctgaagatagtatcatccttcctttttcatcattctttcttcttcatgatcctctcttctgttgacctgatgatgcttgtttgtcttgtgtttcattcttgaacagagtcgatgaaagcagagtattgtgaagagaaagaagaggaaagcagttgtctttctcatttcttttttcatatttcctttttatttgcaatagaatgatctattccggttgcagagcccaggaggagtggataagcaggggccatctcgagtttgctcattgcccataatgaatttccagtctcaaatggaggttcttgccctttggtcaacaagctttggcttcacatttttcctctgactctgtctaccctttaaaaggatctgtgcaaagctaccatttgatttaagaaatactgctcagcatggcttacagataataaactttactagggaacccagggggttgatctttccctgraaacctgctctttaaaagttttgcagtgttttgttggagagccatagagtttgtacttg

SEQ ID NO: 199377 - DNA, 511 bp, Homo sapiens
tggctgtgtccgcacccaaatctcatcttgaattttagttcccatgattcccatgtgtcgtgggagggacctggtgggaggtaawtgaatcacggggacggttacctccatgctgttctcatgatagtgtgttctcacaagatctgatggttttataaggggcatttcccccacttcactctgcacttctttctgccaccctgtgaagaaggtgcctttcttccccttcgccttccaccacaattataagtttcctgaggcttccccagccatgtggaactgtgagtcaattaaacctctttcctttataaatgacccagtctcgggtatttccttatagcaatgtgataacagactaatacactggacaatgagtaaatcctaattaaattgaatacaattaaaactgcccaccttctatgatatagactttttaaataaaataactgaaatagtttatctgttacctttctgtgcattatcataggcatagccaaaaacacagactgtg

SEQ ID NO: 199378 - DNA, 511 bp, Homo sapiens
tggctgtgtccgcacccaaatctcatcttgaattttagttcccatgattcccatgtgtcgtgggagggacctggtgggaggtaaatgaatcacggggacggttacctccatgctgttctcatgatrgtgtgttctcacaagatctgatggttttataaggggcatttcccccacttcactctgcacttctttctgccaccctgtgaagaaggtgcctttcttccccttcgccttccaccacaattataagtttcctgaggcttccccagccatgtggaactgtgagtcaattaaacctctttcctttataaatgacccagtctcgggtatttccttatagcaatgtgataacagactaatacactggacaatgagtaaatcctaattaaattgaatacaattaaaactgcccaccttctatgatatagactttttaaataaaataactgaaatagtttatctgttacctttctgtgcattatcataggcatagccaaaaacacagactgtg

SEQ ID NO: 199379 - DNA, 631 bp, Homo sapiens
aaatactagaggaggtaaacaaacaaaatgaccatacctttttatgatggaaattaagtagtgctttagaataaaaatcattgaagggaaaatcagtgagaaaaactgmaactgggtaggagtttagccaagaaagaaaataggaaaatttgtaaatgtcctgcccaagacaatttcaagttcctgctacactgagatggattgggaagctgtagaaaaactatgggctttggtgaccatcacatcacattcttgctttgagaccttggcataaactctctgattacaagttttctcacctattaaaatagggcataataacctcaacagagcataagagtaaagaacaattttagcagtaattaatcttatcaaacagcaagctctctggttgattctttaactttggtgaatctcctctaaaacattccatagttttagaaagagtgaactagagtgaacactttggagtaggtaattaactgacataattaagccgatatccagggtcttggcttttccatcatgattaaatgaaaaccaaatctttatctcctacttatgtggcacttcataaaaaaaaaaaaaaaagaaaaagaaacagtttcctaatactaaataaaccatgcag

SEQ ID NO: 199380 - DNA, 631 bp, Homo sapiens
aaatactagaggaggtaaacaaacaaaatgaccatacctttttatgatggaaattaagtagtgctttagaataaaaatcattgaagggaaaatcagtgagaaaaactgcaactgggtaggagtttagccaagaaagaaaataggaaaatttgtaaatgtcctgcccaagacaatttcaagttcctgctacactgagatggattgggaagctgtagaaaaactatgggctttggtgaccatcacatcacattcttgctttgagaccttggcataaactctctgattacaagttttctcacctattaaaatagggcataataacctcaacagagcataagagtaaagaacaattttagcagtaattaatcttatcaaacagcaagctctctggttgattctttaactttggtgaatctcctctaaaacattccatagttttagaaagagtgaactagagtgaacactttggagtaggtaattaactgacataattaagccgatatccagggtcttggcttttccatcatgattaaatgaaaaccaaatctttatctcctacttatgtggcacktcataaaaaaaaaaaaaaaagaaaaagaaacagtttcctaatactaaataaaccatgcag

SEQ ID NO: 199381 - DNA, 424 bp, Homo sapiens
ttgaggcacccacaaaaccacccttgtccctacaacccttgtccctttccagtgctcctttccacccttcccctttactgcctctaccaggggaaccactctcctgacttctgacaggtcagattagttttgaacttgatatcartggaataatacaggatgcactcttctgaatctggcttctttcactcaacatgaagcttgtgagcttcatccagaaaaaataaaaaaataagattcctgactcattttttgctaaaaatatgacttaagcattatttagaaatagaaagggaagaatctgataaaagaggatgaaaatatactattgatacagaggtggttgccaaactatgcttggttggaagtagcatagtgtttgatattagttactgataataagactttctgttgcaatctggaa

SEQ ID NO: 199382 - DNA, 576 bp, Homo sapiens
ccatatatttgctaacatgtagttctcattcgtattttgttttgaagtatttcttgtcattatgattataattaattttttacctttcttttacttccttttatgcttcatacttctccagccaaatgaagcattcaatccctggcttcctctaaaagttgatgtrtttgcttctattttcctgaattagaagccacctgtcctgggtttctacagcatcagcttactgcagtataatgcatttattttctttttttgttcccccttcttcagactacttgatcaaacctaatttgtctgcctgtaaaaaaataccgagagactgaaaatagcaagaatagcagaaacaatcaccaaaaaaagctaacaggtactgattgcttaatatgtaacaggttgctatcttaaatacaacttatgtattagctcatttaacactcacaacttcagtgaaatagctattactatgcctatcactggaatttgatggcatgttttattttaagagcccctatataatctgtgaaatatttatcctagcatatttggcacactgtgtaccttaagtgttcagaa

SEQ ID NO: 199383 - DNA, 576 bp, Homo sapiens
ccatatatttgctaacatgtagttctcattcgtattttgttttgaagtatttcttgtcattatgattataattaattttttacctttcttttacttccttttatgcttcatacttctccagccaaatgaagcattcaatccctggcttcctctaaaagttgatgtgtttgcttctattttcctgaattagaagccacctgtcctgggtttctacagcatcagcttactgcagtataatgcatttattttctttttttgttcccccttcttcagactacttgatcaaacctaatttgtctgcctgtaaaaaaataccgagagactgaaaatagcaagaatagcagaaacaatcaccaaaaaaagctaacaggtactgattgcttaatatgtaacaggttgctatcttaaatacaacttatgtattagctcatttaacactcacaacttcagtgaaatagctattactmtgcctatcactggaatttgatggcatgttttattttaagagcccctatataatctgtgaaatatttatcctagcatatttggcacactgtgtaccttaagtgttcagaa

SEQ ID NO: 199384 - DNA, 651 bp, Homo sapiens
tcttttgtttttttttttctatctgttgaacaacagaaaatgatgatattgtttacaatattccaggctatggaaaagattctaatgtgttttatgagtactcaaataactgacaaacttcattccaaaaactagtctgatacaagagtatatatgcagatatagcaaataaatattagcaaaaagatccaagaatatacaaaagtatattatattattcggtatttttattgggactgcaagatttgttcaatatcagattatttgcataktttacctcggtaaaaaaaaaaaaactaaagaaacaccatataaatatattaatagatacagagaattacttgataaaaattccatgactattaataaaatctctacataaaacagaaaaaatttccttgggaaattaatagaattctcccaatattttctgctagagagaattgcacttattagataataaatgttgctcctggaagtaaaggatgtgattacaaaagaccattggagcttctaactttatttcaacatcacttaaaatattaaagatgaaacattaattaaacatagagagatatggtttaaatattaacttgcagaaaatgaagagttgcgctagaaggagaatgagagtcattacctaatgactgc

SEQ ID NO: 199385 - DNA, 588 bp, Homo sapiens
agacggtaggatcaagaggcaggaggagagtatcctgccggggtgagaggataaggaaatgaggttgggtggggctcctgacakggttaaggcctgtgaatcaccagaggccctcaggctgggtgcagtgggctggaggtagcttttctgaaagccgtgcttcttggagtcagcattggcttcacattcaagacggctggattggggtgggggtaggggagaaaagggggagtcttagaggaatgaaaatgcatcacgtggccacagcaagaatccagagaggaaatgattagaattgtgctatggagtgaaaaagtaggactagaatggagagataattttgtagttccctggatgtggaggtgtgcaggggagtctacggtgacccccagcttttagcatgttactggatgcttggtggcaccattgacaaagatgaggaggaacccaagagaaataaggtgaaagatgttgagctgagattaccttttgacatgttgagcttgagaaacccatgggaactacagttagaggcatctgctcagaagaatgtcctggctggagtcgggcaccatctgcaaacagatt

SEQ ID NO: 199386 - DNA, 560 bp, Homo sapiens
ttacattttataaagttattgtgaacacgaaattagcaaatacttaacctttgctcctaggaaaaatacagggttaggttcctgcaagcctctggtcataacttttttgtcaactgatcaatgtacaaccttgttttatgtgtgtttctgtttaaagataacttatgtaatatatattgctgattcattaaactgatagctaataactataactcatgcctgaagaaaccttatctaacacacgtattttctctgtaagcctcatctcagccttcttggactaacaaaactaggcagccctttagcactatacttgggagccattttcaaaagcaaaatcaccacaaaakgtctaaaaatgtggaaaaggtggcacttgatagactacaaaaaagtttacaatatataagacctgaaacaagaaggtagaccatcactttgacctaagctaagaatgtgcactccaatttttcaccactctgtatatgtcctcaaaattacgtaacagcaccaagcatattgacttaaggattacaaacacattttagcaatcagggaaa

SEQ ID NO: 199387 - DNA, 493 bp, Homo sapiens
aataactttgctgagttctgtgagtcctcctagtgaatcagtgaacctgagggtggtcttagggaccttccaacacaagaractttttcaagctcgcaattagtggcagaatctgaacaaatcaattcttctcattcatttttgcaaccccacatagatggttggtttttccttgtgcatactggcaatcatcaaatgtatagagcgagtctaccatgactgggagttaggaaggtgatgacaaatatggtgagcctccttccttatggagctaacactctcatcctttgtgatcttcttatatgattttgattatgaaattctatttttaactaattgatttttagatcatagaatttatatctctctttagtttgccattgtgaacttctttaaaacacctatcatagtctcctccgcatcatagcaattgtactatctgtttctctctagattttgaagtgctgtccagatgggaaatctgtcaagcatt

SEQ ID NO: 199388 - DNA, 485 bp, Homo sapiens
gtaagggtgggccctgccctagaggaactgaacagggtcatcctgccccacagaatctagagaggcggccccactctttgaaacctagaaggaaacggtcctgctccctgggcctcttgcaggagtagcagccccagtgatctctgaatccccttaggggtcattcgtccctttccttgaatagtggtccagtccctgtagaacccaagaagtcccacaatcggccttaattcttttctgctttctctgcactatttacttcaaactcttggcatcttagctggtataatctcatmtctgttcctggcttctgtcaatagagctgatgaagtccctgagtcccatcatctctttatctattagtcaagaactttttctaggcactggaaatataaggtattgtttctaccatgttatgcatttttttagcaatatgttcctactctagctcaaaacccagcactcacagactgttatgacatcat

SEQ ID NO: 199389 - DNA, 484 bp, Homo sapiens
gtaaactttgattaaatcaatggcaaacttatgaatacatttcagctgtattgggaggtgaggcattttggaaatgcaggtagtaaaataaggatggtagcagagtgaaccttctaaatttgttaatacagtaggaaaataaatgccttaaagtagtgcatcatccaaatacaatgtttcctgttgcatcttggaatgcaatatttatagccttttccttttctgcctggcaagatatatcccttattctgttctctgaagaagaagaagaggcatagtttctatccccaaggaayaggactctaactccctaactcacacgaaatgccactaactacacaagaaataagtttcaaaagtatgtgttgatagaactggtgccataggagtttggtaatgaataaggcaagctcagaatccagaagattaccaattttctaacattcaaatttcatatttttggtcttctcaattccttggcctc

SEQ ID NO: 199390 - DNA, 527 bp, Homo sapiens
gcatagtgcctcacacatacatgccgcagtgatttttttgttcacttctttgcctgtttcctggaccgtgtatccacagtcagcsctgtggggaaatgccgttttattcatcattgtaccacagtgcctggaatggcccctgcaatgtcaggttctcaatatctgttgagaatatgttgaatatgttattaaagaatgagattttaaaatcaaaatctctgttctatctatgagcatacctttattttctccattactaagctttttgaggaagagcttgacttctgtatctgactcagtgttgcagacctcacagtgcctagcactgtatcttgcccacagtcagtaggtaacataaaagttggaaaaaatgacgcaagtcaagtcctggctctactaattactacttgcatgactactggaaaaggcagtcatgtgcaccccatctttcgacccctgcatggttgcataaggatgtaccttgggctggcacatttccttgcaaagagataaggagtcctcccaac

SEQ ID NO: 199391 - DNA, 453 bp, Homo sapiens
gacagataacaatggcttaaaacagaatagaaataacttttaacatacaattacacatcaaaacaatttatcaattacttgtaggatgaaattttcagacagaaagattatattgaaagatttttacagggtgtggagaaacttcgacaagagatgtgaagaaaattatgcaaatggagaagaaggtaagtaataactccagggaatataaaaagttacacagaagaaacatcatcatggaacatttattgatttaataagaaacaatctttacatagtaaaaaaaagtaaaagctgaatatttgcttactcaagacatattctaagaaaacatggagatgatagtataagagagctaaatactcatctaccatagttgaaggtcaatggctaacacagaaaytgataaatcaagagatagcctattttttggaagatgaaagagctgaaagt

SEQ ID NO: 199392 - DNA, 406 bp, Homo sapiens
gactataatcttaactgaactactayttcagttgcttaaaatattcaataagttccctttaagaaagaaaaattatttaaggttttagacactaaaattgttgaagtgctctttttctcttgaatgaatatatttaaggtttcagatctttgtagtagtaaaaagatgatttatcgccaagaaacaaaccatggaagccaatgttgggggtggcagagggagaggtggaggactgagggagctctgttttcatttctttttattacctgtgaaatgctgttcatcgttagtagccatcactctaggtcttaaatagtttggcccaacagcatttgaaaccctataacctcaatttttaagtggtgtgctttcctggcctagttgggctgtgacattatttcctctg

SEQ ID NO: 199393 - DNA, 590 bp, Homo sapiens
tttaatgtggcacatcgttgtctgcagaaacttgggtgggactgtgactgcttgcccattgcacccggtgattgaatctgctgtcaccagcatcctgataataatgaacattcagcttaacgaccgtgattatgattatcataattgatgtgcaagtgcagtgtgtggggatcattacagctgaactgtacagcagagaaacatgcctcagttatggataattttacttttatgcattgattgggataaaatatgcctttctatttaaacagaccagcttcatataattttaagaatctttccatacatgctgattgatgattatgcacttgctgaaaaacagccccttacagttgtttgttttgtgttgtttcatttcattagtaaatgtaaacaaataattaggtgtaattgagggaaaatattttgcttatgaggatrgccttcaataatcaaatactcagtttaagtgctttttctttctctccctctttaacaatatattagagactgaattttttcagttttcttcctctgattacccttgtctagtctttctaaggacagtaggcttcaggaaaagtataaat

SEQ ID NO: 199394 - DNA, 429 bp, Homo sapiens
agctttatctcaaagggaagatattcctaatgggaattcctgctcctttttctttttgtctttttyattatctttgatgatcatgttgaaagtcagtggatataaattctctttctaaggccattcctaagcaagatggaatctgaaccacttactaacctcctccctcaattttttggactataaactagagatattttttgctatttatccagcttataaggagatggaacaatcattgaaaagaagcctttggtgcccttccaaaggattaggggaaaaacatagaatattctctaagtaataaattatattttagtaatgaattctaaagataatccagaataataaatgaataatattttattgagcatctgttgtgtatttaactagtcagtatcatttaaaagaactgtatgatatgatgcc

SEQ ID NO: 199395 - DNA, 482 bp, Homo sapiens
catatatatgtagaatttggaatgccaagttaagatttaaaatgtaattttagtaaggaaggcaatgctccattaacatttatgccagttgataattataaagaatattaagaacagtatagggaatgacagcacagccagcatctagctacactgcttagggtttcttttgttaaaaaaaaraaaaaagaaaaagaaaaaaagaaagaaagagaaagaaagaaaagtaaatcactgatttctaaaagcaatgtgactctagtttttgtctccttgcctcctctgccctagtatgaacaagaaattactaaactgaaggagcgcctgagagtttccagccggcgactggaggaatatgaacgccgcttgctggtgcaggagcagcagatgcagaagctgctgctggaatacaaggcccgactggaggacagcgaggagcggctccgaagacagcaggaagaaaaagatagccagatgaaaag

SEQ ID NO: 199396 - DNA, 596 bp, Homo sapiens
ttcactgtgagaacctggtaggactctaggaggtaaaatttttaaaaattgtggcctccccattaatgaatacccctacagtttttatctctcaaacttggccacactaagcctccagcatttcataaattacagttgaggttttcctatctgaaaacaagaagtcttgcatttaaactttcgaggggatggcataatgttatatttaccttaacatcaaccacaatgtttaaactttagtaagtccttgataaatacatacatgaaatcatggctgatttaggaacacagataaggaaaaggttaagattgyacagagtgggcagtaatacttcagggaggtagtgaaacctttcaaaattttgtggtcacctccttgatgtaaatgaagcatagttttaacctgagaaatggtttctctcacagctctatttagttgaagttttttcattctccattacccaatattcagtggtacccaggaagaggtagctggactttacctagcttaccatgactgtttccaaatcaatagtccataaaatcatggtttggagtaaatgcatattttttaaggtacataccatcttgattta

SEQ ID NO: 199397 - DNA, 588 bp, Homo sapiens
gcagattgtactatatttcttttggacagtgctggtccataagaagaggaaccaaacaaacatcttttgacttctacaacatctagtataggactcatctgtagtcacttagtaagctcttgttaattaatcaaatctcagccctaataattctatgtatgtataaatacatgtatatatagtttttgaattttacttgtaactggctagtagtacatatttggaagggagaaattaccttatgatagttggcaattttgtttattcaaaaatcaggcacctgcaatgtgctggggtctgggttagttacaggggatttcaaaaataaataagacatttaggtcaaaatgtcctggaattaggatggatggatrgatggatggatggatggatggatggatggataaataagaaaaacatggtctcagatcttgaaccactgatgctgtggttagaaaaataacatgatgagtgacatccttaccaatactaaaaattaacatagtaatgtaatgttattgttagtcttgtcccctgatgaaaatgtactaagaatcaaattttactgaaaggaggcaaagccaaaag

SEQ ID NO: 199398 - DNA, 496 bp, Homo sapiens
gcttgagctgagaatagccagaaacaagaacaaatctatgcttacatccctcctccttcaacaaaggacactacactttggaacagttacctctttttcctaataaaataagtgattttgacyacagtgtgccctccgcttggagagaaggtgtaagaatttgcaaaccaaaaccaaaggtgaagaaaacgtaaaagtgccaaaacagctggatataaagtgtgcagatcagataaacacagtgagaaactcccattttagatctgtctggcagaaacagggattgctatgaaagaaactgttttaaaaggttgtgggttatgtggccatggtgaggttgctgaaacgtaaggtccaacacaaagatccacctgagagagggcagagctcaagaggctggaatgcaagcctgggacttggtgaaaaggagggcttggtgtctgtcggcatcactcaaaagagggcactatacatgttctcttataaatattctgtt

SEQ ID NO: 199399 - DNA, 335 bp, Homo sapiens
gctgttgagtggtcagtggaaggagctggatattcatttatgaaaggtgcctggattctaccaaaatagtccagagaaccaaaccatttcaaaaccactgtcttgaagtatggactgaaaacattaactagcttagcagaccaccagtctgacagtgacttacggtttgaggatagcatttctcccattcctacacatgacaccctcctggttaactgagagaaagtccttactttccagagcatttgagycctaataaatcagattccctccctggcttttacctcctatgcctagcaggtgacttctgctttatacccagtcacctagcccta

SEQ ID NO: 199400 - DNA, 422 bp, Homo sapiens
gaattcaacttttcttaataattcacattaatcattatcagcattctgcaaatacgtattaagtagcccactgtatgctaagcattacagaaatatgaagatgagctcaatgtgtttgttttctgtttgccttcaggagttaagattcatagggaatataaaataggaacagaattaattataggtcaaggtaggggaaaacagtagtataaataaaaagtttagataatcagaagtgggagagactaagtcctattagagtaatcaggaatggtttcctcaagaattggtacttgaaataaatgatataaggacaactgagtaaccatgtggaaaaagataatattagatgtrtatctcataccttacacaagagtaaactccaaatggattagggatctaaaatgtgaaaaaaaagcata

SEQ ID NO: 199401 - DNA, 552 bp, Homo sapiens
ttgtccaactatcatcactaatctgattttaggacattttcatcaccgccccccccacctcaaagaaaccccttacccggtagaagtcactccctctccgccccaccggcaaccacaaacctattttctgtttctgtggatttgcttgtccttggctgtttctttttgtgttttggatttgatgagacgcatgatccttatccttaaagatgctcttcctccctgaggagctgcttgctgtgaggattagagatggtgaatgtgtctcctgcagggattggcacacggtagatgtacaayaactgcgccctcctgagtttggctaccatgatgggcaaccaaatgcggggccatcagagcctggggtggccactcacctgctgggtgttgcagaccctgccctcacactcactctgttttcttgcagactcctccactggacaccgggcatcagcagagttgcctccactcttccacacttcccccacagaaatgacagaggaaacaactcccaggccaggcagaggtgctttgagcctgcccttggctgga

SEQ ID NO: 199402 - DNA, 628 bp, Homo sapiens
ccagcaatagcagcatggaagatttcactaaacgtagcactcagagtgaggacttctccaggcggcacacggtgccagatagacacatacctcttgctttgccacgacaaaatagtactgggcaggcccagatccgaaaagtggaccagggtgggttaggtgcccgagccaaagccccaccatccctgccacacagtgcttctttacgtagcaccgggagcatgtcagtggtgtccgcagccctggtggccgaacctgtgcagaatgggagccggtcccggcagcagtcctcttcctccagagagagccctgttcccaaagttagagcaatccagagacaacagacacagcakgtaggtgtgagtgctgaaggggcctggcttctacttggtccatctgtttccttggttctttatacataaatcattgggaaatcctattgttaacaagatttcctcttaaaagcaacctttaaatggaaagaggaaaggaaaaatttgggaggcttctgcccaggtgtgactacagaatgtaatctgactcattacccttaagagtgtaacaaacacgcagaggcccccttgccttctcttcaagcagcagagctgctacctcagtttgcacttag

SEQ ID NO: 199403 - DNA, 604 bp, Homo sapiens
gaattcttgaacctgagttctagcctcaatatgattagctttgtgatgatcctcattttcttcatctttaaaatgtgtgggctaaaactgttatcaccgcattttctttagaaactctaattccaaattaaattatatgacaaagaatgtaagaagatatttatttgtagtatttttattttttgagagatagaattttggtttgctttaccttagggtttctcattcttgacactattgacattgagcctgataattcttttgttggagtagctgtcctctacactatagaacgtttaacagctttcctgatttctacccactttgaacaaaaaaaatgtctctagacactgccagatgtctgtcctctagggggtgaagtcatctctggtggtggattattttattgtatcttttttttgagacagggtctcactctgtttcccaggctagagtgcagtggtgcagtctcagctctctgcaacctctaccttccaggctsaagtgatccttctgcctcagcctcccgagtagctggaactacaagcacatgtgccaccacacctggctaattttttgtagaaacgaggttttgctatgttgt

SEQ ID NO: 199404 - DNA, 452 bp, Homo sapiens
ttttttccaggtctcaccgcttctatatacctgttttattttattttattttatttttgagatgtgggtctcactctgccgtccaggctggagtgccgtggtgtaatctgggctcactgcaacctctgcctcccagcctcaagtgattctcctgcctcagcctcgcaagtagctgggaccagaggtgcacaccagcacaccagctaagtttttgtatttttggtagagacagggtttctccatgttgcttaggctggtcttgacctcctgggctctggcaatccacctgcctcggccttccaaartgcttggattacaggtgtgagtcaccgtgcccggctctatctatctatctctctgtctatctatctatctagcagatgaaatattatcttttggaaaaccaagctgagatcataatacactgctaaaaatacatacattttggtaaa

SEQ ID NO: 199405 - DNA, 596 bp, Homo sapiens
agaggaagttaaaacaacaacaaaaaacaaccatttgaaaaatttttgtcaccagcaaaacttttcactaattagtgatatgaaatgtgatttttgtgttgttaaacttcagctttggaaaactcagtctctttcattatcatccattccaatttgaaggagttgggcagctaatttggttaaaggcagtcttgagggttagaagtattacttccttttcgggttccagacctagcttgtgactgaaagttttagaaaaaggaagtacatctatagccraattgataaggttattactgtgttttgcacaaagtatattagcaaaagtatttgctggaattattggtagatggcagtcccactcctacacctgctttgtcagatacagctgggttccctggctgactctgtaccttacttacactacttacttaatagaaacacaaacttggaaattgtgccagtggtccagctggagcacaacgtttggtgaatatgctgtttcctcagttcagagaggtagcaactaggtaaactccttataaaaagcaaatacctggatttacaaaagtgaaagtagttgttcacaaaagaat

SEQ ID NO: 199406 - DNA, 523 bp, Homo sapiens
tatgtgtgtgctctactacactagagtaagaagacaaatggagtatgtattagtccacttccatactgctatgaagaaatacctgagactgggtaatttataaagaaaaagaggttaaatggactcccagttccacatggctggggaggcctcacaatcatgrtggaaggtgaaggagaagcaaagccatgtcttacatggtggcagggaggagagcatgtgcaggggaactgcccttcataaaaccatcagatctcataagacttactatcaggagaacagcatgggaaaacccacccccatgattcggttaccttccactggtccctcccacaacacgtggggattatgggagctagagttcaagatgagatttgggtggggacacagccaaaccatatcagagtagaaggaagataacagagtggtgctgtgctcttcaaataattattggtgtctcctttcaccacgttgacttcccaccaaaaacctggcacacaaaccagacatcatcctgttttct

SEQ ID NO: 199407 - DNA, 523 bp, Homo sapiens
tatgtgtgtgctctactacactagagtaagaagacaaatggagtatgtattagtccacttccatactgctatgaagaaatacctgagactgggtaatttataaagaaaaagaggttaaatggactcccagttccacatggctggggaggcctcacaatcatgatggaaggtgaaggagaagcaaagccatgtcttacatggtggcagggaggagagcatgtgcaggggaactgcccttcataaaaccatcagatctcataagacttactatcaggagaacagcatgggaaaacccacccccatgattcggttaccttccactggtccctcccacaacacgtggggattatgggagctagagttcaagatgagatttgggtggggayacagccaaaccatatcagagtagaaggaagataacagagtggtgctgtgctcttcaaataattattggtgtctcctttcaccacgttgacttcccaccaaaaacctggcacacaaaccagacatcatcctgttttct

SEQ ID NO: 199408 - DNA, 544 bp, Homo sapiens
ttgttgctgcagcagactggaaaacctagggggtggggagaagggatggaaatacagacggctgcttcttccgtctccttgctctctgtccacccacacccaccttcttaaacccccaattaactacctctgtgctttcagggttggatcaggaaaagggaggagaggtcatcaaggtcccacttggtaggcacagacacagtcacctatggcagcctctcggtatggcagaatcctgttgctcactctttacttcactgggtatttttgtgaatttcagggagatactccccttggaacatccaactrtgctcccattgtgaaggcaatgtctctcctcaggctggccctctacaattctctcctcagcccctggctatctggtggccactcccttccctgtggtcacataccccctccagccagttttggaatatgaggttgccccaggcaagcttctccacaggcccacatctggctcaggagaaacagtcacccacccttgcctcactgcttgtggatgtgcagtttgctcccagtgccc

SEQ ID NO: 199409 - DNA, 544 bp, Homo sapiens
ttgttgctgcagcagactggaaaacctagggggtggggagaagggatggaaatacagacggctgcttcttccgtctccttgctctctgtccacccacacccaccttcttaaacccccaattaactacctctgtgctttcagggttggatcaggaaaagggaggagaggtcatcaaggtcccacttggtaggcacagacacagtcacctatggcagcctctcggtatggcagaatcctgttgctcactctttacttcactgggtatttttgtgaatttcagggagatactccccttggaacatccaactatgctcccattgtgaaggcaatgtctctcctcaggctggccctctayaattctctcctcagcccctggctatctggtggccactcccttccctgtggtcacataccccctccagccagttttggaatatgaggttgccccaggcaagcttctccacaggcccacatctggctcaggagaaacagtcacccacccttgcctcactgcttgtggatgtgcagtttgctcccagtgccc

SEQ ID NO: 199410 - DNA, 372 bp, Homo sapiens
tggctaatgaccatcctccacttgcttgatccagggacagcagtgcccacctcacccacctgccttgasgatatctctctgaggcattagagaacagggaagtgcatggaattagctcagtactgattctattacattacatttctattatatttagactcttactcatgggtcctgacaaccaattgctttgtaatatatattctgtcttcagtattacattataagcttcctggggttttaattaatttatttttaacttatctcttgttgtagtcatccttttctactcccctcaacccctacctcctggggttttgtgtaatatcttgcacatcgtagatactctctgttggataaatgaaagaatgt

SEQ ID NO: 199411 - DNA, 372 bp, Homo sapiens
tggctaatgaccatcctccacttgcttgatccagggacagcagtgcccacctcacccacctgccttgaggatatctctctgaggcattagagaacagggaagtgcatggaattagctcagtackgattctattacattacatttctattatatttagactcttactcatgggtcctgacaaccaattgctttgtaatatatattctgtcttcagtattacattataagcttcctggggttttaattaatttatttttaacttatctcttgttgtagtcatccttttctactcccctcaacccctacctcctggggttttgtgtaatatcttgcacatcgtagatactctctgttggataaatgaaagaatgt

SEQ ID NO: 199412 - DNA, 616 bp, Homo sapiens
tattggtatttacatttgatagcacttactgttaatgaaaatgaaaaccggaggccttgggtcacttgaaattcaagtaagaaggaatggcttttatattaataaactgttcattgtaagtactctactgataactgatcagtcatgctaaagggaaatccagcagataagaatgacagaaattatcaataaaaggaattggaaattaaaatatttccattctataagcatatttaaagataatttggccaggcacagtggctcatgcctgtagtctagcactttgggaggtcyaggcaggtggattgcttgaagccaggagtttgagaccagcctggccaacatggtgaaaccctgtctctattaaaaatacaaaaatcagctgagcgcagtggcccacacatgtaatccaagctactcaggtggctgacgcaggagaatcacttgaacctggaagcagaagttgcagtcaagattacgccactgcactccagcctaggggacagagtgagatcctgtctcaaaaaaaagaaattaaaaaaataaagataattaaatagcttattaaatagcttagagtcacatataaaaagtatacacacacatacgccatata

SEQ ID NO: 199413 - DNA, 616 bp, Homo sapiens
tattggtatttacatttgatagcacttactgttaatgaaaatgaaaaccggaggccttgggtcacttgaaattcaagtaagaaggaatggcttttatattaataaactgttcattgtaagtactctactgataactgatcagtcatgctaaagggaaatccagcagataagaatgacagaaattatcaataaaaggaattggaaattaaaatatttccattctataagcatatttaaagataatttggccaggcacagtggctcatgcctgtagtctagcactttgggaggtctasgcaggtggattgcttgaagccaggagtttgagaccagcctggccaacatggtgaaaccctgtctctattaaaaatacaaaaatcagctgagcgcagtggcccacacatgtaatccaagctactcaggtggctgacgcaggagaatcacttgaacctggaagcagaagttgcagtcaagattacgccactgcactccagcctaggggacagagtgagatcctgtctcaaaaaaaagaaattaaaaaaataaagataattaaatagcttattaaatagcttagagtcacatataaaaagtatacacacacatacgccatata

SEQ ID NO: 199414 - DNA, 366 bp, Homo sapiens
tcaaatcatcctcctattcagaagtctttaacagctctgcatggcctgtgtattagtccgttttcacattgctataaagaactacctgagactgcgtaatttataaagaaaagaggtttaattgactcacggttctacatggctagggaggcctcaggaaacttataatcaaggtggaaggcaaagggggagcaaggcacattttatatggtggcaggagagagaaagagagtgagggggggatgtgccatacttytaaaccatcagatcttgtgataactcacttactgtcacaagaatagcatggaggaaactgtccccatgatccagtcacctcccacaaggtcccttccttgacacgtgggg

SEQ ID NO: 199415 - DNA, 618 bp, Homo sapiens
gtaagggtgagtgggctacccactaagcctggggggctgtatgacccttggtaaaggcggtctcccagtttcactctttttgtccgtccagaacctttcctaggtagattcttttttcttctctctccttattcttttttgtccttcttcagtctggcagcccctggctgtggttgtggctggctgaaaaacatacaacttaccccttcctttatgccggtgctcaggagttggaaatgaaagagtcagagatctttgcattaaaggggtctggatttcttgctgagttcttactccttgatgatctgagtcttctcctagcatgacctggaaaggtccttaattgctatttgtgtcttttaaaattactgtttcaaaacagagcagctgccaaggcctcaagttagagtggattctatcatctctgaaaatgggatctrtaatgccatcttgaggtgttctgtggaggaaggaggagagaccatcacatatgagtggacatcaatgggaccaggggctgctgtgtcccacgtggggtcagtcctctatggctcctgaagccttcatgacctggattggatctacacttgcacagctctgaatcctgttagctacagc

SEQ ID NO: 199416 - DNA, 618 bp, Homo sapiens
ttctgttgttttaagctatccgacttgtaataattgttacagcagccctaagaaattaatacagatactactggctgtgtgaccttaagaaaatgcacaggggttacctctctgtttcttcatctgtaaaatggagatartaactgtatccacttcatacagttgttgtgaggattagatgagtttttgcctgtaaagtgcttaagcagtacctgacagatggtaaacacacaatagattagcaaatattcttctttgatcacttcaatttagtaaagatttttttgagcaactactatgcggcagaccctatatgtaagttatttcatttgattcttgtaacagtcctgtgaacctcttcttatcccattttgcagttaagaaaactaaggctcagagtattaacttgttttgagaaagcagacgagctgcaacctcgactgagcctttggctctgttctgtcaggtcttctattccacaaaattacaggcatctcagtgtatactggggagtggacaaggaagggtgcgaacctttgttgatgattattttgcactgggaagattttgcctaatgcctctctgcatataacacttgaaggaaggtatttgctggct

SEQ ID NO: 199417 - DNA, 607 bp, Homo sapiens
agagtgaattgcctatcagtgatgaatcctgacagacagagatgctggcttgtatccaggccttatgaccccataggtttctttctactctaaattgttgttgctgctgttgttgttgtttttctatgatcttaagagaagcgagtttacctatagatgaatagtttgagaaggggggtattggtggtgaatctagttgtttttaaaatcacgttgtcaacctaaattccagcatgatgataaacccaaaatccagtttcttccagataatgtttttctttcagtcatttatggtaagtctgtggacatatgatgaatctgcagaaaggtttattactgtgtaaaagcataacagttctgttagtaagtaaaaattataatgctatacatattttgaaataaaagtaagaaattttagggccasctgtggtggcttacacctataatcccagctactcaggaggctgaagcacaagtatcacttgaacctgggaggcagaggttgcagtgagccaagatttcaccaagaaaaaaagagagagagagagagagagagaaaagaaatttaaaggagaagaaattttaggaaagttgaagggggaataaa

SEQ ID NO: 199418 - DNA, 659 bp, Homo sapiens
ctttggcagtttggggggtatcagcaatttcatttggtccattatggtgtagagaaagctcatgagtctgggcatcagcttatgtgacttctaaccctgctccgccatgagctacctgtgtgatattgggcaaatctctctgctacttggtttacccatgttattagtttagactctaaactggaatggatgaacatcttcctggctaaaacccagtgactgacatgtggacagtagcatacttgtgagtgatgcacacaggaccccgaggacttggaattgcattctgtcttgacccatcacatttctccgactgccaacttcagactctcccactgcaacctcagacttaaagtaaagggagcttaaaatactggggggaaatatgggaggcagaatctctcagtgcctgtgtagagtttttaaaatgcgacccggttttggtttagtcactgaaaagtttgtgggagcctggcggttccagggtgcacaccactcctygtagcaggtcccctgtcttgtgtgctgtgtccccccgaggtatgctggtgctggtggcccaggcaggaggtgacactctcaaagtgactggtcactacgtaaaatgtgtctttcttttgtttgtttcccacctgctttccgagcccctttctcggaca

SEQ ID NO: 199419 - DNA, 573 bp, Homo sapiens
aggaggcaggtttacaggaacaactttatttttttatggctagcattagtcactgattaacttgggtggggcagagctagaatttctagttcctgtcccatcaagaaaactacactggaaagttcaagagtgtctttgctggctctttcttgaatatttccaaagccttggaagttacargttttgggtgtgggataaggaaaaactgaatgatagagcacaggtaccgctcccctttcctcatcatgcctctctgtcgcctctttgttcatagttgaccacggcatgtttgagaatttgaacacagccctcactccaaagctccaggccagccgctccttcccccacttgtccaagcccgtggcccccggctctgcccctctgggctctggtgagcctggggggccaggactctgggtgggcagcagccagcacctcaagaacctgggcaaagccatgggggccaaagtgaatgacttcctgaggagaaaggagccctccagcctgggcagtgtgggtgtgacagagatcaacaagactgcaggagcacagctggccagtgggactgacgcg

SEQ ID NO: 199420 - DNA, 493 bp, Homo sapiens
catttattcagacaatatatccaagccccttcctgccatgcactaagtgctatctaggggactgtggtgacgttggtggaaaagtgacacgcggtcctctttctccattctgaatggatgggagtgccatcatacctgccctcccgggcgctatgctaacagggtatgtgatcaggatgtgaaatgcagtggaagcaccaaagtggggctcagggtgaggcagttaatttcagccgagagagtgctcatttcctctggactaaatctgccattagtagttgctgaaggaaacacactcaggggccatcaggagacccacctcattccttaggtctgtgcctatgctggcagggaccccagttggtattcagaatttttatgaaattagccgacccrgaaatgtactcagatgctaccctaatctcagaaaattcctgctgggtcagtttaatctgctctcacatttcacaatgcctttgaggtcagtgaatcc

SEQ ID NO: 199421 - DNA, 585 bp, Homo sapiens
agactgggtaatttataaaggaaagaggtttaatggattcacagttccacatggctggggaggcctcacagtcatggcagaaggtaaaggagaagcaaaggcatgtcttccatggtggcaggcaagagggagtgtgaaggagaactcccctttataaaaccatcagatctcatgacacttattcactatcatgagaacagcatgggaaagacccacccacatgattcaattacctcccactgggtccctcccacaacacatgggaattatgggagctaaaattcaagatgagatttgggtggggacgaaaccaaactatatcaccttggtaccctttctagccataaaawgtaaacaataaggacttttatgttaatattcctgcatttatatgtagctcttataatattaaagtgagattaccttgattattttttccagagagtaattttctgcattcctcaacataggagtgaaaaaaaaactgttgaagtgagatttgttttggcatgtgaatcatataaatacaaaatttacttgctttaagggtctttgatctggcatttaatgtaaattaagtcatgc

SEQ ID NO: 199422 - DNA, 585 bp, Homo sapiens
agactgggtaatttataaaggaaagaggtttaatggattcacagttccacatggctggggaggcctcacagtcatggcagaaggtaaaggagaagcaaaggcatgtcttccatggtggcaggcaagagggagtgtgaaggagaactcccctttataaaaccatcagatctcatgacacttattcactatcatgagaacagcatgggaaagacccacccacatgattcaattacctcccactgggtccctcccacaacacatgggaattatgggagctaaaattcaagatgagatttgggtggggacgaaaccaaactatatcaccttggtaccctttctagccataaaaagtaaacaataaggacttttatgttaatattcctgcatttatatgtagctcttataatattaaagtgagattaccttgattattttttccagagagtaattttctgcattsctcaacataggagtgaaaaaaaaactgttgaagtgagatttgttttggcatgtgaatcatataaatacaaaatttacttgctttaagggtctttgatctggcatttaatgtaaattaagtcatgc

SEQ ID NO: 199423 - DNA, 523 bp, Homo sapiens
gctcccccgggtttatgaagagaacctgaaggcaaagtcaacaaatgtagctactttgtctgtccatcaargtacccatttatcactcggtccacgatgaattacagcagtcccctgttatgtgcagttttactttctgtgatttcagttacctgtagtcaaccacagtctgtaaatagtaaatggaacgttttaaaaataaacacttgatatgttttaaattgtgcctcattctaagtagcatgataaaatctcacaccattccactccatcccacctggaacatgaatcctccctttgtccagcatgtctacactgaagactcactacctgcccattagccacatagtcgctgctcaaggatcaactgtcatggcattggagtgcaggtgcaagtactcttgcacccaaataaaggtccatttgacttataatggccccagagtgcaagagtagtgataccagcagtttggacgtgccaaagacaagtcagaaagtgtttcctttaagtaaaaaggtcaaa

SEQ ID NO: 199424 - DNA, 523 bp, Homo sapiens
gctcccccgggtttatgaagagaacctgaaggcaaagtcaacaaatgtagctactttgtctgtccatcaaagtacccatttatcactcggtccacgatgaattacagcagtcccctgttatgtgcagttttactttctgtgatttcagttacctgtagtcaaccacagtctgtaaatagtaaatggaacgttttaaaaataaacacttgatatgttttaaattgtgcmtcattctaagtagcatgataaaatctcacaccattccactccatcccacctggaacatgaatcctccctttgtccagcatgtctacactgaagactcactacctgcccattagccacatagtcgctgctcaaggatcaactgtcatggcattggagtgcaggtgcaagtactcttgcacccaaataaaggtccatttgacttataatggccccagagtgcaagagtagtgataccagcagtttggacgtgccaaagacaagtcagaaagtgtttcctttaagtaaaaaggtcaaa

SEQ ID NO: 199425 - DNA, 555 bp, Homo sapiens
ctcccccgggtttatgaagagaacctgaaggcaaagtcaacaaatgtagctactttgtctgtccatcaaagtacccatttatcactcggtccacgatgaattacagcagtcccctgttatgtgcagttttactttctgtgatttcagttacctgtagtcaaccacagtctgtaaatagtaaatggaacgttttaaaaataaacacttgatatgttttaaattgtgcctcattctaagtagcatgataaaatctcacaccattccactccatcccacctggaacatgaatcctccctttgtccagcatgtctacactgaagactcactacctgcccattagccacatagtcgctgctcaaggatcaactgtcatggcattggagtgcaggtgcaagtactcttgcacccaaataaaggtccatttgacttataatggccccagagtgcaagagtagtgataccagcagttyggacgtgccaaagacaagtcagaaagtgtttcctttaagtaaaaaggtcaaagttcttgacttaataagttaaaaaaaacatatg

SEQ ID NO: 199426 - DNA, 605 bp, Homo sapiens
actgtacagaccaagaccaattgctacagataattgagaactggttctaatctgaatttcacatagaacaggaaggagtcaaagactttgaaaacattaataggttgatttgaaatttatgtataggtggatcaactaaaatttttataaagaagtagtaaaagagtatatattgatgaaacagccattgctaaatatmaattttatattataaaaaattagaaaaatttagaacacagagaaaactaaaacagccattattatcctgcaacaaaagaaaaacaattgccatataatacttactgatacttttttatgtttaaaaaagtaatgatgacaataataacaatgacaaaggtcagctaacattaattaggcattattgtgtatcaggcactctattagatgttatgcatggatttagttttattcttgaaatgggcctataaattaatcctgtaaatatcccattttacagatgagtatactaatcttcagtgatgttaagtccaaagtttcacagctagtaataaaaaaatctgaattttatttgaattataatttaaaattattcaaaagtataaatattttgtatacaaacatat

SEQ ID NO: 199427 - DNA, 615 bp, Homo sapiens
tttggtatacgtataaagtctcataaaaaggcatatgaggatgtgaatttacaagaaatcaaaataaaaagcagtctatgttttctagatttttaaatattgaaaagagctgtcttttagatataatagttgttacgtatgaaaggcataatgatcacctattaaaataatagatgctaaatattaatcctaggtaatatcacttgcctaaatacctactacactgcttgttaatatggactgtataaattgtatatttggtgcgtttgattttctgtgtgtgtaaatttctcaattcccaatgcaaatggattgatttctattttgtaaaatcctatttggatacaaatatcatacagaaaatctaataaaaaggatgacttatagaaagaattcatttgacatttagtttctaaaaatttgtgacactgatcctttaaactcagaactctattaaagatcttttttttwtatattggccatgtgtcataaacaaacatttgaagcaggcatataaattattctattgttctaaatgtttttttaaaaattttaagtctacatttctatttctcaatgaatgaataataaatggagtccatagggaaaacaaaa

SEQ ID NO: 199428 - DNA, 607 bp, Homo sapiens
caagttatggtatatatatatattttttttttctagtaataatattaagtgtttagaataktctcttataaattaaactcaggaaattttatgcagttgttcttcatggttttattctatttttataaatttgctgctagtaagaaataaaggcaagctaatgttttatcacaaactctccattatttatttattttttttgagatggagatttcctcttgttgcccaggctagagtacaatggcacaatctcggctcactgcaacatccacctcccaggttcaagcggttctcctgcctcagcctcccgagtagctggggttacaggcatgtgccaccacacccggctaattttgtatttttagtagagacagagtttcaccatgttggtcagtctggtctcaaactcttgacctcaggtgatccgcccatctcagcctcccaaagttctgggattacaggcgtgagtcaccgcgcccggccagactctccattctttaaagtgaaggcttagttcaaattattattaaaattgctgttgttactattcttaattttttagttcctgattttttttattaatagcagtaagtatactcaatttttg

SEQ ID NO: 199429 - DNA, 425 bp, Homo sapiens
ctgctgatgatcaatcagaagatccttaggagaagatcttttgtttaaaggtgtttaatttcgatctattctgtgctctgttatacttattactatacttttaggagaattgaacacatataaatgtaatataaaagggccattatgctactgtgtagtggattttaaactggagcgtgmatatccctggggttatgtgaggatgttccattggcatatgaactcagagctttgaggatacaataaaacaataatttgtttggctaattgacaaatcgaatggctctgataactgggtaacagatccattttcaaatcaggtggtttacaattctctactttaagcaaaatttcagagaggcctaattgagttgtcagccaatatatgattaaaataatttttgatggaaaatcattgacttttg

SEQ ID NO: 199430 - DNA, 576 bp, Homo sapiens
gactaaatttgttgtctgcacaactcttattaacattttgtcttgctccacagagagtgcgtcctgcagtaggtgagacatgataaagtatttccaacgcttacaataatgaaatgttagcatgcttgacctctgcagctatccatcattaaagaattaattttctggamctgaatccatttatttcctcattttagcgtatgtttggttattaaggggaagggagagtaaaactttatagatagaaggagaaaataaagttattaacctgtcttgccaacaacccattttatgtaataggggaaatgttgaactactcattagctattctttctctaaggttaaacaggtaaaataaaataacccactactaagagataacaaatgttgaataaactgggtttgaaagaaatattataattcgtttttaaagggaagaaaaatgctcaggaaattctcaatttttattttcctttttccacttgaatgtgaaaaaaattatagaattatctattttcaggtggataagaaactgcataattgaattatacaaaaactgaaggattttcatgcaca

SEQ ID NO: 199431 - DNA, 576 bp, Homo sapiens
gactaaatttgttgtctgcacaactcttattaacattttgtcttgctccacagagagtgcgtcctgcagtaggtgagacatgataaagtatttccaacgcttacaataatgaaatgttagcatgcttgacctctgcagctatccatcattaaagaattaattttctggacctgaatccatttatttcctcattttagcgtatgtttggttattaaggggaagggagagtaaaactttatagatagaaggagaaaataaagttattaacctgtcttgccaacaacccattttatgtaataggggaaatgttgaactactcattagctattctttctctaaggttaaacaggtaaaataaaataacccactactaagagataacaaatgttgaataaactgggtttgaaagaaatattataattcrtttttaaagggaagaaaaatgctcaggaaattctcaatttttattttcctttttccacttgaatgtgaaaaaaattatagaattatctattttcaggtggataagaaactgcataattgaattatacaaaaactgaaggattttcatgcaca

SEQ ID NO: 199432 - DNA, 489 bp, Homo sapiens
aactacccaaatctgttattttaggccaaagcagccatagacaatatgtaaatgaatgagtgtgtctgtattcctataaacctctttacaagaacaaatggtattctagatttggcccatggtctctgctagaataaaagtcccacatttggtttttatcctactagtattcctggttattttaggcattgtcctttctagaattcactatgggtatctgccactgcttgagaaagctgctgagaatcaacactgcaatatattgtggaaatatgctttgggggcaccaagtatatgatgaatgatgaatgaaaccgagttctgtggttagatcatttccartcagaatagagactgaggcaggattggaagatgtgcagataacattcttagaaatacttctgtagagggaaaatgtcattatgagtttaaaataaattactatatgccctgaactttagttgtgtaactccctcagtgaattcactt

SEQ ID NO: 199433 - DNA, 588 bp, Homo sapiens
caaggttaggtttgactcagctgagatggatatctgggggcagctagacattgtataaggataaagtatgaggccagatcacatttgagctggagagaagaacaccaaaaccaaagcgctaaagtctcaaacaggaagccaaccatgcgcggagctggtagactgtggaggcccatgtggaagggagatccagtgtggcctaaggtgagcactcagcagccaagatgcctgagtgtttttagctgcctatcctgggagctggctgtcctgggaggttagacctgagttaaaggcagagagttggggatggtccatygtgtcccatgggagcacagcataatccaggtcttcctgggttggtaaccacaaaaaatgaacatagaaacaggactctacccactcctgcaagaccgacattctacatggcttcaggagcagatggagttatcagttactcagcaggtatgacttagagaaacagaagcaccaaagaaagcacctttagcctccaaaatctctctcctagctgccttttatggcatgtaaaattttgccaccatagattcatttatttggattagagctcat

SEQ ID NO: 199434 - DNA, 620 bp, Homo sapiens
aagcttggcaggttcttcctgtgacagtggtggagtatgtgcctcgataactctgtccattaccatggtagcactcctgcaccccaggcctttgctcagtcggtgctgaaatgaaaacacgggaaatcaagctgagtatctctgagcatagagaaacatgtgaagccatytgtgacacaaccagaaaggagtctatgagaattacgaccgttctcttttccttatccataggcagatggatgtgagaaaaccgaccaacaaacaaacaccaaagcaacagattcctcccattctagaactgtagtaagttcttggaaatatttcacctgacaccttagagaaacacaacagatcagattcctcattggaaagtgagctcacgaggtagcacctttctaggaaactctactgaatcttcatgcaaacggcaccgcatttggcaatgcgggctgcaggtggtaattggctgtcgggggcagagtttgggacagacatggaaattttgcatgtttccctagaccgttgatcatgaaagccaaggcctttggcttccgggccatggggcagaaaacggtcctatgtatctgactgaagacaaagacactttgcttctcagggat

SEQ ID NO: 199435 - DNA, 604 bp, Homo sapiens
gtatgtgcctcgataactctgtccattaccatggtagcactcctgcaccccaggcctttgctcagtcggtgctgaaatgaaaacacgggaaatcaagctgagtatctctgagcatagagaaacatgtgaagccatttgtgacacaaccagaaaggagtctatgagaattacgaccgttctcttttccttatccataggcagatggatgtgagaaaaccgaccaacaaacaaacaccaaagcaacagattcctcccattctagaactgtagtaagttcttggaaatatttcacctgacaccttagagaaacacaacagatcagattcctcattggaaagtgagctcacsaggtagcacctttctaggaaactctactgaatcttcatgcaaacggcaccgcatttggcaatgcgggctgcaggtggtaattggctgtcgggggcagagtttgggacagacatggaaattttgcatgtttccctagaccgttgatcatgaaagccaaggcctttggcttccgggccatggggcagaaaacggtcctatgtatctgactgaagacaaagacactttgcttctcagggatgtgtgcacgccaaaagct

SEQ ID NO: 199436 - DNA, 389 bp, Homo sapiens
tttcacctgacaccttagagaaacacaacagatcagattcctcattggaaagtgagctcacgaggtagcacctttctaggaaactmtactgaatcttcatgcaaacggcaccgcatttggcaatgcgggctgcaggtggtaattggctgtcgggggcagagtttgggacagacatggaaattttgcatgtttccctagaccgttgatcatgaaagccaaggcctttggcttccgggccatggggcagaaaacggtcctatgtatctgactgaagacaaagacactttgcttctcagggatgtgtgcacgccaaaagcttcttcccttggaggagagagggaatcctctcatgccctgcatcctgaattgtagtaaagtaggagtctact

SEQ ID NO: 199437 - DNA, 389 bp, Homo sapiens
tttcacctgacaccttagagaaacacaacagatcagattcctcattggaaagtgagctcacgaggtagcacctttctaggaaactctactgaatcttcatgcaaacggcaccgcatttggcaatgcgggctgcaggtggtaattggctgtcgggggcagagtttgggacagacayggaaattttgcatgtttccctagaccgttgatcatgaaagccaaggcctttggcttccgggccatggggcagaaaacggtcctatgtatctgactgaagacaaagacactttgcttctcagggatgtgtgcacgccaaaagcttcttcccttggaggagagagggaatcctctcatgccctgcatcctgaattgtagtaaagtaggagtctact

SEQ ID NO: 199438 - DNA, 549 bp, Homo sapiens
gttcttggaaatatttcacctgacaccttagagaaacacaacagatcagattcctcattggaaagtgagctcacgaggtagcacctttctaggaaactctactgaatcttcatgcaaacggcaccgcatttggcaatgcgggctgcaggtggtaattggctgtcgggggcagagtttgggacagacatggaaattttgcatgtttccctagaccgttgatcatgaaagccaargcctttggcttccgggccatggggcagaaaacggtcctatgtatctgactgaagacaaagacactttgcttctcagggatgtgtgcacgccaaaagcttcttcccttggaggagagagggaatcctctcatgccctgcatcctgaattgtagtaaagtaggagtctactactctttctctctagacccctcacaggtacaagtgtcatcagaaagaggtttaagaatactgagaaatcactcccttcaaagcctagggctgaagagccttagagcactgggagctcatgtactgctccatagacccagggccacat

SEQ ID NO: 199439 - DNA, 401 bp, Homo sapiens
gttcttggaaatatttcacctgacaccttagagaaacacaacagatcagattcctcattggaaagtgagctcacgaggtagcacctttctaggaaactctactgaatcttcatgcaaacggcaccgcatttggcaatgcgggctgcaggtggtaattggctgtcgggggcagagtttgggacagacatggaaattttgcatgtttccctagaccgttgatcatgaaagccaaggcctttggcttccgggccatggggcagaaaacggtcctatgtatctgactgaagacaaagacactttgcttctcagggatgtgtgcacgccaaaagcttcttcccttggasgagagagggaatcctctcatgccctgcatcctgaattgtagtaaagtaggagtctac

SEQ ID NO: 199440 - DNA, 561 bp, Homo sapiens
gccatggttttcagctccatcaggtcatttaaggtcttctctatgctgtttattctagttagccatttgtctaatcttttttcaaggtttttagttccttgtgatggatttgaacatcctcctttagcttggagaagtttgttactactgaccttctgaagcctacttctgtcaagtygttgaagtcattctccatccagctttgttccattgctggtgaggagctgcgatcctttggaggagaagaggcactctggtttttagaattttcagcttttctgctctgttttctccccatctttgtggttttatctacctttggtctttgatgatggtgacctacagatggggttttggtgtggatgtcctttttgttgatgttgatgctattcctttctgttagttttccttctaacagtcaggtccctcagttgtaggtgtgttggagttcgctggaggtccagtccagaccctgtttgctgggtatcaccagcagaggctgcagagcagcacatattgcagaacagtgaatactgctccctgatccttcctctggaagct

SEQ ID NO: 199441 - DNA, 561 bp, Homo sapiens
gccatggttttcagctccatcaggtcatttaaggtcttctctatgctgtttattctagttagccatttgtctaatcttttttcaaggtttttagttccttgtgatggatttgaacatcctcctttagcttggagaagtttgttactactgaccttctgaagcctacttctgtcaagttgttgaagtcattctccatccagctttgttccattgctggtgaggagctgcgatcctttggaggagaagaggcactctggtttttagaattttcagcttttctgctctgttttctccccatctttgtggttttatctacctttggtctttgatgatggtgacctacagatggggttttggtgtggatgtcctttttgttgatgttgatgctattcctttctgttagttttccttctaacagtcaggtccctcagttgtaggtgtgttggagttcgctggaggtccagtccagaccctgtttgctgggtatyaccagcagaggctgcagagcagcacatattgcagaacagtgaatactgctccctgatccttcctctggaagct

SEQ ID NO: 199442 - DNA, 570 bp, Homo sapiens
gaattctagccagccacgggtagcagtgttagacatccctgagacagagttccaagtggggaggggcaggccaccatttttgctgtttgggcgaaagagcaaagctgttccagcctttgggttttggagagtccaagctgaccagaggcagaaacaatccccatgcacagcacagctgcatccttaaaaacatggccagactgctttttaaagcgggtccccaatcccgttcctcctcactggacaggacctcccaaccagggtctccagccactcccaaaggtgttctctggcccacagaaatttgaaamctcccttggacagaactcccagagagaggggtggactgccatctttgctgtttgtgtgacttagctgctctggcctttgagctttggaaactcaaggtaactgggggctgaagtagacccccagtacagcacagctgctctatgaaaaagtggccacagtgcttttttaagtgaactgtttctccctactaggtgggacctttcaactggggtctccagccacctcctacaagtgtgtttggctcagtaacatgtctgt

SEQ ID NO: 199443 - DNA, 570 bp, Homo sapiens
gaattctagccagccacgggtagcagtgttagacatccctgagacagagttccaagtggggaggggcaggccaccatttttgctgtttgggcgaaagagcaaagctgttccagcctttgggttttggagagtccaagctgaccagaggcagaaacaatccccatgcacagcacagctgcatccttaaaaacatggccagactgctttttaaagcgggtccccaatcccgttcctcctcactggacaggacctcccaaccagggtctccagccactcccaaaggtgttctctggcccacagaaatttgaaacctyccttggacagaactcccagagagaggggtggactgccatctttgctgtttgtgtgacttagctgctctggcctttgagctttggaaactcaaggtaactgggggctgaagtagacccccagtacagcacagctgctctatgaaaaagtggccacagtgcttttttaagtgaactgtttctccctactaggtgggacctttcaactggggtctccagccacctcctacaagtgtgtttggctcagtaacatgtctgt

SEQ ID NO: 199444 - DNA, 579 bp, Homo sapiens
agaatgaagcaatgagattgaactagattgagttggatatccgtattatttgctttcatagcaccttgttttcacccagaatatgagatatatctcattcctgtaattagggggtgagcttcttgaggggagtgaacagttttatttattgttttattaccagtggtagtggacaacccagcacttgtttggtgctcaaaacgtttgtgaattaatgtatagctctgatgatgcaatataataggaacttataaaggagatgggaggaagactacaaggaaaaaatacataagatgaacgaatgctcatttgtcatraacaaacagaataaaaatgaaacaataaaaccagaccttaagccccactatattttccacagtcacactttatgcttagatgtgaagatttcactttccttggattcacctgcttctatagagataaatctgcaagtagaggatgttgccataagtttgtgagtgtgccttctggaaggtctctagggtggaggcaagcatgcttttcttccttacaaaaatccccctaatatagctaacttaaaaaatgtaagtaaacatt

SEQ ID NO: 199445 - DNA, 588 bp, Homo sapiens
ttcctaaagagaagaggagaaagaattgtgctagtggagtcatgtcagtgatggagccgtggaagagaggccaccaggcagaagctgcaacagtagagggatgtggtcatcgtaagaccatggcaaggcaggaaaggagtggggataagtgcctagacttttccctctttccatcttccaacctcctgccaattcttcctgttggcagaacccaataaaaagccagagggcamaggagtctgctgtggtaatgaaatcaatgtaagtcagcctccttggtcacagagcatgtcagaggagggtataaatggatctgggcatggtaagaagaaggaaaattatcagcaaactaagtgagtaatatctaaataaatggaatggaaactatacaaacatttgacagcaaaataaaaaaggaaataagcaagtatgcaaaagatagccaattcattctaaaagaaaatatcaagcaaggagcatttgctttacactatagaacaacctaataaaaatttgaatctgatatagagctcaaaaataagatgctaatacaacaaaatgagattaaaagaaaatttccaaacccaa

SEQ ID NO: 199446 - DNA, 588 bp, Homo sapiens
ttcctaaagagaagaggagaaagaattgtgctagtggagtcatgtcagtgatggagccgtggaagagaggccaccaggcagaagctgcaacagtagagggatgtggtcatcgtaagaccatggcaaggcaggaaaggagtggggataagtgcctagacttttccctctttccatcttccaacctcctgccaattcttcctgttggcagaacccaataaaaagccagagggcacaggagtctgctgtggtaatgaaatcaatgtaagtcagcctccttggtcacagagcatgtcagaggagggtataaatggatctgggcatggtaagaagaaggaaaattatcagcaaactaagtgagyaatatctaaataaatggaatggaaactatacaaacatttgacagcaaaataaaaaaggaaataagcaagtatgcaaaagatagccaattcattctaaaagaaaatatcaagcaaggagcatttgctttacactatagaacaacctaataaaaatttgaatctgatatagagctcaaaaataagatgctaatacaacaaaatgagattaaaagaaaatttccaaacccaa

SEQ ID NO: 199447 - DNA, 588 bp, Homo sapiens
ttcctaaagagaagaggagaaagaattgtgctagtggagtcatgtcagtgatggagccgtggaagagaggccaccaggcagaagctgcaacagtagagggatgtggtcatcgtaagaccatggcaaggcaggaaaggagtggggataagtgcctagacttttccctctttccatcttccaacctcctgccaattcttcctgttggcagaacccaataaaaagccagagggcacaggagtctgctgtggtaatgaaatcaatgtaagtcagcctccttggtcacagagcatgtcagaggagggtataaatggatctgggcatggtaagaagaaggaaaattatcagcaaactaagtgagtaatatctaaataaatggaatggaaactatacaaacatttgacagcaaaataaaaaaggaaataagcaagtatgcaaaagatagccaattcattctaaaagaaaatatcaagcaaggarcatttgctttacactatagaacaacctaataaaaatttgaatctgatatagagctcaaaaataagatgctaatacaacaaaatgagattaaaagaaaatttccaaacccaa

SEQ ID NO: 199448 - DNA, 562 bp, Homo sapiens
aagcttccagaggaaggatcaggcagcaacatttgctgttttgcaatatgttgctgttttgcaatatttgctgttatgcagcgtgcactggtgatacccaggcaaacagggtgtggagtggacctccagcaaactccaacagacctgcagatgagggtcctgactgttagaaggaaaactagcaaagagaaaggaatagcatcaacatcaacaaaaaggacatccacaccaaagccccatctgtaggtcaccatcatcaaagactaaaggtagataaaaccacaaagatggggagaaaccagagcagaaaagctgaaaattctaaaaatcagagcacytcttctcctccaaaggaacacagctcctcaagagcaatggaacaaggatggacggagaatgactttgacaagatgacagaagtaggcttaaaaatatcagtaataacaaacttctccaaggaagtttggaggatgttcaaacccatcgcaaagaagctaaaaaccttgaaaaaagattagacgaatggctaactagaataaacagtgtagagaagaccttaagt

SEQ ID NO: 199449 - DNA, 562 bp, Homo sapiens
aagcttccagaggaaggatcaggcagcaacatttgctgttttgcaatatgttgctgttttgcaatatttgctgttatgcagcgtgcactggtgatacccaggcaaacagggtgtggagtggacctccagcaaactccaacagacctgcagatgagggtcctgactgttagaaggaaaactagcaaagagaaaggaatagcatcaacatcaacaaaaaggacatccacaccaaagccccatctgtaggtcaccatcatcaaagactaaaggtagataaaaccacaaagatggggagaaaccagagcagaaaagctgaaaattctaaaaatcagagcacctcttctcctccaaaggaacacagctcctcaagagcaatggaacaargatggacggagaatgactttgacaagatgacagaagtaggcttaaaaatatcagtaataacaaacttctccaaggaagtttggaggatgttcaaacccatcgcaaagaagctaaaaaccttgaaaaaagattagacgaatggctaactagaataaacagtgtagagaagaccttaagt

SEQ ID NO: 199450 - DNA, 584 bp, Homo sapiens
ccctgaggtaatgggcctgagcagtaggcactcacttggctgtgtttcctttgcagatggcttggtgtcttacaatgctccagctgggcagcagtttgtactccctggaggttccatcatttatctgaatgattctgtctatgatggagctgttggatacaggtaaatcctgggaaactttattagaatgggaaattggccactaagaaagaataatattttatcatgtcttgggatcaataatcaatcaaccaatcmgtatttatttagttcttgtacaaggcatttggaaataatttagatgaaggaatacacatgacctttatttccagggaacttaaagcccggtttgggaagacaagttaattacccagaaaacaatcaattacacaaagtaatggctaaagtttgtgatatggctctaagtataatagccatatttttgaccctcaaaacaggacatgtagtctgacacaaatattgacctacttatggaaacaaagggccagagaattgaagtaataagtataatactctgggcaagtcaagaagtcagaaagaatagaccttatacatataaatgc

SEQ ID NO: 199451 - DNA, 472 bp, Homo sapiens
tattccatccagcagtcaggcttctggaaaactcagcctttaaaacagagcctcttactcagaagtcaaaaaagcctgctaagctagaacacaaaactaaatccaatacctgggattctcatgaaatccttgcatcttacttcctgggtctagtatcctacaaatttaattaraattaaataaaaattattatttaaatttagagcttgtattttcccccttagtttaatatcaaactgggttgttggatatgtggaatagaagagagtgtgactggattctctgaaattgattcactgaacaatgacaatatgtagttaaaggagagtcagcaccaagctctggaaacatttatatgatagtggggcaagtgctactatgtatggtagcattcattctatgcatttatccatttcctcatttactctatgaattagttcatcaaatgcatttgataatattaagtcattat

SEQ ID NO: 199452 - DNA, 537 bp, Homo sapiens
aagatagaaacaaaaacttctcatccagttaactagagtgaaygtagggagaattgttttgcttgtaacatggagagtttattttcaagtgaggaaagagaaaaaaattactcagacttgttcctggtgaagtgcattctctgtttgtatactttttgatggagaaattgatctatagaactgcttaattttttgaggcatttagacagcaatgaaaggtagttctccacaggacaccgaatcaaaaggagagaccagactctggcctcatacccagcctatttgaaacaagctatctagtttctcctgcagacaccttgtcaacaacatgcaacagtgtcaggtgccttgcaggaaaataatatgagtcccaagctagcctgtgctcatccacaatcacaatgaacatgtcaaggaagaatttgcagagactcaagggaagcacaatgggataaggtaatcactttcagtgaaaaactgttttcttgaaaacaggcttggacacaattgaaagctggcttcctgcaaacacaccaa

SEQ ID NO: 199453 - DNA, 537 bp, Homo sapiens
aagatagaaacaaaaacttctcatccagttaactagagtgaatgtagggagaattgttttgcttgtaacatggagagtttattttcaartgaggaaagagaaaaaaattactcagacttgttcctggtgaagtgcattctctgtttgtatactttttgatggagaaattgatctatagaactgcttaattttttgaggcatttagacagcaatgaaaggtagttctccacaggacaccgaatcaaaaggagagaccagactctggcctcatacccagcctatttgaaacaagctatctagtttctcctgcagacaccttgtcaacaacatgcaacagtgtcaggtgccttgcaggaaaataatatgagtcccaagctagcctgtgctcatccacaatcacaatgaacatgtcaaggaagaatttgcagagactcaagggaagcacaatgggataaggtaatcactttcagtgaaaaactgttttcttgaaaacaggcttggacacaattgaaagctggcttcctgcaaacacaccaa

SEQ ID NO: 199454 - DNA, 537 bp, Homo sapiens
aagatagaaacaaaaacttctcatccagttaactagagtgaatgtagggagaattgttttgcttgtaacatggagagtttattttcaagtgaggaaagagaaaaaaattactcagacttgttcctggtgaagtgcattctctgtttgtatactttttgatggagaaattgatctatagarctgcttaattttttgaggcatttagacagcaatgaaaggtagttctccacaggacaccgaatcaaaaggagagaccagactctggcctcatacccagcctatttgaaacaagctatctagtttctcctgcagacaccttgtcaacaacatgcaacagtgtcaggtgccttgcaggaaaataatatgagtcccaagctagcctgtgctcatccacaatcacaatgaacatgtcaaggaagaatttgcagagactcaagggaagcacaatgggataaggtaatcactttcagtgaaaaactgttttcttgaaaacaggcttggacacaattgaaagctggcttcctgcaaacacaccaa

SEQ ID NO: 199455 - DNA, 602 bp, Homo sapiens
gggtttcctctgccctgacattccttgagtctcacactccaaaggcagtagagcacagaggtcaagagcatgcttgtggccgggtgtggtggctcatgcctgtaatcccagcactttaggagggcgaggtcaggagttcaagaccagtctggccaacatggcaaaaccccttctctacaaaaagtacccaaactagttgggtgtggtggcgcatgcctgtagtcccagctacttggggagctgaggcaggaggatggcttgagcccaggaggttgaggctgcagtgagtcatgttcatgccactgcactccagcctgggtgacagagcaacatgccctctccaaaaacaaacaaaaaaacaagcgaaaaactcttaactgatacattgttggaaatttgaaaaacgggataaagaaaaaagaagtagaagaaaagagcatgcttgctggagcagagtcgaatgccggttctgccacttagctttctctgtaacctgctatgagttacctaatgtttcttggcctcactttctcctctgtaaaactggaataataatactactattatataataayactaatactaataagattattgtgaag

SEQ ID NO: 199456 - DNA, 566 bp, Homo sapiens
gtggcatctcattctcccagataattttcttggaatcccacctcattcatttaaattctggaggtgagggaattacctcatgagaaaggatgggaaaggaactacctcccactgagaaaatagcatgctcctcttcctccctgscacccctcgtaatctctttataattatttatttgctgggcagtgattgtggttagtagggcctgtttagctgcctgcctctcagtaaactctggggggattatcaggccccagtgttggcagctctatttagactgtggcatatcagtgcgtcttattttcagacgaagctccaaggcaacagtaaaaatcccactcagtatcttgttatataaacaatagctctgctcaaccttctacggtagctgttcaaaatatgggcacaaaagttgattttaattttactttgcttagtgctgttttcaccactttgaaaatcttgataagcaccgaagtgctctgagcatgtggaaaggcctggggaaggtcagtacggtgtgcaataacacataataaacaaattaacttctctcctgcacgaag

SEQ ID NO: 199457 - DNA, 449 bp, Homo sapiens
ttaatggcctctttcagtgttttaattatttatgaacagcaatgatccataaaacactgagataatttatattggcttttgattctagaggttttgattaatgataccaacttacttagtaatcatttatcctatatcaakaaaattagattgaaagaacaaatctggttattagaacattagattcctaaataaaattttttttttttttttttttttttagacagagtctcactctgtcagcaggctgcagtgcagtggcgcaatctcggctcactgtaacctccgcctcccgggttcaagcaattctcctgcctcagcctcccgagtagctgggactacaggcacacaccaccacactcagctaatttttgtgtgtgtatatatgtatgtgtatatatatatatatatatatattttttttttttttttagtagaggtggggtttc

SEQ ID NO: 199458 - DNA, 578 bp, Homo sapiens
tttgattaatgataccaacttacttagtaatcatttatcctatatcaataaaattagattgaaagaacaaatctggttattagaacattagattcctaaataaaattttttttttttttttttttttttagacagagtctyactctgtcagcaggctgcagtgcagtggcgcaatctcggctcactgtaacctccgcctcccgggttcaagcaattctcctgcctcagcctcccgagtagctgggactacaggcacacaccaccacactcagctaatttttgtgtgtgtatatatgtatgtgtatatatatatatatatatatattttttttttttttttagtagaggtggggtttcatcgtgttggccaggctggtcttgaactcctgagctcaagtgatctgcctgcctcggcctcccaaagtgttgggattaccggcatgagccaccgcgcccggccaataaaatttctttatcatgggggtggaactcagctcctacgcttatcccactttcaactgttctaaagagaccacaatttaacaacattttctgaaagtcatggagtaaaattaagc

SEQ ID NO: 199459 - DNA, 578 bp, Homo sapiens
tttgattaatgataccaacttacttagtaatcatttatcctatatcaataaaattagattgaaagaacaaatctggttattagaacattagattcctaaataaaattttttttttttttttttttttttagacagagtctcactctgtcagcaggctgcagtgcagtggcgcaatctcggctcactgtaacctccgcytcccgggttcaagcaattctcctgcctcagcctcccgagtagctgggactacaggcacacaccaccacactcagctaatttttgtgtgtgtatatatgtatgtgtatatatatatatatatatatattttttttttttttttagtagaggtggggtttcatcgtgttggccaggctggtcttgaactcctgagctcaagtgatctgcctgcctcggcctcccaaagtgttgggattaccggcatgagccaccgcgcccggccaataaaatttctttatcatgggggtggaactcagctcctacgcttatcccactttcaactgttctaaagagaccacaatttaacaacattttctgaaagtcatggagtaaaattaagc

SEQ ID NO: 199460 - DNA, 449 bp, Homo sapiens
ttaatggcctctttcagtgttttaattatttatgaacagcaatgatccataaaacactgagataatttatattggcttttgattctagaggttttgattaatgataccaacttacttagtaatcatttatcctatatcaataaaattagattgaaagaacaaatctggttattagaacattagattcctaaataaaattttttttttttttttttttttttagacagagtctcactctgtcagcaggctgcagtgcagtggcgcaatctcggctcactgtaacctccgcctcccgggttcaagcaattctcctgcctcagcctcccgagtagctgggactamaggcacacaccaccacactcagctaatttttgtgtgtgtatatatgtatgtgtatatatatatatatatatatattttttttttttttttagtagaggtggggtttc

SEQ ID NO: 199461 - DNA, 570 bp, Homo sapiens
taatgataccaacttacttagtaatcatttatcctatatcaataaaattagattgaaagaacaaatctggttattagaacattagattcctaaataaaattttttttttttttttttttttttagacagagtctcactctgtcagcaggctgcagtgcagtggcgcaatctcggctcactgtaacctccgcctcccgggttcaagcaattctcctgcctcagcctcccgagtagctgggactacaggcacacaccaccacactcagctaatttttgtgtgtgtatatatgtatgtrtatatatatatatatatatatattttttttttttttttagtagaggtggggtttcatcgtgttggccaggctggtcttgaactcctgagctcaagtgatctgcctgcctcggcctcccaaagtgttgggattaccggcatgagccaccgcgcccggccaataaaatttctttatcatgggggtggaactcagctcctacgcttatcccactttcaactgttctaaagagaccacaatttaacaacattttctgaaagtcatggagtaaaattaa

SEQ ID NO: 199462 - DNA, 578 bp, Homo sapiens
tttgattaatgataccaacttacttagtaatcatttatcctatatcaataaaattagattgaaagaacaaatctggttattagaacattagattcctaaataaaattttttttttttttttttttttttagacagagtctcactctgtcagcaggctgcagtgcagtggcgcaatctcggctcactgtaacctccgcctcccgggttcaagcaattctcctgcctcagcctcccgagtagctgggactacaggcacacaccaccacactcagctaatttttgtgtgtgtatatatgtatgtgtatatatatatatatatatatattttttttttttttttagtagaggkggggtttcatcgtgttggccaggctggtcttgaactcctgagctcaagtgatctgcctgcctcggcctcccaaagtgttgggattaccggcatgagccaccgcgcccggccaataaaatttctttatcatgggggtggaactcagctcctacgcttatcccactttcaactgttctaaagagaccacaatttaacaacattttctgaaagtcatggagtaaaattaagc

SEQ ID NO: 199463 - DNA, 578 bp, Homo sapiens
tttgattaatgataccaacttacttagtaatcatttatcctatatcaataaaattagattgaaagaacaaatctggttattagaacattagattcctaaataaaattttttttttttttttttttttttagacagagtctcactctgtcagcaggctgcagtgcagtggcgcaatctcggctcactgtaacctccgcctcccgggttcaagcaattctcctgcctcagcctcccgagtagctgggactacaggcacacaccaccacactcagctaatttttgtgtgtgtatatatgtatgtgtatatatatatatatatatatattttttttttttttttagtagaggtggggtttcatcgtgttggccaggctggtcttgaactcctgasctcaagtgatctgcctgcctcggcctcccaaagtgttgggattaccggcatgagccaccgcgcccggccaataaaatttctttatcatgggggtggaactcagctcctacgcttatcccactttcaactgttctaaagagaccacaatttaacaacattttctgaaagtcatggagtaaaattaagc

SEQ ID NO: 199464 - DNA, 222 bp, Homo sapiens
acctctccactgcctcctccacccctgtatttcacttggctctccaaattgactcaactccaggtaacttctcccacaaagaggycttcagtttctccagtgggggtgtgcgtttgggagaggagggtctccctttcccacttccacagctgggacacacagcatttggggtgttctcccgggtcctgcaggagcagtccacttcctccagagggtctgtgg

SEQ ID NO: 199465 - DNA, 438 bp, Homo sapiens
tctgttttccagagggtgagctcttcatgggacagccacactcccaagtttccactcactttctttccttacgtgacacctctgagtccaggaactttcacattgagcctttgggtctggccctggaataagactattcttattttcagagttagagttgtcaaatactgatctcttgtcttgraaggagttggagtgggagaagggtaggggctgagttcctctcaaatcatgaacacttctgaattatccagaaatctaaatgtcagacaaccaaacaaattggtagtatcagtgatttattccaaataattttgggacaagtggctagtaaccgggaaaaaaaaagttggagccttctatcactgctgtagtaggcagaatttaaaatgtcccccatgacctttgcccagttactctcatgattgcattgttatg

SEQ ID NO: 199466 - DNA, 438 bp, Homo sapiens
tctgttttccagagggtgagctcttcatgggacagccacactcccaagtttccactcactttctttccttacgtgacacctctgagtccaggaactttcacattgagcctttgggtctggccctggaataagactattcttattttcagagttagagttgtcaaatactgatctcttgtcttggaaggagttggagtgggagaagggtagggrctgagttcctctcaaatcatgaacacttctgaattatccagaaatctaaatgtcagacaaccaaacaaattggtagtatcagtgatttattccaaataattttgggacaagtggctagtaaccgggaaaaaaaaagttggagccttctatcactgctgtagtaggcagaatttaaaatgtcccccatgacctttgcccagttactctcatgattgcattgttatg

SEQ ID NO: 199467 - DNA, 438 bp, Homo sapiens
tctgttttccagagggtgagctcttcatgggacagccacactcccaagtttccactcactttctttccttacgtgacacctctgagtccaggaactttcacattgagcctttgggtctggccctggaataagactattcttattttcagagttagagttgtcaaatactgatctcttgtcttggaaggagttggagtgggagaagggtaggggctgagttcctctcaaatmatgaacacttctgaattatccagaaatctaaatgtcagacaaccaaacaaattggtagtatcagtgatttattccaaataattttgggacaagtggctagtaaccgggaaaaaaaaagttggagccttctatcactgctgtagtaggcagaatttaaaatgtcccccatgacctttgcccagttactctcatgattgcattgttatg

SEQ ID NO: 199468 - DNA, 438 bp, Homo sapiens
tctgttttccagagggtgagctcttcatgggacagccacactcccaagtttccactcactttctttccttacgtgacacctctgagtccaggaactttcacattgagcctttgggtctggccctggaataagactattcttattttcagagttagagttgtcaaatactgatctcttgtcttggaaggagttggagtgggagaagggtaggggctgagttcctctcaaatcatgaacacttctgaattatccagaaatctaaatgtcaracaaccaaacaaattggtagtatcagtgatttattccaaataattttgggacaagtggctagtaaccgggaaaaaaaaagttggagccttctatcactgctgtagtaggcagaatttaaaatgtcccccatgacctttgcccagttactctcatgattgcattgttatg

SEQ ID NO: 199469 - DNA, 576 bp, Homo sapiens
ctagtagctgggatcacaggcgcatgccaccacacctgggtaatttatgtattttttaatggagatggggttttgccagccaggtgtggtggttcacacctgtaatcccaacattttgggaggcagaggtgggtggatcacttgaagtcaggagttcaagaccagcctcrgcaacatggtgaaaccccatctctactaaaaatacaaaaattagccgggcatagtggcacatgtttgtaaccccagctactcgggatagtcacctttagaaggtaaggtctaatgaaagggatgcagaggtagcagtgagctgagatcacgccactgcaccccagcctgggtgacagagcaagactccatctcaaaaaagaaaaaagaaaataaatggggtttcactatgttgaccaggctggtctcaaactcctggcctcaagtgatctgcctgcttcagcctcccaaagtgctaggattacaggtatgagccaccacacctggccccacacaatttttaaatacaaaaataagtagggaatatattatatatatattaaactatattataaagctatagcagtt

SEQ ID NO: 199470 - DNA, 445 bp, Homo sapiens
gggtcgcctgccacagcaacatgagtgggagcaccaggaacccagggttggaacaggatgccatggattgctttagcccttttcctgtttagaacaaaaaaggscagctcactgccagtgctcatttaattttacagaaacaggctctttgaggctgaagcaaatctgactgacttttgatgtgaaaataaaatataaaaaccgttcctgaagttatttctaaacagaactaacataaaaataggctgaatcatcagaatcatctatttcggaaaaaccggatttgtcaaatcaatcttcgggcaacaactgtttgagaacgatgttcacatcccatgtaggaatgctatgttttctaggatctggcattttcagtgattgagaatcgctatattttgcaaatggaaatagcactactaaaaacaaaatgctatgaacagagtga

SEQ ID NO: 199471 - DNA, 445 bp, Homo sapiens
gggtcgcctgccacagcaacatgagtgggagcaccaggaacccagggttggaacaggatgccatggattgctttagcccttttcctgtttagaacaaaaaagggcagctcactgccagtgctcatttaattttacagaaacaggctctttgaggctgaagcaaatctgactgacttttgatgtgaaaataaaatataaaaaccgttcctgaagttatttctaaacagaactaacataaaaatagkctgaatcatcagaatcatctatttcggaaaaaccggatttgtcaaatcaatcttcgggcaacaactgtttgagaacgatgttcacatcccatgtaggaatgctatgttttctaggatctggcattttcagtgattgagaatcgctatattttgcaaatggaaatagcactactaaaaacaaaatgctatgaacagagtga

SEQ ID NO: 199472 - DNA, 462 bp, Homo sapiens
gggtcgcctgccacagcaacatgagtgggagcaccaggaacccagggttggaacaggatgccatggattgctttagcccttttcctgtttagaacaaaaaagggcagctcactgccagtgctcatttaattttacagaaacaggctctttgaggctgaagcaaatctgactgacttttgatgtgaaaataaaatataaaaaccgttcctgaagttatttctaaacagaactaacataaaaataggctgaatcatcagaatcatctatttcggaaaaaccggatttgtcaaatcaatcttcgggcaacaactgtttgagaacgatgttcacatcccatgtaggaatgctatgttttctaggatctggcattttcagtgattgagaatcrctatattttgcaaatggaaatagcactactaaaaacaaaatgctatgaacagagtgatgtcttttgtttccaaa

SEQ ID NO: 199473 - DNA, 616 bp, Homo sapiens
agggagggctgactgtatactactgggcacatgcccaagagaaatgaaaacgtatttgcacaaaaatgtgtacatgaatgttcatagcaacgccaaaaggtaaaaactttttgataaataaaatgtggcatatacatacaatgcaatattattcagccaaaaaaggaatgaagtactgacacatactacaaaatggatgaacstgttacaggtggcaggtatccaagttaccagggcaaatctgtatgggtctgcagcaacttcagttcttgcctcctcagaagaaagaatttgaccgaggggcaataaggcacaaaaagagactgaggcaagtttcagagcaggagtggaagcttatttaaaaggcctttaggaaagaaaggaaagcacgctcggaagagtcccaagctgtcactgaggtcaactgtgatattgacctcgatcctaggactttacaggctggctcctttcccatgattcttcccttagggtgggctgcctccatgcgcagtgccctccttacccttgggaagtgagcacagcgcaatatgtatgaagttgtatgcgtgcccatctgaggctttcttcccttttccgatagagtccccctgaaagg

SEQ ID NO: 199474 - DNA, 601 bp, Homo sapiens
ttcgtgtctttattacatttgctttcctagttacctttagactgtcacttctgagttctttctctgacatgcttttcttttctcgtgaagcgtcttacattctgactaaattttgtttttttgttgttgttttagtgaggtgatttttaaaacatgctctaggtcaataagacaaagttaatgatgagcagtaaaacaattcttgaayaattttgtactttttttctttatataatatatccgtaagccaaagtctttcttgacaagtacagcgttttactctgctttcttagtttggaggatatacaagtagttttagctccttgagggagtaatttaaataacttatctaaagctcaaaaatattattccctctaatgttagactttaagcacttctgtaaatatttaagttattctttgtcacctatcattttctattctatcttttcactgaaaagctgttggactgtttgttgcttttgactttattgtgatctcaaaattaagatataaaattagttgttactagtatatgtagcccaacccttctttagtatcttaaagttatctttatgtatttcagtttcttttgaatgtcc

SEQ ID NO: 199475 - DNA, 435 bp, Homo sapiens
ctgctcagtttcttctcaatcgcctcaagcttcctctgctgaaatgatcctctaccatccatttttcaactgacctattttttcaagtaggcaagttagctcctccagtaagccttcactaaccatgggctaggctgggtgacctgtcgtggtgccctcgtccttctccatcttcacagcacattgcgtgtctgtatttacccaacaatcygaaatatttgcttactgctggtctccttcatgaggttataagatctaagaaagaagggactgtgcttgtcttatattctgtctgcctagtataatcacacatagtggcttccccatgaaatatttgtggaagggtctgatgagaccacattcagatgagtggattcaattctagatactcttgcttattaagggaaagaggtgcacgtcacttctggaggtctc

SEQ ID NO: 199476 - DNA, 618 bp, Homo sapiens
atgtcacttaaaatgctgaaaatgactaattttatgttatgtttattttaccacaataaataaatatttttaaaaacagtgaagttactagggcataaaattgaaagaagaatcattctcagaggcatggaaatggaggttctgcagctgagaatgaaagcctccttcaactttcaccctagctgcttcatttccttatcttagtcatgactctgaagggaggcacaggacctcctatctcacagatctctaaaccctgctacaggtttgatttccatccagcaaggacagggcaggcccaaggtccatgtcagggactcaagccattgtctaatgctcttgtgtctgcttccacacttacattctccagcaagacactttctcctttggcacaagaagaaatttgccttccataaccactcattcttccagtcttctgtttatggcaatgatattatgtctggattattacagggcttagtttttttaacttaaaaaaatctggtaaaatatagataacataatttaatatatacaacataaagmttaagggtacaattcagaaggcttagatttttgaagcccagaaacctagatttctataaagcaaatggtctg

SEQ ID NO: 199477 - DNA, 603 bp, Homo sapiens
attacaacaatcagcagggcagcatgtattactttcctgaaagtaaataaattattatgtgaaaattctgaactttttcaaaaaattttccacagaatttaaaactcagcctgcttcaatttcaagtgttcctgctatacacttcagatgagctctttagtgtctacagagttagtgcttgaaaatgtccaacccaagaacaaaaattaaaacaccttcaaagagattggctttataaatgctttcagtgagaaaatagaaatttaatcaaaacagcctttatctaataagcatcttctgtttcatttactgtgggtaatcagggtgagtgtgacttttctgacagctgggttctccatcgtaggttttgtagttcagttcttctgttactgtgaycccattagaattcacttcattgaaaatatataattaatacttaacacagcttttctagacaatctacaagtctataaactgtctacatcctcaaacatgggtgaaaatggtctaccatattgtactgagggactctggtgaaactgaaaccttttcttcaatcatgtgagatacaattaaattgcaatctgtatcagattattgcca

SEQ ID NO: 199478 - DNA, 609 bp, Homo sapiens
ctttggcgctgagaatgggcacatgacaattctgaccaatcagagcatgccatttttttctggttagtgattggctcaggaatgaacatgtgacttgaattcacrcaatgagagtcacttctcagaggtctgggagaattatgagtaaagtgactttctttgtccagccaagactgataacctagaaagatataaacctggagcttatatgcagccatcttggccagtttcagaatgaagccaactaagaggaaatagagctgatcgaaggataactataggttctgacaatatggtttaagtgcctgagtgcagtcatgactaaagctaattatatttctccaatattcttcttaagtttacatgagaaataaactccttcaaaaaatgtttacatgactttgaataggaatttgtttttttgttggcaaccaaagaataagtggccaaatagtaggaatgtgagtacaaactgctgtatatttcctcagccaccacctttagcagggaagagattttaggcgccaggataccttgattcttgtcccagttctgcggtgctgacgatgcgactctgggcatatagcttattcacactgtgcttcagtt

SEQ ID NO: 199479 - DNA, 609 bp, Homo sapiens
ctttggcgctgagaatgggcacatgacaattctgaccaatcagagcatgccatttttttctggttagtgattggctcaggaatgaacatgtgacttgaattcacgcaatgagagtcacttctcagaggtctgggagaattawgagtaaagtgactttctttgtccagccaagactgataacctagaaagatataaacctggagcttatatgcagccatcttggccagtttcagaatgaagccaactaagaggaaatagagctgatcgaaggataactataggttctgacaatatggtttaagtgcctgagtgcagtcatgactaaagctaattatatttctccaatattcttcttaagtttacatgagaaataaactccttcaaaaaatgtttacatgactttgaataggaatttgtttttttgttggcaaccaaagaataagtggccaaatagtaggaatgtgagtacaaactgctgtatatttcctcagccaccacctttagcagggaagagattttaggcgccaggataccttgattcttgtcccagttctgcggtgctgacgatgcgactctgggcatatagcttattcacactgtgcttcagtt

SEQ ID NO: 199480 - DNA, 549 bp, Homo sapiens
ttaacacataagaactacaggcccaagttggtttcctgtaattcaagcagtcagcagcaaaattgattctgattcaatgacatcccaacccaccacctcttcaataggcctaaattgtcaaccagcggggtatcccagcaacatcacaaactgaacattaaaaactgaacaaakgattgtttctccaaatcagctcttccttctgcattccctactttaaccaaaagcaccattctttccctaagtacatatagcctcccacagcttatcatcaagtcctattcttgaattatcccccaagtatcctgactttttccatttctttttgttgccctggccctgcttaaaatcagaaatcgcacctcacctcctgccgttgacagctcaactggcatctgatgttacatgaaaacatagtgtactctcctattccattccaaagtctatctttttgtttacttcctatgaaaactatacacatttctctgaacctaattctaacatcccaaatatggtttccttcccatatttttatgtaaaaattattta

SEQ ID NO: 199481 - DNA, 549 bp, Homo sapiens
ttaacacataagaactacaggcccaagttggtttcctgtaattcaagcagtcagcagcaaaattgattctgattcaatgacatcccaacccaccacctcttcaataggcctaaattgtcaaccagcggggtatcccagcaacatcacaaactgaacattaaaaactgaacaaatgattgtttctccaaatcagctcttccttctgcattccctactttaaccaaaagcaccattctttccctaagtacatatagcctcccacagcttatcatcaagtcctattmttgaattatcccccaagtatcctgactttttccatttctttttgttgccctggccctgcttaaaatcagaaatcgcacctcacctcctgccgttgacagctcaactggcatctgatgttacatgaaaacatagtgtactctcctattccattccaaagtctatctttttgtttacttcctatgaaaactatacacatttctctgaacctaattctaacatcccaaatatggtttccttcccatatttttatgtaaaaattattta

SEQ ID NO: 199482 - DNA, 603 bp, Homo sapiens
aagaaaggggacttatgaaatttactcctcttatagagaactaaaaaataacacgaaattatgccagaggttcactaagctctttaaatgtcctgatttcccaaggcaagtggcagctttcaacttgtcctatttattttaagtgttgtgcaaattatatgaaaatagccgattgcataatatatttttctagttrtggttgaaaaaatagcacttacttagaaaaatccccagagattttcttagatcatttctccataaggaggaataattattctactttgggtagatactgtctcatgctcagggaatacatgtacaacaaatatgaaatcctatgaagaatggaatagaaatactatttcagtatattcagtagtaaagatattttcccttgaagtatatggggtttgaaaaaattatacagtaacattttctaaaacttactttggatccacgatatattctgatggactacataaagtcacattgctaatctgtaaaagatgatggttgaaagaatttagaattatcttgttcagacatctgtaggttaataccattttgtgatattaacaaaataaatagtgaatattcatccac

SEQ ID NO: 199483 - DNA, 603 bp, Homo sapiens
aagaaaggggacttatgaaatttactcctcttatagagaactaaaaaataacacgaaattatgccagaggttcactaagctctttaaatgtcctgatttcccaaggcaagtggcagctttcaacttgtcctatttattttaagtgttgtgcaaattatatgaaaatagccgattgcataatatatttttctagttgtggttgaaaaaatagcacttacttagaaaaatccccagagattttcttagatcatttctccataaggaggaataattattctactttgggtagatactgtctcatgctcagggaatacatgtacaacaaatatgaaatcctatgaagaatggaatagaratactatttcagtatattcagtagtaaagatattttcccttgaagtatatggggtttgaaaaaattatacagtaacattttctaaaacttactttggatccacgatatattctgatggactacataaagtcacattgctaatctgtaaaagatgatggttgaaagaatttagaattatcttgttcagacatctgtaggttaataccattttgtgatattaacaaaataaatagtgaatattcatccac

SEQ ID NO: 199484 - DNA, 603 bp, Homo sapiens
aagaaaggggacttatgaaatttactcctcttatagagaactaaaaaataacacgaaattatgccagaggttcactaagctctttaaatgtcctgatttcccaaggcaagtggcagctttcaacttgtcctatttattttaagtgttgtgcaaattatatgaaaatagccgattgcataatatatttttctagttgtggttgaaaaaatagcacttacttagaaaaatccccagagattttcttagatcatttctccataaggaggaataattattctactttgggtagatactgtctcatgctcagggaatacatgtacaacaaatatgaaatcctatgaagaatggaatagaaatactatttcagtatattcagtagtaaagatattttcccttgaagtatatggggtttgaaaaaattatacagtaacattttctaaaacttactttggatccacgatatattctgatggactacataaagtcacattgctaatctgtaraagatgatggttgaaagaatttagaattatcttgttcagacatctgtaggttaataccattttgtgatattaacaaaataaatagtgaatattcatccac

SEQ ID NO: 199485 - DNA, 589 bp, Homo sapiens
aaaaccatcagacctcatgagaactcactcactgtcttgagaacagcatggagaaaaccacccctgtgatccattcacctcccaccaagtccttccatggacaccctggggattacaattcgagatgaaatttgggtgggacacagagccaaaccatatcacctgtcttcgtcttagaagaaagatctgggctgaaaatatagatttggaagtcactagaatggaaatgggtaaaatcactcagaaatatggtcacaaataaaaacacagcagaccagacatatacttctgagagacaagctgtctaaaaggctcctgtttcttgtcatatgtccatcaacagaaatctctgttttgacccttgaaacacaaaggtgttatcrggacaaatatatttaatgcattagagacaacttaagatctataatgggacaggtaaggaggaaactccaggagcctatgcataattcagatgattaaatttgcccgtctatagaactctccttgggaactggaaccagatggggttcaaaacaaaattaagtgcaattaacttttaatttactgatttaatgcccactactaaaca

SEQ ID NO: 199486 - DNA, 459 bp, Homo sapiens
atggtcacaaataaaaacacagcagaccagacatatacttctgagagacaagctgtctaaaaggctcctgtttcttgtcatatgtccatcaacagaaatctctgttttgacccttgaaacacaaaggtgttatcgggacaaatatatttaatgcattagagacaacttaagatctataatgggacaggtaaggaggaaactccaggagcctatgcataattcagatgattaaatytgcccgtctatagaactctccttgggaactggaaccagatggggttcaaaacaaaattaagtgcaattaacttttaatttactgatttaatgcccactactaaacacattttccgttttgaatgtcacatactaatgataagcagctcatctggaacttggctaacttttgcaatttaatatctaacttcaaaattctggctagacaacatatttggaggttaa

SEQ ID NO: 199487 - DNA, 552 bp, Homo sapiens
acaggagtaagtttaaaaagtctgtttatagattgtgcatttaaaatcacaagtatgtaatgagtattttcacatttctgtattgcctttatctatttctattgcaagctccccaatgaaagaaataatctgacacttctcttgcttcctcacctccatccttccctccctccctccctctgtcccttcttccatccctccctccttctcttcctccctcacttccttccttttttccttctcttgccttaaagtttttagcactgaacataacattctcgtgaacaaatactcatgaatttaaataaaattgtttccatcacttagtgttccatggtatataaaaactttggattatttttactactgaatatgtaayttttgttcttaaattcatttcatcatatttcctgttcagtttctataacttactattcagaacttttatctttaaaacactaataatataagccatttgaagagattgaattccaaaaacttacagcctgataatgttctgctacaaaaagaatgctgagctatagaaaactc

SEQ ID NO: 199488 - DNA, 385 bp, Homo sapiens
tattgtgttctatccattatttttaaattaagaatagaaacacaaattttgtacaacaaaagagcagtaaatgtttgagtgctttgcatttgtagagaggggaaaaatactcgttttctatgaggattccaccgaaactagatttataacgtacgttttagtttcctattgctgtgtaataaactacctcaaaacttagtgcttaaaaccacaaccattgtatttgttaacattcgggtagaacttgggtatgttrtttttcttttccatgtgtcacacatttctcaagtggtgatgacaagatggaaacagtcctgaatacccaatatgatttaattcccatgtctagcaccttggcaaatgggctggaggttgagtctatctc

SEQ ID NO: 199489 - DNA, 385 bp, Homo sapiens
tattgtgttctatccattatttttaaattaagaatagaaacacaaattttgtacaacaaaagagcagtaaatgtttgagtgctttgcatttgtagagaggggaaaaatactcgttttctatgaggattccaccgaaactagatttataacgtacgttttagtttcctattgctgtgtaataaactacctcaaaacttagtgcttaaaaccacaaccattgtatttgttaacattcgggtagaacttgggtatgttatttttcttttccatgtgtcacacatttctcaagtggtgatgacaagatggaaacagtcctsaatacccaatatgatttaattcccatgtctagcaccttggcaaatgggctggaggttgagtctatctc

SEQ ID NO: 199490 - DNA, 549 bp, Homo sapiens
ctcgttttctatgaggattccaccgaaactagatttataacgtacgttttagtttcctattgctgtgtaataaactacctcaaaacttagtgcttaaaaccacaaccattgtatttgttaacattcgggtagaacttgggtatgttatttttcttttccatgtgtcacacatttctcaagtggtgatgacaagatggaaacagtcctgaatacccaatatgatttaattcccatgtctagcaccttggcaaatgggctggaggttgagtctatctctcactccccatatggctctttctagatggcctccytaggtttctttacatgagtaggtcctagaagtaagcattcagaacagctgatgtaaaactgctgctctctccaggcccagactcagatgttgcatggcatcattattgctggattctatcgatcaaagcaagctgcgaagtaagagcaggttcaaaagtaaaggagatggattccatctcttgatgggaaactggtaaggttacattgcaaatgagcatatgagatagtagatatttt

SEQ ID NO: 199491 - DNA, 549 bp, Homo sapiens
ctcgttttctatgaggattccaccgaaactagatttataacgtacgttttagtttcctattgctgtgtaataaactacctcaaaacttagtgcttaaaaccacaaccattgtatttgttaacattcgggtagaacttgggtatgttatttttcttttccatgtgtcacacatttctcaagtggtgatgacaagatggaaacagtcctgaatacccaatatgatttaattcccatgtctagcaccttggcaaatgggctggaggttgagtctatctctcactccccatatggctctttctagatggcctccctargtttctttacatgagtaggtcctagaagtaagcattcagaacagctgatgtaaaactgctgctctctccaggcccagactcagatgttgcatggcatcattattgctggattctatcgatcaaagcaagctgcgaagtaagagcaggttcaaaagtaaaggagatggattccatctcttgatgggaaactggtaaggttacattgcaaatgagcatatgagatagtagatatttt

SEQ ID NO: 199492 - DNA, 535 bp, Homo sapiens
acaccatttcttaaacaatactttgaaattcatttggtaaatgtcaactgccaataataaaaaagggaagtagatttgtaacacctaaactaacaatcagcttatctgggttctcggattcccataaagctgcaatccatgtcaaagtagcaccatttcttattggagctcagagttctcttccaatctcatgtggttgttgagataattcagtgtcccattagtttgctggcagtcaaccgagcatgattcttaagttctatatgctactcgctgtgccttctcacaattcaatcttagtgatggtggttcagttmtcctgcctcggccttctgagtagctggaactacaggggtgcaccaccttatacaatgtattaagtaattttgtgcacaaaacaaagttttggttgtgttttgactatgacccatcacgtgagttcagatgtggaattttccacttgtggcattatgccagcatgaaaaagttcctgattttggagcatttcagatttaagattttaggattagggttg

SEQ ID NO: 199493 - DNA, 628 bp, Homo sapiens
ttcattaagtgacggtatcagtgccaacaaccaaccacctctctctattcttcttattataggggataaataaatgccaatttgcaagacacattttatgtgatggttcctgctcctttcaggtaggtagaaacgaatgcaatttttagaaggtatgaaagattgactgaataacctgatattaccaaagacaaaacaaataacagacacttcaaaagagtgtttttatatgaatgaataagagaatacatggacagacaaatctgccattcattaagtcactgttttctctgacttgtttaaatctaccacacgctctaaatttgaacagagatagcctttgaataaagtacacagtttttaccccatcaaattctctgaaataatagcaatcttgcatctacaagaataaacaaccatcttcccctaaaaaaatatgctgaaaagaacagaaaagaaactataaagaaaayaaaaccttctcagggctctaaatctttacctcattatccggtatgttccctttaactatcatatactatgaacccccacaacccacccccaatcccagccttacccatacctcaaccactatttgtcatttgaatcaacccattttactttcttt

SEQ ID NO: 199494 - DNA, 477 bp, Homo sapiens
caccaccgagagcttcagtgctctgtatctccaagtaaactttaaaaacagtctaggccataaagactgcaactcttatgggagtcctagtgctgaactaggctcagagacagtacactggggagagggagcatgtgacatactgagacacaaactggagtggccaagggagcactggcattacccctccactaacctcaggctgcatagttcatggctccaaaagagaccccttccttctacttgagaagaggagaggggagagcgggkaagacttcatattgcatcttggataccatctcagccacagaaggagagagtaccagagttgtgaagccccaattccagggccccgggttccaagtcctagttcccagatcatattactagacacaccctgagccagaagaaaacctactgtcttgaaggaaaggacccagtactggcagcattcatcatctgctaattgaagaactc

SEQ ID NO: 199495 - DNA, 472 bp, Homo sapiens
gaattccaacaaatctcaccaccgagagcttcagtgctctgtatctccaagtaaactttaaaaacagtctaggccataaagactgcaactcttatgggagtcctagtgctgaactaggctcagagacagtacactggggagagggagcatgtgacatactgagacacaaactggagtggccaagggagcactggcattacccctccactaacctcaggctgcatagttcatggctccaaaagagaccccttccttctacttgagaagaggagaggggagagcgggtaagacttcatrttgcatcttggataccatctcagccacagaaggagagagtaccagagttgtgaagccccaattccagggccccgggttccaagtcctagttcccagatcatattactagacacaccctgagccagaagaaaacctactgtcttgaaggaaaggacccagtactggcagcattcat

SEQ ID NO: 199496 - DNA, 472 bp, Homo sapiens
gaattccaacaaatctcaccaccgagagcttcagtgctctgtatctccaagtaaactttaaaaacagtctaggccataaagactgcaactcttatgggagtcctagtgctgaactaggctcagagacagtacactggggagagggagcatgtgacatactgagacacaaactggagtggccaagggagcactggcattacccctccactaacctcaggctgcatagttcatggctccaaaagagaccccttccttctacttgagaagaggagaggggagagcgggtaagacttcatattgcatcttggataccatctcagccacagaaggagagagtaccagagttgtgaagccccarttccagggccccgggttccaagtcctagttcccagatcatattactagacacaccctgagccagaagaaaacctactgtcttgaaggaaaggacccagtactggcagcattcat

SEQ ID NO: 199497 - DNA, 617 bp, Homo sapiens
cttacttatcaataaaaacattgaatgtaaatggactagactcgccaatcaaaagacatagactagcagaatagattaaaaagaaaaaaaatctaatgatctcctgactatgagaaacacacttcatctataaacacacacatagaccaaaaataaagggagggataaagatattccaggccaatggaagccaaagaagagtaggagttgctatacttatatcagacaaaatatatttcaagaccaaaactataagagacaaagaaggtcactatataatgataaggatgtcaattcagcaagaggttataacaattttaattatgyatgcactcaacactggaagtcccagatatataaaaaatatattatgagagagaaagagagagaggacccatacaataatagctggagacttcaacaacccactttcagcgctgaacagatattctagacagaaaaccagcaaagaaacatcagccttaatctgtactatagacccaataaatataatagatatttacagaacattttatccaagaactgaagaatacacattcttttccttagcacatggataattctcaaggatacaccatattttaggtcacaaaaca

SEQ ID NO: 199498 - DNA, 617 bp, Homo sapiens
cttacttatcaataaaaacattgaatgtaaatggactagactcgccaatcaaaagacatagactagcagaatagattaaaaagaaaaaaaatctaatgatctcctgactatgagaaacacacttcatctataaacacacacatagaccaaaaataaagggagggataaagatattccaggccaatggaagccaaagaagagtaggagttgctatacttatatcagacaaaatatatttcaagaccaaaactataagagacaaagaaggtcactatataatgataaggatgtcaattcagcaagaggttataacaattttaattatgcatgcactcaacactggaagtcccagatatataaaaaatatattatgagagagaaagagagagaggacccatacaataatagctggagacttcaacaacccactttcagcgctgaacagatattctagacagaaaaccarcaaagaaacatcagccttaatctgtactatagacccaataaatataatagatatttacagaacattttatccaagaactgaagaatacacattcttttccttagcacatggataattctcaaggatacaccatattttaggtcacaaaaca

SEQ ID NO: 199499 - DNA, 540 bp, Homo sapiens
ctaatttctacaaataattttatgaaatggtcagataagtttcaagtaatggaaatgagtgacatctgtgaaacttggacctatactttcagcgcatatgaaaatgccagtccaagggagcacactctactaagacacctgccagaccaggaaaagcaactctcttgccattcattcatatatttatgtggtaaacttgtactgagtgctaactagagtgtcaaatgcatgtagtgtcaaaaattcttccaaaacgarttttataatcaacaaaataaagcaggaaatgaatatctgccaaaaaaaagagaatgtaaggcattaaatatgtgcacaggatgcaaaagacacaatggaaagaatcatcatttttaccagggtttgagtaaaggaattggacaatgtagtctttaaattactggggcagccttcagagtacaaacacctaacacaatggaaagaattatcatttgtacctgggtttgagtaaaaaaaattggacaacgttgtctttaaattactggggcaaccttcagagta

SEQ ID NO: 199500 - DNA, 609 bp, Homo sapiens
gaaggtttctgaaaaggaaaatgactcctacaaacatatttagctgtaataaggaagataaagggagagtttgtcagtaagccgttctgggaggaaaatagggtttccttttgtgctggctccacccaactatgtcggcctgatttcacctactgctccattaaaaatatacaaccaaaactgaaataagttacttaatctttgtaattacatgtctgtaaattctaaaagattctcttctttctgaaagtctcccattaaaatgtaaactccccttggaatggccactgtctcaacattcttgccctcaaagccaaatgtggccctccaatcttcctaaatatagatagtgttccaaagatccacaactaaatgatrgctgttgccactgacttatgatctctagcctaagatatcttcagttagcaaattagcattgacaatcaacattttaacacagagaagtgagatttgatatattgtagacaaaggaagctgattttctacttcataaatctgcaaaagaaagtatgttgctaggattaaaatatgtatacaatatggggcaatgttcaagataaagagatatagatgaaaagatttgtgatc

SEQ ID NO: 199501 - DNA, 596 bp, Homo sapiens
ataaagaaagtgcagatagatttctagattaaaaagcaatgatatgtgtatatctctggaggtacaccaaatgatttatgaagaaacaagagataattttagaatttttatttttgcattaaaaaattatacattgatctcactaattttatgttttcctctccagatgaattttgtttgtgtatatcatgatgatttctattttaactttcatatatatgttttactaaataataacataattttgaaatacttaaatctttttaaccagtatattgtgcgtattttctgcaatctatttatttgcttgatatgttactgaggcttttgtgtgttgacatatgtcaccatagttcattcattttaaccataatgtagtattctgtgatttaaatataattctactgttgatgaacattttaaatgttttttattttaaaacatttttgatttttcacaattgtacgttgttactaacaacatcattatwaaatcttttcccacctctctgtaagaggtttttcaatgcaatttcatcaggaattggaatataggtcatagagcataaagtaacttctgctttactgtataacgtt

SEQ ID NO: 199502 - DNA, 619 bp, Homo sapiens
cccattggcattttaagttttatattgamatttagtaaactgccctttgtatatttgccttaccttaaccactagacttatttaattcaaaatttctggtttcctcatagaaatgcatttccaataatctttacccacttagtgtggaataaaaatcgaatctctccacagccagtgcagttatgtgtctttaagctgcttcttcccaaacacacacacacacacacactctcactcacacacactcacacttactctcacacacacacactcaaaaccaccagcatcaactccactgtagccacaacgcagcatcagaatgctttctttcttgttgtctttgggttatttagattccactttggtgaaattactatttttagcttgccagttgagctcattgataattaactctggctatattagaatcgccttgagaagtggcttcaagtgtcaaaaaccaatgtttgagctgcacatgaatcaaataaataacaatatctgaaggtgagaacaaggcatgtgtatctgttatgtgtatgatgaatatttgcagccttccttgagaaccactgtatgcatggcatacctgaacaggaatgtcattctactcagctgg

SEQ ID NO: 199503 - DNA, 619 bp, Homo sapiens
cccattggcattttaagttttatattgacatttagtaaactgccctttgtatatttgccttaccttaaccactagacttatttaattcaaaatttctggtttcctcatagaaatgcatttccaataatctttacccacttagtgtggaataaaaatcgaatctctccacagccagtgcagttatgtgtctttaagctgcttcttcccaaacacacacacacacacacactctcactcacacacactcacacttactctcacacacacacactcaaaaccaccagcatcaactccactgtagccacaacgcagcatcagaatgctttctttcttgttgtctttgggttatttagattccactttggtgaaattactatttttakcttgccagttgagctcattgataattaactctggctatattagaatcgccttgagaagtggcttcaagtgtcaaaaaccaatgtttgagctgcacatgaatcaaataaataacaatatctgaaggtgagaacaaggcatgtgtatctgttatgtgtatgatgaatatttgcagccttccttgagaaccactgtatgcatggcatacctgaacaggaatgtcattctactcagctgg

SEQ ID NO: 199504 - DNA, 590 bp, Homo sapiens
gagccagttgctacaaatcctgaagcagtatgttgaggggagacaagtaagctgcctctaagaagagggctgagctgagctgagcctgactcagcagactcccctgagacaagactcctttgtgttccattttccctccatggaagggcaccagttgagggtcaggtacatcagcacagacgtggacatccagaacaaaatctgcagttttatagaccaagggactagggggtaggaggaaacgactaggggtgtcaaagtgctgagtattaagtcagagcagcctctgctgaagaggatggcctctactgaggatggcctctgctgaagactcccaatacagaggactccaaatggcggcacctaggccatgaacccaactatgtttaagagcatggttgtccaggaggtctgaacctttgacagcaactcccttcagagcctacaaggcattggctgtgcaccatgtctggtggggaagaacagcatttccctgtgwgacttgttaggtaaagacttttttattgcttatagtcaagtctaaaaacatcgcacatacatttctggcaaggagtcagacttctctctga

SEQ ID NO: 199505 - DNA, 588 bp, Homo sapiens
actcaagcgctctcatggagaagtacaaggagattgatgttgtttttatatctgctaatacaatattcattctgcagcccatggatcaagaagtaatttagactttcaagtctcattattacaaaaagttttgcaaggctatagctgccatacatagcgattcctttgatggatctggacaaagtacaatgaaaatcttctagaaaggattcaccattttaaataccatgaagaacatttatgactcatgggaggaggttgaaatattaacctgaacaagagtttggaagaagttgattctaactctcataggtgattttgagggtttcaagactttagtagataggataagtcaytgcagatatgttagaaagagcaagagaattagaattttaagtggaacctgaagatgtgactaaattattgcaatcttataaccaaacttgaatagatgaggagtttcttgttatagatgagcaaagaaagtgctcttttaaaaaaaaaaaaaacagaatctactcctgatgtctgacatgctgtgaatgtgaattaacaacaaataatatagaacattagataaacatgctt

SEQ ID NO: 199506 - DNA, 523 bp, Homo sapiens
ttgcaagatattttccttggacttccgctaggtgctcctacaaaagtttagaaatcctgacgaaggccagagagagccatactggtggtgaagacgtgtaggagaaagagcagcaggcaagcaagacatgaatgacgacaacaaatactatgcagttccagagaaccttctttcttttgatacaatagtttaaacttctggggaagtagcagcaracctaatgctctcttcttccactatctaaattgattttcccttcatgatagacttctttcaataacttgcatttcccatgatttctctcttaaggcttctgcatacaccatttcctctgcctaggaaattgctatctacttctgtgtaatttgtcttctaatctttcaaacgtatatttaattttgatgctactttccattaataagtcctcattgcctcactcaacttatttgtacctcaaggtttaagcatgtgtcttagatacttcatctattattttatacactttttgtaatatttactgtta

SEQ ID NO: 199507 - DNA, 592 bp, Homo sapiens
aggttataatgtaagcccagtgtggagattggaagattactgacatttgcagaaaagaaaaaaaaggtcattgccattcatcagttccaatcataatcagctattcaaaacaagaactcaaatcctgggctgggtataccacttctctgggacacaatggatttgtggttttagcattttttattgcccatttgttttgttgtttcttatattataatatagacagataaataaaatgtgatatayaaacacacacacacaaacatacacttatacacacaatggaatattattaatcagctttataaagaaaattcagacatacactacaacattaatgaaccttgaggacattaggctaaatgaaataagtcagtcacaaaaagacaaatacactataattccacttatctgaggtatctagagtagtcaaattcatagtgacagagagtagaatggtggttggccagggctgagggaagaggaagttgttgtttaataggcagagagtttccgttttgcacgatgaaagagtttcagtgattggttgggcaacaatatggatgtatttcatgccacagaactgtacatt

SEQ ID NO: 199508 - DNA, 606 bp, Homo sapiens
agtagaatggtggttggccagggctgagggaagaggaagttgttgtttaataggcagagagtttccgttttgcacgatgaaagagtttcrgtgattggttgggcaacaatatggatgtatttcatgccacagaactgtacatttaacaatagtcaaaatggtaaattttatgttgtgtgtattttactacaatgatacatattttaaaaggaatcaacaggccaaaaacttcagtaacattatcaattgacaacctctccaaacaatgtgtggaaaaataaggccacttgcctggcccccattctacagtctcttgggtcctggcatttttctgtcactctctcacatctgcattttaagccaccactacctagctctatcacttcacagttgatcgttttgcatttctggtaagagagtcctattgtctccagtcaactgggggcatgttttatcatcacatgcctcctattcctgtttccccaaactttgatagtcttaggtaattctatccttagagaatggattaccccacaaattactgtcaccatgtcccccagcatatctgaggttatatcacaattttaccctctggattagatccct

SEQ ID NO: 199509 - DNA, 566 bp, Homo sapiens
aaaaatcaactaaggtgaaattgagacctctattgttaacaaagcccaggaactaagagaagcttccagtgctgactataaaaattgtgggaactggatcaatgaagaaaggcccttttgaggcagttatctgaggtttctctcttaacccaaaacagacttccttctgctcctcagatgttgctcaagatctgatcagatgatatttctggakcagtagtagggccacacaatgatatttctcatttgccaaagccatttggaggtgtagtctaatggtcttttttgtttctgtatggaaaacacagaagctaggaggcaaagtttccttgtgggaataaattataagagtttctcatgtgattgagcttttgaaaaactaagaacagcaagaaggtaacattgtatttaacattatgactctgaaatcatactgcttgtgtacatattctagctctatcccttcctggttgtgtgacttctaccattgtctcattctctggtcttcagtcttccccactataaaatggggatgataattatagtatccacattaaaagattatt

SEQ ID NO: 199510 - DNA, 566 bp, Homo sapiens
aaaaatcaactaaggtgaaattgagacctctattgttaacaaagcccaggaactaagagaagcttccagtgctgactataaaaattgtgggaactggatcaatgaagaaaggcccttttgaggcagttatctgaggtttctctcttaacccaaaacagacttccttctgctcctcagatgttgctcaagatctgatcagatgatatttctggatcagtagtagggccacacaatgatatttctcatttgccaaagccatttggaggtgtagtctaatggtcttttttgtttctgtatggaaaacayagaagctaggaggcaaagtttccttgtgggaataaattataagagtttctcatgtgattgagcttttgaaaaactaagaacagcaagaaggtaacattgtatttaacattatgactctgaaatcatactgcttgtgtacatattctagctctatcccttcctggttgtgtgacttctaccattgtctcattctctggtcttcagtcttccccactataaaatggggatgataattatagtatccacattaaaagattatt

SEQ ID NO: 199511 - DNA, 566 bp, Homo sapiens
aaaaatcaactaaggtgaaattgagacctctattgttaacaaagcccaggaactaagagaagcttccagtgctgactataaaaattgtgggaactggatcaatgaagaaaggcccttttgaggcagttatctgaggtttctctcttaacccaaaacagacttccttctgctcctcagatgttgctcaagatctgatcagatgatatttctggatcagtagtagggccacacaatgatatttctcatttgccaaagccatttggaggtgtagtctaatggtcttttttgtttctgtatggaaaacacagaagcwaggaggcaaagtttccttgtgggaataaattataagagtttctcatgtgattgagcttttgaaaaactaagaacagcaagaaggtaacattgtatttaacattatgactctgaaatcatactgcttgtgtacatattctagctctatcccttcctggttgtgtgacttctaccattgtctcattctctggtcttcagtcttccccactataaaatggggatgataattatagtatccacattaaaagattatt

SEQ ID NO: 199512 - DNA, 625 bp, Homo sapiens
gaaatttaaaaatctataaacgaggacaaatggttcaaagtatcattgaaacactatctcctaaattgttggtaaaagcaactaactggaaaacaatctaattagcttgtgtaccaaagtcatcaatttccaatggagtgtaaactagttacccctgtttcstagctgcttgtaggagtttctattaaaatgaaagctggtaactagtttgaaatgtttctctatttcttgtaaaaagcaacatgtggaagacattttctcacttctgtatactagacagaaagggtaacctcacagccatgctgctgttcagaagttgccaactcctcatatctttgaatgtcttatcattattattaaataaatactttcttttcagacaattgtcattctccctgccaaaaagtgaaagagaactagcagtgtgaccttgagcaggtttgaattctctgagcgacaattttctcactcatgagatgaaaggaggttgaattaaattctcaaggtcccttctatatctcacttcaacactttctcaaattccaccaaatataaatatatttttcttccagtgggcattactcctcttcatgcactatagatgatagtcgtgccaatgtacaca

SEQ ID NO: 199513 - DNA, 625 bp, Homo sapiens
gaaatttaaaaatctataaacgaggacaaatggttcaaagtatcattgaaacactatctcctaaattgttggtaaaagcaactaactggaaaacaatctaattagcttgtgtaccaaagtcatcaatttccaatggagtgtaaactagttacccctgtttcctagctgcttgtaggagtttctattaaaatgaaagctggtaactagtttgaaatgtttctctatttcttgtaaaaagcaacatgtggaagacattttmtcacttctgtatactagacagaaagggtaacctcacagccatgctgctgttcagaagttgccaactcctcatatctttgaatgtcttatcattattattaaataaatactttcttttcagacaattgtcattctccctgccaaaaagtgaaagagaactagcagtgtgaccttgagcaggtttgaattctctgagcgacaattttctcactcatgagatgaaaggaggttgaattaaattctcaaggtcccttctatatctcacttcaacactttctcaaattccaccaaatataaatatatttttcttccagtgggcattactcctcttcatgcactatagatgatagtcgtgccaatgtacaca

SEQ ID NO: 199514 - DNA, 625 bp, Homo sapiens
gaaatttaaaaatctataaacgaggacaaatggttcaaagtatcattgaaacactatctcctaaattgttggtaaaagcaactaactggaaaacaatctaattagcttgtgtaccaaagtcatcaatttccaatggagtgtaaactagttacccctgtttcctagctgcttgtaggagtttctattaaaatgaaagctggtaactagtttgaaatgtttctctatttcttgtaaaaagcaacatgtggaagacattttctcacttctgtatactagacagaaagggtaacctcacagccatgstgctgttcagaagttgccaactcctcatatctttgaatgtcttatcattattattaaataaatactttcttttcagacaattgtcattctccctgccaaaaagtgaaagagaactagcagtgtgaccttgagcaggtttgaattctctgagcgacaattttctcactcatgagatgaaaggaggttgaattaaattctcaaggtcccttctatatctcacttcaacactttctcaaattccaccaaatataaatatatttttcttccagtgggcattactcctcttcatgcactatagatgatagtcgtgccaatgtacaca

SEQ ID NO: 199515 - DNA, 625 bp, Homo sapiens
gaaatttaaaaatctataaacgaggacaaatggttcaaagtatcattgaaacactatctcctaaattgttggtaaaagcaactaactggaaaacaatctaattagcttgtgtaccaaagtcatcaatttccaatggagtgtaaactagttacccctgtttcctagctgcttgtaggagtttctattaaaatgaaagctggtaactagtttgaaatgtttctctatttcttgtaaaaagcaacatgtggaagacattttctcacttctgtatactagacagaaagggtaacctcacagccatgctgctgttcagaagttgccaactcctcatatctttgaatgtcttatcattattattaaataaatactttcttttcagacaattgtcattctccctgccaaaaagtgaaagagaactagcagtgtgaccttgagcaggtttgaattctctgagcgacaattttctcactcatgagatgaaaggaggttgaattaaattctcaaggtcccttctatatctyacttcaacactttctcaaattccaccaaatataaatatatttttcttccagtgggcattactcctcttcatgcactatagatgatagtcgtgccaatgtacaca

SEQ ID NO: 199516 - DNA, 609 bp, Homo sapiens
ctttgaagcaaactacttccacatccttcagataatctagttaaatgctctaagacccagtcaatgcattagcagaaacggtagtgcctattgccatccatgttgaactcctaggttgaattttaaggaaagctgaggaaaatttcccatttgtgatggtagcagatagagcgaaaaggaagaggaacagggaaagcaaaaataatttaaatgaaaaaaagttgaaaagaataacckgttttctactttttattagaagtctctgttactcataattttttaacctgcaagactaaattgggatgaatttattcatattactcagtttcattcaggaaatactcttgtttatataacaaattctatacttttacgtgtgtaatttttaattatatttttctataaataatcttaaattttaaatgattttgttgctagaatttggaaaataacttttaaataaatttttggagcatattttattattgctttttaagcaacatgtagcaagatcttgttacttagaatacccacattttagtgaaaataaaatcactcaagtgctttgaggaaacaacataagaaataaataatgaaaccttcaaacaa

SEQ ID NO: 199517 - DNA, 609 bp, Homo sapiens
ctttgaagcaaactacttccacatccttcagataatctagttaaatgctctaagacccagtcaatgcattagcagaaacggtagtgcctattgccatccatgttgaactcctaggttgaattttaaggaaagctgaggaaaatttcccatttgtgatggtagcagatagagcgaaaaggaagaggaacagggaaagcaaaaataatttaaatgaaaaaaagttgaaaagaataaccggttttctactttttattagaagtctctgttactcataattttttaacctgcaagactaaattgggatgaatttattcatattactcagtttcattcaggaaatactcttgtttatataacaaattctatacttttacrtgtgtaatttttaattatatttttctataaataatcttaaattttaaatgattttgttgctagaatttggaaaataacttttaaataaatttttggagcatattttattattgctttttaagcaacatgtagcaagatcttgttacttagaatacccacattttagtgaaaataaaatcactcaagtgctttgaggaaacaacataagaaataaataatgaaaccttcaaacaa

SEQ ID NO: 199518 - DNA, 525 bp, Homo sapiens
acctggctcttctattcttcaaagatgtgataatgaaaaattatttaacctgagtctccattttcccatttatataatagtggkgatcttacaaggtggaagtcaattttggatgaggtcctatatgctaaaatgtaatcctgtgtttatatttaacataattacagtcataatagttattttttaattataacatagcaattgagccataaactaggttctattttgaaatgcattttgaataaagtatgcatatgctgtgtgtgattgacatacacagtgggttgggctggggagcaaattacagtcctcaggccaaatctgtctgcctcctgttttggaaataaagttttattggaaaacaggcacacccatttgtttgcatatgatgtatgactgtgttcaaactacagtggtagagtttgaatagttgcaacataaatcatatggccttcaaaaacctaaaatattaagattaggattaactgttaccaaataaaaatatttttctcaaaaagcaagttg

SEQ ID NO: 199519 - DNA, 406 bp, Homo sapiens
atcgtgagaacagcaaagggaaaatccacctccatgatccagtgactccccaccaagcctctcctcagcactgggggctataattcaacatgagatttgggtggggccataaatccagaccatatcaccagatmattaaaatgtctaatgggttcatcccatgagcttacccatgagtgatagggtaaactatttcaaagtatttcaaatcatggtctatgggacaatgtcatcagaatcacaagatgtttgttaaaacatcttggatctcatttatatgcggactctaaaaaagctgaacacatagaagcagaaagtagaatggtagttaccaggagcttggagaaggaggggactgggaagatgctgatcaaaggataaaaaatttcagttagaaattgaagag

SEQ ID NO: 199520 - DNA, 347 bp, Homo sapiens
ttatattatcattcaaagaggcgagtagatgagcccatgattgacaactacagttttcaacatttacaattccctcttcagggatattcasaatcgattgaaaaagaatgcagtgtttaggaactactcaggggtactttcagtaaaaatgccttaaataatgattgcccaaagcttgccagacactttgtaaatgtcagaaacacattaaatatgttaaatgggcatgttcaatatctagaaaacaacacaaatgatttacaatcaatttcacacatgccctggatgcctccctgatggaaaacaaagacatcctctttgactggggcacatgattccaagtgttc

SEQ ID NO: 199521 - DNA, 573 bp, Homo sapiens
aagcttgagaggtcaagcaacttgcccaagaaaaactagtaacaggtggactctctcagacactgtatgatatggcttccctttttaaatggttacatattatttcattgtttgcatgcctcattatccccacctccaaggtagactgattgtctttcccccataccgcaaatctatggtctactctccttccccatccctgcagctgctcacagccctcagatggagtttttgctggtgaataaatgctgcccttcctttaaaataaaactygtagccttcaggatgacagagcctatggcatgtattagtgataccttgctggttcttaggtaaacatgtagcataatggagaagatgataatccttctatgaccatttttgtaaactgttgtcaccaattgagtgatctgaattgattttctgtttccagacctcagtctacctaagaagtttaatcccacctaaagcaataatcatccaacttgatttagaattaatcaggtattatcttctatcaaggctatggccaatctgccactttttgtcctgggtctcaccactataacaaaa

SEQ ID NO: 199522 - DNA, 573 bp, Homo sapiens
aagcttgagaggtcaagcaacttgcccaagaaaaactagtaacaggtggactctctcagacactgtatgatatggcttccctttttaaatggttacatattatttcattgtttgcatgcctcattatccccacctccaaggtagactgattgtctttcccccataccgcaaatctatggtctactctccttccccatccctgcagctgctcacagccctcagatggagtttttgctggtgaataaatgctgcccttcctttaaaataaaactcgtagccttcaggatgacagagcctatggcatgtattagtgataccttgctggttcttaggtaaacatgtagcataatggagaagatgataatccttctatgaccatttttgtaaactgttgtcaccaattgagtgatctgaattgattttctgtttccagacctcagtctacctaagaagtttaatcccacctaaagcaataatcatccaacttgatttagaattaatcaggtattatcttctrtcaaggctatggccaatctgccactttttgtcctgggtctcaccactataacaaaa

SEQ ID NO: 199523 - DNA, 605 bp, Homo sapiens
gaatttacacaaggtaaatacacccatgtatccagcactcagatgaagaaacagaacatgatcaacatctcagagacccccatgtgtctcctttcaactgcttcattcccccaaggatatctatcctgacttcaactgctgcattcccccaagggtatctatcctgacttctaacaccatatattagttttgattctttttgaactataaattatacaacacaattatatgttttatatatatagtatatactcttttatatattttaacataatttgtttatgagattcatccatattgttgcatataayagttatttcttttccttctcattactatatagaattccacagaatgagtgtatattttaaaaatttactctacttttgatgggcattcaagtagattccagcttgggactattataaatagtgcttttaaaaaaaaattcttttttgagatggagttttgcttttgtcgcccaggctggagtgcagtggtgcaatctcagctaactgcaacctccacctcccaggtttaagtgattctcttgcctcagcctcccaagtagcggggattataggcatgtgccaacatgcttggct

SEQ ID NO: 199524 - DNA, 594 bp, Homo sapiens
ctccaaaagtagtggggccaggtttcaacctgtgctatggtacacagatgtaccatgaccctttcaaagggatcaaagtatgatcaagaatgcaagttattcctgctaaaagtgaggagggtatctactcagaaacaagtttataagaaaaggttgtcagattgtaacatttgtgggcatgcagaatggtaagaacagagtgtgtcttgttgcgagtaggggtgagaagtatggcagcctattaagcagacaccaaagatcaaagcatgtttgctgaaatgtgcaagagctacctcctgagtatgtaaaactgcagccaggtcagtaaattgttctactcaaacagggacaaggtttcggaggataatcaagtggataataataagtaactgtggagagagaaacattttacacttttcaagtgttcaaccaaacacaaaaagttacaaactactgtcctgggaatagtcacatatgatgcaagctgtattcttcyaaagtctttagctttttatcttttaacagcttctcttacactcactggcattgtgagcatggttgtaaccttataatcacattatgcaagtttaaggg

SEQ ID NO: 199525 - DNA, 594 bp, Homo sapiens
ctccaaaagtagtggggccaggtttcaacctgtgctatggtacacagatgtaccatgaccctttcaaagggatcaaagtatgatcaagaatgcaagttattcctgctaaaagtgaggagggtatctactcagaaacaagtttataagaaaaggttgtcagattgtaacatttgtgggcatgcagaatggtaagaacagagtgtgtcttgttgcgagtaggggtgagaagtatggcagcctattaagcagacaccaaagatcaaagcatgtttgctgaaatgtgcaagagctacctcctgagtatgtaaaactgcagccaggtcagtaaattgttctactcaaacagggacaaggtttcggaggataatcaagtggataataataagtaactgtggagagagaaacattttacacttttcaagtgttcaaccaaacacaaaaagttacaaactactgtcctgggaatagtcacatatgatgcaagctgtattcttccaaagtctttagctttttatcttttaacagcttctcttacactcaytggcattgtgagcatggttgtaaccttataatcacattatgcaagtttaaggg

SEQ ID NO: 199526 - DNA, 581 bp, Homo sapiens
tttgcttcccacaatatagaactgagatgcttccaaaatattactctaaaaaatagtaggaattcacttaamagtagaaactattttttcaacacaaagaataatgagccttttaaagtaatgtacttttaaaagaaaatagatgctggtattattagctgtctgcaattttctctacctgccacaaaaaatacagatacagtcctattaccatcttgcatatgtactgattgaagttcatgcaatggcctgtggaaggtccagggccaagagaattggctaataattcttacttcattctgtgctcctgacacaatataaagagcatgttatcttacttaatcagcacaacattgctgctaggtgggttttattccttcattttatgagaaaagagggtaaaagagttctgggtggttttttgctggttttttgtttgtttgtttgtttgtttgtttgtttgtttgtttgtttttaatgtccaggaccttataactactaagtgactaaaagtaggatttaagttaacaaaaaaaaacctgtttcttctggtgtcagaactcatgatcttgattacgttg

SEQ ID NO: 199527 - DNA, 614 bp, Homo sapiens
aaagaaaaaaatgaagaattactttaatttttatcctttctttgttaggtttatacagatacatttcttttgtaaaaatttttaattgataaataattacggggtacaatgtgatgttttgatgtatatttctattatggaatatatgcatacttttatattcacaacagattatatatattactttgattaaagagtatattttttctacaaaattaattttttagaaaaaataattcattcaaaattagtttattcacttgaaattagtaggaaacgactgtatgagcttgttaccacatattccattgcctttaaggaccaggcaggaacatcaacctgtcagagcctagtgcaataataagaaagagtgagccttgtgggaaactggagtgtcccatttaaaggcatgcaaagtcaattttttcaatactctgctgacctcaggaacaggtctgagaatggtttttgccagtgggctggaaactggcaactgctkctctaaactagaaaacaaacaaacaaacagaaagatgacaacatctgctattagatagatacatatgatgactgaattccagctgtctttattaggaggaacaaacgtagacacc

SEQ ID NO: 199528 - DNA, 545 bp, Homo sapiens
gaagcttcaatcattctataaaaataaaagcactgaaagaactgcttctaattgctccataacaatgaaagtgcaatcatctttatgatgtagaaaaaaaaggggcaggtattgcccaatgaactgggtgtttctgtaagtatccacatggttggttttacttccctctcacccagatattttgcatcttataagaatgcccttggaatataacttgtgttcatgtyagttaagagtttgcctatgcttgatgaatgatgagccctgaagacagcccaggctgaccttctggctatgccatgactggctatgtgatttttgagtcagtcaccaaatttcgctgatcctcagtttcctggcgaataaaatggaaataatgggaggacataccttatagggttagagttagaattaaataagtgtatagacttagagtagttgggacagtagcacataatagccttaaaaaatggtaaacattatttttattattattactggtattaattatgttccattatttttacaactttgagatcgatact

SEQ ID NO: 199529 - DNA, 572 bp, Homo sapiens
tttcctgtaaactatgcctataccatttctggttagtgttttgcactcatggactttgcaggacttttatcttttactgtctttaatgatacttagcactctcagcattttgatatctctccattatcatctggcatctattatttctgatgagaagtttgctatcagaccaaatacctttttttgtatggkttactcatcctttctattagcttctaaaataatttcttttacatagtctcatagtttaacttagctgtatctaaatttatttttgtttttattcctattttcttattcgctgtccttgatgctttgagtccacttttgatcttaggatacttggaaagttcagatttcttcaaatatttattctgcaccatttcctctattctgttctttaggaactatcacatgataaaaggtagttctgcagagcccacagtctattttccattgcttcattatatccccttctctcactttttttttttttaaatcttgcatgctatattccaggtcaatccctcttttatgtcactgacttattcttcaactttgtccactaccaa

SEQ ID NO: 199530 - DNA, 572 bp, Homo sapiens
tttcctgtaaactatgcctataccatttctggttagtgttttgcactcatggactttgcaggacttttatcttttactgtctttaatgatacttagcactctcagcattttgatatctctccattatcatctggcatctattatttctgatgagaagtttgctatcagaccaaatacctttttttgtatgggttactcatcctttctattagcytctaaaataatttcttttacatagtctcatagtttaacttagctgtatctaaatttatttttgtttttattcctattttcttattcgctgtccttgatgctttgagtccacttttgatcttaggatacttggaaagttcagatttcttcaaatatttattctgcaccatttcctctattctgttctttaggaactatcacatgataaaaggtagttctgcagagcccacagtctattttccattgcttcattatatccccttctctcactttttttttttttaaatcttgcatgctatattccaggtcaatccctcttttatgtcactgacttattcttcaactttgtccactaccaa

SEQ ID NO: 199531 - DNA, 605 bp, Homo sapiens
ctgccatgccttcctctcatgatgtagctgggaaatgtacaactcagggctgctaatgcatggaataaatggacagtcttgctaactcctattatcatcattgtgtctagagtctatgtcagttcaaaactaaaatgtcctcctttgcatccacagcactttaaataacccaacagcatctgcatttatataatgcccatctgcaggatatgatatcatcttgacaaatattccatatttctatcttttctgtgtgtgtatggctcagaaaaactgaagggttacacaagaagaacttttttgggttttatgcatgtccaaaagttgtagtcctcactgatagtaaaggtcatgtaacttggagaaaacatgggcaaaaatggatccatgtagatcagaaatgattagtcagctccattttctttcctaccacaccattttacatcattaatttgaaatgcaagggactggaaagaattgacttctatttaatgaggtttgatttattcaaccttgtgttattagtgaaaatagaataacttgttagctggaaaatacatktaaaataatgcacttctctgaataaattatcagattgatgagta

SEQ ID NO: 199532 - DNA, 554 bp, Homo sapiens
cctgctcacattgttttcttgagagcagagagatgtcaattggcttggtcctcttttatatgcaattagatacagctatcatatattaccttgtgacagatatgcattgtctcattcaatattaagtagggatccacatgtagccatccacagtcgtagacctggatatatcttgtttctacttggagaaattcaatgaatggcaacatggatttacaaatcaatattaagaggtaattattctgcttacaaataaatttgtcagcttccacatctgttagcaggtcrgagattatttgagttcacattagagtgaaatacatagaaaagaaacttaaagtttgtatattatagaagatcattaggaaatgccttcctttgactctagagccaaaggactaatctaacaatcaatgtcatcaataactttctctacagtatttaatgtcaattattgattcccagaaaagcaaaccctgttcaaaatgtgttattttgatttataagcaattcattcaccatattattctccctgacccgcagtaagcaaatag

SEQ ID NO: 199533 - DNA, 621 bp, Homo sapiens
ttatttattttctttttcgcaactattactcttgagtgaagagtataagaacattcacactgattgttttcgctaggaaagggatctgtgaaayatatccataaaataatatctggctaagcctgggacccactaaaactctatggttctcaaatgaaagctaatctgaattgttaataattcagtttatatatttagtgaagtgtaataccaacacaggtagcactagcttcctattatggacgtcttcagagacagcaaacatacctctaataacattgtagtaaattcagattttatgataagaaatagattacagtttatcacataaaataaagaatggaatatactgggctttatttagctaaaataattaaaatctagaattaagtgtgtctcatcttttttcatatggacagaaagtcaatcacaagcgactggtatgaagcatggtggaggtaatttgagtttcatttctgaatatctcatctgcttcaaacagcatttattagatcaaaaaagaacagcgccccccctcaccacccgtccttcccccaaaaaactttaacatcttagatgaaagcttatttttcttttggatcatacctaccaatgccccaa

SEQ ID NO: 199534 - DNA, 597 bp, Homo sapiens
caactacactctgctttccaatcacaccaaatttttgcagatgtccctaataccaagctttcttaagtgtcggagactttgcatgtgtttcgtcttttacctggatgcccttactctatatcatctagcaagttgctgagttgtttatgtgaatatgtgtgttgcatactttgagtcctcagtaaactgaaaatttctcccaggacagtgctagctacatagtcatgggatatcaccattaaaaaaatactactcctagttcaggatgtgtgcaaaaccaagggatgcctgagaaaaatgtaatgaatgtgaacttagcatgtatttcgtgtggaggtcctagaatcccttcagtaatgtctctgtggctcatgagtgattatttggttaacacttcatataagcctttcagtgggcaattttacatttgctggcatctctaccaatgagcamacaatggaaatgacattccaaaaagctattttggtcacctactgtaagctctaatcagataaatgttagaaggagtaattaaattgaagtctctatatggtctgttttatgtagggaagggagagatgcacgtagtcacgtcta

SEQ ID NO: 199535 - DNA, 594 bp, Homo sapiens
tttctgtggctccttctccagtcatgattgcctaatactcctggaattaaccctcaaacatgattgcttcctttgcttcttccaggaatgcacgattgaatacttaataatgagatgaggacacagggaaccatgggatgtttttcaaaatttgtcccaacgttctgagagtctttttgctgtttataggtgtggaatgtgagtgggggtgtgtgggggaatctatcagattaaatgtgcctaatggtcaccaaatgtcatggygtaacagtttaagcacagggctataaagtcacaaagctttattgccttgtcaaaccatttgcagtgctaaatctggcaattattattaaaggaaacaatttaaaaattcaagttttcatattattaccaagaaaaaaaatcactgtgtttagtgtcggtgccctaaagatacatttttggagtctctgcgtaaacttcacattaactatataatatttgcaatttaaatttcacagaattggaatttggatatgtgaaagcccgggaacacatatttgcaaatacacacttgcaaatgtcccaagatatgagtgaggcattgaaatgtat

SEQ ID NO: 199536 - DNA, 644 bp, Homo sapiens
tccttgtctttgcatatgctttctcccaagcctgggatctcctttctggtctgttggatgaactgccactcatcctttaagacccagatacattggctatctgctttttctagcaatttattaggccctttacattaaatatttcaaattcttgttattaaggtgtaatcacttgctaatttgttaattcaaattaataacaactaagtttgttagttgtattaaaatagaaactttccaacaaatgtcaaacacaaattttgaacaaatcaatatgtattacatttttaactttagcatgtattaaaatcttaatatatattaaatacagcatatactaaaattgatttttatatttttgccattatttttttctcttcctcttacccatgagccagttgaacaaaataaaagaaagcagaacaaaatagctaagacaaacacttgcctccatgagtttaacrtctaaacagatgtttatatttttaatctctgttacaactttctacactacagtttttctcatatttcaaatgcgtcctgtattaatttatgtgaagctctgttaaatctaattaaaatgttgccatattttgtattatgcatttttatataatttctttatatctaggccaggcatggtg

SEQ ID NO: 199537 - DNA, 580 bp, Homo sapiens
aagcttcttagggccccttttataaggacactaattccagtcatgagggctatgccttcatgacctaatcacctcccaaattctccacctcttaatattgttgtattagggattaggttttaacataggaatatgaagtggtggaggacacaaacaaaccataatagtgttcatttttatcaatgacctcttctgyagttggaaacagaatgagaaagagagaaatgtctctgctattgataatccctaggtcaaaatctgcaagagttccagctgaggaatgagaaaaatgtctcctaaggtaggagggaggtcaggtggtcacagtcaccccaaatgtgttgttcatgtttatattttccattttgaaggtagatggaatgctcggcgcaagatggcaacttttcctagttgagctctaggctttagagaagctgctgataaaaatcattggttttgatcaatattttgtgaactaccctatgacctcatgacatttgttatcactttacaaagcaaccccaagtttacaatgtgccccaaagttttgtctgtataggcaaaactttgtattccactt

SEQ ID NO: 199538 - DNA, 573 bp, Homo sapiens
gatgaaaggatttttattttaaaatatattcacaggtgtattgaaactaacaatatttttatttttccaaccctcttttgagtgaatcagggctaaataaaatgcttcaaaacgaatgagtagcaagaacaatgaatggctatctgataggtcttggtaaagcctagttggtatacttcccagaaatcaaggcagtgaatgactgtaatgactgggtgacaaagacttttgcaagagaggttgtatatatttcttttctttcggtaaaactgaaggagtatctattcaagttgttasatgtagagcactaaaaataatttttgatgatatattaggatgtgatattttggcatatagctcacaggactaccaagaattgagatggcatgctgttaggaaaccttaatttccatctctctatttgtgtgaacaaattttttcagttctaataacaataaatgagaaaataaatataattgatatggaactgtttcattctggcaataaagttcatctgtaaacacacaaattaattaaaaatgaagccagacacatccatgtcattaagaaata

SEQ ID NO: 199539 - DNA, 529 bp, Homo sapiens
gcttcctgatgcaattattttacattaagatacaaatattcctaacayagaagctcagttcccaaatgctcattgtttagaaaacaaaatacacattgagctctaataaaaatgcttccctccctcgttcttttatcattcttttccagcagaatccaatgaacatgattaatatacaatttagtggggatttggccacagtccaaatatacactaaccagggggaaccagggacatgatactgtgctgactccacagaaatcccctttgctcctattaagaagagttgaataaggagttaaggatgagcagctacattttttccagatgtattaggaaatagcatgttcgtgaatacaaatacacctggaagtggtcacctatgaaggtcttaaagactacattcatgtgcagccttgactaaaggcagactaatgaaccagatgactatgattgttggcattcttcaaaagccatcatagccagcagtttgaggcttacaatgtgctgtctaagtgctttccaaaca

SEQ ID NO: 199540 - DNA, 529 bp, Homo sapiens
gtctgatttttgaagtggtatatagagctttaacagggttaaataacctgattttgactttttttttcctaagagactaaaggttttgagagtatttacaatatccatgtatatatatttaaaatacagtttataaaatattcttatccaatatatttgctgcaatttggaaaaatattgtgagcattttacttgtggtattctggaatttcactactattgcaattgcccctgatcaaaacaaatatttcactcccatttatcaaagaactgcatttcacccaatgttgtacaggagttagctgaaaaattaactagacgctaagtcttccttccaacaaaacactccattataggacatttgatcttctgctatggttggtcatcttacagctacaagaaattaatctgtgatggaatattttgaaattgtttccaaatagaaaaagaaattaaaaaaaaattgggraatcaactttattaggttctcaacactgcctgccagctcaatcttcttttttctttataa

SEQ ID NO: 199541 - DNA, 405 bp, Homo sapiens
ttttccttttttaaaagcacagttttattcatttttcccatcaacacttggaaatgtggcttctgaaagataacgaggcatggtccgtagcatgccataacctctctttttctccccgctcactgctaactcttttgtttgtacaatattcttttattctgagcartataacgttttagttctcataataaatgccttcatgtgaagcagttcagctaagagaatgttattagactgtgctcccaggcagcacacctcctcacgatcaatacaaagctgggcctcagctcattccctctttgcttaaattccctgcaaatgtgcaagagaagcagcagtgggtgtcatcaatcacaggccactgtgacatatgctgaaacctgaccagggccgagatgttttaat

SEQ ID NO: 199542 - DNA, 482 bp, Homo sapiens
tctgggtaatttatcttataacattagtgggtaaracagagacctctatatagttctttgaagaagcagctcattcaaagatggactggaattgtcacatatcactcttacaagttttttcttgtacatcaattttcttctgggaagtgaatctacagtaatagcagcattgtttgtcaatgtcctcctgtgattgttagcaatgcatccttgcacgtattgtttcagacaaaaaattagtattttgcattacaagaggataattaggcaataagatacaaaagcgagtgtggttatcatgagataaacacacacatggggtgttatgaagcacagccaagtgtctgtaatccctctagggtacgattatctcatgataaccacataccctggagttgccttattgctattataaaatatctttattataggaagaaatgtgcatttttgtgcagaaaggcgacagagctggcaatttagaa

SEQ ID NO: 199543 - DNA, 482 bp, Homo sapiens
tctgggtaatttatcttataacattagtgggtaagacagagacctctatatagttctttgaagaagcagctcattcaaagatggactggaattgtcacatatcactcttacaagttttttcttgtacatcaattttcttctgggaagtgaatctacagtaatagcagcattgtttgtcaatgtcctcctgtgattgttagcaatgcatccttgcacgtattgtttcagacaaaaaattagtattttgcattasaagaggataattaggcaataagatacaaaagcgagtgtggttatcatgagataaacacacacatggggtgttatgaagcacagccaagtgtctgtaatccctctagggtacgattatctcatgataaccacataccctggagttgccttattgctattataaaatatctttattataggaagaaatgtgcatttttgtgcagaaaggcgacagagctggcaatttagaa

SEQ ID NO: 199544 - DNA, 482 bp, Homo sapiens
tctgggtaatttatcttataacattagtgggtaagacagagacctctatatagttctttgaagaagcagctcattcaaagatggactggaattgtcacatatcactcttacaagttttttcttgtacatcaattttcttctgggaagtgaatctacagtaatagcagcattgtttgtcaatgtcctcctgtgattgttagcaatgcatccttgcacgtattgtttcagacaaaaaattagtattttgcattacragaggataattaggcaataagatacaaaagcgagtgtggttatcatgagataaacacacacatggggtgttatgaagcacagccaagtgtctgtaatccctctagggtacgattatctcatgataaccacataccctggagttgccttattgctattataaaatatctttattataggaagaaatgtgcatttttgtgcagaaaggcgacagagctggcaatttagaa

SEQ ID NO: 199545 - DNA, 482 bp, Homo sapiens
tctgggtaatttatcttataacattagtgggtaagacagagacctctatatagttctttgaagaagcagctcattcaaagatggactggaattgtcacatatcactcttacaagttttttcttgtacatcaattttcttctgggaagtgaatctacagtaatagcagcattgtttgtcaatgtcctcctgtgattgttagcaatgcatccttgcacgtattgtttcagacaaaaaattagtattttgcattacaagaggataattaggcaataagatacaaaagcgagtgtggttatcatgagataaacacacacatggggtgttatgaagcacagccaagtgtctgtaatccctctagggtacgattatctcrtgataaccacataccctggagttgccttattgctattataaaatatctttattataggaagaaatgtgcatttttgtgcagaaaggcgacagagctggcaatttagaa

SEQ ID NO: 199546 - DNA, 432 bp, Homo sapiens
atttacatgttactttctttcatgtccattcattttctctaataatcatatattactcctcaaaagaattgcttacagtttccatctccctgctcccctatgaagaagggtrtataagcatctaaaccttgttgggttactgggatatcagtcttctgtaattctcccatgctaatgcactttaattaaattgcatgctttttttccctgctaatttgtctattttcaattcatttcaacagacttagactaaaaccttcagagggaaaatttgagtttttctacaccttcaataattctccatggcttaccaaattaaacgcaggttcttcatgcaggccttcagaatcctcagctttacatcctcgaccagactaacttcccactgtttttttcagctcgtaactgacattccttccttactgcatgatc

SEQ ID NO: 199547 - DNA, 261 bp, Homo sapiens
ttattaacaaaatcataaagaggaggaggaggaggaggaggaggaggggttggtcttcctgtctcaggggtggcagaagcacaggaaaatctgagtataaatggaccttcacacctgtgttgttcaagggtcaactgtatttatcatgtacaacatgttttgaartatgtataaattgtggaatggctaacaaaaagtcattttagacacagtatattgttacctaattcagataatcaatccagatttcaaaagagaaag

SEQ ID NO: 199548 - DNA, 505 bp, Homo sapiens
aatttttgtaaaatataacaataatgtattttgagtttaaaatacatagaaaattaaaattcacaacaatagtgcaaacagtgtgagggcattacagtggagttataaagtacctgtttcccataattggtataagcaataattaatatcagactttgatcacccatagatgcatgctgtaatctctagggaaaccattagaacaatggtgtaagaatgtataactaataagctagtggaggraaaataatatacatatcaattcatgtgattattaatacctctgtaagtgtatatgcttcttcagccgtgcactctgcctgtgctgtaggattacttaatgcaaatattacaggcctttcattgatagaggccatggctctgattacatcaggagtgaaaagacggccagcacctgcaactcctgtaataagtaagggggaaaaacagcaacttcattataggtataaaagcaatgcttatcaatagcatttctacaataggc

SEQ ID NO: 199549 - DNA, 533 bp, Homo sapiens
atcctttaacagattctgaagaggttgatttaactctcaaractaaatacagattgagcacctttaaactgaaaatccaaagtttggtattctccaaaatttgaaacattttgaatgtctacatgacggcacaggtagaaaattctacatctgatacctttgttttctgatgattcaatgttcaaaaaccatgttcatgcataaagtaattaaaatattgtacaaaattaccttcaggctatgtatataaggtgtacataaaaacataaatgaatttcttctttagacttggccttatccccatatctcattttgtatatgcaaatattctaaaatataacaaaatccaaaatgcttctagtccccaacatttcagataaatgatactcaacctgtataatttgtattcacttttgaaatgggctttcactttaattttgaaaatgactaagacattcaggaaaacatgacttttgcaatttgtcgactgaactgtggagtgattatcttattgctcactccccccacagcaa

SEQ ID NO: 199550 - DNA, 414 bp, Homo sapiens
tttactatggtttaagttggaagtattttacttttttgtaaagtacagtattcacattgttgtcaaactaataagtgtattatttatacataacataataagtgttagccaaccactttatttcatacataagaaaatcaatgctcagaggcagacagcaaaaagtgtctgagtayggtgtgccttcaccctttcatcattttgcttgatgttgtttcatctctcttgtaaatgaaacgaccttgatttcttttttactccctcttatcttttaatagaatacttttttctgatcaatttaaaacaatgcttctcaacatttaatgtttatataaattacctgtggcattgataaaatacagattctggttctgtaggtctgggaagggatctgacatttgtgattggtgattt

SEQ ID NO: 199551 - DNA, 628 bp, Homo sapiens
accatcattttactcactatcttaatgagtcaaatctcacaccatacacaaggataaaaaccgaagagttaaaggttttagatgtaaaaaaaaatcatacatattttaggagaaaatatatgaattcttctttatcctgagtgtgaaaatgctttttaactgtgagtcaaaatatagatgtataaaatatcgaaaaatcttcattaatgataataaaatatatgccaaatatttgaaaagaaataaaagaaaaytgatactaagagaatatcaaaaaaatggaagggaatatttgccaaaaaaaaaaaaaaattatccggaacacataaaggactctgaaaacataatagtaggaaaaccaataacgcaatttttttagagggttaaagatttgaagagatccttcacctaatgggatacacagagagcaattaaccatatcaaacatgttcaacaagcttaattataagaggaaaataaattaaaccctaatgggatactagtacaaacctattagaatggttaaaatgaaaaacactgatactgtcaagtgtgtatgaggatgcagctccactggacctttcatgaattgctgttgggtatgcaatttggtataaccactttggaa

SEQ ID NO: 199552 - DNA, 628 bp, Homo sapiens
accatcattttactcactatcttaatgagtcaaatctcacaccatacacaaggataaaaaccgaagagttaaaggttttagatgtaaaaaaaaatcatacatattttaggagaaaatatatgaattcttctttatcctgagtgtgaaaatgctttttaactgtgagtcaaaatatagatgtataaaatatcgaaaaatcttcattaatgataataaaatatatgccaaatatttgaaaagaaataaaagaaaattgatactaagagaatatcaaaaaaatggaagggaatatttgccaaaaaaaaaaaaaaattatccggaacacataaaggactctgaaaacataatagtaggaaaaccaataacscaatttttttagagggttaaagatttgaagagatccttcacctaatgggatacacagagagcaattaaccatatcaaacatgttcaacaagcttaattataagaggaaaataaattaaaccctaatgggatactagtacaaacctattagaatggttaaaatgaaaaacactgatactgtcaagtgtgtatgaggatgcagctccactggacctttcatgaattgctgttgggtatgcaatttggtataaccactttggaa

SEQ ID NO: 199553 - DNA, 628 bp, Homo sapiens
accatcattttactcactatcttaatgagtcaaatctcacaccatacacaaggataaaaaccgaagagttaaaggttttagatgtaaaaaaaaatcatacatattttaggagaaaatatatgaattcttctttatcctgagtgtgaaaatgctttttaactgtgagtcaaaatatagatgtataaaatatcgaaaaatcttcattaatgataataaaatatatgccaaatatttgaaaagaaataaaagaaaattgatactaagagaatatcaaaaaaatggaagggaatatttgccaaaaaaaaaaaaaaattatccggaacacataaaggactctgaaaacataatagtaggaaaaccaataacgcaatttttttagagggttaaagatttgaagagatccttcacctaatgggatacacagagagcaattaaccatatcaaacatgttcaacaagcttaattataagaggaaaataaattaaaccctaatgggatactagtacaaacctattagaatggttaaaatgaaaaacactgatacwgtcaagtgtgtatgaggatgcagctccactggacctttcatgaattgctgttgggtatgcaatttggtataaccactttggaa

SEQ ID NO: 199554 - DNA, 628 bp, Homo sapiens
accatcattttactcactatcttaatgagtcaaatctcacaccatacacaaggataaaaaccgaagagttaaaggttttagatgtaaaaaaaaatcatacatattttaggagaaaatatatgaattcttctttatcctgagtgtgaaaatgctttttaactgtgagtcaaaatatagatgtataaaatatcgaaaaatcttcattaatgataataaaatatatgccaaatatttgaaaagaaataaaagaaaattgatactaagagaatatcaaaaaaatggaagggaatatttgccaaaaaaaaaaaaaaattatccggaacacataaaggactctgaaaacataatagtaggaaaaccaataacgcaatttttttagagggttaaagatttgaagagatccttcacctaatgggatacacagagagcaattaaccatatcaaacatgttcaacaagcttaattataagaggaaaataaattaaaccctaatgggatactagtacaaacctattagaatggttaaaatgaaaaacactgatactgtcaagtgtgtatgaggaygcagctccactggacctttcatgaattgctgttgggtatgcaatttggtataaccactttggaa

SEQ ID NO: 199555 - DNA, 441 bp, Homo sapiens
gtgtgaggcttttctaatttctagtggaaacaccagcttgtctttgccactgacacaacttaagacacgtttggcaaaaaaacataaacatattatgtctcttgtgtgtaattgccaccatttcctcgctggccaaataccactaattgtgcctctcaagtgtattattttggcattagctcattaaatttttatttaagtttacaaattagagccaaaaattcacaactttcagtttttaagagacaagactccaaactctgcctcgtaaaactctaagatttctgagagaacaactggtcttctcaggtgatastttataagggcctgacatggcatctaacaaatgacgggcagttcttgaaagacttgacttttttcaggaattatcgcagaaccaaccacacatttattggagccattgtgctattttttagacca

SEQ ID NO: 199556 - DNA, 589 bp, Homo sapiens
tcacatggtagttcagcttttagttctttaagaaatctgcaaactgttttctacagtgactgaactaattcacattccccccaacagtgtacaagaatttccttttctccacagccccatygacagctgtaattttttgactttttaaccgaaagccattctgactggtatgagattgtatctcattatggttttgatttgcatttccctgatgattagagatgattagcatctttttatatgtttgatggctgtttgtctgtcttcttttcaatagtgtctgttcatgttctttggccattttttaatggggttattgatttttttgcttgttgacttaagttccttataaattgtggatattagtcctttgttggatgcatagtttgtgaatatttctcccattcagtgggttgtctgttgtattagtctgttctcacactgttaataagtacatccaagacagtaatttttaaaggaaagaggtttaattgactcacagttccacatggctggggaggcctcacaatcaaggcagtaggcaaaggagaagcaaagccatgtcttccatggtggcaggcaagagagc

SEQ ID NO: 199557 - DNA, 445 bp, Homo sapiens
aattcaggctcttcggtggccagaggggtagggccaaggcagtagcactgggggccctcctttcattttctaattctttttgtttcttctagcccatttctttttttcctgttccaagttgttcttcaggtgttgtgtagaaagtgaaaattactggtgggagtcaggactctctgggattaatagaaagctgggccccagtggaaaatatgrgagcagcactttgggtttttttgaagacagtagaaatgtagacttgttatggaattttctgcaaaacctcaagaggttttaggcactataggaaagtacggactttgaaatcagctggacctggctaccagttatgaactgtatatcacagtccagttaatttattggactctcagtttccttatatgtgaaatagatgtaacctagtcatagaattattgtgagagttaaa

SEQ ID NO: 199558 - DNA, 464 bp, Homo sapiens
gtggccagaggggtagggccaaggcagtagcactgggggccctcctttcattttctaattctttttgtttcttctagcccatttctttttttcctgttccaagttgttcttcaggtgttgtgtagaaagtgaaaattactggtgggagtcaggactctctgggattaatagaaagctgggccccagtggaaaatatgagagcagcactttgggtttttttgaagacagtagaaatgtagacttgttatggaattttctgcaaaacctcaagaggttttaggcactatagkaaagtacggactttgaaatcagctggacctggctaccagttatgaactgtatatcacagtccagttaatttattggactctcagtttccttatatgtgaaatagatgtaacctagtcatagaattattgtgagagttaaatgaaatggtatgtacgatgtgcttcacagaattc

SEQ ID NO: 199559 - DNA, 619 bp, Homo sapiens
gcacggaaacctatcatagagcaaacacacaatgacatcttcctgggggcttgagacaattcatttcttttctctcattaacagcagagaggttattagttcttcctttttctcataagagaaatctgagatctgacaaacatcaccaattttcttctgatcacacagcaaatcacttgtaagaataataataaaagcaacttgtatatttagcaacagcttgcgtattttaccttattctctcttcatacaaatcctctaaggtctactcaggaaacgtaattgtctccatactatgtggcaggtcgggggcggggaatggaggctcagggaagtgatgtgactagtccagggtcatatctggtaagtggcagagtcaggaccaataccacgttcttcttacttttgatctttacttcttcccagagatcccaacctttgagggtttagttatcttgaaattacttgatattactggtctcacctacagaaataattaacaattattttcaggtgaggcataggcagattcaacaccacactccaggccatagcatccccatccttgaagagattcttgccmtctgctttagcagcagattctgagaacagcatacct

SEQ ID NO: 199560 - DNA, 622 bp, Homo sapiens
gtaaggcatggttgcttagcaagtcgctggtgagcaacagctgttggttagacatacttgtttctgcatctctctgatggagcacctgctggccccaggcaccgcctgtctgctcatgtcctttgttccttctcaactcaatgttcttatgatcatatgtcaggagaaaggctgatgtgggagagcaagagagtgagagagctagagaatgagaaatggaggctcacactcacacacactgtgtaacacagaattcagctagtgtggttcttccaccttgttgcactgtttcctaaatttgtctctttccccttgcttttccctggtttttgttattgattcaataaaccatttggtttgagcatcttgaatyggtccacaagcatttctgctcaatagccttcctaccagtgcagtaggaggctaccattgcactggtgtaatttctcagtggcaagtccactttaactccatcctttgagcacatgtaggttctgtcccagtggtaatttaatgtgcaggatagaaatgaggtagcttggcccctgaagcacatagaggaaacctcagggaggtgaaagagcgaatattgggctctctgtaccaagtttgtttgtgcaat

SEQ ID NO: 199561 - DNA, 532 bp, Homo sapiens
tggggtctggatcaggacccctttcctatgacatatttctggtgaccacagcagggactacagtgcagcaaccctgacctaaaggctaactttgggtaagtggtgaggcctggtaatatctttcttgtgaaccacaaaarggacaatactgaggaggtccctgagccaaaggaaatagactgcagcactgattggacaactttggtaagtggtggggtacccgggtaaagaatgagattgggttagaggcccagcttaggggatttagagtctctcctaagacagagtgggttagaggccactcttaatgaaagtcaaggggggaggctggcaagatggttgaataggaacagctccgatctgcagctcccagcgagatcaatgcagaaggtagatgatttctgcatttccaacaggggtacccagctcatctcactgggactggttagacagtgggtgcagcccacacagggtgagctgaagcagggtggggtgtcacctcacccaggaagtgcaaggagttggggaattc

SEQ ID NO: 199562 - DNA, 610 bp, Homo sapiens
aaccctctattggggtctggatcaggacccctttcctatgacatatttctggtgaccacagcagggactacagtgcagcaaccctgacctaaaggctaactttgggtaagtggtgaggcctggtaatatctttcttgtgaaccacaaaaaggacaatactgaggaggtccctgagccaaaggaaatagactgcagcactgattggacaactttggtaagtggtggggtacccgggtaaagaatgagattgggttagaggcccagcttaggggatttagagtctctcctaagacagagtgggttagaggccactcttaatgaaagtcaaggggggaggctggcaagatggttgaataggaacagctccgatctgcagctcccagcgaratcaatgcagaaggtagatgatttctgcatttccaacaggggtacccagctcatctcactgggactggttagacagtgggtgcagcccacacagggtgagctgaagcagggtggggtgtcacctcacccaggaagtgcaaggagttggggaattccctccactagccaagggaagccgtgagggactgtgctgtgaggaatagtgcatttcagcacagatact

SEQ ID NO: 199563 - DNA, 594 bp, Homo sapiens
tcctggtacagtctgtcacagcttcccttggctaggaaagggaaatcccccaaccccttgagcttccccagtgaggcaatgccccgccctgtttcagctcgccctccatgggctgtacccactgtccaaccagtcccaattagatgaaccaggtacctcagttggaaatgcagaaatcacccatcttctgcatcaatcacactaggagctgcagaccggagctgttcctattcggccatattggaatgctgcaatgtcctttaatttttatctataaaaatcatcgcaatttatctactgccatggactgaattgtgtcccctgcctccaraatgcatgcgttgaaaccctaatccccagcataatggtatttggagatggggccttgggagataattagatttagatgaggtcatgagggtggagccctcatgatggaattagtgcctttataagaagagacaccagagaacttgctcgctctctctcactctcttcactgtgtgaggacacagtgagaaggtagctgtttgcaagccaggaagaaaaccttcacaagaacgcgatcatgctgacacctgatctcagatttct

SEQ ID NO: 199564 - DNA, 520 bp, Homo sapiens
agtcctccaactttctttttytttttcaagaatgttgtggttactctggatcctttgaattcccatatgattttaggattaccttctccatttctgctaagaagccagcttgaattttgacagggactgtgttgatctgaagatcagtttggggagtattgccatcttaaaaatattaagccgggcatggtggctcacacctgtaatcccagcactttgggaggccaaggcaggcagattgcctgagctcaggagttcaagaccagcctgggcaacacagtgaatccctgtctctactaaaatacaaaaaattagccaggcaccacagggtgatggcatgcacctgtaatcccagctacttgggaggctgaggcagtagaatctcttgaaactgggagcagaggttgcagtgagccgagatgatgtatgatgttagctgtgggtttttttgtagatgtcctttatcaggttaagaaaattatcttctatttctagtttgttgagtgtttttatcatgaga

SEQ ID NO: 199565 - DNA, 539 bp, Homo sapiens
attacataatgtattacattcattccaaatcctcatcctaagcccatctctcacaaaagcttttccctgcgagttttgtttttgggtttttttgagatggagtctcactctgttgcccagactggagtgcagtggaaygatctcagctcactgcaacatctgcctcccaggttcaagcaattctcttgcctcagactcccaagtagctgggagcaatttatgtcccaggacattgtcacaatgcaccaccatgcctggctaattttttgtattttttttagtagagacagggtttcaccatgttggccagggtagtctagaactcctgacctcaagtgatctgtctgccttggcctcccaaagtgctgagattagaggcatgagccactgtgcctggccgtgattttaaagtccctagaattttacatgtctgctattattatctctaaaacttttctgtgggtctcttacctctcttctcagcacactgtcagcaattagaggcatagacatgtagttcaactcatgttagtggttgg

SEQ ID NO: 199566 - DNA, 504 bp, Homo sapiens
attccaaattgccaactgcatcaaatgctgccaattccttaagtaagagaaaaactgaattcaccattaaatttagtaacacagaggccattaaagatgttaaaaagagctgtttttagtggagtcgtgggaatgaaagcttgttggagtgaattcaaaaagaaagggagaaaagaattagaaacaatgggtgtgaacaactatttagagaaatgtggctgtaaagtgatgcagaaaaataaagcaatagctraaggagaaagtgggataaaaagtaaatttttttcagctaggagaaataacctaatgtttgtgtgctatttgcatgtttatttatctatccttaaacgtgtagtgagagactcttggttcccagaccttctattccagcagagaatgaaagaatatgataagctcatgactgcttcaaagaagacaccacgttccgcatgactaggccccaatggtgcagctgtctccaaaccctcactattagtactgcac

SEQ ID NO: 199567 - DNA, 625 bp, Homo sapiens
ggggccctctgaaacacagctgtagctgtagccgtggcatctgggattaggggagcagtgtcctgaggctgagcagggcagcatggactggggccctgctcctgaaaccattccccccacccctccaggcctctgggcctgtggtagaagaggctgcctcaaagatttctgaaatggcttcaaagcctttttcccattgtcttggatattagcacctgcctcccttatactcatgcaaatctctctagcaagtggttgctccacagccctcttggcttctcctgaaaatgcttttttcttctctgccacatggccaggttgtgattttccaaatttttacactgcactaacattttagtaagtttcagtatgtcatcataggtgttagaagcagccattccacatcttgaatgctttgctacttagaaattttttctacctgatactctaagtcatcatcattttttttttttttttgagacagggtctcactctgttactcaggctggagtgcagtggcaccgatcatggctcactgcagcctcgacccccwaggctcaagagatcctcccacctcagcctcctaagttgttgggactacaggcatgtgccaccatgcctagct

SEQ ID NO: 199568 - DNA, 543 bp, Homo sapiens
tttgcaaaactgaaacttgatggccagaaacaaactaattctccttctccactctccccgtccttggcaaccactttcttactttctgtttttataattttgactactttagatatctcatgtgagtggaaaagtgctgtatttgtscttttgtgactagcttatataacttagcataatgtcctcaaggtttatgcatgttgaatgtgacagggatttccttctttttaaaggctgcgtaatactccattttaatgcatataccacgttttctttatccattcatctgttgatgaacatgtgagtttatgcttatgtatctttttccaaactacttgaaagtagttggaacattatgatgctttacccttaaacacttcaccttaaatactagctgctaagaagaaggccattctcttacataaccacaattacatgatcatgtttaagaaatttaatatgcagtctatactcaaattcaaattttcccaattgttttaataataaaataatatatctatttattttgaatctaaggtccaa

SEQ ID NO: 199569 - DNA, 567 bp, Homo sapiens
tgcaaaactgaaacttgatggccagaaacaaactaattctccttctccactctccccgtccttggcaaccactttcttactttctgtttttataattttgactactttagatatctcatgtgagtggaaaagtgctgtatttgtgcttttgtgactagcttatataacttagcataatgtcctcaaggtttatgcatgttgaatgtgacagggatttccttctttttaaaggctgcgtaatactccattttaatgcatataccacgttttctttatccattcatctgttgatgaacatgtgagtttatgcwtatgtatctttttccaaactacttgaaagtagttggaacattatgatgctttacccttaaacacttcaccttaaatactagctgctaagaagaaggccattctcttacataaccacaattacatgatcatgtttaagaaatttaatatgcagtctatactcaaattcaaattttcccaattgttttaataataaaataatatatctatttattttgaatctaaggtccaatcagggattattcattgcatttagtt

SEQ ID NO: 199570 - DNA, 446 bp, Homo sapiens
gaattctaataggttagctcattaagtgaattaatcttctcttcatattaagtaatattcaattttcaaaaaaatgctcatcccactaaaactgagattatatttataattaccaaataagcaagataaacctaacctgatttattatttttatttgatttactttatcactggactggtgatgtttggaccaaaatgatccacactatatcaagttagaatggccgccagagttccctgctctgtttcccagaaaccgaatgctcaacatgatgaagtcattttttgaataccaaacagaaatagtcccaaactcatcaccccaggttctagaacgaacattccactgatgtgtgtggggatgcgtgtacatgcttgggtctagcttttggtcaaactacatcatgtaayataataaatctaggattcctgttagcagagaacta

SEQ ID NO: 199571 - DNA, 592 bp, Homo sapiens
ataatcattctgtatacctttctctatgtaagcaccatatctaatttatctataagtcttgccgattacacctttaaaatataacactaatatatccatatttctccaacttttctattaccaccgaggaacaatgtatagccatgacttcactaatgctaaaatagtctttttattagccatctcctccctcttgtacatatygccccatgacctccaatccattccttatcttacagataatttgatttgcctttaacatacatgtatatatgattatgccactttcttgcttcatattcactaatagctttctgttacactccttatttggttcctaaacctcctcaactcaataccacaagttctagccacaatggctttgtaattagttcctcaacaacacaaaacttgatcttggtgcaagatcaaaactcttagtgcaattctcactatgtattaagttgttgttgagaacttctcagcattctggcttcttctcattactctccgtcttctggtatccacctaaatggcaggaatcatatgactatatcaaccaaatcagtccctttgtcccttccccccatca

SEQ ID NO: 199572 - DNA, 241 bp, Homo sapiens
ggtatatttgaatgaggactggattactaacatatcactaaacacctataaaccatattaagtgcatttgcatttgagaaataccaattaactggacaaataagcccaytgtgttatgtggacttagtatccattcagtaacaatagattacaatagattagttcactgaaaacaacttactgctgtttttctgctcgaatacaagtatgtcataaatatttcaatttttatctgatctga

SEQ ID NO: 199573 - DNA, 576 bp, Homo sapiens
cagccctccaatgagaagaggttcatgggagaagctaggaaaggtaacttacattgattaattgatgaatttgcacggaaaccttgagtatgtgttgtcctgacagccaaataaacagaatgtatcaaggaggaggtagtgagtaactgttaaatgtggctgayaagacacctactgagaactgatcattagatgccacaacatgggagccttctatgagtttcttggggtcaggactatgttcttatttgtttctttttcctgtaatctggcccagagtttgaaaaatgtgaggtctgattccaagtgtgatattcttcaattctctagctgagagtgttaccagcatccagagaagcccaattaattagactacacaaaatttaaataacaaaaaacaagaactagatgtcacctgaaagagtgttgctgtttatgatttttcatcttcttttattcttgtttgttttgaaaataaaatgtttactcattcaagatgttttagaagccagcttaaaaagtgattagaaaataatttaggttactgctcaaagctagcaagtgccttgggtgaca

SEQ ID NO: 199574 - DNA, 576 bp, Homo sapiens
cagccctccaatgagaagaggttcatgggagaagctaggaaaggtaacttacattgattaattgatgaatttgcacggaaaccttgagtatgtgttgtcctgacagccaaataaacagaatgtatcaaggaggaggtagtgagtaactgttaaatgtggctgacaagacacctactgagaactgatcattagatgccacaacatgggagccttctatgagtttcttggggtcaggactatgttcttatttgtttctttttcctgtaatctggcccagagtttgaaaaatgtgaggtctgattccaagtgtgatattcttcmattctctagctgagagtgttaccagcatccagagaagcccaattaattagactacacaaaatttaaataacaaaaaacaagaactagatgtcacctgaaagagtgttgctgtttatgatttttcatcttcttttattcttgtttgttttgaaaataaaatgtttactcattcaagatgttttagaagccagcttaaaaagtgattagaaaataatttaggttactgctcaaagctagcaagtgccttgggtgaca

SEQ ID NO: 199575 - DNA, 572 bp, Homo sapiens
taaaaattgtatatgaggaaaccagaagactaagggtgccaataataaatcaaaataaatttcactgatgttattagtggcttccagttatttttgaaattcaaaatatagttagttcaataaaatgacaattcattttttaatatcagtaacctgggtggagaactgaataaaagcaggtaatgccctaaagctcctcctttgttcaagcaaaactccatgtatctattgatattttcagtagcagagatgaaagaacatgtctgtagtgaaaaggtcctggcttttctgataccttggagggcagaattctctccaggaacataccaaaacaagcaccaccctcatgggtctaattagaaaacaattcagtcgctttgaacttatcartgtattaccatgaagtattttttaagatttaaaagcacatatacatcggaaggcataataacgaaataaccaatcaagatgaatataacaccaatgcaaagaaaagttagaaattcaaatcaagcttgcaaaacaaattaagtagcaggaaagcaacattcataacacattagtttgcacca

SEQ ID NO: 199576 - DNA, 572 bp, Homo sapiens
taaaaattgtatatgaggaaaccagaagactaagggtgccaataataaatcaaaataaatttcactgatgttattagtggcttccagttatttttgaaattcaaaatatagttagttcaataaaatgacaattcattttttaatatcagtaacctgggtggagaactgaataaaagcaggtaatgccctaaagctcctcctttgttcaagcaaaactccatgtatctattgatattttcagtagcagagatgaaagaacatgtctgtagtgaaaaggtcctggcttttctgataccttggagggcagaattctctccaggaacataccaaaacaagcaccaccctcatgggtctaattagaaaacaattcagtcgctttgaacttatcagtgtattaccatgaagtattttttaagatttaaaagcacatatacatcggaaggcataataacgaaataaccaatcaagatgaatataacaccaatgcaaagaamagttagaaattcaaatcaagcttgcaaaacaaattaagtagcaggaaagcaacattcataacacattagtttgcacca

SEQ ID NO: 199577 - DNA, 528 bp, Homo sapiens
ataaccaatcaagatgaatataacaccaatgcaaagaaaagttagaaattcaaatcaagcttgcaaaacaaattaagtagcaggaaagcaacattcataacacattagtttgcaccaaaacaaaattaataaagagaaagtgcataaatagtacttgaatatttttgtaattaaaaggaacatctctttgcgtgaagcaaaaagcatccagagaagcaggcaagcatcccgctgttgaacacataacaagagaagagrcagacatctctgacctctgttgtttttctggataataggaaaaattaatatatcccgtgaaaaggacaggaggggaaaaaattacttcatgtgtttgtaggcagagacttcaaatttttattcaaaatctattattaatctttccttttattaggatcttagctagaggttacattttccaggtttctttgtagcttcaagtggccaatgagttatgaacaaaagtaagtaatgtttataatttttaaccccttttccttgaggaagctg

SEQ ID NO: 199578 - DNA, 511 bp, Homo sapiens
gagacttcaaatttttattcaaaatctattattaatctttccttttattaggatcttagctagaggttacattttccaggyttctttgtagcttcaagtggccaatgagttatgaacaaaagtaagtaatgtttataatttttaaccccttttccttgaggaagctgcttgtctttcatgcattttccgcctccctgcagttgagatgtcaccggggtgctgggagacagatttctcatgtagaaagtcaataatttagaccatagctgtgcaacaagatgaaaagaacctgcttctaactagccttctggaacagaacttcttgcccacctggactgtactcaatacccacttctggacttttctgtgagggagaaataaactattttgttaggacactgaaattttgtgttgctttgtgactgtagcttagcgtaaaccctaactgattcaggtataaagtcctaacgtagtttctagcagataaaacacacttttatttgcattttat

SEQ ID NO: 199579 - DNA, 511 bp, Homo sapiens
gagacttcaaatttttattcaaaatctattattaatctttccttttattaggatcttagctagaggttacattttccaggtttctttgtagcttcaagtggccaatgagttatgaacaaaagtaagtaatgtttataatttttaaccccttttccttgaggaagctgcttgtctttcaygcattttccgcctccctgcagttgagatgtcaccggggtgctgggagacagatttctcatgtagaaagtcaataatttagaccatagctgtgcaacaagatgaaaagaacctgcttctaactagccttctggaacagaacttcttgcccacctggactgtactcaatacccacttctggacttttctgtgagggagaaataaactattttgttaggacactgaaattttgtgttgctttgtgactgtagcttagcgtaaaccctaactgattcaggtataaagtcctaacgtagtttctagcagataaaacacacttttatttgcattttat

SEQ ID NO: 199580 - DNA, 580 bp, Homo sapiens
tactgttttctttccatggatcatctagtgacatttttcagaagcagcttctgttgtgtggccacttggttcaaacgacagtccttttagaaggaaaacagacaaattgtattctcacgtaacttatgatcaagactgcagaatatatattttatgatacattgttttaccatatatatagtgtccttactctcctatgagcattacatggctagactatatggaagggaaaatacagctgagatttcatacctagaggacatttatcaatatctgaacattatttcaaaagtagtgttttgttgttgttgttgtttttgttttgtttattttgtagaagacagggtctcactaggtttcccaggctggtcttgaactcctggaattaagtaattctcccacctyggcctcccaaagtgctgggattaaaggcatgagccagcacacctggctagaagtgaacagtgtaagaattctcccccaagtttgaattctggagtttactatatattccgaccccattagtgacacagatatattacaacttggttcagtaagtttcagatgacattaaaagcag

SEQ ID NO: 199581 - DNA, 609 bp, Homo sapiens
tgatgctgcggtttggagcatggatcccatcactcagataatgaacatagtacmgaataggcgatttttcaacccacatatctctccctcctacctgcctctagcagtcaccagtatctattgttcccatctttacatccatacgtgctcagtgtttagctcccacttataagtgagaacatgcagtatttgttttttttgttcctgcattaatttgcttaggataatggcatccagctgcgtccatggtgctgcaaaggacatgattccgttcttttttatggctgcataacattccatggtgtacatataccacattttctttatctaacccactgtcaatgagcaccacagttgattttatgtttttgctattgtgaacagtgctgcaaaaaatatgcatgcatgtatctttttggtggaacaatttatgtttctttgagtatatatccagtaatgaaattgcttcactggctggtagctttgttttaagtcctttgagaagtctgcaaactgcttttcacaggggctaatttacattcctaccatcagtgtgtaagtgttctgttttctccacagctttgccagtatctgttatcctttgacatt

SEQ ID NO: 199582 - DNA, 609 bp, Homo sapiens
tgatgctgcggtttggagcatggatcccatcactcagataatgaacatagtacagaataggcgatttttcaacccacatatctctccctcctacctgcctctagcagtcaccagtatctattgttcccatctttacatccatacgtgctcagtgtttagctcccacttataagtgagaacatgcagtatttgttttttttgttcctgcattaatttgcttaggataatggcatccagctgcgtccatggtgctgcaaaggacatgattccgttcttttttatggctgcataacattccatggtgtacatataccacattttctttatctaacccactgtcaatgagcaccacagttgattttatgtttttgctattgtgaacagtgctgcaaaaaatatgcatgcatgtatctttttggtggaacaatttatgtttctttgagtatatatccagtaatgaaattgcttcactggctggtagctttgttttaagtcctttgagaaktctgcaaactgcttttcacaggggctaatttacattcctaccatcagtgtgtaagtgttctgttttctccacagctttgccagtatctgttatcctttgacatt

SEQ ID NO: 199583 - DNA, 650 bp, Homo sapiens
ttagtaatagtcatttttgactagtctgaggttatatttcattgtagtttgatttgtatttctctgacgatcagtgacgttgagcattttttcatatgtatgtgggatgtttggatgtcttcattaatatgatctctacttaactagtcaagttgaacaagtcagaatcctgagacayagccaaagattcttacattctgttcccaacttttttcagtttgtcaggatgtcctgctgattttgctacatcaagtttcttagagtctactccgttgcttcatcagtcattacaactgcagagcaggggttcaataaatgctttttgaatgaatgaactaattcctcttctctctgcccctacctgagtttatgctcctcattactccttgctcacaaattggaatacattctcaatgtctcccagtataaataacatttccttaaaattaaagccagtataatttctttaagtctgaatttaatttgttcaatcactttcttaaagtccatcaatatctccttacctcctgcaagacacattataaactccttagcatattgttatctttacccacttttgacagcctggttaaaggctgacccagtaaatcctcttaaaggtttcctagaatgagaatctccttttctca

SEQ ID NO: 199584 - DNA, 630 bp, Homo sapiens
tgtacacatataatatgcacacataaaaattcttgataaagtttcaagatggatgcattattcaagctgcttctcatacagtttatgttttaaagtattttaataaatgtttgtagaaaaaatcgtaacatttgaaataccaggatgtagcaaatagtttgaaataagtcacaattatttcctcaaaaacaattctaggaygctacaagtctcctaatgtcaatcccttgtttaaaacgtttttagagtttccaagccaggagtcttttgctccactttgttcagaggcacagagaaaaacaacatattatatttaaagtaatagccaaatattactcaagtattatttattcacagtctccaaaacacaatctttctcattttaaaatacatgattttctgttgttccctgaaggacatagagtttattgctacaataatcttttctatgagattcagatgacataaattataaacccactttctagcgtatgggctagtaaaactgtagagtttctttcccattcttataatccttgcaattatgggaataaaaactccaagtgagccagctttactgtaattctattctttgcagtggtaggtaatgaaaattagcaaaatagctta

SEQ ID NO: 199585 - DNA, 630 bp, Homo sapiens
tgtacacatataatatgcacacataaaaattcttgataaagtttcaagatggatgcattattcaagctgcttctcatacagtttatgttttaaagtattttaataaatgtttgtagaaaaaatcgtaacatttgaaataccaggatgtagcaaatagtttgaaataagtcacaattatttcctcaaaaacaattctaggacgctacaagtctcctaatgtcaatcccttgtttaaaacgtttttagagtttccaagccaggagtcttytgctccactttgttcagaggcacagagaaaaacaacatattatatttaaagtaatagccaaatattactcaagtattatttattcacagtctccaaaacacaatctttctcattttaaaatacatgattttctgttgttccctgaaggacatagagtttattgctacaataatcttttctatgagattcagatgacataaattataaacccactttctagcgtatgggctagtaaaactgtagagtttctttcccattcttataatccttgcaattatgggaataaaaactccaagtgagccagctttactgtaattctattctttgcagtggtaggtaatgaaaattagcaaaatagctta

SEQ ID NO: 199586 - DNA, 630 bp, Homo sapiens
tgtacacatataatatgcacacataaaaattcttgataaagtttcaagatggatgcattattcaagctgcttctcatacagtttatgttttaaagtattttaataaatgtttgtagaaaaaatcgtaacatttgaaataccaggatgtagcaaatagtttgaaataagtcacaattatttcctcaaaaacaattctaggacgctacaagtctcctaatgtcaatcccttgtttaaaacgtttttagagtttccaagccaggagtcttttgctccactttgttcagaggcacagagaaaaacaacatattatatttaaagtaatagccaaatattactcaagtattatttattcacagtctccaaaacacaatctttctcattttaaaatacatgattttctgttgttccctgaaggacatagagtttattgctacaataatcttttctatgagattcagatgacataaattataaacccactttctagcgtatgggctagtaaaactgtagagtttctttcccattcttataatccttgcaattatgggaataaaaactccaagtgagccagctttactgtaaytctattctttgcagtggtaggtaatgaaaattagcaaaatagctta

SEQ ID NO: 199587 - DNA, 617 bp, Homo sapiens
ctcgatatattgcaaacccctagaaaaatgacctgtgcatagaaggtgctgaatagtattttttaaatgaatatattttgactttgattttcttttctrtaaagcaaatgtgctatactattgctttcaatgaaatattttcttctccttctacctatacacttcttccaaaagaataaattttaaaacatgaatagcaaaatagatgaaggggaaaaagagtggaaagcaagaaagtatttcctgattggcatcactgaacataggaagtcaactccacctttgaacgctgttgggcttctgtggtggcaatatacacatatatgcatatataatacatgcagacagtgaaatatatatatttcactttctctgtctacctgaaatgtcatctattagagatatatttggattcatgaatattattgttgtaaatgcaagtagctctgaataagaaataatttaaaaatttgcttaattagattattttgttcctaaaattgagacaattagaaggggtagagttttataaacataaattatgtggaatgagcagatgcgaagaaagaaaggtcagggagataagtgaatatttttcaaaaaaaaaaagagaagct

SEQ ID NO: 199588 - DNA, 617 bp, Homo sapiens
ctcgatatattgcaaacccctagaaaaatgacctgtgcatagaaggtgctgaatagtattttttaaatgaatatattttgactttgattttcttttctataaagcaaatgtgctatactattgctttcaatgaaatattttcttctccttctacctatacacttcttccaaaagaataaattttaaaacatgaatagcaaartagatgaaggggaaaaagagtggaaagcaagaaagtatttcctgattggcatcactgaacataggaagtcaactccacctttgaacgctgttgggcttctgtggtggcaatatacacatatatgcatatataatacatgcagacagtgaaatatatatatttcactttctctgtctacctgaaatgtcatctattagagatatatttggattcatgaatattattgttgtaaatgcaagtagctctgaataagaaataatttaaaaatttgcttaattagattattttgttcctaaaattgagacaattagaaggggtagagttttataaacataaattatgtggaatgagcagatgcgaagaaagaaaggtcagggagataagtgaatatttttcaaaaaaaaaaagagaagct

SEQ ID NO: 199589 - DNA, 617 bp, Homo sapiens
ctcgatatattgcaaacccctagaaaaatgacctgtgcatagaaggtgctgaatagtattttttaaatgaatatattttgactttgattttcttttctataaagcaaatgtgctatactattgctttcaatgaaatattttcttctccttctacctatacacttcttccaaaagaataaattttaaaacatgaatagcaaaatagatgaaggggaaaaagagtggaaagcaagaaagtatttcctgattggcatcactgaacataggaagtcaactccacctttgaacgctgttgggcttctgtggtggcaatatacacatatatgcatatataatayatgcagacagtgaaatatatatatttcactttctctgtctacctgaaatgtcatctattagagatatatttggattcatgaatattattgttgtaaatgcaagtagctctgaataagaaataatttaaaaatttgcttaattagattattttgttcctaaaattgagacaattagaaggggtagagttttataaacataaattatgtggaatgagcagatgcgaagaaagaaaggtcagggagataagtgaatatttttcaaaaaaaaaaagagaagct

SEQ ID NO: 199590 - DNA, 617 bp, Homo sapiens
ctcgatatattgcaaacccctagaaaaatgacctgtgcatagaaggtgctgaatagtattttttaaatgaatatattttgactttgattttcttttctataaagcaaatgtgctatactattgctttcaatgaaatattttcttctccttctacctatacacttcttccaaaagaataaattttaaaacatgaatagcaaaatagatgaaggggaaaaagagtggaaagcaagaaagtatttcctgattggcatcactgaacataggaagtcaactccacctttgaacgctgttgggcttctgtggtggcaatatacacatatatgcatatataatacatgcagacagtgaaatatatatatttcactttctctgtctacctgaaatgtcatctattagagatatatttggattcatgaatattattgttgtaaatgsaagtagctctgaataagaaataatttaaaaatttgcttaattagattattttgttcctaaaattgagacaattagaaggggtagagttttataaacataaattatgtggaatgagcagatgcgaagaaagaaaggtcagggagataagtgaatatttttcaaaaaaaaaaagagaagct

SEQ ID NO: 199591 - DNA, 620 bp, Homo sapiens
ttattaaattaatattaaaacatagaataaattmgtttgttcattctaaatgtgtcattcaaatataaataatctacattttaaatatatatgtaggtatactaaataagtaaatatgtatgttaatatgtttaaagcagggtgagaaacctggacacttcctgtgtgggcaatgacatcaagatgatgctagagaaaccacttcactattttcttcagtgttctcatctgtaagttgaagttattgacagccttacagttctgtgacccttacgacaacatttcattatttaattcttgtttgggtattcctccactatctggggagacagttctatttaaccaaacacccaggcaccagaagcacacctggagtggattctgcaaagaggagccctcatttcccagagggaggtaccctgaacttgactttgaaaatggcttggcagaaggatttgacagggagtgacctaagcaggcaaaaactccaattccacagagcaccacctccttaaaagttaaaagtatattggatgctaaggctaacaatttcaggtacatatttaaaaaatcataataattcaaaataatcaaaaaatattacaaactttaaaacagat

SEQ ID NO: 199592 - DNA, 620 bp, Homo sapiens
ttattaaattaatattaaaacatagaataaattagtttgttcattctaaatgtgtcattcaaatataaataatctacattttaaatatatatgtaggtatactaaataagtaaatatgtatgttaatatgtttaaagcagggtgagaaacctggacacttcctgtgtgggcaatgacatcaagatgatgctagagaaaccacttcactattttcttcagtgttctcatctgtaagttgaagttattgacagccttacagttctgtgacccttacgacaacatttcattatttaattcttgtttgggtattcctccactatctggggagacagttctatttaaccaaacacccaggcaccagaagcacacctggagtggattctgcaaagaggagccctcatttcccagagggaggtaccctgaacttsactttgaaaatggcttggcagaaggatttgacagggagtgacctaagcaggcaaaaactccaattccacagagcaccacctccttaaaagttaaaagtatattggatgctaaggctaacaatttcaggtacatatttaaaaaatcataataattcaaaataatcaaaaaatattacaaactttaaaacagat

SEQ ID NO: 199593 - DNA, 551 bp, Homo sapiens
ggtatatatccaaagaaagaaaataaatatatcaaagagatagctgcattcccatgtttattgcaacattctacacagtagacaaagtagggaattaagtgtctatcaacagaggaatgagtaaakgtggtctatatacacaatggaatattattcagccatgaaaaatgaaattctgtcatttgcaacaccatggatggaattggacagcattatgttaagtgaaataagccaagcacagaaagacaaatactgtgtgttctcactcatatgtgggagctaaaaaagttgacctcatggagatagagagtagaatgatggccactagaggctgggaaatgtagtggggagatgggataaagtggtgttggtgggggttaatggtacaaaagtacagttacaaggaataagatctagtattaagtagcactatagggcgactatggttgacaataatttattgcatgcttcaacataaatagaagagtgaaactgaaatgtttctgacacaaagaaatcataaatgtttaaggtggtagacattccactta

SEQ ID NO: 199594 - DNA, 551 bp, Homo sapiens
ggtatatatccaaagaaagaaaataaatatatcaaagagatagctgcattcccatgtttattgcaacattctacacagtagacaaagtagggaattaagtgtctatcaacagaggaatgagtaaaggtggtctatatacacaatggaatattattcagccatgaaaaatgaaattctgtcatttgcaacaccatggatggaattggacagcattatgttaagtgaaataagccaagcacagaaagacaaataytgtgtgttctcactcatatgtgggagctaaaaaagttgacctcatggagatagagagtagaatgatggccactagaggctgggaaatgtagtggggagatgggataaagtggtgttggtgggggttaatggtacaaaagtacagttacaaggaataagatctagtattaagtagcactatagggcgactatggttgacaataatttattgcatgcttcaacataaatagaagagtgaaactgaaatgtttctgacacaaagaaatcataaatgtttaaggtggtagacattccactta

SEQ ID NO: 199595 - DNA, 535 bp, Homo sapiens
agttgactaacatactcaattttccggtctstctttttaaataagctcagtgcctgaattctccctcaccaagtttatttataaagagaaactggagaacacctggacagggatgttttaggtagtttttatgaatcatataaaatttacatttgatgattttctgtcatggctaacactaatttatatagttttttaggttaaaaaataacatttttttactgtgtaaacctactagtaaaaatacaaaaatagagtaattataggctttcgggaagcttaagctttagagaaccaaagtagagaaaattttacatcatttttatatttagtgtattgtaatggtgatcatctgtgcatcatcagtctagttcagggtttttctttttttcttttttttttttgagacagagtctcgctctgtggcccaggttggagtgcagtgatgcgatctccactcactgcaagttccgcctcctgggttcacgccattctcctgcctcagcctcccgagtagctgggactagaggcgccc

SEQ ID NO: 199596 - DNA, 535 bp, Homo sapiens
agttgactaacatactcaattttccggtctctctttttaaataagctcagtgcctgaattctccctcaccaagtttatttataaagagaaactggaraacacctggacagggatgttttaggtagtttttatgaatcatataaaatttacatttgatgattttctgtcatggctaacactaatttatatagttttttaggttaaaaaataacatttttttactgtgtaaacctactagtaaaaatacaaaaatagagtaattataggctttcgggaagcttaagctttagagaaccaaagtagagaaaattttacatcatttttatatttagtgtattgtaatggtgatcatctgtgcatcatcagtctagttcagggtttttctttttttcttttttttttttgagacagagtctcgctctgtggcccaggttggagtgcagtgatgcgatctccactcactgcaagttccgcctcctgggttcacgccattctcctgcctcagcctcccgagtagctgggactagaggcgccc

SEQ ID NO: 199597 - DNA, 535 bp, Homo sapiens
agttgactaacatactcaattttccggtctctctttttaaataagctcagtgcctgaattctccctcaccaagtttatttataaagagaaactggagaacacctggacagggatgttttaggtagtttttatgaatcatataaaatttacatttgatgattttctgtcatggctaacactaatttatatagttttttaggttaaaaaataacatttttttactgtgtaaacctactagtaaaaatacaaaaatagagtaattataggctttcgggaagcttaarctttagagaaccaaagtagagaaaattttacatcatttttatatttagtgtattgtaatggtgatcatctgtgcatcatcagtctagttcagggtttttctttttttcttttttttttttgagacagagtctcgctctgtggcccaggttggagtgcagtgatgcgatctccactcactgcaagttccgcctcctgggttcacgccattctcctgcctcagcctcccgagtagctgggactagaggcgccc

SEQ ID NO: 199598 - DNA, 648 bp, Homo sapiens
acaagtgtataattcttcacttaatttttggtttgttttattcttccttcagtgagctttttcaaaaaatattgccatcattcttgtacagaaccatagcattttagggctcgagaaaattaagtgattttctcatttggagattaattagcttatctggaactagaagttatatcctctgatacacacttaaacgtaccatcaactatagaatttcatcaatcttaagatgcatgatttttcacattttaaaatatctaaaatctgaatgtgtttcatctcacaatccatgggatgccataggtttatcacttgtgcttttcctttctcagtgatatataaaagtggtttatggtatacagtcctagagattatgaaacscaacatgccatttttaaatatataaattatgtacttttccagtgattacatcaattaaattgtttcagagctttttaaaaatgattgttcatttctaactaaatgaacgtctacatgtactcactcccttcataatgcaatttttacttggcatctgatggcttcttaaatgatgttttggcccagtttaataatttttctataaacaacagcttgttttttgagtattaaataagacaatcaagttctttagggaaagtggaacca

SEQ ID NO: 199599 - DNA, 478 bp, Homo sapiens
tttcatctcctaaaataaaaactattcaggaaaataaatcttgagcatgaaacttcaattttctgatttcactgaacgcgatatcgaagatgcaaaagcaaataacaattctaaaccttgatggaatatttacttcgattggctttcacccaraagtggccatggattactgaaaatattttcagagctctctgtataactttaatggatagtggccaagatgcaaccgtggctataattagtttctctgtttatacatttcaggcacggtgaaatgtgttaataaaaaattaaaaagacacaggtttgtggtgattaagtaagattaagtaaattgttagatctatattacatttgtgcataaatattctaatgctaacttgaagaatatatgaaatattcattaattgaatattctaatctgttaaaatgaccttaataatttccattcctcaataattttactttcatttcaaaa

SEQ ID NO: 199600 - DNA, 576 bp, Homo sapiens
agaaaaatgtcatatactttatgtaagtcatttaacaaaagctgtttatatatatttcaaaaaacaacattttagatggaaaatgctattatgatagasgcacagtattggttgaccaggaaaatatagcaattatgtgtttcccctggccacaaactcaaccaataaaaataaatttaaaattcacaattttgagaaattattaataactatgtatcagaaattgggagtataaatacagaatagattaataaatgtataaacaacttgaaaagtgacacaattagcaaacttgaatgaacatacaaacctgcaacaatatgatgttttgcataaggtaagttaattcagatataaacaataaaaagatggttaataaagcaaatatttacaatctgccaaatactgtctgtcacctgatgaaaagaggaaaaactagtatctagtataaatattattcaacaaatagcaaagaaagtattaaggtaaaaaacttatgagcttcacgaatcatgaaggcaaattctgattaattgaactttatcaaaattaaaatgtgttgttcatcaaaagaca

SEQ ID NO: 199601 - DNA, 576 bp, Homo sapiens
agaaaaatgtcatatactttatgtaagtcatttaacaaaagctgtttatatatatttcaaaaaacaacattttagatggaaaatgctattatgatagaggcacagtattggttgaccaggaaaatatagcaattatgtgtttcccctggccacaaactcaaccaataaaaataaatttaaaattcacaattttgagaaattattaataactatgtatcagaaattgggagtataaatacagaatagattaataaatgtataaacaacttgaaaagtgacacaattagcaaacttgaatgaacatacaaacctgcaacaatatgatgttttgcataaggtaagttaattcagayataaacaataaaaagatggttaataaagcaaatatttacaatctgccaaatactgtctgtcacctgatgaaaagaggaaaaactagtatctagtataaatattattcaacaaatagcaaagaaagtattaaggtaaaaaacttatgagcttcacgaatcatgaaggcaaattctgattaattgaactttatcaaaattaaaatgtgttgttcatcaaaagaca

SEQ ID NO: 199602 - DNA, 496 bp, Homo sapiens
catattgaggcactatgagttaggataacaacatatgattttaggtagaagagagtttatttcataaaaggtactgtactgaatagtttagatacattattttattctatattaaaagccaacctcttagatatagtttcatacatactttacagatgaagaaagtaagcaagataataaataatgatcccaagttcacacaggtagtgaggtagaaagckctcacatataaatcctggcgttcgcactttagtctccatactggtgacagccacacgatattgctcttgagacgacctcatcttctagatgaaagtgatcttatgcaaatttctttgggatctctactttatattacaaaaaatctctgttttcaacattatttcccatcatttatcttctttctaagggggaatcatcttatctaattgacaagattttacagcatgctagaattctcccctcttgtacagcctcagtatttttctttccacaa

SEQ ID NO: 199603 - DNA, 563 bp, Homo sapiens
attaatatgttagtgaatgcccccaaattttaccattctatgctatagaattcctactttatagaccgtatcaaatgttatcattgatgatattcttattaatatattttacctttattactgaacatgaaaactatgtttacaaataaccatattttacctttattactgaacatgaaaactatatttacaaataaccatattgcttaagactgctcataagttcatgttttgaacagttttaaatattaaatcactaatggaatactgttttatatgaaataacttttcatataytgtgccctatagaaaagtaaaatgaatcagatttatttcctttttacattattttaaaatatgaagtaaatttttgttcttttattttgtaaagttaattgtagaatgggggaagaataaaatacttaagtttacttcagaatctatacataaagatacagtattgcataatttaatgcaataaaattgaaaatattttagaaaaagagtgaagatttcccctcagtttgctctcccccgcccgacacccatcaagtttattcagc

SEQ ID NO: 199604 - DNA, 546 bp, Homo sapiens
gattgcctagtagtttctaacaagatccttgttctaaattctgctctcatgagatgaccaaacaccttctagtccttctgaatttgatgaagcaaaatatgttcatgaagctatgtatatacttctaatcaattctcttcagatatttatttctggccaaaaagacaggtgggggaaagcaaaagcaggaagcaggctgtttctgctttcctattggatttccagattgcttcatgtgcttggatattttgttgaacaaataacctcctccatcaaattgacaggtctttttggttaacttgtctccataataaacgttccatcacctacatctatttttattaaayaaggtgtggtgaggaaggagaaatggttttatacagtcagtgggcacttctgtttccagcagctattgtatttttaattcatatttttgtatcaggttagaataatatgtatttgatgattaatgtcaggcttgtaataagattattttctattgtcatcaaatctttttggaattctgggacaggttataccagttga

SEQ ID NO: 199605 - DNA, 526 bp, Homo sapiens
catcatgggaagttgagttttctcatctataattctttaaatctgagcttcctcatctacaaaacagacataataatagtwgctcccttaataggtttttgggacaatcaaatatgataatcaaataaaagtgcttaacatagtacatggcatattgtaagatctaaataatgttatccatttttattatgtaggtttagttcatcttattttggaattggctttaacttcaactgttatgctatatatatcagcatgtaaaagcacgcagaaccttcttagagtagcaattctaagtctgtgctctgttactgtgtgtcaatagtattgcctttctatatgagatacctatgtatcaatataaactaataagtagaggcccagagtcaaaagtctaactttgacaaatgttggtcttcatcaagtgtaaaatggaattttatttgctcttggctacaaaaaaccctaagcatcacagaaacattcacataaccagaagaaatacatacatgtgtgcacatagaaa

SEQ ID NO: 199606 - DNA, 529 bp, Homo sapiens
ctcaatcccacctctatcttcattttctgctgatgatcgtgttcactctctcactagaaaataaacacaattacgtgaaaatggctgtgtattcccacggtctaattgtttactatatttgcrcctgcattctaattctgtgctgtccttctttttaccatagaggaactatcatttctggcctcttaaagaatatgctttcagcaattctccactctatcctacattatcaacatctcctgataatttcataaagtatatcatttctctagtaatataaatatgctttatatttccaatatggaaaataataaaacaaatacaataaaagccttattgaacttcacatatctctccaactactgcctttcttctttcctcctttttaaagcaaacctcattaaaacagcttgttacatttgctttttctatttttctcgtctcttttacaaccacttcaatcagactgtatctctaccactccaatgaaacatcgcttgtcaagatcgccaatggtctctacttggct

SEQ ID NO: 199607 - DNA, 428 bp, Homo sapiens
acaaaactcctatttgggtaccattgtcttgtttcatacatgaggaaraagaatctgaaagaggttagcaccgaaagtggtcacactgataggttaaaaaagtttatactgagatccatatctatctggctccaaagtctgtgaccttttctaccacatcatattgtctttgattaaattgtggatatagtctatagagagaaaagaacttttttccttctgaaaaatgagccttagcttggtgcaactgacaaataaacagttatcacataatctcagtggatttcaatttcccagaaaaagagcacacgaacccatcttattactaatccagagagttagaagatgattctgggtgtgtgtacatggaagtaatagcagcatgcagacctttaaagcatgataacttaaaagagtcaacaaataat

SEQ ID NO: 199608 - DNA, 428 bp, Homo sapiens
acaaaactcctatttgggtaccattgtcttgtttcatacatgaggaagaagaatctgaaagaggttagcaccgaaagtggtcacactgataggttaaaaaagtttatactgagatccatatctatctggctccaaagtctgtgaccttttctaccacatcatattgtctttgattaaattgtggatatagtctatagagagraaagaacttttttccttctgaaaaatgagccttagcttggtgcaactgacaaataaacagttatcacataatctcagtggatttcaatttcccagaaaaagagcacacgaacccatcttattactaatccagagagttagaagatgattctgggtgtgtgtacatggaagtaatagcagcatgcagacctttaaagcatgataacttaaaagagtcaacaaataat

SEQ ID NO: 199609 - DNA, 282 bp, Homo sapiens
tggtggcagaaagttgggataataccaatctgttggcatcagttttctatattaaaagaagttaaggttattcctgagagaataaaaagattatggagttggktgtaacaaacaaggaaaatttgaaagggagtgggagagtgctgaagaaagaaacacaatgtaatgtgctggttaaattaatttcttaagatctaatttcaaacatacatttcttattttattcaaaaacatataaaagcctagcaacctagcaactatttaaaagaaaattagaaaata

SEQ ID NO: 199610 - DNA, 418 bp, Homo sapiens
gaattcagaatggctgaaataaaagccactagggtagttgctatcatctaaaacactggtcttaaattctgacattttctgacaggatttataggattttctttgttcccaagggattaataagaaatgaaatgaaattcttaaacttaaggcatgccaaattttcttgaactccagtcagctacatattatggcctatacttgtgcgtatttttaaactgatagacaaactacatsaaggataattcagaactgttcatattatcaatgaccattcggagatggtcattatttaaaaaacctgcagctgtaggggaaacatatggtgtcttctaatttttctgtttctctctctctgtctctctctctctttttctgtctactttgaatctgctgacttttctactagtgttgagaa

SEQ ID NO: 199611 - DNA, 577 bp, Homo sapiens
tctactgaattatgtccatcagaatgaaaatctactgtaatatgttccatcaaaaaataaaacaaaacaaaatgcctacacccattgtttcatgaagcatcgcaaatatctgatgatttctctgctccatgttatagcaaaacttctcaaaagtatagactgcactgattttcttcttttcatctcaccttttctcttgaatccactctcttcaggctttactccacacaacttcactgaaattacccttgttacaagmgaccaccatcttgccaaactcaaatgccaaatcttagtccttgttgacttctcaacagcattttacaaaataaatgtccttcttgaaacatttccttcacttgacttctggaacgcagaattctggctttttttctgcatcatgcacacctccttctcagtatttttagctagcctcacttcattttccttattaataaatgctggagcagttccaggatccagtcttggaactcatctctcctttatcttcactagtccctgagatgaacttatctaattgtatgcttttaaatatcatctacctgctgaacatata

SEQ ID NO: 199612 - DNA, 562 bp, Homo sapiens
aaatatatagtaattaacctaaatgcctttagtttgcatgactccagtaaattgttaataaataagctggttttaaaattattggtaaaattttaaaaaaggtcttcagaattctcagcatgtatttttacctggatttactgttcagacagctttatatgtgtctctgctatatatttaaggtgtcagggtttgagacaaagattataaaactatacatctagcctaaaatrgaatgatctttgtgtaattttttgataagtaagacctatttaacattattagtttagtgaaaatagctgtatcttctgggttatcaagtaaaaatttttacttatgtgaacagctaatattcacaggctataaaaatagttaaccaggaaagtaaaatgattaacatctttgtctaatactgttaaaagtaaacaagttaggtaaatgtaaatgagataaacatttataaataaatgtttcatgtaatttgaaatcttaaagttacattaaataatagatattcattaaatgctggattatttccaaataagattaaaacaaattatgt

SEQ ID NO: 199613 - DNA, 562 bp, Homo sapiens
aaatatatagtaattaacctaaatgcctttagtttgcatgactccagtaaattgttaataaataagctggttttaaaattattggtaaaattttaaaaaaggtcttcagaattctcagcatgtatttttacctggatttactgttcagacagctttatatgtgtctctgctatatatttaaggtgtcagggtttgagacaaagattataaaactatacatctagcctaaaatggaatgatctttgtgtaattttttgataagtaagacctatttaacattattagtttagtgaaaatagctgtatcttctgggttatcaagtaaaaatttttacttakgtgaacagctaatattcacaggctataaaaatagttaaccaggaaagtaaaatgattaacatctttgtctaatactgttaaaagtaaacaagttaggtaaatgtaaatgagataaacatttataaataaatgtttcatgtaatttgaaatcttaaagttacattaaataatagatattcattaaatgctggattatttccaaataagattaaaacaaattatgt

SEQ ID NO: 199614 - DNA, 562 bp, Homo sapiens
aaatatatagtaattaacctaaatgcctttagtttgcatgactccagtaaattgttaataaataagctggttttaaaattattggtaaaattttaaaaaaggtcttcagaattctcagcatgtatttttacctggatttactgttcagacagctttatatgtgtctctgctatatatttaaggtgtcagggtttgagacaaagattataaaactatacatctagcctaaaatggaatgatctttgtgtaattttttgataagtaagacctatttaacattattagtttagtgaaaatagctgtatcttctgggttatcaagtaaaaatttttacttatgtgaacagctaatattcacaggctataaaaatagttaaccaggaaagtaaaatgattaacatctttgtctaatactgttaaaagtaaayaagttaggtaaatgtaaatgagataaacatttataaataaatgtttcatgtaatttgaaatcttaaagttacattaaataatagatattcattaaatgctggattatttccaaataagattaaaacaaattatgt

SEQ ID NO: 199615 - DNA, 560 bp, Homo sapiens
gatatgctgattttcctaatctgatcactatatattatatgtattaaaacatcactacgtaaccgatgaatatgagtatataattattattcatcaagttaaaaattaaataaatagttatttttaaaatgtgaatgctaacgatattggggacaccaggtatagcacatcctgtcactaatggatgacttcacatgacttcctgacttggtagactgatgaagcaaaatactaggtagtgaattatgtaggctgctccctggatattagatattctgttcatcatgggctcagcakgcattagttattttctctcctttaagtcatgtgcttttatgactcccagtagtatcaggaaactgtattttcaatccttcacatcatgttctctcttttctttccaggtcattgcacatgtttatcccactgtctagaatacttgtccctcccttttattcttgttttccttccaaattacttggccacatcaacttacatgtcgggtctcagcttaagtacatttcctccacaaggcctttctgaattctcggacaaaatta

SEQ ID NO: 199616 - DNA, 558 bp, Homo sapiens
acaggtcatgctgatgcaagaagtgggctcccactgccttgggaatcttcacccctgtgrctttgcaggatacagtcccccttctggctgctttcatgggctggcactgagtgtctgtggcttttccatgtgcactgtgtaagctgtcagtggatctaccattctggagtccggaggacagtggccctcttctcacagctccactaggcagtaccttagaggggactctgtgtgagggttctgaccccacatttcccatccacactgccctagcagaggttttccatgagagctccacccctacagcaaacttctgcctggacatccaggcatttccatacatcctctgaaatctagggggaggttcccaaacctcgattgttgatttctgagtacccaccggctcaacgctctgtggaaaccaccaaggtttgggacttgcaccctctgaagcaatggcccaagctgtaccttggccccttttaaccatggctggagctgaagcagctgggacacagggaaccatgtcctgaggctgcacagagcagggggaccctg

SEQ ID NO: 199617 - DNA, 558 bp, Homo sapiens
acaggtcatgctgatgcaagaagtgggctcccactgccttgggaatcttcacccctgtgactttgcaggatacagtcccccttctggctgctttcaygggctggcactgagtgtctgtggcttttccatgtgcactgtgtaagctgtcagtggatctaccattctggagtccggaggacagtggccctcttctcacagctccactaggcagtaccttagaggggactctgtgtgagggttctgaccccacatttcccatccacactgccctagcagaggttttccatgagagctccacccctacagcaaacttctgcctggacatccaggcatttccatacatcctctgaaatctagggggaggttcccaaacctcgattgttgatttctgagtacccaccggctcaacgctctgtggaaaccaccaaggtttgggacttgcaccctctgaagcaatggcccaagctgtaccttggccccttttaaccatggctggagctgaagcagctgggacacagggaaccatgtcctgaggctgcacagagcagggggaccctg

SEQ ID NO: 199618 - DNA, 558 bp, Homo sapiens
acaggtcatgctgatgcaagaagtgggctcccactgccttgggaatcttcacccctgtgactttgcaggatacagtcccccttctggctgctttcatgggctggcactgagtgtctgtggcttttccatgtgcactgtgtaagctgtcagtggatctaccattctggagtccggaggacagtggccctcttctcacagctccactaggcagtaccttagwggggactctgtgtgagggttctgaccccacatttcccatccacactgccctagcagaggttttccatgagagctccacccctacagcaaacttctgcctggacatccaggcatttccatacatcctctgaaatctagggggaggttcccaaacctcgattgttgatttctgagtacccaccggctcaacgctctgtggaaaccaccaaggtttgggacttgcaccctctgaagcaatggcccaagctgtaccttggccccttttaaccatggctggagctgaagcagctgggacacagggaaccatgtcctgaggctgcacagagcagggggaccctg

SEQ ID NO: 199619 - DNA, 571 bp, Homo sapiens
ctttcatgactcatctcagctctctcattattctctaggaaactaccttttccaagttccaattccactccccacctgcctcctacccccctaacaactccgttcctaaactctcttttagatgtccttttacagtttttacccatcctacctcyattataccactcagcagcccctgccacactaaattctgtccatttatcttacctgtctttcctttaaactataatctttttttgaaaacagaggctgtattttttttcgcatctttgtatctctagtgcctaatgcagtgtctggaatttagaaggtgcctaaatatttgttgaatgaatgaataatgactgttaagtcaagggtagtttaagacactttttatactgatatttatcatactctacataaccatcacggtgacttcccagaatttcctcccagagtctcttctgttttcattcactctgtaagtaacctaatccaccattcccctggcttcagtagtcacatgtatgactctgactgtggataacttccaaatgtatatcactttctttcatccaaactccagatg

SEQ ID NO: 199620 - DNA, 571 bp, Homo sapiens
ctttcatgactcatctcagctctctcattattctctaggaaactaccttttccaagttccaattccactccccacctgcctcctacccccctaacaactccgttcctaaactctcttttagatgtccttttacagtttttacccatcctacctctattataccactcagcagcccctgccacactaaattctgtccatttatcttacctgtctttcctttaaactataatctttttttgaaaacagaggctgtattttttttckcatctttgtatctctagtgcctaatgcagtgtctggaatttagaaggtgcctaaatatttgttgaatgaatgaataatgactgttaagtcaagggtagtttaagacactttttatactgatatttatcatactctacataaccatcacggtgacttcccagaatttcctcccagagtctcttctgttttcattcactctgtaagtaacctaatccaccattcccctggcttcagtagtcacatgtatgactctgactgtggataacttccaaatgtatatcactttctttcatccaaactccagatg

SEQ ID NO: 199621 - DNA, 610 bp, Homo sapiens
tttagcccttttgacactgagctcttccaggggagactcaattatccttatatctgtgcagaatctagcacactctttgttacacagtagatagtcaatacttataaatagtgatgaatgaataaacagaagagcaaaagcaaatattcattctgtctttcttattcctgattcagaagtaaaaagcagaaggtttaaacaatgggtctttcattctttagcttgtaatttgtgtctttttttttaagataaagttaatggcacaactaaattttaaggatgtgttcaatgttttaataaagtcttattttatccattgcaataataaatgtgtccatttctttgcgtaatataccataaaacaataaattgcagrtggaagactaaaagtgtctttcaaaatgataaatgcccctagtgaaatgaaatatgtgctggcttttcttaatcctactcagcccaagcaagctgcaagcactggacatgacatttttcctctctgagactcagatatatcatctgtaaactgagcaggatggactctggctccttccactctaataatcaataacactaaaatacttcaaagaatcaccagaaatgccaccaa

SEQ ID NO: 199622 - DNA, 522 bp, Homo sapiens
tgtagaaggtggaaaacaggaattagcaccaaatctctaaaaccactgtcacaaattctatgttctgatcaacctttgaaaaaggcaattccattccaatttaatcagagggaaatgattacttaaaagcatcaagtgtgacaatgatgcttttccagaaagattttctgtcttttaacagaaaatgttaatgtcttcaagaaaataaataaaattaaatcaataaattacattaaattaaatcagaaacaaaaacagtttgtaaataatatgcattatarttggttaaaagagctttaaaaagtatttggccacctctgattctatggaattgatatgcaagagaaattcctatctttgaaagtcataataatatacagtaaaatgaaaatagctgattgagattataaggaagttattcatatcaaatattttcagagcaggtgagaaaataatctttgatactacaagtaaagttgaaaacaaacaggatgggtttttaaaacaaatcttagtaacaca

SEQ ID NO: 199623 - DNA, 429 bp, Homo sapiens
aggtttgtctttcatgtgggtttctttgctctgttgagtttcagctctgtgttttgttttgttttttttgcttttctcactggcctgtattgctgatgtcccagcattggcaggaccctgaccggatagctaattcctgatcaccctaaaatcacctgaaaaattcaggtctcccattgttattctctatcttaccttcttgtttgtttgcttctagcatttattacggcttgtgattattttgtctttctacttytctttttttatgtaaatctaaactataagtttcctgagagtggatgctacaccttgcccattgttgtatttactgtccctaccacggtatctgatatgaagttagtaggagccactcagccactcaataaataataagtaaataaaattattggaataaattataaaaggtca

SEQ ID NO: 199624 - DNA, 600 bp, Homo sapiens
ggaagtggcaaccatttattaacatcattgctctctatatcaggcatttgtaagtgtgttctacttaaatatacggtctgtgctaggtgattcattaaacccggcattcataaacttatgatgctgcgtatactgtatgtaaataatactcaacataaagtggaaacaggaaaaaacacctaaagaaaacaaatttttgaaaatgtaaataagtaatcatggtctttcatccactctttctacatgctgagactccattaaatgactgatgtgaaagaattctaatgaaatctgcaacaatactaacaarcacatgtacaatagactccttcagttttttttaatgtgtgtttgtcacttcaaaaatatatctttactacctgaggagaagtaaaatgaaagaagtttgtcatgctgcatgattttgaattctcaaatgtttagaataaatttataatcttgatacactttatttaactaaagaaagaaaaccataggccttaataacaggcatcaatgaataggaaaccaactgcaaattacctaatttgttggatttgaaagtatggaaataagggtagttttaaaatcaaagctatt

SEQ ID NO: 199625 - DNA, 544 bp, Homo sapiens
attgcccattagcaggagttcttaggtgtctgattggaaatgaccacccctgatggaagccaacaacctctacagaaaatggaatacaggcaagggggataaaggctaagaatctgatagtgttagttctgtagctacacacccacaagcagagtcaagttcctaggactcttgaacaaagccactttgtagccaggattgagaatcacaggcccagaggcaaatgacagtactgtgatcacaactggaacgtgcactttgcygaacatggatcacagtcttgagaaagaaagcagctggggacttttgcatatcacaaaatatgcaccattgattaaataatttctaattacttcccgacctattgggagggttctcattatatttgtttgtttttaaactttttattatggaagcctgcaaatcatatatgacaagagaatagtatcctgaactcccaattcatgatcaatcctgttttatctgttaccttctccccaactgtagcattttaaagaaaatctggaatcccagctctaccatt

SEQ ID NO: 199626 - DNA, 530 bp, Homo sapiens
ggacagatggcaagggccttgggagatgacttacatggcttggattttctttccactaaatttttttcatttccccattcctagatgtctatatctctagcattctgtctgttgcattcagaactaaatctgaacttaygactacatgggttcttaatttttgttcacgtaaacagtcatcataatgatgattaaatgatacccatttaattttgtagtcgtgctagagttgagagttgtgctagcatctctctctccattgctaactctgttctcttttgtcaaagtgacagctgttgtcacttccaatgcttctattctcccctgccacttctgttgcttgtcatcttggctgtttgccatttgcttatttttcctttttcttctctctctctctgtttttttctgctacttggtccagacggcttggattttgcacaaattggcttggctcttacagtcattactaactatttagagagagtatcctttcatttaatgtaacaaatcgaccaatcatagcatattct

SEQ ID NO: 199627 - DNA, 632 bp, Homo sapiens
caaaaacaatttattgaaaggatgttgggaactgactgtaaggaagacaggattggagaaccaggtttagaagagaaaaggcagtgccagaagtttttgattggagaaaactacagggcaatgttgcacaagaaccattgctggtaagaatgaactctctttctttcctctttccattgtcatccttatcaagacttaatgttctgagagaacatggccaaattcaggccaggagtttgttccttagttgtgctagtatcgtgggtgggaggacttgaaagaaaaagtctgaaaggattttcttagcttcaagtaaacaccaaagcagttgaggaactctgaagaaatgtctggatattgcrtagtttgaacaaatgataagtatcagcagttacacttacttgttcacacagatgtgctatcaaatcccagcattgccagtgactaagtgtatggctttgtgaacatttcttaccttctgtaggtgccatttttctcatctataaatggggataccaatatatattcttacatgatggttttaaggattacattaaataagatgtgtcctataaaaggtgcttattacagtgtctgtcacatagtagctacacgataaatgatggctatta

SEQ ID NO: 199628 - DNA, 590 bp, Homo sapiens
tttttaaaattaaacttttgttgaaggtatgaatgaataataatggggttgtctatgaagaggagagaatgaaaaagctcagcttaccaagatgaatgctcctctgatcttgtcttgatgggctaaagccttgaagattgctattgggaaacttgacccagttggctgccaaaggacaacacatcaggctgcagatcatcaaacagggttctgagctgcatcccctggggcatcccctagtgcacaaaacaataaaaatcaaggaggacagatgccctttgtgttttgtatctggtcaacagtggggtatctaaagacagatgagyatcttggatggaagcaatcacaagattgaattccaaatcttaagggaacagaggagagacaggagaaagttaaagaaagcagttgcatttttccaggttcacagcacaaatagaaagaatttgattgcagtgaagttcaaggaaaaaggagtttagggaagctggttagtgtatggaaatatcatctcttaggactaggtacaagagattccagagtatagaatgtaaaggagcataacaacaccaaatggcttttgttgttgt

SEQ ID NO: 199629 - DNA, 581 bp, Homo sapiens
aagtactaaacggacaaagtctgaaggcttaaaagtcacctccccctaacacctctgcccaagcatcaacctcctcagggttccttctctagtctgagacactccatgctccatttcccatttttctgtgactggaagttctgagctgccttcctgggagagcaagagtgcttttactacctccctctgccaggtcaggtcacctttgactccacttcygccccacctacatgctctggggggagtcagggaatttgctcctggctcctcttcccttccaggactggaagagatggggaggctgcttcgcaacctctccagacctggactggaggcagggaggacagtcagggcatcagtctatccgtccatcctttggcccatctgtctattgttgcattcatgccgcataccagtaaagatcacaaacatggaatggaagcccacaccaactgtagcgctctctaagcccaacttgagaaaggaaggctcttgttttgcgccctgccccccaattcagccccgatgcttagtgcccagtggcttctctcatctcactgggaaggggagggaccaaggag

SEQ ID NO: 199630 - DNA, 581 bp, Homo sapiens
aagtactaaacggacaaagtctgaaggcttaaaagtcacctccccctaacacctctgcccaagcatcaacctcctcagggttccttctctagtctgagacactccatgctccatttcccatttttctgtgactggaagttctgagctgccttcctgggagagcaagagtgcttttactacctccctctgccaggtcaggtcacctttgactccacttccgccccacctacatgctctggggggagtcagggaatttgctcctggctcctcttcccttccaggactggaagagatggggaggctgcttcgcaacctctccagacctggactggaggcagggaggacagtcagggcatcagtctatccgtccatcctttggcccatctgtctattgttgcattcatgccgcataccagtaaagatcacaaacatggaatggaagcccacaccaactgtrgcgctctctaagcccaacttgagaaaggaaggctcttgttttgcgccctgccccccaattcagccccgatgcttagtgcccagtggcttctctcatctcactgggaaggggagggaccaaggag

SEQ ID NO: 199631 - DNA, 503 bp, Homo sapiens
acccacaggaaggaggcagtgctgatggaagagacctgaagaaggaatctccatggaaccggggctgcttctgcccaagtacagcactgacgctcaatgggaccctggataggccacagtttctccacccccagttctccatctgtaaaacgcggtgcttaagtgagaccaggctattgtataaaaagactaaacgcagagctctttggcttasagtagggagtgtgggtttttgtacttccactgtgtgtttagcacctccaggaggacttaggcaacatgggactccatagataaccaaaaattcctacaaataggagggagagggcatgctttgccatgtgtgaaaagggtagtcttttccttcttggtggtcactgtccacacatgccaactgccagcagaatgactttccagagccttgtagtatttcaggggctggtcttttggtaagacaagaacatcccggagagagaacattcagggatgctccttgttgctgt

SEQ ID NO: 199632 - DNA, 517 bp, Homo sapiens
gtcttctcccttggcttcctggacaacaactatgaatctttcaaaacccagctcagatcccaggaagccatcccaacaactcatcctctacccttaaagaattgtttttccctctgcgacctctgtacataataatggcatctattargcactatgtccctgacactgttccaagcattttaaatgtattaactcatttaatcttcacaattaccctccccatgaagtggcaccattatgacctttatggatatggaaacttgaatcacggagaagttaaataacccgtcctcaaagatactcaactgtatcgagacagattaaaatccttatgtcatacatatttatattattgcatctctcacggggaatttattcatgtgactctccttatactggactgcacactccttgaggacagggattatgttgtattctactctaaatccacagtacctggtataaagtaggtaatgagtgcatgcatttctcaaactgattttaaaataatattcct

SEQ ID NO: 199633 - DNA, 424 bp, Homo sapiens
  misc_feature (1)...(424): n = A,T,C or G
accaagcaggataaaggccaaaaaacctacacctaggcatataatgtacttttctttcttttttttttttttagagatagggtctcactttgtcggccaggttggaataaacgcctggccccaagtgatctcccacttcagcctcccaaagtgctgggattacagggttgagcttcattgtccagttcggcatatctagaaagaagccagaggaaataaacaccttatctatagagaaacaaatatagtaattacttcccacttctcaaaaaccatacaaacaagtgtggagtgaaatattttaaagttttgagagaaaaagcataccaacstagaattctgtaccctgtgaacttattcttcaaaagtcaaggagaaataaagacggnnnnnnnnnnnnnnnnnnnnnnnnnnnnnnnnnnnn

SEQ ID NO: 199634 - DNA, 595 bp, Homo sapiens
acttgtttgtaatttcatgatagtatcttataaactgattttttttaaattgtaattgttacatattgtgttttttccagattttaagtctttattctatgtgaagaacagttttacaaaattcaattgtggtgggttctttaaggaatatagtggagccacttaatgccataattggatattgatgtgcttacatcatgattatgtctacacatgactcaaaatatgcctctagatcaagagttggcaggcaaactctggcctgatccaaactggctcttttgttctctaaaaaaatagagaacaaatttttttctgtaaatattcacactttgggaggggctkaggtggcaggatcccatgaactcaggagttcagtagttcaagaccagcctgggtaacatggtgagaccctatctcttaaaaagaaaaaaagaaagaaagaaaaagtttgctgacttctgctttaagtcgtgggagttacttgcagctagtgtttagggaatacagagtctagcacctttctgtgttctctgtgctcaggctctaaactattagtttagtcttattccactcaaactacataagtaacaga

SEQ ID NO: 199635 - DNA, 407 bp, Homo sapiens
aggataaaggccaaaaaacctacacctaggcatataatgtacttttctttcttttttttttttttaraaatagggtctcactttgtcggccaggttggaataaacgcctggccccaagtgatctcccacttcaacctcccaaagtgctgggattacagggttgagcttcattgtccagttcggcatatctagaaagaagccagaggaaataaacaccttatctatagagaaacaaatatagtaattacttcccacttctcaaaaaccatacaaacaagtgtggagtgaaatattttaaagttttgagagaaaaagcctaccaacctagaattctgtaccctgtgaacttattcttcaaaagtcaaggagaaataaagactttctcagacaaacaaaaattgagatat

SEQ ID NO: 199636 - DNA, 407 bp, Homo sapiens
aggataaaggccaaaaaacctacacctaggcatataatgtacttttctttcttttttttttttttaaaratagggtctcactttgtcggccaggttggaataaacgcctggccccaagtgatctcccacttcaacctcccaaagtgctgggattacagggttgagcttcattgtccagttcggcatatctagaaagaagccagaggaaataaacaccttatctatagagaaacaaatatagtaattacttcccacttctcaaaaaccatacaaacaagtgtggagtgaaatattttaaagttttgagagaaaaagcctaccaacctagaattctgtaccctgtgaacttattcttcaaaagtcaaggagaaataaagactttctcagacaaacaaaaattgagatat

SEQ ID NO: 199637 - DNA, 407 bp, Homo sapiens
aggataaaggccaaaaaacctacacctaggcatataatgtacttttctttcttttttttttttttaaaaatagggtctcactttgtcggccaggttggaataaacgcctggccccaagtgatctcccacttcaacctcccaaagtgctgggattacagggttgagcttcattgtccagttcggcatatctagaaagaagccagaggaaataaacaccttatctatagagaaacaaatatagtaattacttcccacttctcaaaaaccatacaaacaagtgtggagtgaaatattttaaagttttgagagaaaaagcctaccaacctagaattctgtaccctgtgaacttattcttcaaaagtcaaggagaaataaagactttcycagacaaacaaaaattgagatat

SEQ ID NO: 199638 - DNA, 403 bp, Homo sapiens
caattaaaaatgggcaaatgattacaatacacatttctccaaaaaagacatgtaaatggtctataagcatatgaaaatattgtggctcaacatggttcagcaattagagaaacgcaagtcaaaaaccacaatgatataacactttacatgtacttaaatggctaaaataaaaaagacaatcagatgtgttggtgaggaaatgaagaaactggaaccttcatacattgctggtgggaatgtgaaatgatgcggccactttggtaaacagtttgacagttcttcaaaaagttagttcctacatggtccagcattccacttccaggtatgtacctgagayagaataggaatgggacacagctccttcttcgtaatgtttaaaccatgccttttacttaaagaattc

SEQ ID NO: 199639 - DNA, 294 bp, Homo sapiens
cttccaaacctgcacggagcatctggtccagcttctagtcaaaatcacaccacgcctttgaatgattcatgataccagcttcaggctgaattagaggtcttcttccaacaaaaatacacacggcaacagcaagtcctaagtttaraaactaaggctgcctggttgggccattccctacctgtggttctttttaaaggtgtcaatgtcttatatcttggctttgttaactctaaactaagaaaccacctgacctgaactgatgcaatgtggtgaggacatatggttgttggcttc

SEQ ID NO: 199640 - DNA, 273 bp, Homo sapiens
agccccggaggcctggccgcggcgaccgcacttcccgcgacggccgctgggtgtcactgcagccgcgcggctgaatcggctcggcgcctgcgggagtgggggacggtgggacgccgggamtaggccgtcgcgctgcacgccagtctcgcctgcccgcgcctggaggctccgcgacgctgggatgcggcgcccacaccttcctccacccgcctggccaaggaagcacctcccgcctcgcccacagactcgcagcgaggcccggactaagcaacg

SEQ ID NO: 199641 - DNA, 576 bp, Homo sapiens
actaaacagaagcagtctcagaatcttctttgtgatgtttgcattcaaatcccagagttgaactttcctttcaaagttcacgtttgaaacactctttttgcaggatctacaagtggatatttggaccactctgtgtccttcgttcgaaacgggtatatcttcacatgacatctagacagaagcattctcagaagcttctctgtgatgactgcattcaactcacggagttgaacactccttttgagagcgcwgttttgaaactctctttctgtggcatctgcaaggggacatgtagacctctttgaagatttcgttggaaacggaatcatcttcacataaaaactatacagatgcattctcaggaactttttggtgatgtttgtattcaactcccagagttgaactttcctttggaaagagcagctatgaaacactctttttctagaatctgcaagtggacgtttggagggctttgtggtttgtggtggaaaaggaaatatcttcacctaaatactagatagaagcattctcagaaactgctttgtgatgattgcattcacctcacagagttgaaca

SEQ ID NO: 199642 - DNA, 576 bp, Homo sapiens
actaaacagaagcagtctcagaatcttctttgtgatgtttgcattcaaatcccagagttgaactttcctttcaaagttcacgtttgaaacactctttttgcaggatctacaagtggatatttggaccactctgtgtccttcgttcgaaacgggtatatcttcacatgacatctagacagaagcattctcagaagcttctctgtgatgactgcattcaactcacggagttgaacactccttttgagagcgcagttttgaaactctctttctgtggcatctgcaaggggacatgtagacctcttkgaagatttcgttggaaacggaatcatcttcacataaaaactatacagatgcattctcaggaactttttggtgatgtttgtattcaactcccagagttgaactttcctttggaaagagcagctatgaaacactctttttctagaatctgcaagtggacgtttggagggctttgtggtttgtggtggaaaaggaaatatcttcacctaaatactagatagaagcattctcagaaactgctttgtgatgattgcattcacctcacagagttgaaca

SEQ ID NO: 199643 - DNA, 576 bp, Homo sapiens
actaaacagaagcagtctcagaatcttctttgtgatgtttgcattcaaatcccagagttgaactttcctttcaaagttcacgtttgaaacactctttttgcaggatctacaagtggatatttggaccactctgtgtccttcgttcgaaacgggtatatcttcacatgacatctagacagaagcattctcagaagcttctctgtgatgactgcattcaactcacggagttgaacactccttttgagagcgcagttttgaaactctctttctgtggcatctgcaaggggacatgtagacctctttgaagatttcgttggaaacggaatcatcttcacataaaaactatacagatgcattctcaggaactttttgrtgatgtttgtattcaactcccagagttgaactttcctttggaaagagcagctatgaaacactctttttctagaatctgcaagtggacgtttggagggctttgtggtttgtggtggaaaaggaaatatcttcacctaaatactagatagaagcattctcagaaactgctttgtgatgattgcattcacctcacagagttgaaca

SEQ ID NO: 199644 - DNA, 576 bp, Homo sapiens
actaaacagaagcagtctcagaatcttctttgtgatgtttgcattcaaatcccagagttgaactttcctttcaaagttcacgtttgaaacactctttttgcaggatctacaagtggatatttggaccactctgtgtccttcgttcgaaacgggtatatcttcacatgacatctagacagaagcattctcagaagcttctctgtgatgactgcattcaactcacggagttgaacactccttttgagagcgcagttttgaaactctctttctgtggcatctgcaaggggacatgtagacctctttgaagatttcgttggaaacggaatcatcttcacataaaaactatacagatgcattctcaggaactttttggtgatgtttgtattcaactcccagagttgaactttcctttggaaagagcagctatgaaacactctttttctagaatctgcaagtggacgtttggagggctttgtggtttgtggtggaaaaggaaatatcttcacctaaatactagatagaagcattctcagaaactgctttgtgatgaytgcattcacctcacagagttgaaca

SEQ ID NO: 199645 - DNA, 441 bp, Homo sapiens
gtggtgtgcgcctacagtcccagctactcaggaggctgaggtgggaggattgcttgagcccaggaggtggaggctgcagtgagctgagactgtgccactgcattccagcctgggtgacagartgagaccctgtctcaaaaataaacaaacaaacaaataaatcaataagaaaaaaggaaaaaaataacactgattttgcctgaggcaaaatcagccacctctggagagagctgttagctcatttgaagcttattagcacgcccattttacagaggggaaaactgacattccatgtcagtgctgatattggtggggaagctgaagagaaaagagggaagattttgaggagggacttcctgtgggtagaggtcctgtgctggcttgcagccttccattttgggggcagaagaactgacaccaccaccctcccaacaggagcag

SEQ ID NO: 199646 - DNA, 468 bp, Homo sapiens
caactcaaagcgttgaaccctcctatggatagagcagttttgaatctctctttttgtggaatctgcaagtggatatgtggtcctctttgaagatgtctttggaaacgggaatatcttcacattaaaactaaacagaagcattctcagaaacttctctgtgatgtttgtgttcaactcacagagtttcacgttgcttttcatagagcagatgagaaacatgcttttcgtagggtctgcaagtggacatttggagagctttcaggcctgtggtggaaaacgaattatcgtcacgtaaaaactagagagaagcattgtcagaaacttgtttgtgawgactgcattcaactcacagagttgaaggttccttttcaaacagcagtttccaaacactctttctgtggcatctgcaagtggatgtttgggcctctttgaagatttcgttggaaacgggataatcttcacagaaaa

SEQ ID NO: 199647 - DNA, 314 bp, Homo sapiens
cccagaattgaaccttcctttgaaagttcaggttggaaacactctttttgcaggatctacaagtggatattcggaccactctgtggacttcgttcgaaacgggtatatcttcacataacatctagacagaagcattctcagaaacttttctgtgatgactgyattcaactcacagagttgaacactcctttcgagagcgcagttttgaaactctctttctctggaatctgcaaggggacatgcagacctctttgaaggtttcgttggaaacggaatcatcttcacataaaaattacacagaagcatcctcagga

SEQ ID NO: 199648 - DNA, 308 bp, Homo sapiens
acttctctgtgacgattgcattcaactcaaagcgttgaaccctcctatggatagagcagttttgaatctctctttttgtggaatctgcaagtggatatgtggtcctctttgaagatgtctttggaaacgggaatatcttcacataaaaactaaacagaagcattctcagaaacttctctgtgatgtttgtgtycaactcacagagtttcacgttgcttttcatagagcagatgagaaacatgcttttcgtagggtctgcaagtggacatttggagagctttcaggcctgtggtggaaaacgaattatc

SEQ ID NO: 199649 - DNA, 308 bp, Homo sapiens
acttctctgtgacgattgcattcaactcaaagcgttgaaccctcctatggatagagcagttttgaatctctctttttgtggaatctgcaagtggatatgtggtcctctttgaagatgtctttggaaacgggaatatcttcacataaaaactaaacagaagcattctcagaaacttctctgtgatgtttgtgttcaamtcacagagtttcacgttgcttttcatagagcagatgagaaacatgcttttcgtagggtctgcaagtggacatttggagagctttcaggcctgtggtggaaaacgaattatc

SEQ ID NO: 199650 - DNA, 651 bp, Homo sapiens
cagcaaccacatctgcattcagaaatcttttcactttcagaagagcagttcctttcctctattccctctgactgggatcagaccaccaaattaggccactgaggaccacaggctttgatcgttctcacttcacaatagstttagttggtctcctctggaattcaatgagtgacaaaagggaagcagtcatcaaaacatgtcaccaggctcaagttccttctctaccagtgtctcataaaccccataattgcctaaccccataaccactccagctgaatgccagtcattcccagagagcactgcacagcccagactattctggtcccttctctagaaattaagactttttttgtgtgtgatagtcaatagtcttttttgtttttttcttgtcaaattcagcaaagggaacttttctaggagaaaatacctatccctctgtcatctttctttggcagcttagtagagaataaacaaatctctctattctcccattcccagttgcacacaatttgcctgttttctctttctcttaaaaaaaaaaaatccttgcacaagttcagttatctgaacctccagattcctataaaatgaagaatctggtcctaagaattgttattctttccttctttatggagcactgcactgtgcaaa

SEQ ID NO: 199651 - DNA, 651 bp, Homo sapiens
cagcaaccacatctgcattcagaaatcttttcactttcagaagagcagttcctttcctctattccctctgactgggatcagaccaccaaattaggccactgaggaccacaggctttgatcgttctcacttcacaatagctttagttggtctcctctggaattcaatgagtgacaaaagggaagcagtcatcaaaacatgtcaccaggctcaagttccttctctaccagtgtctcataaaccccataattgcctaaccccataaccactccagctgaatgccagtcattcccagagagcactgcacagcccagactattctggtcccttctctagaaattaagactttttttgtgtgtgatagtcaatagtcttttttgkttttttcttgtcaaattcagcaaagggaacttttctaggagaaaatacctatccctctgtcatctttctttggcagcttagtagagaataaacaaatctctctattctcccattcccagttgcacacaatttgcctgttttctctttctcttaaaaaaaaaaaatccttgcacaagttcagttatctgaacctccagattcctataaaatgaagaatctggtcctaagaattgttattctttccttctttatggagcactgcactgtgcaaa

SEQ ID NO: 199652 - DNA, 561 bp, Homo sapiens
tacagtaaacaaaacagcatagtactggtacaaacaagttcttaagaaagttttatattaaataaatttrtagctaaaagaagtactttaaggataagaaaatgaaatagtatatatttttctcctgtgtttctaattcttctttcccctatttatttgcatgtctctcattctttttttgttattgtttttcggtgagacagagtcttgctctattgcccatgctggagtgcagtgagatctcagctcactgcaacctctgccttctgggttcacgccattctcctgcctcagcctcccgagtagttgggactacaggcacatgctgccacgcccagctaattttttgtatttttagtagagatcgggtttcaccgtgttgcccaggctggtcttgaactcctggcctcaggtgatccacctgccttggcctcccaaagtgctgggattacaggcatgagccactgtgccctgccagtctcccattctttatattaatattattttcactagaaaagtgatgattattggcttaatgtgaacttattttggtaggcgttg

SEQ ID NO: 199653 - DNA, 561 bp, Homo sapiens
tacagtaaacaaaacagcatagtactggtacaaacaagttcttaagaaagttttatattaaataaatttatagctaaaagaagtactttaaggataagaaaatgaaatagtatatatttttctcctgtgtttctaattcttctttcccctatttatttgcatgtctctcattctttttttgttattgtttttcggtgagacagagtcttgctctattgcccatgctggagtgcagtgagatctcagctcactgcaacctctgccttctgggttcacgccattctcctgcctcagcctcccgagtagttgggactacaggcacatgytgccacgcccagctaattttttgtatttttagtagagatcgggtttcaccgtgttgcccaggctggtcttgaactcctggcctcaggtgatccacctgccttggcctcccaaagtgctgggattacaggcatgagccactgtgccctgccagtctcccattctttatattaatattattttcactagaaaagtgatgattattggcttaatgtgaacttattttggtaggcgttg

SEQ ID NO: 199654 - DNA, 622 bp, Homo sapiens
tgcaaccagttgaggctaaaatgtcctccaagcattattaaatttgtaggccaattaaatctgctaccctgatcataacaccagccatatgtcccatatagagtccttctcctgaacccatggttgtaagcagttaatttgcggagagggwtcatcaggtaagtacatagtcagaggcatgcattttggaaaagtggggaatattgtaactttttcggctccttcacctgtggaataaaagtagaatgttccaaaaagttgtcaggttacattagaatcacctgaagaggctgaaatactttcaagggagttcatttctagttacctctggctagaatctatttaggcagtggatctgatgtgtcctgcccttcccaggcaggataagagacattgaaaagagatgaaagaaataagacatgccatgtagatgtcaaataatttaatatagtttttgtggtggtaatatattttcttcctgactctgtttaaatcttgaggtgtcctttctaaatagacattcagtagtaaacaagcatgcatgagtttaaatcttttaaatgaatcctttcctatggattcattgtgtgaaatagtagtacctagattccatttcgtaaat

SEQ ID NO: 199655 - DNA, 622 bp, Homo sapiens
tgcaaccagttgaggctaaaatgtcctccaagcattattaaatttgtaggccaattaaatctgctaccctgatcataacaccagccatatgtcccatatagagtccttctcctgaacccatggttgtaagcagttaatttgcggagagggttcatcaggtaagtacatagtcagaggcatgcattttggaaaagtggggaatattgtaactttttyggctccttcacctgtggaataaaagtagaatgttccaaaaagttgtcaggttacattagaatcacctgaagaggctgaaatactttcaagggagttcatttctagttacctctggctagaatctatttaggcagtggatctgatgtgtcctgcccttcccaggcaggataagagacattgaaaagagatgaaagaaataagacatgccatgtagatgtcaaataatttaatatagtttttgtggtggtaatatattttcttcctgactctgtttaaatcttgaggtgtcctttctaaatagacattcagtagtaaacaagcatgcatgagtttaaatcttttaaatgaatcctttcctatggattcattgtgtgaaatagtagtacctagattccatttcgtaaat

SEQ ID NO: 199656 - DNA, 599 bp, Homo sapiens
tattattttctgtaattcagagccacccaagtatatggtcacaagaccctttgaggaaggctgggagaaatatttattagaaaatttttggcagtgtagcagggttcttcctcaagaggatacagcctcccatccattcaaggtgttttgatctgtaaattggctcaagcctgggtgttaattgaggtcttgtggtttygttttgatgatttaaggcttacttatttgtattagacctagaattgttctgtgtatacagatcagtaaataatttagtagaccacccatctgttttctaagaacattatgaccaactagccaatgccagttatctgaaagtcagactattctgattagttctctgggtggatttcatgatttataataatcagaaaacacttttcattggtgattaagtgatatcactcgatcttgtcattccaggattccattatactcgttgaattttgtgatcccagcttgctagtagcagttcccactgtaatttctgacctacagaggagtgaacaagggcttttcatggatactggagctccttctttatttctcagggtcatagtaaaaggtgcataatatgg

SEQ ID NO: 199657 - DNA, 618 bp, Homo sapiens
ccaattccattttactccttaatttgactaaaatgttctaaggtggcaactatatagaaaccagtagttctctttctgtaggtatttaattaggagtgtccactgaaaatattttgcttatttttattaccagattatgccacggacaaccactgcccacttttacaccaaagataatggcataagtgtccttacatacagtcagatgggagaaccaattccagaaactcagaacattttccctaataacataacagtgcctcccctgcggacctcttaagaagtggctgttttccttttctttcccacctgcttaataccttttgtgcctggaagtgagatacattacattctttctcattattgttgcttccaggctgttctcctttttcccttagaatgacaagtctttagactacagcactgactaccgctctcagctgcrgccacctgctcctctcatcccactggccatcattatttcatccctggtgattttagcttctggcatattgcctctttcacattgcttttgttggaatgtttagtgatatcaatattcccatgaattcccctttcaataagttgccctcttttactccactggccttgtttacc

SEQ ID NO: 199658 - DNA, 489 bp, Homo sapiens
ataataggggcatctttggtcaccagaaagaccaaccatgtgatctcaggaggttaggactttgagccagtctgatctccagggaggggaaaggggctggtgactgagtttaatccttggtcaatggtctgactaatcatgcctatgtcaggaaactataatacaactctggacacaagctcagaggaactttctgtttgayaaacacattgatgtgtcaggagggtgatgcgctctgatttcatggaaagagagcgtgggatctctgcgtttgggaccctctcagatcttgtcctatgtatctcttcattatgctggtcctgatttgcagcctttataataaaactgtaattataagtctagcaccttcctgagttccaggaattgttatggagaattgtcaagcctgagagtggttgtaggatttgtagctagttagttggtcaggcacaggtggtctggagacctggaattacagctggcatctga

SEQ ID NO: 199659 - DNA, 489 bp, Homo sapiens
ataataggggcatctttggtcaccagaaagaccaaccatgtgatctcaggaggttaggactttgagccagtctgatctccagggaggggaaaggggctggtgactgagtttaatccttggtcaatggtctgactaatcatgcctatgtcaggaaactataatacaactctggacacaagctcagaggaactttctgtttgataaacacattgatgtgtcaggagggtgatgcgctctgatttcatggaaagagagcgtgggatctctgcgtttgggaccctctcagatcytgtcctatgtatctcttcattatgctggtcctgatttgcagcctttataataaaactgtaattataagtctagcaccttcctgagttccaggaattgttatggagaattgtcaagcctgagagtggttgtaggatttgtagctagttagttggtcaggcacaggtggtctggagacctggaattacagctggcatctga

SEQ ID NO: 199660 - DNA, 518 bp, Homo sapiens
ataaaatatttaactggtcataaaagaggtaactggcatttctttaaagatttttaaaaatccataaatgaatmccaaataaatgttaatatatcacatttaacttcccttttctctatctgtcctaatacattaccatgaaaccaatatataatcctgataaacacattatttaaaaaataagaaaacttgtttaaatgcacacactgcaagccaaattttaacaataaaccatttttatagctatttttgtattcccaactgaaaacattaggtgactttggaaattctaattcctttataatccagcagcaccaaagcaaacagtcatgaccccttaagaggataaaatgcccattttaattaaagactaaattatttgacttggtgtgcaatttttgcatctgtattttgagatgtatttataaatcctgtgcttttcattaatgaaaaactgtacaagtataataattgacaaatagcctatagaggcagtcttaaaaggtgtcttgaattct

SEQ ID NO: 199661 - DNA, 566 bp, Homo sapiens
aattctacactggtgcaaaaagcatttttctaacctctgttacattagccaatctaaaataatatgatatgaactcttcgaactactaatcttattaaatcctgttatcatttctagtactagtctgatcattagcagacaagtttaaaaagaaaattttgggccaggcgcggtggctcacgcctgtaatccccagcactttgggaggccgaggtgggcggatcacgaggtcaggagatggagaccatcctggctaacatggtgaaacctcgtctctactaaaaatacaaaaaatcagctgggcatggtggcacgcacctgtaatcccagctactcatgaggctgaggcaggagaatcacttgaacctaacctargaggtggaggttgcagtgagccgagatcacgccactgcactccagcctgggcgacagagcaggactccatctcaaaaataaataaataaataaaataaaaataaaaaataaaaatttatgtttaaatctcaaacatcaaaaaggcactcgaagtagcttacaaaagcaaagaagagccctgcagagaatcg

SEQ ID NO: 199662 - DNA, 556 bp, Homo sapiens
ctctggccttttaccagagtaactgcactggggaaaggggaatgatcagacttttcagggacttactggatactggctctgagctgacatttattccaggggacccaaaacatcattgtggtcctccagttaaagtaggggcttatggaggtcaggtacttaatggagttttagctcaggtcccactatagtgagtccagtgggtccctggactcatcctgtggtcatttccccagtgtcagaatgcataattggcatagacatacttagcagctggcagaatccccacattggctccctgactggtaggatgaaggctattatggtgggaaaggccaaatggaagccattagagctgcctctacctagataaatagtaaatcaaaaacaatattgtaaaaacaaacaaaaaacaacaacaaaaaccaatatcgcatccctgaagggagtgcasagattagtgccaccatcaaggacttgaaagacgaactctcctatttggcccgtgcagaatagagatggatcttggagaatgacagtggattatcgtaagctt

SEQ ID NO: 199663 - DNA, 563 bp, Homo sapiens
actacttgctggagagattagcatgactaaaagggagccaagttctaatatagaagacaatgggaaaaagacttcagggcatctcagagatcttggagtcaggctctgccatcacaatcccccttccaaaccaaggcctaagaggaaagaaaggtttcatgggccaagtcaagggctccattgtcctgcttatccttgagacactgctgccggcatcctggctgctccagcttcagctgtggctcaaaggatttcaggtgaagcttgggttgccactccagaaagcacaagccacaggccttggtgattccayatgatgttaagcctgctggcatgcagaatgcaagactgaaggaagtttggcgcttccacctagatttcagaggttgtatccgaaagcctgggtgcccaggcaaaagcatgcttcaggggaagagctctcacagagagtctctgctagggcagtgctgaggggaaatgtggaggtggagccccacacagagttttcagcatggcactgcctaaaggagctgtctaaatgggtctgccaccctccagactcc

SEQ ID NO: 199664 - DNA, 530 bp, Homo sapiens
atatcattggaaacacagaaaactgtaatctattaactataatatctgccttttgggaatcctaggtattatttcatattatagacttttttctccttttaatcacaatgtccaacatcctatggaataaatcctattgtctctcaaccaaatgtctccttggtacattttaagatattttcccaatgtgattgttgtcaggcctcttagctgaagctcagccattgtaacccttgtgacctgaacatatacgaccagatggcctgcaggagccaagaagtctggggcaacctaaaactacaaaagaagtgaagcagccagctcctgtcttaactgattgaccaaccttacgacattccattatgactggttcctgtcctgccccaactgatagatcgaccttctgacatkcttcttctgaacaatgagtcttatgatctccccaccatgcaccttgtgaccccctcctctgctaaccacagataaccacctttaactgtaactttccactgcttcccccagtcctataa

SEQ ID NO: 199665 - DNA, 629 bp, Homo sapiens
acaaataaatgaaaagatattctgtgttcatgtattataagwattaatactgttaaaatgcccatactgcctaaagcattctacatattcaatgcaatccctatcaaaattccatggtatttttcaccaaaatagacaaaaattacaaaaatttgtatggactcacaaaatgccccaaatagccaaagcaattctgaattaaaaaaacaaagctagagacataatgctacctgatttcaaattatattacatatctataataaccaaaacagtatgatactgacatagaagcagatacctaggccaatacaagaggataaagagcccagaaacaagcccacacatatatagtcacttaatctttgaaaatgacacaaagaatatacagtgggaaaataagaatcttttcaatgaatggtgttaagaaaagtaaatatccacatacacaagaatgaaactgtatgcttaatttatgccatacacaaaacttgactcaaaatgaattaaagacctaatcataaggcctgaaactctaaaacttctagaagaaaacatagaaggaaagctgtttgaccttgttcttggcaatgtttctttgcataagacaccaaaaacacacacaagaaaag

SEQ ID NO: 199666 - DNA, 575 bp, Homo sapiens
aatgttttaagatttccttttgaatataaatttgtttctttgtattctctttcttatttcctgctttctctttcatgtttcaaatattttaaataaccyattaactttcttctattcacatcttagctgcacttctttgtactattattagtgctctaagaattatagaatgcatccacaacttacgacattctatttatagtcaccttgttttgttttcttttgttttgagacagggtttcactctgtcacctaggctggagtaccatgttatgatcacagctcactgcagcctcaacctcccaggctcaagtcatcctcccaccccctgagtagccgagaccacagtgtgtgccaccatgcccagataatatttatttttattttttttgtagaaatagggtctcattatgttgcctaggctggtctcaaacacctgggctcaaactgtcctcttaattttttaaaaactaaaaaataaatacaacttctgaagctcttcaatctattttgagttttcatataatattttcttcaactttgacttgtgtgtgttgtttagctctgctggtggc

SEQ ID NO: 199667 - DNA, 576 bp, Homo sapiens
gcctctttccccctgcagctcacaattcctgcttttcttttaaggttggcaaagtatttcctttgtttctgtctaatctgcagtccttacttctatttatgctaagctcatattcttcgctcacatcatgatactaaacaggagatgatttcttaacagagataaatattatttttactaagggaattaaaactgcaaagcacaatcatacaaacaatcaatattaacaaaataaaaaagataaagtaagcaagcaagaaataattcaattttyatacttttacaaagctcttcagaattattattttcaagctgttagataaagccatgataaattagaaccactcttcctaatattcactttatctcctaaattgcattttgcctagaaaaaagcttaaatttatcttaaaatattgtattaaagaatgataaaagaaatatctgttcctgggccctctataacttacatctaaaaaacaaatatcaggtataggtctgttctctttggttaatatttctagaaaaactaacccataaatcatgtccataacttgtagttaagaaatgtagctg

SEQ ID NO: 199668 - DNA, 483 bp, Homo sapiens
tgatgtaaattgctcttgtacactgtaggagatgtacttttatttatattactgactttacagagattttatttgtactaccggcttctgcaattacaatggatttccagaattaatgaagtgccagcatgagctcagaaactttctgtcacccatttcagaacaggtatactaagtggttgccttcacatcatatcttaaaattgctttaatacatagaccattttaaaatcatggtatcagtttagaacattttcagaaagactttgcaaagatttccatttcctcaaaaatactttttwtttttccaagtattctttcttatataatttggacgaagcaaagtcgcttagtggaaaagtaatatttaaaaataaatccccactgggccctggagctgtcccttaggaaagcattagtaggaaatgaattaatgtttcccagtttttagctttatattttctgttttaatattgcttaaat

SEQ ID NO: 199669 - DNA, 495 bp, Homo sapiens
attcctgttttatagaggaagaaactgaagcccaaggtcacatgggtaagacaaagcagagtcaggatccagacccaggtctgttattcattcttctcttttatgagtcctcaaagtttcagaagctgcttctgagagctacacatgcaaatttccattttgtacttctgttctcccaaagaggccaggcaagagaaaataagtattcgcctagtacagagtttcacgtatggaacacacacacacacacacacacacacacacacacacacacacacacrgagcaggaaatgttcaccgcgtgctcttttcttttgtttttgtttacactggagcgacgtgtgcccatggatgcctggccttgctgctctgtcccctgcccctcgagctatatggggctccctccaggaccgggctccccaccctggtctatctgacccagtcagggcagtcactcaaacattcattactgtcaccatgaaagtggcatctgtt

SEQ ID NO: 199670 - DNA, 452 bp, Homo sapiens
agccttgaccgtttcatttctaattgagcttatttggatctactctcttattttcttggttaatcttgctaatggtctatcaattttattttatcttttcaaagaaccagctttttgtttcatttatcttctgtattgttttttgtttgtttgtttcaacttcatttagttatgctctgatcttgattatttcctttcttctgctgagtttaagtttggtttgttcttgttcctctagttccttgaggcgtgaccttaaattgtttatttgtgctctttcagactttttaatgaaggcatttaaggcatttaaggaactttcctcttagtatcgtctttgctgtgtccaagaggttttgataggttgtgtcactattattcagctcaaagaattttttaatttccatcttgatttcattggtgaccsagtgatcattcaggagcaggttact

SEQ ID NO: 199671 - DNA, 575 bp, Homo sapiens
tgatgatccaagtctccacaccctgctctgtccatcggagctggaactgcaagctagttctgcctcctatcctgtgttcttttaatttctattagattaatagtatccagtcttttttcttttctaatgaatgcatttagggctataaattttgttctacgtattactgtaacagcattccacaagtgtggatgtatggcatttttattatcattcagcctawaatatagtctttttattatgatttcttctttggatcatgacttatttgcaaatatgctttaaaacatccaaatgtataacttcattcaatttttttacttgaacaatatatagtggagagagaacatggcctgcatgatcccattttgttaatatttgttgaattgtattttatgacctaatatgtgattattataactgttgcatttgtacttgaaaagaatatgcattattaatttttaggtataacattctatatgtcattagatataaattcttaatttgtattttaaaaatccatacacttactttgttacactgtaagggtagacttataaacctctccttgtaat

SEQ ID NO: 199672 - DNA, 525 bp, Homo sapiens
gacactttcctagaaatcaatctgcagctggacaggagggtgtgttctaaggctggtgggatggccagttgcctgtacatgttgtgcattttatggcttgtttgaaaaatcttccctgctatataatccagattatattacatattttgttctagaatttttaaagctttggtttcacctgtagttcattgatccatttgaaattgatatttttcaggattataatgatactttgctgagtggtataaggaagagatccattgttttccttcaatattccagtcaccatcattgaataatagcccattctatccccattgatagggaaatgatgtcttcatgctaagttttctgatataggaagttctgtttctggcttttctcttctgtcctcacatcaattcatctatcctggtactgatactacaatctccgtgtttccaaatcagctctgagatctggtaggacatatctcttctcttcattattcttttaaatactcrcggctgttcttgaactttggct

SEQ ID NO: 199673 - DNA, 490 bp, Homo sapiens
ccaagtggtggttatgccagaaatgcaaaaagagaaaaattattagaaaatacactaatatatttcaccataataatagataaaatgagaaaaagcatatgatatctctctagagcagcatgtccaataggaagataaagtgaaccacgtgggtaattttagatattctagaagccacatttcaaataagtaaaaagcaacagataaaacaaattttaatgatattttatttaacccaatatatctaaaatgtactgtcctagctcaccgcaattcagacacaaaattttcattggaaaagcttgatctgcattaagatttagtgaagtttatgatacaaaaaagtaggtgtatatatccaagttgcaaacatacttgagtttttcagtaactgaattatcagtcttaaaatttagtttamttaaattaaattaaaaattcagttcctcaatcacactagccaaatttcaagtgtttgtgagccagccac

SEQ ID NO: 199674 - DNA, 586 bp, Homo sapiens
aaaagttttagaaagggcaagttagcgtggaaagacaggatgctctggacaaactgctgttcaattatcttaattttgccaacttgataaaaacagaygaccttctgatgatattaccggggtccctcccaggccttacaagagactcaagtgagtggggagcctaaagattccttggtctccccgtaagtccttgtctactggaaagagctgaaatctaaaaggaaactggggatatgaggaattttcctcccaatgatatctctgcccaattctatttgccgaacctaaggtctggtctccattgacaggaaggcctaaccacttgctttgaaagataaagtagattgggtagtaaagagctgcatattaatgaattaaagcttgcttacaaaaacctcgtcatcaaaaatgggatttgaggcaggttcataaaatacaattatccttaaatattcccttggaaatgattgtgcaggacgtgaaggttaatctttgagaccttggactttaaattcttaatctaattgttgcctatttacttaggcttcctgacctttcattgccaagcagtttattgttatag

SEQ ID NO: 199675 - DNA, 586 bp, Homo sapiens
aaaagttttagaaagggcaagttagcgtggaaagacaggatgctctggacaaactgctgttcaattatcttaattttgccaacttgataaaaacagacgaccttctgatgatattaccggggtccctcccaggccttacaagagactcaagtgagtggggagcctaaagattccttggtctccccgtaagtccttgtctactggaaagagctgaaatctaaaaggaaactggggatatgaggaattttcctcccaatgatatctctgcccaattctatttgccraacctaaggtctggtctccattgacaggaaggcctaaccacttgctttgaaagataaagtagattgggtagtaaagagctgcatattaatgaattaaagcttgcttacaaaaacctcgtcatcaaaaatgggatttgaggcaggttcataaaatacaattatccttaaatattcccttggaaatgattgtgcaggacgtgaaggttaatctttgagaccttggactttaaattcttaatctaattgttgcctatttacttaggcttcctgacctttcattgccaagcagtttattgttatag

SEQ ID NO: 199676 - DNA, 586 bp, Homo sapiens
aaaagttttagaaagggcaagttagcgtggaaagacaggatgctctggacaaactgctgttcaattatcttaattttgccaacttgataaaaacagacgaccttctgatgatattaccggggtccctcccaggccttacaagagactcaagtgagtggggagcctaaagattccttggtctccccgtaagtccttgtctactggaaagagctgaaatctaaaaggaaactggggatatgaggaattttcctcccaatgatatctctgcccaattctatttgccgaacctaaggtctggtctccattgacaggaaggcctaaccacttgctttgaaagataaagtagattgggtagtaaagagctgcatattaatgaattaaagcttgcttacaaaaacctcgtcatcaaaaatgggatttgaggcaggttcataaaatacaattatccttaaatattcccttggaaatgattgtgcaggaygtgaaggttaatctttgagaccttggactttaaattcttaatctaattgttgcctatttacttaggcttcctgacctttcattgccaagcagtttattgttatag

SEQ ID NO: 199677 - DNA, 586 bp, Homo sapiens
aaaagttttagaaagggcaagttagcgtggaaagacaggatgctctggacaaactgctgttcaattatcttaattttgccaacttgataaaaacagacgaccttctgatgatattaccggggtccctcccaggccttacaagagactcaagtgagtggggagcctaaagattccttggtctccccgtaagtccttgtctactggaaagagctgaaatctaaaaggaaactggggatatgaggaattttcctcccaatgatatctctgcccaattctatttgccgaacctaaggtctggtctccattgacaggaaggcctaaccacttgctttgaaagataaagtagattgggtagtaaagagctgcatattaatgaattaaagcttgcttacaaaaacctcgtcatcaaaaatgggatttgaggcaggttcataaaatacaattatccttaaatattcccttggaaatgattgtgcaggacgtgaaggttaatctytgagaccttggactttaaattcttaatctaattgttgcctatttacttaggcttcctgacctttcattgccaagcagtttattgttatag

SEQ ID NO: 199678 - DNA, 399 bp, Homo sapiens
ttccttacctaagcaataatttcaagacgaataattgccaggtargcaaatatcagtctctgccacagctctatgacattaccccatccctaaatttaggacttgtccaagggttttcctctaaccccgttccatctcctctcaacacccactcttcagtccttcggctcaagacagtaacttttcttttctttttttctttcttttttttttttgttttgaaacggagtttcgctcttgtcgcccaggctggagtgcaatggcacaatctcagttcactgcaacctccgcctcctgggttcaagcgattctcctgcctcagcctcccaagtagctggaattacaggtgcccaccaccatgcctagctaatttttgtatttttagtagagatggggttt

SEQ ID NO: 199679 - DNA, 399 bp, Homo sapiens
ttccttacctaagcaataatttcaagacgaataattgccaggtaggcaaatatcagtctctgccacagctctatgacattaccccatccctaaatttargacttgtccaagggttttcctctaaccccgttccatctcctctcaacacccactcttcagtccttcggctcaagacagtaacttttcttttctttttttctttcttttttttttttgttttgaaacggagtttcgctcttgtcgcccaggctggagtgcaatggcacaatctcagttcactgcaacctccgcctcctgggttcaagcgattctcctgcctcagcctcccaagtagctggaattacaggtgcccaccaccatgcctagctaatttttgtatttttagtagagatggggttt

SEQ ID NO: 199680 - DNA, 458 bp, Homo sapiens
acagcatttgtccccaggactctgcaggacatccctgcctgctgggtatctgtaacaatgcagcctttcarcaggaaagtcagacttcgaaagcgaagtttgcaacggtagcagcaaatacgaattttttattttattttttaattatttttatttttttatttttttgagatggagtctcactgtgtcgcccaggccggagtacagtggcgctatcttggctcactgcaacctctgcttcccaggttcaagtgattctcctgcctcagcctcccgagtagctgggactacaggcgtgcaccactgtgctcagctaatttttgtatatatttttagagatggggtttcattatgttggtccagctggtctcgaactcctgacctcgtgatccacacgcctcagcatcccaaagccactgggcctagcccccgaaaataagaactttataggtggacac

SEQ ID NO: 199681 - DNA, 451 bp, Homo sapiens
tactgacatgtagacagcatttgtccccaggactctgcaggacatccctgcctgctgggtatctgtaacaatgcagcctttcaacaggaaagtcagacttcgaaagcgaagtttgcaacggtagcagcaaatacgaattttttattttattttttaattatttttatttttttatttttttgagatggagtctcactgtgtcrcccaggccggagtacagtggcgctatcttggctcactgcaacctctgcttcccaggttcaagtgattctcctgcctcagcctcccgagtagctgggactacaggcgtgcaccactgtgctcagctaatttttgtatatatttttagagatggggtttcattatgttggtccagctggtctcgaactcctgacctcgtgatccacacgcctcagcatcccaaagccactgggcctagcccccgaaaata

SEQ ID NO: 199682 - DNA, 567 bp, Homo sapiens
cacctcatacttgcaactggtgcctgaagtaaggacggttttataggactgagcrcttaaacctgcggagtctggcacaaactcagggtagttaagtatcagaaatgaactgaattgtagagtatttagtgtctggagagttgaagaactggttgttgatgtggaaagaacccatacatttattatgagtgacaacagctcagacacaccaactctattttttctttaaaaagcattatcagagataaagagagtcactacacagttgtaaaaggttctattcactaaactatgtatctaataagttagccttaagctagacgaggtaactaattgtaaaattatatgaagaaagtgatagagatatacttcatgtttcaattagtaatgtaattagtaaataaatagttgatttgaactacacaattagcaaatttgatttaatagacaaatacagaactcaaagaatatacattcttttaaagtatacatggagtattttcttaaattggctacataatagatcataaaggaaatatcaagattgcaaagaatatcaatagatca

SEQ ID NO: 199683 - DNA, 567 bp, Homo sapiens
cacctcatacttgcaactggtgcctgaagtaaggacggttttataggactgagcgcttaaacctgcggagtctggcacaaactcagggtagttaagtatcagaaatgaactgaattgtagagtatttagtgtctggagagttgaagaactggttgttgatgtggaaagaacccatacatttattatgagtgacaacagctcagacacaccaactctattttttctttaaaaagcattatcagagataaagagagtcactacacagttgtaaaaggttctattcactaaactatgtatctaataagttagccttaagctagacgaggtaactaattgtaaaattatatgaagaaagtgatagagatatacttcatgtttcaattagtaatgtarttagtaaataaatagttgatttgaactacacaattagcaaatttgatttaatagacaaatacagaactcaaagaatatacattcttttaaagtatacatggagtattttcttaaattggctacataatagatcataaaggaaatatcaagattgcaaagaatatcaatagatca

SEQ ID NO: 199684 - DNA, 594 bp, Homo sapiens
tttaaataaaaaaacaatcagaacttctggaaatgaaagacacatttacraaactagaaaatgcagtgcaaattttaacaatagactagaaggagtctaacaacagactagaagagataatttcagagctcaaagacaagactttcaaattaacccaatcagacaatttttttaaaaaagaatgaaaagaaatgaacaaagtctccaagaaatatgagattatgtaaaatggccaaacctaggaattataggtgttcctaagagagaagaaaaatcaaaaagtttgtaaaatctatttgagggaataactgaggaaaacttctctggccttgctagagatttagacattcagatacattcagacattcagaagctcaaagaactcctgagaaaatcattgcaaaaaggatatcaccaaggcttacagtcatcaggctatctaaagtcaacatgtaggaaagaacctcagggccagacggattcactactgaattcgatcagacattcaaacaagaattagtatcaattctactaaaactgttccaaaagatggaggagggaatcctccttaactaattttataaagccagtatt

SEQ ID NO: 199685 - DNA, 511 bp, Homo sapiens
cttacagtcatcaggctatctaaagtcaacatgtaggaaagaacctcagggccagacggattcactactgaattcgatcagacattcaaacaagaattagtatcaattctactaaaactgttccaaaagatggaggagggaatcctccttaactaattttataaagccagtatttccctgataccagtcaagaaaggacrtagccaaaaaaaaaaaaaaaaagcaacaacaacaacaacaaaaccactactgaacaatatccctgatgaatataggtagaaaaatcctcaacaaaatactagcaaactgaagagtgcatcgaaaacataattcaccatgatcaaagaagtttaattctaagaatgcagggatggttcaacataaacaagtcaataaatgtgattcatcacataaacaattaaaaacaagaactatatgatcatatcaatagattcagaaaaagaacttgataaaatccaacatccctttatgataaaaatcctcaaactag

SEQ ID NO: 199686 - DNA, 677 bp, Homo sapiens
atgtgaattcttggaaaacaggagtccctttagcaagcatgcaatttcatttcatactgagcttagcgctccctatacatatgttcttaagcactcaaaaatgtattacttaaaaaaaaaaaacttaatgaaattctgaacaataatttgttttcagtttttttctcgtgtattttagataaccagaaattatattcaattagttgcatgtgtatttagaataaaattctcttctatcattttgtctaatattaattrtagaattctttggggttaaatgttttaaataattttcttaatttttttttactatgtagctaaagtatttaaatacagttttgtaaaagctcttgtatttaaaaaagtcagaaaaagaactgtggtttcacatttttatatgttaatgaatgtagtcacagtatattgtctgttagctatttctaaagtataaacttaatttatgttatttatttttagaaattagctttcaggcttaaagaatttcactttagacacaaacatgaaaatgatgctttaaaaaccttttccttctgcctgtgaaatatcttaatagcgagttatctataattcaccaagctggagtaggtaggtaatggtgcagagctgatattgagaaagcatctgctgtacattaataagatgtgaaatattgactc

SEQ ID NO: 199687 - DNA, 677 bp, Homo sapiens
atgtgaattcttggaaaacaggagtccctttagcaagcatgcaatttcatttcatactgagcttagcgctccctatacatatgttcttaagcactcaaaaatgtattacttaaaaaaaaaaaacttaatgaaattctgaacaataatttgttttcagtttttttctcgtgtattttagataaccagaaattatattcaattagttgcatgtgtatttagaataaaattctcttctatcattttgtctaatattaattgtagaattctttggggttaaatgttttaaataattttcttaatttttttttactatgtagctaaagtatttaaatacagttttgtaaaagctcttgtatttaaaaaagtcagaaaaagaactgtggtttcacatttttatrtgttaatgaatgtagtcacagtatattgtctgttagctatttctaaagtataaacttaatttatgttatttatttttagaaattagctttcaggcttaaagaatttcactttagacacaaacatgaaaatgatgctttaaaaaccttttccttctgcctgtgaaatatcttaatagcgagttatctataattcaccaagctggagtaggtaggtaatggtgcagagctgatattgagaaagcatctgctgtacattaataagatgtgaaatattgactc

SEQ ID NO: 199688 - DNA, 574 bp, Homo sapiens
ctttaaagtttacaaagttcttttcacaaatatcctttcaattaacaggagattcagtacaacagaattgtttcaaaatatatactcatctagttgtatgtaacattttcacatattcatttaaaaagccaagtttattaaagggtcatccacagacctcctgcatcaacatcacatggggtggtatttaaaaagacagtatcccagatcttctgaattataatacttggaaataaaacctaggaatctgcattgtaacactgacattgattccaatacccactgtcatttgaaaaccactcttaaaagaaatgtaattcaaagagactaaagtatgagtatgtaagtaacacattagaatactccaaaaagatgacttccatggttattattttaactcatgaccttagaactctgcaaatagtcttagcttcaaataagtatttaaaagtaamgttttctctaaaactaatacccagcataacagtgcttatttttaaaaatgaatgaataaatgaatgaatatacaagtagatggcttgttccagaaatttcaaaaaaacaaatgcagctc

SEQ ID NO: 199689 - DNA, 655 bp, Homo sapiens
tcctgtgtcctggatggcaccagctccccaggcatgtggaaaaaaccacagccccccagagctatgccacmtgcctgggggctctaacccattcctgcagaatggctgcacctccacccttgctatatggcaatgtccttggagtgctatacatcttccaaagccaccttacatctgtggactccccagtctagtaaagcaagaagggtggaaggggagcctcagcggaaccgtgtctattcacacccacccacccacttggcatctctttctcggccacaggactcccagcgttccacgccttcctgctgccccgggagcctctgtgggttcttctgtctcctcacttagcatcttacctctcaccacatgcttgcttgtgtcacccactccagccagaccacaatccctggagattcctgaaactctcaaggtctctcagacctctgctcctcggcaatgccaatcaaaacacccctctcttccttcctgcccttctctgggctgtcacatgggtgtaagacaccacctcagggaagccttcctggatcccccagctgggtgagagggaggtgcctgtgactggagacccaccgctgccctcggccatggcactctctgccctgctgccatttatgctctgtttatgtctagg

SEQ ID NO: 199690 - DNA, 550 bp, Homo sapiens
atccttcctcaatgggtggggcctccctgcaggaactccaacacctacagccagaggctcagggacagagaaccctgacttccctgggcctgagcccctagtgggaggggtggccgcagtctctgcagaccaccagacttagcctctcctgctggtagttgtgaggaattcgggcagcccagatgaatgggttttcccctagcaaagtgcacccacttcaccaagggacagtcaaagtgcttctttaaatgggtcctgttccccatgccacccaactgggtaagaccctccagtaggggttgtcagacaccctatactgcagcaatcctactggcatcaggttactgcccctcgaggtcagagatcccagaagaaggagaaggcacccatttttgctgttcttcagcctccttgaggaacatctccaggtgtgggagtgagacggatgaatagggactgaagwgaacccccagcaaactgcagcagccctatagaagagggagttgaccattgaaataaaaacaaaaaataaaacagaaagtgacaacag

SEQ ID NO: 199691 - DNA, 599 bp, Homo sapiens
gtttgtctattgagtggcatggggtcatttgcatgtctcccatttggttgtcatctttcttacaaaggaaggaaacaacttgggaagaagggaaatctctttggtgggcctattagcattaaaaatctctagatctccttcctcccaaaaacataactacaatgcagtcaacagatacaacataaaccaagaaagccactgatttgctggtatrttgattaaaagctacgttatcgcattgagagatctgatagtatttaaaatgctacagaaagattttcttcattaaaaaacaattttcaactaatcttattatgtggaatcatcaagtaaacctttatagggacttgttttctctgacatagaacacctcacttgagctgacttctaaactcatccatacaattcaaatcaatagcaatgtaaacttagtccctcctcaatgttactagttttgaaatttttactttgcatcggaaagaactagagatctctctattcctttcatcaggtgtccaatctactccaatctaaaattatcttagtaatgctcacacgaagatgttttcttcatggctggtttttatacaaagctattt

SEQ ID NO: 199692 - DNA, 599 bp, Homo sapiens
gtttgtctattgagtggcatggggtcatttgcatgtctcccatttggttgtcatctttcttacaaaggaaggaaacaacttgggaagaagggaaatctctttggtgggcctattagcattaaaaatctctagatctccttcctcccaaaaacataactacaatgcagtcaacagatacaacataaaccaagaaagccactgatttgctggtatgttgattaaaagctacgttatcgcattgagagatctgatagtatttaaaatgctacagaaagattttcttcattaaaaaacaattttcaactaatcttattatrtggaatcatcaagtaaacctttatagggacttgttttctctgacatagaacacctcacttgagctgacttctaaactcatccatacaattcaaatcaatagcaatgtaaacttagtccctcctcaatgttactagttttgaaatttttactttgcatcggaaagaactagagatctctctattcctttcatcaggtgtccaatctactccaatctaaaattatcttagtaatgctcacacgaagatgttttcttcatggctggtttttatacaaagctattt

SEQ ID NO: 199693 - DNA, 599 bp, Homo sapiens
gtttgtctattgagtggcatggggtcatttgcatgtctcccatttggttgtcatctttcttacaaaggaaggaaacaacttgggaagaagggaaatctctttggtgggcctattagcattaaaaatctctagatctccttcctcccaaaaacataactacaatgcagtcaacagatacaacataaaccaagaaagccactgatttgctggtatgttgattaaaagctacgttatcgcattgagagatctgatagtatttaaaatgctacagaaagattttcttcattaaaaaacaattttcaactaatcttattatgtggaatcatcaagtaaacctttatagggacttgttttctctgacatagaacacctcacttgagctgacttctaaactcatccatacaattcaaatcaatagcaatgtaaacttagtccctcctcaatgttactarttttgaaatttttactttgcatcggaaagaactagagatctctctattcctttcatcaggtgtccaatctactccaatctaaaattatcttagtaatgctcacacgaagatgttttcttcatggctggtttttatacaaagctattt

SEQ ID NO: 199694 - DNA, 583 bp, Homo sapiens
ttttgtagacatgaggtctcactacattgcccaggctggcctccaactcttgatctcaagcartcctccctcattggcttcccaaagtgatggattacaggcatgagccactgtgcccagcctcagcataattttcaattgctcaaaatcatggtaatgttacttgattttatttatgtctcatttacttttctgtaagtagatctatctttccaaaaatgtagtcaattccccaacttttatgttgttcttcaaaagcatcagcatttccaagacaataaatactgcatattgtaccaaataacctttcaatttaagcatgtggaacataaaaatggtgggctgcatgtttttacttgaatcataagaaagaacacacatgaggtactgaaactgttttctcaggaggaacaacattatacttgcagagcattcacaatccacctggattaatggtaactaatgctcctctattccaaatcctgtcaaatttgtcaatatttgttctgggaagataaaaaatgctgcaacagtacaacgaaatgttccctgaagaactcttatatatttggtttcaggaatt

SEQ ID NO: 199695 - DNA, 586 bp, Homo sapiens
tggaaaaagcatttagaaatatcagaaatggaaaataaagaccagatttgaagaggataagataaggattaattcaaaactgaattaattcagttctgggcatgttgagtttgaggtgatcataggacatcaaagtggagacgtccaattctacaggagagtttcaagagagctagaaataatatttgaggtaatctgtaaaagagttgttggtggtgctatagactggaaagttcatgaaattgccacaagtaagagtgtagacactagggtttttgacatttcagggtcaagatcaagggcatgaaaaagaaaagctgtgtatgaaagaggagaaacagattgttagaaagtcattaaaacaaaagttaggggttcaaaaaggatgtcagcagtgtgaaaagcttcagaatatcaaaggakgaagatttagaaaacaactttgtattcggcatttaggaggtcagtaatcatctctggtagattagtttcagccaagtggcaagcaagcagaaataaaattgctaaaggtgaagacacaagagaaacaattgtagattttcaaaaagtttgtgcaaagatggta

SEQ ID NO: 199696 - DNA, 537 bp, Homo sapiens
tatttattttcctctactaattttgagtttgatttgctcttgctttttaaattcttttaggtgtaatgttagatagtttatttgaagtttttcttcttttttgatgtacgcacttacagctataaacttgcctcttattattgcttttgctgaatcccatagttttggtattttgtggttctattatytgtttcagtacaattttagtttgcttcttaatttctttattgacccactggtcgttcaggagtatattgcttaatttccatgtatttgtatagtttccaaaattcttcttgatattaatttctagttttattccattgtagtcagagaagatgtttgatattatttcaagttttttgaatgttttaagacatgttttgtgatttaacatatggtctgtccttgagaatgatccatgtgctgaggaaaataatgtgtatcccgcagctcttggatgaaatattctacaattgtctattagatccatttggtctaaagtgcagattaagtctgatgtttcattttggattt

SEQ ID NO: 199697 - DNA, 537 bp, Homo sapiens
tatttattttcctctactaattttgagtttgatttgctcttgctttttaaattcttttaggtgtaatgttagatagtttatttgaagtttttcttcttttttgatgtacgcacttacagctataaacttgcctcttattattgcttttgctgaatcccatagttttggtattttgtggttctattatttgtttcagtacaattttagtttgcttcttaatttctttattgacccactggtcrttcaggagtatattgcttaatttccatgtatttgtatagtttccaaaattcttcttgatattaatttctagttttattccattgtagtcagagaagatgtttgatattatttcaagttttttgaatgttttaagacatgttttgtgatttaacatatggtctgtccttgagaatgatccatgtgctgaggaaaataatgtgtatcccgcagctcttggatgaaatattctacaattgtctattagatccatttggtctaaagtgcagattaagtctgatgtttcattttggattt

SEQ ID NO: 199698 - DNA, 473 bp, Homo sapiens
tccaaacccttacttattgttctttaatgtccttttctttctgattgaagtattccctttagcattgcttataagataggtctgatgttgataaaatccctcagcttttgtttgtctgggaaagtctttaattctcctttgtgtttgaaggatatttttactggatatactattctatggtaaaagcatttttccttcagccctttaaatatgttctgccactttctcccggcctgtaaggtttccactgaatagtctgttgcctgacatattgcagctccattttatgtcattttttcctcttactgcttttargatcctttctttttcctttgggagtttgattattaaatgcattgagatagtcttctttgtgttacattggcttggtgttctataacattcttgtacttgtatattgatatctttctctaggtttgagacattctccattatctttttgaataaacttt

SEQ ID NO: 199699 - DNA, 489 bp, Homo sapiens
attttaaaaagtacagttaagttcttattgactctagtcaccctattgtactatcaaatagtaggtcttattcattccctctattttttttgtacccattaaccatccccaccttccctccagcccttcactattcttccaaacctctggtaaccatccttctactttctgtgtttattagttcaattgttttgattttaagatcccacaaataagtgagaacatgtgatgtgtgtcttcctgtgcctgkattatttcacttcgcataatgatctccagttccatgcatgttgttgcaaatgactgggtctcactcttttttatggctaatagtactccgttgtgtgtatgtaccacattttcttttttttaatgtttattttaagctcaagaatacctgtgaaggtttgtaacctaggtaaactcatgtgactgggatttgttatacagattatttcgtcacccaggaattaagcccagtacccaata

SEQ ID NO: 199700 - DNA, 530 bp, Homo sapiens
agaaacttctgtgatgaggtgtgaagataaatgtagtctttatgggatcagtatgcaaactattagacataaattataagcatgtttgaaaagctttcttcaattcttttctttttctttttagagacaggttcttgctgtgttgcccaggctggagtgcagtggcatgatccatcatagttccttgcagccttgaactcctgggctcaagttatactcctgcctcagccccctgagcagctaggactacaggtacatgccaccatccccagttaattatttttaatttttttgtgtagagaaagaggtcttgctattttgcccaagctgatcttgaactcctgggctcaagtgattctcccacytcagcctccaaaagcactgggattacaggtgtaaaccaccatgcccagtgtcttttacctctttaagtagagatgtagagtaggcattagatatacaagttcagtgcttgggatagatgtctggacaggagatatatgcttaggagaggaatgactgtaaataga

SEQ ID NO: 199701 - DNA, 468 bp, Homo sapiens
gggttactatgttctgttaatacagagattctaagctgtaccaagctctgagatgttgaagagcaaattatttgaaatcacagaagtatgactttcccatgattcaacaaaaaaggatccagaaagaagttaaaatatttcagacgggtggtcacatagacatgtcaattcctaatctgtgcagctgctctttgtctgatactcactgtgrgctttccacccatctctggggaaaaactaatgtctatatgaactggctgtttttagcccaggcactatcctgcagcctttagcaaagctaaaggcttacttttaccaaggcttggtttatctttaccaacgcttggttgatttttttctagaataatgccacaacagctccaataggggattggcagagatctttggcactctgaagtttagggtggatatggttaacttaatctcaatctatcattaagatcacac

SEQ ID NO: 199702 - DNA, 537 bp, Homo sapiens
gtagtaattctgggactacacctgcattatctttttggtatcacataaataaattaagtccatattccaagatgcacctagtcttgaatttattccaaagagctggattctctaacactgtcatccaggcacacctggaactttaatgttcatctgttcacatgtgtattattgttccagtttgataatcatttgccttaataaagaacacagagtgtaccagctaaggtgctcttggctgaaagtaacaggaattccaactcaaactgcctaagataattaaggtatgtataactttcaggagtagatcaggcttcagcatttgttaatttgtgtctyaacattaccatcctgtctgcttgctctttgtatctttcagtccgttgcttatagcatcaacgtcataacgaggctgattctgcttatagtcataaggtggcttccagcatcagtctgagttcatgttttctgattcatattacactggagagacagaagacagagaatgagaaaatgagaaagagagaaattcttcta

SEQ ID NO: 199703 - DNA, 558 bp, Homo sapiens
aggattttaagcttcttccaggaagtagatgaacctttgccaagtaagtaataatttctagtttggtcaaggacaaataaaaagccagtccactatttgatgaaactatttaatatgcatgtagagaaaagctcatttaaaagcacattacctgccaaaataaaattacagttgtaacctaccaatatgaaattagacagaaatttcaaatctaatttagaatcatgagcttggaggaattacaggcaacacaatgttytaaatgtgcaagacagatgcttatttgtgccagaggtcaatgctcaattatactctgaatgtcatcagctaggatgctacaaggcgggggagaagtggaatggaaaaggaagatcagatattaaaatactaacgaaaatgagaaaaatcaaatcaaataaagtgatctccaaagaaaccaaagaagaagaaaagcaaaacaaaacaaactacaaatcactgtctacagggctaataattctgagtataggagagaggtaagacattgacattcattgaatattctaccatgtgtttgac

SEQ ID NO: 199704 - DNA, 527 bp, Homo sapiens
ctgccttctcacaaaactgttatgaaaaatgaatgtgacaatgtgtattcaagaattttatacactgtgatgttcacacaaatgatagtgcttgccaattatttgtaaaatattctcccttaaccagaagaaacctatagcctagtgaaggcaatcagagataacaaattcaagaatttagtaacaataaagagctaaatagtaccagacagagactcgagagatgttgcaagacaacacaggattaactgtcaaagaataaaggcttgagcagagagaaacagggagtagtgtgagctagaatcatcaagggacaaatgaaagagttgccaaaacaccatgcaggctcaactaagctttcagaccaggaatctgcagaaggtcaagttagcacaaaaatgaaggagtatcaagctttaattacraacatctaacattttgataaacaactttcataagtaaaaaaatcttcacaatttcagacctttaaatataagtgttggaaagggagacaaacctgcagagat

SEQ ID NO: 199705 - DNA, 608 bp, Homo sapiens
ctctgggcctggaggaagctgcagtgggggtagggaataggcaggctggtgtgtggccatgggggctgccccattggacctctctgccagtcaggcacagttcaccactgcaggagctattatgtgggctcccagagcacctgcttgttctacaagcaggcatggccaggctggggccctggaagaggccagcagaccaaggggtgctcaagtcagactagccccatctgatgggcaagaccaccatgcagagttcaagtctgagagtttccctagggataatgtctcctgtggtagcatgtcgagcctacagggatggacatctcttgtcatactctgccacragtgcttaggcaccaaatccttttggctctgcatcagctggcatgctgcccctaccaattctctaagcagctctttgttccaactcaagtatccgtcatagtttaggggtctcctcctgccaagattccagaggcctgtggcaagagtaggttgatccttgtcagttcaattcacccattcctttggagttgttggagggtaggaattagtcccctgcctggtagcctcctgtagggttcccagcttcctcccacttgagcaca

SEQ ID NO: 199706 - DNA, 608 bp, Homo sapiens
ctctgggcctggaggaagctgcagtgggggtagggaataggcaggctggtgtgtggccatgggggctgccccattggacctctctgccagtcaggcacagttcaccactgcaggagctattatgtgggctcccagagcacctgcttgttctacaagcaggcatggccaggctggggccctggaagaggccagcagaccaaggggtgctcaagtcagactagccccatctgatgggcaagaccaccatgcagagttcaagtctgagagtttccctagggataatgtctcctgtggtagcatgtcgagcctacagggatggacatctcttgtcatactctgccacgagtgcttaggcaccaaatccttttggctctgcatcagctgkcatgctgcccctaccaattctctaagcagctctttgttccaactcaagtatccgtcatagtttaggggtctcctcctgccaagattccagaggcctgtggcaagagtaggttgatccttgtcagttcaattcacccattcctttggagttgttggagggtaggaattagtcccctgcctggtagcctcctgtagggttcccagcttcctcccacttgagcaca

SEQ ID NO: 199707 - DNA, 276 bp, Homo sapiens
aattaatttctcacactcctggagcctagaagtctaagaccagagtgccagcctgatcaggttctggtgagggcccccttcttgccttgtaaatggctgccttcttgctgtgtcctcacaatgcagggagcgagttaactccagtctctttctctgattataaaggcactaatcgtattacagggttccygtgctcatgaccttgtctaaacctagttatttctcagaggccctacctccgaatactgccacattggaattagggcatcaatgtac

SEQ ID NO: 199708 - DNA, 614 bp, Homo sapiens
tctttgatctctcatgatctaactcaaaggtatctcattcctgattcacttcttccttcatccaaactgcactcctgaagcatttaattaatctaaacataagcaatgctgacttactgtttcatattgtattatgtttttgaaactgatttagcccatgtctgaatctttattgttctgaagcccgatcatccagagcctaatatatacaacgctgaaccaaacaaacacatgataacaaaaacactaatttagtgaattaatctagaagaatctagcagaattaatctagaaactgcacagcagcagtttctctcttcagcttgaattactaarcaattcaagttagcaattgtgtagacccaaataagataataatatttagtcatttagatatgccactacaagtaaaaataaatcagatacatacacatacacacaaattactcatagaatgcagtattcataaaaattatgttactttttaaacaagctgtctttttatgtttttgcaaatagtggcgacaaattggctacttcaagtggtgacactacagttaaattatgggatctatgtaaaggcgattgcattttgacctttgaaggacacagcc

SEQ ID NO: 199709 - DNA, 565 bp, Homo sapiens
agaatagtgaaagtcataaaaattgtattctggatagatttgaaagataaagacaacaggagtttctgaagtactgtgaattgtgagagaaagaggaaacaaatgacctgttacattttcatacacctgaaaggcaaaggctcattctccttatactgggacactaatataaacattataaaaggcttttccaaccaggtgtatcakctggtgatccagaagccatgacagaatgaggaatgccttctcattgttcatctaacatttccattaaagaaaatggaatgtttcccttctgcccacttcctagcatcacttcctttttattttaataattctgtagccaatcataacccctgtgctggatgagatgacagaaacagaagtctatttgtaaagaaaacagataaattaagaaagaggaaatatgaaatgttaagattgttatgatgaattaccttctgttaatgatatatactattattttgaaggggaaggcaaataatgcatgaaagtggactctaaaataaaagaaattttcttattacaaaaccaataatgataa

SEQ ID NO: 199710 - DNA, 563 bp, Homo sapiens
gagcatagctatggaaaaaaatcagaatcaggctgacctgtttcatttcatgtttataacctcaactcacaagttgaattcaactgaattttctctatcaattaacttactacaatgtgagatgagtatttcacaccttcctcctccatattcaaatccctaacactctccccactcactttttctctgagtgacaacatggattttcatttcactgagcaaatagaagaaatcagaagaacatttttattcttccaccaccaaatccatcaatgatttatatttcccttttctctggatgttgcctcggtatttcttctgtattgacttacctggagctgggtagtctggaatagtcattcacrtgtttgaagcttcagttgggacagctggggaaagtttctctgtgatatcttattttccacatagtggcagaaatggtccagcagcaagaaaaagcaagctccaatgaacaagaactcatttaaacctttacttactattatatcattgaccaaagcaagtcacatggccaatattagagttcatgtgggaggggaata

SEQ ID NO: 199711 - DNA, 619 bp, Homo sapiens
actgaaagcttttcctctaagatgaggaacatgacaaggatgcctactttcaccgttattcaacatagtgctggaagtcctagttagagcaatcagacaagagaacgaaataaaaaatatccaaattggaaaggaagaagttaaattatcctggttcacagatgatatgatcttatatttggaaatacctaaagacttcacaagaaaactgttaaaacttataaacaaattcagtaatgttccaggataaaaaattaatatacaaaaattggtaccatttctatatgtcaaaagtaaacaatctgaaaaaaaaaaacaatttagcaatcccatttacattaggtacaaataaaataatataastaggaattaactaaaaaagtgaaagatctcttaaatgaaaactataaaaaattgatacaagaatttgaagagaatgccaaaaatggaaagatattccatgttcatggattgaaagaatcagtattgttaaaatgtccatactacccaaaacaatctacagattcaatgcaatctttataaaaataccaatgatattcttcacagaaatagaaaaaacagtcctaatattcatatggaaccacaaaagacctagaat

SEQ ID NO: 199712 - DNA, 550 bp, Homo sapiens
tagtgctggaagtcctagttagagcaatcagacaagagaacgaaataaaaaatatccaaattggaaaggaagaagttaaattatcctggttcacagatgatatgatcttatatttggaaatacctaaagacttcacaagaaaactgttaaaacttataaacaaattcagtaatgttccaggataaaaaattaatatacaaaaattggtaccatttctatatgtcaaaagtaaacaatctgaaaaaaaaaaacaatttagcaatcccatttacattaggtacaaataaaataatataactaggaattaactaaaaaagtgaaagatctcttaaatgaaaactataaaaaattgatacaagaatttgaagagaatgccaaaaatggaaagatattccatgttcakggattgaaagaatcagtattgttaaaatgtccatactacccaaaacaatctacagattcaatgcaatctttataaaaataccaatgatattcttcacagaaatagaaaaaacagtcctaatattcatatggaaccacaaaagaccta

SEQ ID NO: 199713 - DNA, 553 bp, Homo sapiens
ataaataaggcaaggggaactcaagtgaacacatggataaaatgattagatrataaatggaattattcgagaaatattttaaaaattagtgtaattataaaaggtaaataaattctagataaacactgtattaatcagggttctccagtgaaacagaaccaataggagaaagagagagagagagatagatgcaattatggaggcaggaagtcccacgatgtgctgtctgcaagctggaggcacaggaaagccagtggtacagttccagtccaaacctgaaggtctgtgaaccaaggcagtcagtgctctaagtcctggtccaagttcaaaggcctgagaaccaggagctctgatatccgacagcaggagaatatggatgtcccagattgagcaaagagcaaactcaccattttagttatatttatgccctcaatggattgaatggtgccctcttacattggcgagggacatctcctttactcagtctactgatccaaatgttaatctcttctagaaacaccttcacagacatacccagcagtaacattttacc

SEQ ID NO: 199714 - DNA, 553 bp, Homo sapiens
ataaataaggcaaggggaactcaagtgaacacatggataaaatgattagataataaatggaattattcgagaaatattttaaaaattagtgtaattataaaaggtaaataaattctagataaacactgtattaatcagggttctccagtgaaacagaaccaataggagaaagagagagagagagatagatgcaattatggaggcaggaagtcccacgatgtgctgtctgcaagctggaggcacaggaaagccagtggtacagttccagtccaaacctgaaggtctgtgaaccaaggcagtcagtgstctaagtcctggtccaagttcaaaggcctgagaaccaggagctctgatatccgacagcaggagaatatggatgtcccagattgagcaaagagcaaactcaccattttagttatatttatgccctcaatggattgaatggtgccctcttacattggcgagggacatctcctttactcagtctactgatccaaatgttaatctcttctagaaacaccttcacagacatacccagcagtaacattttacc

SEQ ID NO: 199715 - DNA, 553 bp, Homo sapiens
ataaataaggcaaggggaactcaagtgaacacatggataaaatgattagataataaatggaattattcgagaaatattttaaaaattagtgtaattataaaaggtaaataaattctagataaacactgtattaatcagggttctccagtgaaacagaaccaataggagaaagagagagagagagatagatgcaattatggaggcaggaagtcccacgatgtgctgtctgcaagctggaggcacaggaaagccagtggtacagttccagtccaaacctgaaggtctgtgaaccaaggcagtcagtgctctaagtcctggtccaagttcaaaggcctgagaaccaggagctctgatatccgacagcaggagaatatggatgtcccagattgagcaaagagcaaactcaccattttagttatatttatgccctcaatggattgaatggtgccctcttacattggcgagggacatctcctttactcagtctactgatccaaatgttaatctcttctagaaacaccytcacagacatacccagcagtaacattttacc

SEQ ID NO: 199716 - DNA, 487 bp, Homo sapiens
gagctgcttgcaatgtgacatcagattaccaaggaaatgttagtaatgcagatcaaccattaaggctgatcattgcaaaggtgtcacctgtcagacctggaaggcagatttctcatgggtatgtcagtattcttgctgactctgttaaactgcatctatctgaacttctcatttgtggctcacctaytctaggagcaagaaaagttgtgtcttgagattttacactattgtaagtataaatagaaaaggcctaattagaatgggacagacagcaggggtagtgcataatttagaaaagcaacatgaaagttagcactctaagaaaaaagaaaatacaaaaattgaagtgaataagatggggaggaaaatagcaaatcaaaaagccaatgagattaatacaactttgctctccaaaggcaattattcaagttccctaaatctggccatttcctcattcacaggcttctgcagattcctaatgtgaagc

SEQ ID NO: 199717 - DNA, 487 bp, Homo sapiens
gagctgcttgcaatgtgacatcagattaccaaggaaatgttagtaatgcagatcaaccattaaggctgatcattgcaaaggtgtcacctgtcagacctggaaggcagatttctcatgggtatgtcagtattcttgctgactctgttaaactgcatctatctgaacttctcatttgtggctcacctactctaggagcaagaaaagttgtgtcttgagattttacactattgtaagtataamtagaaaaggcctaattagaatgggacagacagcaggggtagtgcataatttagaaaagcaacatgaaagttagcactctaagaaaaaagaaaatacaaaaattgaagtgaataagatggggaggaaaatagcaaatcaaaaagccaatgagattaatacaactttgctctccaaaggcaattattcaagttccctaaatctggccatttcctcattcacaggcttctgcagattcctaatgtgaagc

SEQ ID NO: 199718 - DNA, 507 bp, Homo sapiens
ttcttttttgtggctgcatagtattccatggggtatatggagtaccttattttgtatgtagcgttttggaagtctgatgccaactatttttcttgtcattgtttttatttmtttatttattggctaaagtctgcatatttttcttcttcatctgtaaaaatttggtatttttactttaacatcattttgaactgattattactaatcaattttctctgctactcattgagccctttcagcatttagattcaggacttcttttatttctgaaaggctatttgaattgtcctttaaaaattaattcttttccattattttacttatattccttggagactccagttatagtaaattggatcttctttgcctatcttccattttaagcactttctttctgagcctttttgtttattttatttttattttctttgttgtttttctattttttaaatgaacattgttatacttttatttgaatatattctttcttgggtatctcgtaattta

SEQ ID NO: 199719 - DNA, 547 bp, Homo sapiens
ggtttaagttttttgttctgttttgctttgtttttgctccatacctcaaagtgtttgttcattaatttagtttggagtattgtgttaaagttttcttctttttcactgttactttttgggggttgcagaaggaggattgtatcagctgaattgtttatattctcattctctgatttctttttgtagtttttaataaacaaagactctttgcacytctacattttaatggtctaggttggtgatttgtagtagtttcttttttttttttaaatcatggctaaaaaatgtcctatgtagtcagtgtgaaaaaagcatagtttcattacaaagtgcatttttttttaggggaagattttataagggactaagttattagtcttccaattgtattgtattgtctcttatcttgctcaatctaaatttctctctcgcttctttttcacttcaccatataatttccaaagggcacttatttcttgcttttgattctcttcttgaagactgatgccaacctcttgaagactgattccttgcatactgtatgcat

SEQ ID NO: 199720 - DNA, 489 bp, Homo sapiens
ccagctactcaggaggctgaggcaggagaatggcgtgaacccaggaggcgagcttgcagtgagccgagatcacgccactgcactccagcctgggcaacagagtgagactccatctcaaaaaaaaaaaaaacataaaaaaaggataccagttctattggattagggctttacccttatttaaccataattaccgctttaaatgccttatctccaaatagaattacttggggcttagggcttcaacacatgaactttgaggggatacagttcagtccataacaattagtaatttaaaaaccctacacaaagaaaaggacaggcccaaaatgtttcactggtgaattctaccaaacattcaaagaagaattaatatcaatacttcagaaactttccaaaaaatacaagaggaaggaatacttcccaactcattytatgaggttgatattacacttatatcaaaaccagacaaatacataacaagaaaaaaaa

SEQ ID NO: 199721 - DNA, 595 bp, Homo sapiens
atatgtatgaagcagacactacacgaaccttttctttgaaataatgtgaccagcttaattaattctagctagaatatattaacagtttataacagtttaatattcaggtgaatcctccttctcacactgtagaactcatgaataagaaatatgtgtcagttcatgtcacctaactacagatatatgcagtgaaggaagctgcagttacttctgatcctacattatagatttttctgtcatctgaacaaaggctacattttgttcacacgtgtaagaattgtactcactgaagtatacttattcaggaaagatttgccaaaggagcagaaagaagtcatttcaattaatgttaattttataaaataacctgaatattctgcttcacaattccttaccagcatgtaggttcacaagcatctttgtacatagtttctgtgtggattttattttgtcagactaaaatgtgctttcatacgcctcattatgcaataaaaatraaggcctaagtaggcatggtaaataatttaggagttaaatattcagtgagaatattctgtcagtcctcagtcaaaacttatttgctttgatgaccaag

SEQ ID NO: 199722 - DNA, 441 bp, Homo sapiens
gaattcaaaagtggcgggtgtggcgcggggctggtagcggccggagccgtgcgagttctctaccctgcttcgcgagcgggcgagagaacgcgagtcccaggatccccggcacccagttctcttccactgcattcccccggcgcgtgtgggaccgaggtggacatggatccgcaggtgagtaggggcggcgcaggtgtcctgccctggggatggggacgamggctgaccgctccgatgctgtcgcgcccccggctcccggtcggcctttgtcatgtctaccgggagagcgaaggtccgtgcgcccccgcacaagtggaaaggggcggaggcaggagtggagacggcttagagcacccggggaggtcggaaggcacgtctgtctgccctcccctagcttcaagtttctggagcccctcccttaactttcatgtctccgagatt

SEQ ID NO: 199723 - DNA, 432 bp, Homo sapiens
gcggggctggtagcggccggagccgtgcgagttctctaccctgcttcgcgagcgggcgagagaacgcgagtcccaggatccccggcacccagttctcttccactgcattcccccggcgcgtgtgggaccgaggtggacatggatccgcaggtgagtaggggcggcgcaggtgtcctgccctggggatggggacgacggctgaccgctccgatgctgtcgcgcccccggctcccggtcggcctttgtcatgtctaccgggagagcgaaggtccgtgcgcccccgcacaagtggaaaggggcggaggcaggagtggagacggcttagagcacccggggaggtcggaaggcacgtctgtctgccctcccctagcttcaagtttytggagcccctcccttaactttcatgtctccgagatttctcatttcgaattc

SEQ ID NO: 199724 - DNA, 529 bp, Homo sapiens
taaattgggtatttggattcctgactctttatcctccaaataaccattgcatttgcttagaatgctttcccgtcacatgagcctgtcctttgctctttagatgagaacaatatgagtgaatgtataaggaagttttcatgacatacatacatagctatggattcagcccctgggcaacagggctcttacttaacggcctgttgcttaaagtgggctcactgtgattgagcaaaccggaagtggctgcaaagttttttagagcattgtcacaaccaatgggtcttcaactttggagtgcatcagagtcacctggaagactattacagcacagattcctgggccctgacccaaagactctgacctggtargtctgtggtggggcctgggaatctgcatttctaataagttcccaggtgatgttgaagctgctggctcagagacctctgctttgagaaccggtgattgcatgcatcatttcagccaatcctccccacgttcttattgtttataacactttccatttacaaat

SEQ ID NO: 199725 - DNA, 569 bp, Homo sapiens
caaaacacagcattatttatagatgattacaaatgagagtttaaacattacagagttaagcttttgtawaacacatgagttttgacctgctgtgcttaaaccacttcagctctctgttttacttctttactcttctctgtttatatttctttacaatattcccatatcctcatgattcagagtcagagttaactacagtgatgtgccacacaacaacgttttggtgaatgacagactgtatatatgatggagaccccataagattataataccatatttttattatatgtttcctatgtttagatatgtgtagatacacaaaaacttaccattgggttacaattgcctgcagtactcaatacagtaatatgctgtacaagtttttagcctagaagcaataggctataccacacagcctatgtgtgtggtaggcaataccatctaagtttgtgtaagtgcactctatgatgttcacacaatgacaaaatagcccaatagcatatttctcagaagaatccctgctgttaagcaacacatgacagtatttaatatttcctgcttccctttga

SEQ ID NO: 199726 - DNA, 606 bp, Homo sapiens
cttcatcatagtaacataactatgtccttttccatgatgagtatgcagacttacattttgaatattgcaatctcattcaatggtttggaacagaattcagctgagagcaggcctctgaagtctcacgtctaggcaacggctactctcctcgctttcttggctaagaacacccaattttattcaggtatagcagcctgccactccccaggcacaggtagttgatattgactagtcaagataatcaaggtaattctcatattggtgctgatgactggcttgtatttcaatcttcattaaccaggtggaaggaagtctgcttcctttacatttgattactgttttcctacttgataaaaatagaaaaacaragagaaattgtcttttccacctctaaatatttttctgtgaggaagcaatgcctataactgctcaaaccaggccttagggacccaacatcatgttgagaatgacgaagtttgaagtacagtagttcagtagttccctcttatgcataggggttactttccaagaccccagtggatgcctgaaactgtagcagtatgaactaaattgctgtcttggaacatgtttctgttcatattttcc

SEQ ID NO: 199727 - DNA, 569 bp, Homo sapiens
caaaacacagcattatttatagatgattacaaatgagagtttaaacattacagagttaagcttttgtataacacatgagttttgacctgctgtgcttaaaccacttcagctctctgttttacttctttactcttctctgtttatatttctttacaatattcccatatcctcatgattcagagtcagagttaactacagtgatgtgccacacaacaacgttttggtgaatgacagactgtatatatgatggagaccccataagattataataccatatttttattatatgtttcctatgtttagatatgtgtagatacacaaaaacttaccattgggttacaattgcctgcagtactcaatacagtaatatgctgtacaagtttttagcctagaagcaataggctataccacacagcctatgtgtgtggtaggcaataccatctaagtttgtgtaagtgcactctatgatgttcacacaatgacaaaatagcccaatarcatatttctcagaagaatccctgctgttaagcaacacatgacagtatttaatatttcctgcttccctttga

SEQ ID NO: 199728 - DNA, 572 bp, Homo sapiens
cctagactacctttcacatttactttaagacacagagtgctatacccttctgtggcaaggtttgtaggcactcaaaatccaaccactgggatctgtgacttccctctgcctatggctggtttaaatgcttcctctgagggtgaatgtcagttgaatttggtccagtttttctttctcctcttagaggacagcactgagttcaatacctcacaattgctgtgttctccttcccgcaggtcccagagaagctttctgcagcaagctagtgctgctgsccggagggttgggggtggggccacatcagtgatttctgattgttttttttctatctctttctatctcttcagtgcctctttcagtgataagaagttcaaaccaggtactgtgagtgctcacctgatttttggttatgaaggtgttttgtctgtgtagatagttgttaacttggtctccttgcatgggaggatgatcggtggagccttgtattctgtgactttacttcactggtctcctatatcccagcctctttctttctttctttctctctttctttctctctctttctttcttat

SEQ ID NO: 199729 - DNA, 325 bp, Homo sapiens
gggttcaagccagtttcctgcctccgcctcctaagtagctgggactgcaggtgtgtgccaccatgcccagctaatttttgtatttttagtagaaatggggttttaccatgttggccaggctggtttgaactcctgaccttaaatgatccagctgcctcagcctcccaaagtgctgggattacagatgtgagccaccrgacctggcctgaacctcttttctttataaattacccactttcaggtatttcattatagtgatgtgagaacgaactaatacactccttaccctcccattatctcaccaaacggtattccagtaccagag

SEQ ID NO: 199730 - DNA, 607 bp, Homo sapiens
caatgttccattacatttcactgttgatagaaatatagactaaattttaaaaaccaaaattatatttttttccttttgatgaattttgggggagtattaacccaaactaggccagtatctcaggctatcaacacatgaaaaacacctacaaatgtgatgtgtttgaaaaattaatatatatatatattttgagcrgagtcttgctctgtcacccaggctggagtacaatggctcgatcttggctcactgcaacctcccattcctgggttcaagcaattctcctgcctcagcctcccaagaagctgggattacaggtacacataaccactccaggcaagaaaaattaatatttttacataagcatcaagaagtatctttccctaggaacatcattttctttattaattcacagatggaaaattagaattaatttatacaaataatgtttagtagtttttaaatatcatcatgtatatcccagatgtacattgaggttagttttataaaagacaactactgtataattgcttatatccatactgaaggaaaagaactatggtcacacagtaaaaacagttatgtctaaatcatgttttaattgattatt

SEQ ID NO: 199731 - DNA, 607 bp, Homo sapiens
caatgttccattacatttcactgttgatagaaatatagactaaattttaaaaaccaaaattatatttttttccttttgatgaattttgggggagtattaacccaaactaggccagtatctcaggctatcaacacatgaaaaacacctacaaatgtgatgtgtttgaaaaattaatatatatatatattttgagcggagtcttgctctgtcacccaggctggagtacaatggctcgatcttggctcactgcaacctcccattcctgggttcaagcrattctcctgcctcagcctcccaagaagctgggattacaggtacacataaccactccaggcaagaaaaattaatatttttacataagcatcaagaagtatctttccctaggaacatcattttctttattaattcacagatggaaaattagaattaatttatacaaataatgtttagtagtttttaaatatcatcatgtatatcccagatgtacattgaggttagttttataaaagacaactactgtataattgcttatatccatactgaaggaaaagaactatggtcacacagtaaaaacagttatgtctaaatcatgttttaattgattatt

SEQ ID NO: 199732 - DNA, 480 bp, Homo sapiens
atcttctacagtttaaaatagggtgaatatcaagtagattgcatagttgcttataccaatgcaaaattatgtataaactttgctataaacttggtrttgggtccctcctaaaattcctgtgttggaccttaatccttgatgccatagtatttggaggtgggcctttgggaggtgagtaggtcatgagagcaaagcccttctgaatggaatgagagctcttacacaagctaataatgagatcccagagcactctcttgacccttccactctgtgaggacacagagagaagttggctgtctatgaatcagaaagcaggccctgaccagacaccaaaactcctgggactttgacttctcagcttccagatctgcgagaagtacatttctgtttttttataagccacacaccctataatactctgctttgatttttctcctttttaattataatactattcttttttatttccaaacagaatta

SEQ ID NO: 199733 - DNA, 480 bp, Homo sapiens
atcttctacagtttaaaatagggtgaatatcaagtagattgcatagttgcttataccaatgcaaaattatgtataaactttgctataaacttggtattgggtccctcctaaaattcctgtgttggaccttaatccttgatgccatagtatttggaggtgggcctttgggaggtgagtaggtcatgagagcaaagcccttctgaatggaatgagagctcttacacaagctaataatgagatcccagagcactctcttgacccttccactctgtgaggacacagagagaagttggctgtctatgaatcagaaagcaggccctgaccagacacyaaaactcctgggactttgacttctcagcttccagatctgcgagaagtacatttctgtttttttataagccacacaccctataatactctgctttgatttttctcctttttaattataatactattcttttttatttccaaacagaatta

SEQ ID NO: 199734 - DNA, 459 bp, Homo sapiens
gtttgtatgttagaaatcctgggtaatgtgattttcgcatctttaatcatttattttaattattagtcaatcaactcactgttattatggtaagaacaaaacataagatctaccctcaactttaaaagtkcacaatacaataattttaattataggcataatgttgtgcagcaaatctctagaacttactcctcttacataacagaaactttatacctattgaagagcaactcccaatttcccctgagagagtttggatgtttgtcccctccaaatctcatgttgaaatgtcatccccagtgttggaggtggggtctgctgggaggtgattgggtcatgggggcagagtcttcatgtatgtcttggtgctgtccccatggcaatgaattttttctcatgagatctggttatttaaaactgtataggtttagttggctcacagttctgcatgctgtacaa

SEQ ID NO: 199735 - DNA, 459 bp, Homo sapiens
gtttgtatgttagaaatcctgggtaatgtgattttcgcatctttaatcatttattttaattattagtcaatcaactcactgttattatggtaagaacaaaacataagatctaccctcaactttaaaagtgcacaatacaataattttaattataggcataatgttgtgcagcaaatctctagaacttactcctcttacataacagaaactttatacctrttgaagagcaactcccaatttcccctgagagagtttggatgtttgtcccctccaaatctcatgttgaaatgtcatccccagtgttggaggtggggtctgctgggaggtgattgggtcatgggggcagagtcttcatgtatgtcttggtgctgtccccatggcaatgaattttttctcatgagatctggttatttaaaactgtataggtttagttggctcacagttctgcatgctgtacaa

SEQ ID NO: 199736 - DNA, 542 bp, Homo sapiens
ctttgtagcctaaacaacagaaaaatattctcacgctcctgaaggccagaagtccaaaaatcagtattactgggctaaaatcaaggtgtcatcagggccatgctccctctggaggttctaggggagaatttgcttttctttcctcttccagctactggtggctaccagcattccttggtttatagttgcatcactccagtctctgactccatgattatatcttttacttagcttgtgcctgtttctcttctacctctgtgtctcttataagaacacttatgaytgcatttagagcccacccagataatccaggatgatctctccatctcacatgtttttgcctaattacatttgcatttttttgatatgtggtaacatttaaaggacttgtagagactgatatctctgggggtcgttatttagcataatacacaaggtatcagcaattctgtagttgagggccccagcataataatcaaagacatcaaagacatattgtattctttctgttcatattgttagttcatgtgttacttattttc

SEQ ID NO: 199737 - DNA, 542 bp, Homo sapiens
ctttgtagcctaaacaacagaaaaatattctcacgctcctgaaggccagaagtccaaaaatcagtattactgggctaaaatcaaggtgtcatcagggccatgctccctctggaggttctaggggagaatttgcttttctttcctcttccagctactggtggctaccagcattccttggtttatagttgcatcactccagtctctgactccatgattatatcttttacttagcttgtgcctgtttctcttctacctctgtgtctcttataagaacacttatgattgcatttagagcccacccagataatccaggatgatctctccatctcacatgtttttgcctaattacatttgcatttttttkatatgtggtaacatttaaaggacttgtagagactgatatctctgggggtcgttatttagcataatacacaaggtatcagcaattctgtagttgagggccccagcataataatcaaagacatcaaagacatattgtattctttctgttcatattgttagttcatgtgttacttattttc

SEQ ID NO: 199738 - DNA, 587 bp, Homo sapiens
tcttgtctgacaaattgtttattaagtcattaaaatatttctaatagtgatgtgaagaaataattcttacttgctttttctcaatagaatttagctacgtttcactttatgttgcttaayaatgttaaaaacttttcagtttaactacaaagttgtaaaatgtgttataaatcagtgagcaaatttatatcatagagtttgtagtaataatggttatgtttctttcagcagccaagagtgaccatctggctgtcatgtttttgctcactgggaaagtttcccaatgttcttacaatgaagtacaaggtccttcaggatccatccttctcccttacctttcagaccttattttctactctgtctcatgctcagtgcactctatgtagactggctacctgcctgtatttgagctctaggtgtactcccacctccaggcatttactgtttcttcactccgcagtgctcgttctccagttatccatatggctcacctcacaacttccatgtttcttctctaatgatactttatctatcacagaagccttccctgagtagcatagataaactagcagctggcattccccttg

SEQ ID NO: 199739 - DNA, 587 bp, Homo sapiens
tcttgtctgacaaattgtttattaagtcattaaaatatttctaatagtgatgtgaagaaataattcttacttgctttttctcaatagaatttagctacgtttcactttatgttgcttaataatgttaaaaacttttcagtttaactacaaagttgtaaaatgtgttataaatcagtgagcaaatttatatcatagagtttgtagtaataatggttatgtttctttcagcagccaagagtgaccatctggctgtcatgtttttgctcactgggaaagtttcccaatgttcttacaatgaagtacaaggtccttcaggatccatccttctcccttacctttcagaccttattttctactctgtctcatgctcagtgcactctatgtagactggctacctgcctgtatttgagctctaggtgtactcccacctccaggcatttactgtttcttcactccgcagtgctsgttctccagttatccatatggctcacctcacaacttccatgtttcttctctaatgatactttatctatcacagaagccttccctgagtagcatagataaactagcagctggcattccccttg

SEQ ID NO: 199740 - DNA, 528 bp, Homo sapiens
ccacacaaaaatattaggtataaactatttaaaataaatcagacattgttgtcacccagtgttgatatttcagtattatctgtcaacatgtatatttaatcaccccctggatcagctctttaagagatacttatgtaaaaatcactaagatttctaaagtgaacatggatacttatgtttaaataaagctctaatgtcatggctagtttttcgaaaatgtccagyattgggaaaacattccaacaatggagaaaagaatgtgtattttttaaatgttccaagcaatgttccttaccttgggggtcatttatgccatttttctcctttttaccaattcaacctttcatttataatgctttttattatagaattttgcaacttggaattacatcaattggaattacagtaatgtcaatagtgacacatgtaacatgtttatctgtcaagttaggactgatatattgttattaagctgtcacagtcagtgtcttgagagccagcattaaaatagtactttgttctgaattc

SEQ ID NO: 199741 - DNA, 529 bp, Homo sapiens
tcaggagaatagaatgggaaaactgccccatgatttgattacctcctaccgattccctcccaccacaagtggggattataggaactataattgaaggtgagatttgggtggggacacagccaaacyatattaattgtattgcaaaatactaataagaaaataggagaaatttgtgtcttattctgtatctatgttacacaaatcataaacctaaaattgagctaaaatatccttttgtcttaaagctacgaaaatccaaaagtataaaaactcttccactgttgacaatttagaagaggttacagtcgtacaggccagagaataagtatggtgggccaagcaaagagaccattgctagtccctccctatctctacctctgaggctggaaccaaacttaagcaacgggagctctcccaaaggagttaagcatgccaaggccagaaatgagcaagggcagtatgacaaaggactttagaggtggttgggtctccttggctttcatttcaagggtactgccacctgtgaaga

SEQ ID NO: 199742 - DNA, 557 bp, Homo sapiens
ggttaacctcattgccctcattccaccacacccttcagtccctcaatcctccattcygtactcccacccctgcggtattttggattctgagggatggattccatgggtcccaggcaaggttgggaatggtgatgagagatacgatgtgttgatcagcatctggaggattgatcccagcactgggcaattttgattcgcctcatgctccccgcccagcaggtgcctggactattctcctatcatggctctggattctgccatcctgctgctgcacacgagataaactgggaattctggaagctgccagcaaaggtgttaaaagcaaactgcccagagttccgtggcagcaagaacatgcacttatccacattctcaaagagttgccagctctagtccatgaaggctgcatagggtgtagatattcatggtttcttctagaagtgttttaatgaaaccagaatatcatcagcaaaaataatctggaaggcaaataagatctctgctgagcagcagttccagaatggaccttccaggctgtggctgcacttggaccacag

SEQ ID NO: 199743 - DNA, 537 bp, Homo sapiens
aatctttaataattgatttttaaaatctataaaaatatggttttctagtcacattcacatacaaaggggaataacttacactgaaaagttaaccattgattttttcaaatgcttctgatatgtagtaatagcttggattcaattatgatgagcactaaatcctatgtttttattatttgtttgcatttaacatggggacagagttttataattttattgcagtgggggttcaaacattatttagagttatctaatttgatgaccaacaaagtacttcacaacttgtaaatttcaaggttctgaatctctttacatatgggaatttacaaatggagggtaattcatctgagctctccttctgcctccctcatgagcatgctgggggaggctctctgcctacgyatgtctcctttgtatagctatatatacattcccaggggactaccttctttaaaggaagtcagaacagttaaatacagtaaaaaataacaaaaattcagaatgttttataaatcttgtgaagtatagtcatccttg

SEQ ID NO: 199744 - DNA, 537 bp, Homo sapiens
aatctttaataattgatttttaaaatctataaaaatatggttttctagtcacattcacatacaaaggggaataacttacactgaaaagttaaccattgattttttcaaatgcttctgatatgtagtaatagcttggattcaattatgatgagcactaaatcctatgtttttattatttgtttgcatttaacatggggacagagttttataattttattgcagtgggggttcaaacattatttagagttatctaatttgatgaccaacaaagtacttcacaacttgtaaatttcaaggttctgaatctctttacatatgggaatttacaaatggagggtaattcatctgagctctccttctgcctccctcatgagcatgctgggggaggctctctgcctacgcatgtctcctttgtatagctatatatacattcccaggggactaccttcttyaaaggaagtcagaacagttaaatacagtaaaaaataacaaaaattcagaatgttttataaatcttgtgaagtatagtcatccttg

SEQ ID NO: 199745 - DNA, 443 bp, Homo sapiens
acttcctccctggagcacacagaaataaccagcactgtggacaacttaattttaaccttttaatactgatttcaggcttctgaccttcagaactgtaggagcataaatacatctagttttaagccactaagtgtgaggtaattacggcagtaatagaaatgaatagakagtgcgttgagttgtggctaacggtaataaggatgaaaatgctgttatgtatgttctctacgagattgtcaaaaagttccaaaaagacaaaacagaatataaattcaatatatctagtcggaaggtcagtgtttgtatgacaatctaagtattgtcacaaagacatagttacactacagtgcaaggatatatatgaaaagcatttaaactggtaatcagtcctactacagtctcaagattttgctcctatgataaaccaaagagcaagcaacaag

SEQ ID NO: 199746 - DNA, 560 bp, Homo sapiens
ttaaatcatgcctacttctagtcaccttgcttagttccattctaccctgaatctgggctggtactgttacaatctttcaattaacratttgtagcagaagtaattctgtgtgagtttcaggcttaaagttttaagatgctatagttgcttgcttctgtggactttcaagatccgagtccccacacaagaagtctgaacaccctgagactaatatattgtgaagaagcccaaacgacacacctgaagatgagagataggagatcaaaatactcagccagccctcaaatgttccagccatttcagctgaaatgccatgcatgtgagtggaaagaaaaacaaaaacaaacaaagaaacccttctcggatgtccagcacaactggcccttcagatagaactagcactagccactatatgacaaaataagatgtaaattgtcaagtaggaactgcgcagtttagtgaattaacccatacaattgtgagaagaagtaaaatcatataaaactgagccactaagttggagaatggcttactatacggcaatagataatagaaaggcc

SEQ ID NO: 199747 - DNA, 560 bp, Homo sapiens
ttaaatcatgcctacttctagtcaccttgcttagttccattctaccctgaatctgggctggtactgttacaatctttcaattaacgatttgtagcagaagtaattctgtgtgagtttcaggcttaaagttttaagatgctatagttgcttrcttctgtggactttcaagatccgagtccccacacaagaagtctgaacaccctgagactaatatattgtgaagaagcccaaacgacacacctgaagatgagagataggagatcaaaatactcagccagccctcaaatgttccagccatttcagctgaaatgccatgcatgtgagtggaaagaaaaacaaaaacaaacaaagaaacccttctcggatgtccagcacaactggcccttcagatagaactagcactagccactatatgacaaaataagatgtaaattgtcaagtaggaactgcgcagtttagtgaattaacccatacaattgtgagaagaagtaaaatcatataaaactgagccactaagttggagaatggcttactatacggcaatagataatagaaaggcc

SEQ ID NO: 199748 - DNA, 560 bp, Homo sapiens
ttaaatcatgcctacttctagtcaccttgcttagttccattctaccctgaatctgggctggtactgttacaatctttcaattaacgatttgtagcagaagtaattctgtgtgagtttcaggcttaaagttttaagatgctatagttgcttgcttctgtggactttcaaratccgagtccccacacaagaagtctgaacaccctgagactaatatattgtgaagaagcccaaacgacacacctgaagatgagagataggagatcaaaatactcagccagccctcaaatgttccagccatttcagctgaaatgccatgcatgtgagtggaaagaaaaacaaaaacaaacaaagaaacccttctcggatgtccagcacaactggcccttcagatagaactagcactagccactatatgacaaaataagatgtaaattgtcaagtaggaactgcgcagtttagtgaattaacccatacaattgtgagaagaagtaaaatcatataaaactgagccactaagttggagaatggcttactatacggcaatagataatagaaaggcc

SEQ ID NO: 199749 - DNA, 557 bp, Homo sapiens
aggacatctactagcactattgtcttagttgataccattaccatatatatttggaaaatattttaggacaaaagatatagaactattactaaaaggtaaaagttatgctttatgagattagaaaaagatacattagaaagataaacaccagggccaacaatagaaagataaataccagggccagagcagccccagtgacccgggcttcagarttctttttatacaggctcactcccatagccccagtctttaggccagcccaagtggtcataggcaccaagacagtccctgtgattccaggctttagactagcccctgcagacccagactccatgcctgccccagaaacgggcccactccaggctccaagctggttccaattataccaggctccagtggactcagggtccagacctgctctagcaaaaccagggttcaggctcatccaagtagaccccagtgccaggccagcctctgcagaaggaggatctagaaacactcctccagatctaggcttcaggacagcattggtggacccaggacccaggttcagtccc

SEQ ID NO: 199750 - DNA, 557 bp, Homo sapiens
aggacatctactagcactattgtcttagttgataccattaccatatatatttggaaaatattttaggacaaaagatatagaactattactaaaaggtaaaagttatgctttatgagattagaaaaagatacattagaaagataaacaccagggccaacaatagaaagataaataccagggccagagcagccccagtgacccgggcttcagagttctttttatacaggctcactcccatagccccagtctttaggccagcccaagtggtcataggcaccaagacagtccctgtgattccaggctttagactagcccctgcagacccagactccatgcctgccccagaaacgggcccactccaggctccaagctggttccaattataccaggctccagtggactcagggtccagacctgctctagcaaaaccagggttcaggctcatccaagtagaccccagtgccaggccagcctctgcagaaggaggatctagaaacactcctccagatctaggcttcagracagcattggtggacccaggacccaggttcagtccc

SEQ ID NO: 199751 - DNA, 583 bp, Homo sapiens
  misc_feature (1)...(583): n = A,T,C or G
nnattcaattctattattagaatctctgtccaggtgtcaacaatattttacacacattatcacaaccaactggaatccaagggttctgaggtctggcagaacctggacagaggtctgaaccctarataacatgctataaggatgtctcgccaactcacaggttaaataaataaaaaatgtctaacaggatcatcaacttctttaacttttggtttattctaaagtgttgtcttttaatcctgacaatgttactggacatagctattagtggcttaatcgtgttgaggtctactgctacaacctcaatgtcacttaaaataccacattaatcataataaatactagacgcatttatgttcaacaaacatgtgagtgcacaaacaagttagtatgtttcatggtacacacagaaacagagctagagttacataggtatagttctggaaatacagatggattccgatataaatatgaacacagctaccagtacaaatgctaattttacagactctacagataaaggtcaggatttacatatgtttctgaacttggaagaaaatgtaaagatctcaaagttaacttt

SEQ ID NO: 199752 - DNA, 420 bp, Homo sapiens
catatcaatcacagacttgagaccaatgataattttatacatcttgtttttgagtgtgatgaaacaggagagttccctgccctccccccacctgcacagggtggatgacaggggtgcggctctctattcgaccaccatgagctcaaaccccttgtgggagagggagcacacagaccgccaggtgcaggagccagggtgagcacttygggctgcagccccgtggtagtctctagggctgtgtgcttgtgaccccagaccccagtgttacaatgcccttttagctctgtcttccgcagatggcttaagtgttaaccagctcagtgcccccactgcccttctgcaaaggcagaggacctgtgtgatggctttctatatcccgagctcttgtccagcatcccagaagaatcagaccacacatga

SEQ ID NO: 199753 - DNA, 565 bp, Homo sapiens
gtttctgtttaattttaaagagttttaatttaaatcarttttctcaatttcatgtaaaaaatgggtgacttttaaaagttttatcgtatttgctgataagtggatgcttatgagaacattgaagacattgtgccttattttgctaaggacagtcaccattttttaaggtttgggaagtcattgaagactattttgagaggtggaaaggagttcctgaaatggtttaagatttttcagctttgtgatgattccctaaattattctcatttgttgtaatttttaaacataagactacaacaatatgcttttagccacctgcaaatgattattgggagtcacagttttaaggaggaaattcagatttttatccacttacttaatattatctaaaattagcatacaagcatttgtattaagaagcagatacaggttaacattctttataagaacttctatgtctacagtcagtttgggaataacttgtggccttctggcctccactccttttgtagggtcttaaaattacttgtaattagaataggtgagtcccattacaattaggtga

SEQ ID NO: 199754 - DNA, 410 bp, Homo sapiens
ctagcctcaaaaatataattttaaaaaatctttccacctattatgttattttcatggggttattacttacatgtctaaaagccacacgcacaaaaaagctgccttcccacaatcactttatctccacccccaatctgctttctgtgaggtaagggacttggaaacagtggtctactttcataattcmgggttttttttattattattattgacactttttgttgagagatactactttaatatcttacctattgctattgcagtaaaataagtcaaacagtacagcataaataacccactatcaaatattaggattagggaagtgttcttctgaagtcaacactttaaatttctgttggataaaactataaaacaatcaattaattctcacctaatggtgatggggtcat

SEQ ID NO: 199755 - DNA, 410 bp, Homo sapiens
ctagcctcaaaaatataattttaaaaaatctttccacctattatgttattttcatggggttattacttacatgtctaaaagccacacgcacaaaaaagctgccttcccacaatcactttatctccacccccaatctgctttctgtgaggtaagggacttggaaacagtggtctactttcataattcagggttttttttattattattmttgacactttttgttgagagatactactttaatatcttacctattgctattgcagtaaaataagtcaaacagtacagcataaataacccactatcaaatattaggattagggaagtgttcttctgaagtcaacactttaaatttctgttggataaaactataaaacaatcaattaattctcacctaatggtgatggggtcat

SEQ ID NO: 199756 - DNA, 569 bp, Homo sapiens
tgaattcatgagggtgcggccctggcctgatgggattagggcttttataaaatgagacactaaaaagcttgctctttctctctccccttgtccaagaatccagtcagagacagttatctgcaagccaaaaagacagccttcaccagagcacaaccatattaacaccctgatcttagatttccaatttctggaactgtgaaatragaagtttctgttgtttcaagctaccagtctacagtattttattatgacagtttgaattgactaaaacaacccccaagtctacttttggtgagcttgtctataaaactgttgatggaactgtcagagtaccaggtaatgaaatgttattgcaaaagcagaaacatgctttcagttaatgtgaatttatggaaacactctcagataaaccaatgtgatatagaaaacaaggattcacaaccttggctgcacactggaattacctgaaaactttttctaataattgctgactaggttttatacattctggtataattgatctgggttaaagctttggcattgatattttattctcacatgcagccaat

SEQ ID NO: 199757 - DNA, 565 bp, Homo sapiens
atctttccccttaactaggagaacttaattgcatagaagtaaatgtgtttgaacagactggcatgtgctctgaggtcagtacytaaattctctaaacctttttaaacctctttgcatgttgaggtaagctagttatctaaagaacaaacacagacactattaaaggcttttcttggctgtatacactgattatgattcatcaaataggtgacttactttctagtgtttcaacatagaagctgaccatgggttcacatggatgccacatctgaacatacaagactgtagtcctcacagagggatgaatactcttgtgttgataaaacagttacacaaggccttcctgtacatcttttcagtcatggtgatagtcatgttaaactcttttcaagaagcagccaaattttacatcatgaaaagccaatatagtacaggttcccatatagaaatgccaatcatcaattctttgtacacctcaagttccacatctgtgaaatgaaactttttcttaactcacatagaaagcattacagtgttagagtcaggtgtttctgctcagcatacc

SEQ ID NO: 199758 - DNA, 595 bp, Homo sapiens
acaatgggtggatttgcggactttatttcaggtgttgacttggctggattaaggaatctgggcgtgggccaggtacggtggcacatgcctgtgatcccagcactttgagaggctgaagtgggcaaatcactggagtttaggagtttgagaccagcctagacaacatggtgaaaccccatctctaaaaaaaaaaaattaaaaaaattaaaaaatacaaaaattagcctggcataatggtgcacacctgtggtcccagctacttgggaggctgagaaggaaggatcatttcagcccaggaggtcaaggctgaggaggaaggatcatttgagctcaggaagtcaaacgctgcagtgagctgggatcgtgctactgtctgggcaacagagtgagaccctgtctcaaaagaaaaaaaaaaaaagaaatttgggtgtttctgtgaaggtgcttccagaagcrgttggtgagtgagtctagatggattaggtggggaagctctcccctcactgttggtgggcaccatgtaattggccaggggcctgagagaacaaagtaagaaggcaaattgtctctttttttgtttgtttgtttgagacgg

SEQ ID NO: 199759 - DNA, 505 bp, Homo sapiens
ttgtaggaattgattgggactcatcctaagttctgaagacatggaaaattgtttgaggtgacacaaaatgatggaagtttttattactgatccagaagctctaatgtaccttttgctaatcaactggattrattggatgctttacaaaggtttaacattatgcccctaaaccatttaaaagaacaaacgtcttcttaatgttgaagtgtgagttatgcactgtgccgctcatccttgaccttgttcagagtcttttgctgctgtgctgctgttcagataaaacattttgaaagtgacagttcaaaatacattcactcaggtaatggaagtcaacatttgggtacagaatctctccctgagattttgcagtttgcctctcagtgaattccaccatagtcttgctatagtgtgagggggtaactcattcacactgttcacgcacacgttccagtaagctccaggggctttcagtggttttcagagtagtgacggaattgtagcatca

SEQ ID NO: 199760 - DNA, 505 bp, Homo sapiens
ttgtaggaattgattgggactcatcctaagttctgaagacatggaaaattgtttgaggtgacacaaaatgatggaagtttttattactgatccagaagctctaatgtaccttttgctaatcaactggattaattggatgctttacaaaggtttaacattatgcccctaaaccatttaaaagaacaaacgtcttcttaatgttgaagtgtgagttatgcactgtgccgctcatccttgaccttgttcagagtcttttgctgctgtgctgctgttcagataaaacatttkgaaagtgacagttcaaaatacattcactcaggtaatggaagtcaacatttgggtacagaatctctccctgagattttgcagtttgcctctcagtgaattccaccatagtcttgctatagtgtgagggggtaactcattcacactgttcacgcacacgttccagtaagctccaggggctttcagtggttttcagagtagtgacggaattgtagcatca

SEQ ID NO: 199761 - DNA, 272 bp, Homo sapiens
ctcactccttgtggggggcagctctgaggccagctctgcagcatccrcccgagagccccagcagatggaggccagctgctcacaggacagctctgcccacgaaccagggagactagccgccctggcttgtctaggagggtctcagttttagcatccaaagtcccacatcccagaaaactctctggtctgggcaaagcaggcaggtggtcattgtatcatgaacacaaccctgtggcttcccccttctccgtgcccttccccactgccctccc

SEQ ID NO: 199762 - DNA, 532 bp, Homo sapiens
agcttgtccaaccctgtggcccaggacggcctttgaatgcaccccaaaacaaatttgtaaactttcttaaaacgttatgagattttttttttttgtgctgyatttttttttttttttttagctcatcaactatcgttagtattagtgtattttatgtgtggcccaagacaattcttcttccaacgtggcccagggaagccaaaagattggccacccctgctgtaaaatatctcactcaacacaaaggtcaggaagccacggtcactcatgccccaaagaagaaaaaccgccatattatgtgactcagtttccagggtttaacttttccccttggcataataaatctagaaagtcctaaaattttactttctttttactttctttttactctttccatgagaggaaacatggaacattttgatgggtggaaagtttgagaaaggcctagggtttggctgggaaagctgtgagtggtcagacaaagggtgtggtgcaatcggagggagcaggcactaggttagaggagcactgt

SEQ ID NO: 199763 - DNA, 540 bp, Homo sapiens
atgcgcatcaaaattcacctcaaaactggaggarcgccgtgtaggccactgtgctggaatatattcaggtcttctgagagagaatttgtgcatatttactattggccatcttttcctatagccgtgcctgtgtctgtgcttaaaaaaaaaaaaaggaacgtgacctatcaaatattaggaaggaaactagctcttatcaggggcctactgtgtgcaagacactctcacttgggttatctggtttcaacagtcattattttttctgggaattcaaactgtaggaagttgctgagtgaaaaataggggttttctgtccttccattagcgactgatgggcagatgcattagaaagcgtgacaatcatttcatctcatagtctcgaagggcaagtttattcctataatctttgaaaatcaaatgccagctttcatgtcagctctttcttgaaacatgttttccctctttatttatttattttttctgtttaacagccaggcattaattcaaacatttttgactgtttgacttttctcttccaat

SEQ ID NO: 199764 - DNA, 540 bp, Homo sapiens
atgcgcatcaaaattcacctcaaaactggaggagcgccgtgtaggccactgtgctggaatatattcaggtcttctgagagagaatttgtgcatatttactattggccatcttttcctatagccgtgcctgtgtctgtgcttaaaaaaaaaaaaaggaacgtgacctatcaaatattaggaaggaaactagctcttatcaggggcctactgtgtgcaagacactctcacttgggttatctggtttcaacagtmattattttttctgggaattcaaactgtaggaagttgctgagtgaaaaataggggttttctgtccttccattagcgactgatgggcagatgcattagaaagcgtgacaatcatttcatctcatagtctcgaagggcaagtttattcctataatctttgaaaatcaaatgccagctttcatgtcagctctttcttgaaacatgttttccctctttatttatttattttttctgtttaacagccaggcattaattcaaacatttttgactgtttgacttttctcttccaat

SEQ ID NO: 199765 - DNA, 600 bp, Homo sapiens
gaaactcaaactttttaaagaactgccagactattttccaaaggggttgcactattatgtgttctgaccagaagcatacgaggtttccaatttctccacatcctcatcaacacttgttattatctgtcttttttattatagccaggtgagaataacatagtatctcatagtggttttaattttcattttcccgatgactaatgatgttgaacaactttttaaatcttttttaattaatttatgagatcctttatgtattttttatgtagtttattgtcaaataaataatttgcgaatttttcctcctattctatgggttctagtttcactttctcaatggtgtccttttaagaacaaaaatgtttgattttgattagtctaatttacctatcttctcttttattattygtgctttggtattatatctaaaaaacaccatctaatctgaggttatcaagattttcctctactttttcttataagagtgttatatgtataaaactatagtgtttaggtatagttataacacccttataagtgttatagttataaaacaataacactctcataagaaaaatagggggaaattttcatgacctc

SEQ ID NO: 199766 - DNA, 571 bp, Homo sapiens
agcagtataacatggccttcctacacagttaatttaaaataggctgtggggcctcagtcttttatggcagatgttcttaacttggaggcccaaaaaacccctgagattatatacaaaattgtgaatgtgtcacttatgtctgtatttatagggaaaggggtctatattttttccaacagcttctcaaaaggatggggaactaaagagcaaaacaacaacaataacaacaacaacaaaagatcaggagccacaggatccactgcttcagacagaaatgtgtagctttctgcccttatgcatttgacccctttgttcttcgtcaaggcaattaaaacatataaatcaggctagacaatcactgtggtaataataatggagtgtgtgtgtgtatatatatatatatatatacacttacamatttacatacatatacacatagactttctaggagctctgttcttgcagtgcattaccatggaagtcttgcaatgcgttgccatggtgcttgtttagttccctgatccctttgaaattcatttgcattcaagtgattacaaacatccattcacaa

SEQ ID NO: 199767 - DNA, 592 bp, Homo sapiens
gcttttatgcaaatcgaagttgccaactaaaattctaaggcacatagaaaacaatcaatgccagctgggcgcggyggctcatgcctgtaatcccagcactttgggaggccgaggcaggtggatcacctgagttcaggagtttgacaccagcctgaccaacatggtgaaaccctgtctctattaacatacaaaaattagctgggtgtggttgcggtacctgtaatcccagctactcaggaggctgaggcaggagaatcgcttgaacccgggaggcggaggttgcagtgagccgagatcatgccattgcactccagcctgggcaacaaaagcgaaactccgtcccaaaaaaacaaaaaacaaaacaaacaaacaaacaaaaaaacaatcaatgccaaggaaaaaagcttaaaaaagaaaccctcaacattagaagatgaacttagtttcatcaacaagtgaataatagtaataaatggcttgtaattaactacggtcaaaatcatcaaaaagacagaaaaaggaatactaaaaatttaatgaaacaaaaactggcaactgtgaatcgaaaatgaggaggcatcaaaagtgtcaa

SEQ ID NO: 199768 - DNA, 547 bp, Homo sapiens
ttgtgccttttacaaagtgctttaggaagttgctgtaatgggcttctttagtattgtgtttttcagtgtcttctttcactccttccatcttctctgattctcctgtttacataaaagaaaagagaatatttaagtcctaatgtgtctatagtacttgaagcttcaacattgggcagatgccattttcctgttttttaactggaaaagcaggtcccagacagatagccttgggatctctatgggaatgtggaggctgcatctgagaaccagcaacagtggagcctaggctagtataccacagagtatttatccctagctttgaagcatgaatccaaaatgtttatatgccattagaatatcagaaatcttcatttggtttctccattgtgttayttgagtgtacaccattttctatgtcacttcctgttgctatgttctggacatcttattctcttcctttccaagaatgtaggagaaagatcagttacttgatttatacctgaaaaactgtcttcttttactcctactgagatattctgaccctttg

SEQ ID NO: 199769 - DNA, 594 bp, Homo sapiens
ccctacaacaacttctcatctcagaactctcaaattacatcaaacctttcaccttgcttatttatgaacctgacagccaactttaggagttcttgctaaaaacatggaggaaaacacagacccatccatcatttattatagcctgcaattagactcagcagctattgattaaaggcagtagcagcagcagtcagattggtagaggtttcaccagagctagttttaggacataaactttattttcaagctccacatgttgtggaaagaccattaaatttcattcaaactcaagatttctcaacaagcagactaacatcttgagaaattattcttctgcctcttcatagtctccatctaaaatactgcaaactacttaatcctgctactttaccatccttttctagtgatratgaggaccacaatggtgtaaatgtgaaatcatagctattgacccctcacactgatttataggatgctccattatatagttctggtctaatacttttttttgatggatcttaagccaaaaattcagaaggaaaataccaagcagtatgtgctatgacaactcaatataaactaatagaaaaggaa

SEQ ID NO: 199770 - DNA, 575 bp, Homo sapiens
cattaggctcacaataaggagacttggtaacttgaagaatgtatttttaaaagtatggaaatagctgtcaacatgaggggactktgaaaaggaagttactggggatataaatagatgtaatgggtataaggaatgaagcctgaggcaggaaacagaaaaataatttttaaaaagttgccagaggaagaagcaacattatttccagtttttagaaaagacatgagcaattcactacaagagttatacacaatgaagatgagtatgtttcaataattaaattagtgactttggggaaaaattcaaattgctgagtagagatcctaaaaagtccattccctaaccagttaacttctaagcctagataattcactattaaatatttaggcatatcttatattttgggattcagcaaatggttcgatttcctatgataaattttgtaaatgtgtttactttcccaagtgacagatatttcacaagggccataagagaggtaaatggggagattctttggtttccctttttaaaggcaggaagcagccagttcttggtttgcataaagaaactggaagaaa

SEQ ID NO: 199771 - DNA, 521 bp, Homo sapiens
ttacaatatatttgtaccaagattcactttttatcaaagagaaacttttctgcagtttaaattgtaggatgatggagttctgaatatcttaggtaacattattatatggatgaatatatttgcattctatcaggttgaatatagaaaaatcattatatacagatgttaaagaaactatacaaagtactaatgtataaggagtktgtgtgtgtgtaaccgtctaatgattcatgttttttctcttttttattatacttaagtggagtttccagggcaaacacaggtatacagtcataatgataaattatgtagtttaattcagcttcaccaatgataactcagatgccattttcaaatgcattgtgagaacggttttttcacgtttgcttctaattccagcaaaaacacctaattatagaacaacagtagcaaaaaataaattttgctcagggaaaaaggttttatgagtaatcagtgcaaagcagaaatctcttgctgcgaataatgtgggccagctaagg

SEQ ID NO: 199772 - DNA, 537 bp, Homo sapiens
gaaaaattctggcactgtgggtaatgataataatcaaggactgaatgccaagaaactgcagtgcttttcctatgcatacttagccataaacattttattttaccaaaaaaaaggttttatatagaccacataaaatttyatagttagattttttcacaaacatttaaaattagctttatcaaagtcaatacaataatttcagtatgcattcaaagggcaagttctaaaactttgctacattgtttaataataacccaatgattaataataaaaaacaggttccatgacttatttgtatttgacattgtttaaaattggatttgaaggtttttatattgtatggttttgaatttgctaaaaccttcatcatattggttctcaccaaataagattcatggattgtaaaccaatagcatgaaaggtgtcttggcctgttctgcttggtcataatcccagtgcccacattcatttattttagaagtgaatatagtatgttactcaaacttttaatcattgcaatggaatggtttgactgat

SEQ ID NO: 199773 - DNA, 590 bp, Homo sapiens
gggacaaaatcagaagataaaatacttgggttattggagttaaagagggaactgagaaagataaaagggtagaaagtttatttgaagaaataataacagaaaaatttccaaacctggagaaagatataaatatccaggtacaggaaagtcaaaagtcaccagtcagattcaacctaaataaacatatgccaagagatatcctaatcagactctaaaaaatcaaagacaaagagaagattctgaaagcatcaagagaaaagaagcaaataatatagaagggtgatccagcatgcctggtagcagacttttcagcagaaatcttacaggccaggaaggagttagataaaatatacagagtgctgaaggaaaaaaataaaaaataaataaactgtgaatactgtattgagcaaagctatcttttataaayatagaagatataaatgctttcccagacgaacaaaaactaagggaatttatcactaccagaacattcttacaagaagtgctaaagggagttctttaaactgaaagaaaaggatgctaacatgattgttacactaatattgtaattatggtatgtaaaccactta

SEQ ID NO: 199774 - DNA, 590 bp, Homo sapiens
gggacaaaatcagaagataaaatacttgggttattggagttaaagagggaactgagaaagataaaagggtagaaagtttatttgaagaaataataacagaaaaatttccaaacctggagaaagatataaatatccaggtacaggaaagtcaaaagtcaccagtcagattcaacctaaataaacatatgccaagagatatcctaatcagactctaaaaaatcaaagacaaagagaagattctgaaagcatcaagagaaaagaagcaaataatatagaagggtgatccagcatgcctggtagcagacttttcagcagaaatcttacaggccaggaaggagttagataaaatatacagagtgctgaaggaaaaaaataaaaaataaataaactgtgaatactgtattgagcaaagctatcttttataaatatagaagatataaatgctttcccagaygaacaaaaactaagggaatttatcactaccagaacattcttacaagaagtgctaaagggagttctttaaactgaaagaaaaggatgctaacatgattgttacactaatattgtaattatggtatgtaaaccactta

SEQ ID NO: 199775 - DNA, 517 bp, Homo sapiens
gaatagaaaacaatataaaatctctatgaaactaagttcatttttatgaaaagatcaaacaaaackgacaaaattttagctatcctaattttaaaaagagaagatatcaataattaaatcagaaacaaaaaaggagatatatcaactgataccacagaaatacaaagaattattaaaaactgttatgaacaaatacatgccaacaaattagaaaacttaaatgaaaaggatacatttctggacacttataatctactaagattgaaccatgaagaaatagaaaacctgaacagaccaacagtggctaacaatatcaaaacagtagtaaaaagtctcccctcaacgaaaagcccaggaccaaatggattcactgctaaagtctaaaatcatttaaataaaactaacaccaatttgataaaggccatatatgattaattcaccactcaaactattttacaaaattgaagaggagggaagacttccaaacttactctataagaccagcattcccctgata

SEQ ID NO: 199776 - DNA, 517 bp, Homo sapiens
gaatagaaaacaatataaaatctctatgaaactaagttcatttttatgaaaagatcaaacaaaactgacaaaattttagctatcctaattttaaaaagagaagatatcaataattaaatcagaaacaaaaaaggagatatatcaactgataccacagaaatacaaagaattattaaaaactgttatgaacaaatacatgccaacaaattagaaaacttaaatgaaaaggatacatttctggacacttataatctactaagattgaaccatgaagaaatagaaaacctgaacagaccaacagtggctaacaatatcaaaacagtartaaaaagtctcccctcaacgaaaagcccaggaccaaatggattcactgctaaagtctaaaatcatttaaataaaactaacaccaatttgataaaggccatatatgattaattcaccactcaaactattttacaaaattgaagaggagggaagacttccaaacttactctataagaccagcattcccctgata

SEQ ID NO: 199777 - DNA, 507 bp, Homo sapiens
aactcaatagtcttgaaaagagaaaaaaggaaactgcccacaaaagatattgagactatraagaggcttatatttcactgttactgcaaacttcctttctgcttattatcattccaacactttatttcccagcagctgatgcagctgggaaaaacatcacattgcacaaacagatgtcgactcacttaaattgcctgaccatgctccatggactgtgatctattttttgctgccccacaagtattgagtatgttgtagacatggggacatggctttttcccccttctttttacactcattaggttgctacaaatattctcttaagggcttatattctccttatatcactaggcatcattcaaacaatttacatcaggcaaataaaatcagaggaacatgtttcccatatccactgataactgagaggaatcatgtatattaagaagaaaattgataatagtgctggtcagatgttacaagcaggtcattcggttgctctccttgata

SEQ ID NO: 199778 - DNA, 592 bp, Homo sapiens
ctgcttcagactgttggcttctcactgcctgctctgtcagtgggcatgatcctgacctttttggccctttaccaattgcactctctttactcaactcctttctccggcccaaagtacactctccatcctggccaagtacattcatttggcatatgcatgctgccttgccctgcccatgccctcccgcctcctgcagtctgcatgcttcccctcaccttcctgactcccactgcactctcccagtgtgaaattctgaygtttcctaccagaccatgttctttttatatattcatctgttcagcaaatgtttgtttagtaaatgctgtatgccaggcattttgctaggcaacagggaaacaaagttcttgccttcacggagcttcagagtcctgtgggggacacagacaagtaaatagtactttcagtttggagtgatcagtgctgagatagaaagtattagatgccccagggcacatattaaagggacaacttggtataggggaagggagagatgtccgggagatgttccaaaggcagtgagtgacccaggctgttgaaattgagtattaagttccttagccaaggagtgaaa

SEQ ID NO: 199779 - DNA, 439 bp, Homo sapiens
ttcctgattatcccaaatacctaaagatttgtgaagttactcagcaaggctgataaatcaagagtgaagagcattattatcttttgaaggctataactggcatcatcactgtcctccctgatcccctcacaaatcctaccaacttggggtaaaacaaaattcaactgaaatctaaaactatattatgcttttaggctttttgtttttgcttctctctctctctctgcgtgtgtgtgtgtgtgtgcgtgcgtgtgtgtgcgcatgcacgcgcgcctggttttttgttttgtttttcttttggcttatttaagtagaagttttcagtgaactcactttgaaaacaattcttttcaacaacaacaacaacaaaaaacccttcagttcctaytgctcatgtggaagctcttgctcagcctccaattaaccaaccatcataatc

SEQ ID NO: 199780 - DNA, 625 bp, Homo sapiens
ttggttcttccaaattgtgcttacaaacaaaccccaaactctcctaattattggtccaattttcttgcagtttcctggacttgttcacttagatgtctcttagaaattttaaatttaatagttccaaaaacaaacacatatttcttcaaacctattctcttttaccttacccamcccaatccaaattatttctaatttagtcctattattatcaaatgcagttggccccccctcccccaccctttgattctctagtctgaacctttctttgagctcataggacataatataaacatgtccaaacttagttatcaattttacccttcaaacctcttctccttgaggttgaattacacaggtccaaatcctccattcacaaaggtaaaatctagcacccatctttaagtattctcttttctttatacgcaacattcaatcagttattaagtttcatcattatacattctagttgaaaccatcgtgatttctcacctatcctgttgcaatggacatctgatttccctcttctcttcttgtcactctaaattttattctatctacagaaaccagaaagatatcttgaacatattaatcttatgatgtaactcctcttctcaaagcttcc

SEQ ID NO: 199781 - DNA, 621 bp, Homo sapiens
taataaacttttcttacagggttattgtaagaagtgaattagattaaacagagagtacacatgggcacatggtacatcaccaatcaatggaagatcatggtagtttgactctgaagaattaacactggaagcagaactcattgaattgtaaaggcattttcactgtcaaaagtgactggtaggaagatatttaggcaagscttcttctatggtgtgtgaggtgtatgtttttaaaatctagcatcaacattctaggaaacagctacagctcattttttccaacttttaaatgtcacatctttttttttttttttgagtcaggatctttgttgcccaggctggagtgcagtggcatgaccatagctcactgttgcctcaaactcctgggctcaagtgattctcccacctcagcctcctgagtaactggtatgatagctgtctgtcaccacatctagctattttgtttaatttttttgtagcgatggggtcttgctatgtcatccaggccggtcttgaactcctggcctcaagtgattctttcccactggcctcccaacattctaggattataagcataagccatcgtggctggactgttatatcatttttatggttatggaa

SEQ ID NO: 199782 - DNA, 603 bp, Homo sapiens
taagcagaaacttattaacttgccaccgaaggatgtaatgaaaatttggagggccatggatccccaggatagagcaatgatttcctagtagttcaggcaggattcctgaagtcaaatatttccatgtcagtagcattctaaagartaaagtcatgtaacctactcagattgtcaccaggactgtctattaggtggggtcatgagatgaccccaggattagtgaaaagaaaactcacatttcatggatatgaactgtgggacacattcttttctttttcttttcttttttttttttttttttagatggagtcttgctctgtcacctaggctggagtgcaatggcgcaatcttggctcactgcaatctccaccttctgggtttaagcaattctcctgcctcagtctcccaagtagctgggattacaggtgcccaccatcatgccccgctaatttttatatttttggtagagacagggtttcaccatgttggtcaggctggtcttaaactcctgacctcatgatccgcctgccttagcctcccaaagttctgggattacaggcatgagccaccatgcatggccctgtgggatacatcctgtattat

SEQ ID NO: 199783 - DNA, 404 bp, Homo sapiens
agattatagcagcctgtttcttcatacacctgacagaggacagcagaacagggctgggtcgagcatggtagatgcttctccaccaaagacctacatccagagacttgatttacctatttaagcccacatgacatcccaagagatgggctcaatagcatattaaaattttcaagactgagaagcacaactcagggaagcaatttagaagaaaatgtaaaaatattagaaatacctgaatttatttgtttcccattagttaagctgaagtgcggtgaaccatgtgttatacactggcttttcataaaagtaattatcaaatgggagctgaatccctgcataaccagctatatcctatagtgtaataaatatgytaaacatcacagattttgtatcacagagaagaa

SEQ ID NO: 199784 - DNA, 585 bp, Homo sapiens
ttggatttattccaccaacttttaccttagggacactcttgctcctagtacagagaggttttgcaaacactagcttttaaaaagtttctctctctctytctcgaatgcctttagttgaacatgatggaacataactttggatgttagcagtaacagtctttggaatcacctgtagccatgccccaaaacatgatagcatgttgcaaaacctctaggtgagtgtgtgatgaggaaaccatcctaatcaaccaattctgtacaaagtattgacatctttttcctggctgtgcctttgcttacagtgccctaagggagaaagagcaccagaccatctgaataacgtgaaagtggacacaggaaacaccagacacccagagaaatggagtccaaatgtgagtacttcatttcattcttttgaacatgaaagcttttttttccctgaagtaaatgagaactcttaagaaaaaaaacaaaagaaactccctactcacgacattattctgtttattagtagaaagtacattctatgaagacacagatcttatctatctttttcagtgacactcagcatgatcttaataagca

SEQ ID NO: 199785 - DNA, 431 bp, Homo sapiens
tcatgtccttgttatgaggaacagtcagagatttagtgaaatattctcagtgagtcaatcaggaatgctgttaaaagttacagtgtgcctggttctgggaagactgcataggtataacgtgatctttaaatggaatttatttaaagtgtgatccttcagtccatccatgtcccttttggccatgcttttaaattgcttataaacatgtcacacagattgttaaaggaaacacacaggaaactttcaatcttcttgggtaatatgatcatgaaatacctcaggggaaaaaagtacagatgttttatttggaaatkgtgttctttctttttaataggagtagaactacagcaactttgttaatttacctaaggttgaatttgaaaggaatagagaatgtagtcagttctgtccttactacctggttaaaaagt

SEQ ID NO: 199786 - DNA, 590 bp, Homo sapiens
ctggtgatgattgacagccaaactggtgaaggatgctcacaaaattggattgtgtttatgggtgaacataatttggaaattttaatctattacacctaggaaactctgcttgaagcttaaaagagttaatttaaccacaagaacgaggagacggagaaggaggaggagacttatctcttatattaagaaataaattcatgaagttctttacctcaagagttgctacagactaaaaaaagcttcagaaaaagtctaaattagtacatgaaattgtctccaagtcaactgagaattaaaaattttaagatatctcaacattcctagttgctgaatcactcagttggttttttatttgttgctttggttggttggttagttggttggttggttagttttgtaaacaagtaagcttggtattaacacaatgtgctaatttagtggtgacaacattactgggtatccataaaacaaatatagtgtgtcttgaaatttgaattttctgtcagcccatgttttacctattctatctgtgaaagaagacagtccactttgtagcctaaaatacrttgggggtaaaaaatccagggaag

SEQ ID NO: 199787 - DNA, 531 bp, Homo sapiens
agatctgtcagagaaaacaaatgactcagactccatgtgctgtgtctgtgtacagtttatccgtcgtccttcatgttcttcccttatgcacatctgacaatgtctctcaaggttagtgaaagagtgagcatacctgctaagcaaattggaaataaaatcagaaatgttttttggagaaaatgcagcaaagaagccatctcctccctcctgccccaatttatcatgtctttaagattttctttttggtcttcttcatctctcaactcatgaactttggcattgacatagccaagatgatttttttctttctttctttcttttttaattttattctttttttttttttttttttttttggttggagaaggggttatgctttgctgcccaggctagagtgcagtggtgtgatcagagctcacaccactcacactactggggagtagtcctagctggtccagaggctgaggctcaaatgatcctcccayctcagttgctggagtagccaggactacagggatgtacaccaggtcc

SEQ ID NO: 199788 - DNA, 581 bp, Homo sapiens
cactctgcttctctgctgtcaatgtgtgcagtacccactctgaagaggggacagaaaccaggagagaaaccataccttctacagctatgattcccccacctttttttcttatcagatcacagagggaagtggatgtggcattaggacttgagttttaaacttatgttctttgtgtctgtgtgaaactctaattacctaggaaattattccctgaagctgctccagctccatatttaggaactgaaaattagttttactctctccaagccacttctgcatactgatgccagattaatccacttccaacactgtcttcttcatgttaccccctccttcctacccctaaacctttaatgtctcccacaccrtctctaggctaaattacagactaggcttcttcccgggcttggaatgccatccttccttctctttgcctagtttttgcccatttcaggttcccagctctctctgaagctttcactggccctctagtcaggagctccacattcctttgaggcactaacacagatcctgatggatgctctcaggaccagcagtatccacgtcatctggcaacttgt

SEQ ID NO: 199789 - DNA, 571 bp, Homo sapiens
tggcttactgagcatccaccaggggctatgatttcctctggatataaccttgaccagtgagaaatggaactggaaagtaattggacagataaatatcctcttttcttcccaatgtggattacttcaaagcgtgttttttcctcaccaaccttcccacgcagcccagtacgccaagcggctgtgcctgttgaggaactaatgtgtcactgcaaggttcacataaacctctggctagcagaggggcaggtggcattgcattgcttccatctttccttgattcacttgcctcttcctgccatcaccctcaccaccttgagcttgtacctccaaagtagggtgttattgctttaattcttgccacaaacactacctttcaaaaggacctgggctaccgtacatgtggctttgccaagagygaagatcaactaagtcggcagagggctctatcagaggaagatgggtcctttggtgatcctgggggacagaacttctctatgactaatctccatgccacaccacccccttttgcctggcacaggcttagcatatggtagagattccataagaagct

SEQ ID NO: 199790 - DNA, 604 bp, Homo sapiens
catgtccttccctgtgacctaaaatcaagtttaaaaataaagatgcctaggatgtttttcctgatcccagggctagttagtaattttaagtccacagacaatgggtatcactaaaaggagcagcactgagaaggaggagccaacaggaatagtttaggataagagctaattggcaccgtttcatgctggaaggtgtcactatattatagccctacaagaaaataggttctcctaaagatcgagagaatttagagctatggaggcaccacgtggagtaacggcttcattttacagatgggaaaactgaggcccagggatgagataccctaggtaaaatggtgtcctggctgctgttttaggaagcagggaggaagcaatccatcttttcaaaagagatccagaaagtatgtgcaagtctaacaaaggagamttctgtaatctgaaatatacacttttgcaggccagctccttccccaagcacacaagataggcagtgtgtccaggcaccagggagaggggcgcagaaatccagttgcacagaaattgtacaaaaggcaggcagctgcgcttagtgcaggaagctagcacagccagtaacagcagg

SEQ ID NO: 199791 - DNA, 449 bp, Homo sapiens
tcaaggctggagggttgagtttaaaaakcaagaactgcatgatgacagtggttctttccttgtcttgttccaccatgactacatctcaggaggtaagtctaggcagcaaaatgccatttgtatgataagactgttttaggatggagtgagtgaagaatgccagagaaacaatggttacattctcatgcagtaggcatgttgcttgaacttgggtgcccttatccctgagaatatacaaagatgtagaacaaacatggcatcttcttgaagcaccaattttgtctagtaattttgaggaaaaatgattttctattaaaccaaacagatgcttcactgagtagaatacaaaatttgcaaaaattttaaaaattgcaacatgtgatttcagagaaattttatgcttatggccagctgctatgagttcctatttccttcccttggggttgagt

SEQ ID NO: 199792 - DNA, 463 bp, Homo sapiens
gagtaataactgaaggtgtgtaattactcattacccaatcagctacaaggttcagggggcaagaatggtttggagataaattgcaacttttgtgagtgaatctgacagtctgggttactaggtgtgtttcttgtgattaatgacacaaggaagaaaggtttagaaaaagtgtttccactgattctgctacttctaggctgacccttaaaatgtttttaccagttaccaaggaaaatakaaattacagtagcaaagtgtgaattttataaaaaaacattaaaaaatattacatccataacttcctactccaattaaaaagaaactcaaaatgataagttttaggatgatgccagaatgggtcattcagctacagatctcaactttctcagaaaatgtacttactaaagaaaaaaccaacacagttggagctatttatcatggtcaattaatgtaaaagtttaaa

SEQ ID NO: 199793 - DNA, 386 bp, Homo sapiens
ttatttctctgccactgcctcctctcactttttcaccacaaggttcaaaggtttctccytcacgtatattcaagttttccatagttctcagaaaaattctgacttgagtttaaataaataaataaacaaatagacattaagtagctgaaactatctccccactctccatcccaaaatatggtaggaaaaagtgctaatatatcttccattattgacaataataattaacatctatatatagcaatttaccatttgtaaagcacgttcttatatgactttaacattgatcttcacaacccactatgaaatgaatattttcatccctatttcccagattgttaaaaaagttaagtaatttgctcagatttatgcagctagtaaatggt

SEQ ID NO: 199794 - DNA, 386 bp, Homo sapiens
ttatttctctgccactgcctcctctcactttttcaccacaaggttcaaaggtttctccctcaygtatattcaagttttccatagttctcagaaaaattctgacttgagtttaaataaataaataaacaaatagacattaagtagctgaaactatctccccactctccatcccaaaatatggtaggaaaaagtgctaatatatcttccattattgacaataataattaacatctatatatagcaatttaccatttgtaaagcacgttcttatatgactttaacattgatcttcacaacccactatgaaatgaatattttcatccctatttcccagattgttaaaaaagttaagtaatttgctcagatttatgcagctagtaaatggt

SEQ ID NO: 199795 - DNA, 420 bp, Homo sapiens
gaattccctccgggtctttggtacagaatgcaaaagagaagagggagccgctattgtgggacatgcagtaggcttgggggagggggcagctatagtactagtaaagttgtgcaaaggtcatatggcaacagaaaggtctggatggggtgagggaaaggcagattggtgaaggggagctcaracaaagtccttctcagcaatcagggaactgttgcccataggatatgtttggagacattggtggcccctttctaatctatgggaactttgctgccccctgcgccaagtactttggggacattagtttattcttaatattggagacattgccctctagtcattgcttcctttattagatcatgtggttgcctgggcattgctataagtttggggagatgggtaattagctgaccttctaag

SEQ ID NO: 199796 - DNA, 420 bp, Homo sapiens
gaattccctccgggtctttggtacagaatgcaaaagagaagagggagccgctattgtgggacatgcagtaggcttgggggagggggcagctatagtactagtaaagttgtgcaaaggtcatatggcaacagaaaggtctggatggggtgagggaaaggcagattggtgaaggggagctcagacaaagtccttctcagcaatcagggaactgttgcccataggatatgtttggagacattggtggcccctttctaatctatgggaactttgctgccccctgcrccaagtactttggggacattagtttattcttaatattggagacattgccctctagtcattgcttcctttattagatcatgtggttgcctgggcattgctataagtttggggagatgggtaattagctgaccttctaag

SEQ ID NO: 199797 - DNA, 630 bp, Homo sapiens
aaacaggtccacacttttttgttccagagggwggaagtaaatcatttcagaaataaaatactatggtgataacaccttacgttttatgctatattttattatttacaaagcattttaatatattgtctcatttgatagttagaataactgcattataataatgcttttttcctaatattgttatcccatttacagatgaagaaactgggaaattgaggctcagagagatagtgtggtttgcccagagatctcatccctccaggctgtagcagagccaaaactcaaacccaggtctttcaactctaagccattctcagtgatgcctcctcctctctttaagagagcttccctgcccacagacctagacctacgaaggagaattgtcaggctcttcccaactctgtcttgtggcatcttggaaaagacctctgtcttcttgtacataccagatccaccctccacttgctaggtatgggcatattcttccgccctttaaacctatgcctccaataaatcatcagctccaaaatctcctctgcagatgtttagtctcagatgtgtagtccttaacacatactatcggaactgcccgctttcctcatttgcagatgtgaggatgtttgaaccctt

SEQ ID NO: 199798 - DNA, 630 bp, Homo sapiens
aaacaggtccacacttttttgttccagagggtggaagtaaatcatttcagaaataaaatactatggtgataacaccttacgttttatgctatattttattatttacaaagcattttaatatattrtctcatttgatagttagaataactgcattataataatgcttttttcctaatattgttatcccatttacagatgaagaaactgggaaattgaggctcagagagatagtgtggtttgcccagagatctcatccctccaggctgtagcagagccaaaactcaaacccaggtctttcaactctaagccattctcagtgatgcctcctcctctctttaagagagcttccctgcccacagacctagacctacgaaggagaattgtcaggctcttcccaactctgtcttgtggcatcttggaaaagacctctgtcttcttgtacataccagatccaccctccacttgctaggtatgggcatattcttccgccctttaaacctatgcctccaataaatcatcagctccaaaatctcctctgcagatgtttagtctcagatgtgtagtccttaacacatactatcggaactgcccgctttcctcatttgcagatgtgaggatgtttgaaccctt

SEQ ID NO: 199799 - DNA, 620 bp, Homo sapiens
cttgggcctctcctgcccactgctgggtaatgcaccatgggaaaaaggctggctttgtgacagtctaagtgccagagatgacaggcctgcctgctacccactcacaccctaccagtgaggtttgtcacctcttccacacarctcccactgcccccaagaggttaagccctgtcattttgtgtcattgccagatttcttatccatgtctctttttttgtagcaaagaattcagtgtcattaataacccctggtgatggccaagggcaggccccatgctatttgttatctgttggacacgcgttttttgatccccttctgatagacagaaaatacccatcttctctcttactaattggcagtatgtgccaggcttgggagttggcaacagccattgcttttcatcctttcagattacgtgttggactcctcatccaaaagtgcacgcttacgatgcggctaataccttcctcctgccatccagctcattaaggaataaaacccaaccctacttctgaagtggcacagagcttctagaggcagctgggctgctcatttccctgaaaggaggagatggaattaggctttctcgaagtcttctccaaacagattctagaagcata

SEQ ID NO: 199800 - DNA, 591 bp, Homo sapiens
agctagtagcagaacaaacagatcaaaactccttgaccagcaacgaaaaacatgcataagaacatgcayacaaacaagattctcaacattcctctctcccaactctctttccacctgcgtcagagtgccttacctttttaagtctaggagaataaatctgtcttttgtttacagggaatgataaacatatgtctttcaaattctagaaaccttgaacagattacttaatcattccatgcctcagtttccccatatctcaaattgggataacagcagtacccacttcatagttactaggaatgttcaataagaaaatgcatctcaagagctgataagtccctgacacataaaaaaaacactcagtatctgttagctattaatattgccactgaaactattaataataatatacttgaaaaactgaccatcttttacagttatatacttcagaaggagacatatggtatatagaaagcagtattactccagggagggcaaatgcttcatctatcctacattactccttttgaggcaacagtcaaatgaataaaatccacaaatacgttgatgctcctctaactcccgatatat

SEQ ID NO: 199801 - DNA, 546 bp, Homo sapiens
agttctcagtcccaaattatgagacagcctaaagactggggtgtgggaatgagaagggtaagagcaagaggctgaatactaaagcagaaacacagggagtattcccaccaagggaactccagttttaagaataaattatgtctgcttcatgggatatacaatcctcgggacactgcaggcattaaatagaaaatattaataatgacatctgtgtccttcagcagagttcttcacacaaacacaataaaaatactttatgcattaatgaggcaaataagaaataggaatcttgtatttattatagtaatacctaattcattttgattcagatctatctttcaggctaaaaggsctgacagatctgaatcaaaatttaaattttaatgttctttaaagagataaaaatgtattatccttaaatatatatagaaactagaagaaagctaacttcatcaactagaggtccttcctgggctcacttggactcagaatattaacagtaattctaacatgcttgaaaatagttttcctaataggacaaatcct

SEQ ID NO: 199802 - DNA, 571 bp, Homo sapiens
gcaacatctccatcctctcaacccacaaagcaatgttgtagaattagtcttggcataggaaagtacatattgtttcattaaaaagactcaatgccctccccccacaaaaagccctcaccttttgaaaagcccattgagattagcagcaggtggagaatccggagtcccaaattcttatgccgacaggactcctttagctcctctttttgcttttggctaaattatgtttctatgctatctcttaatcatctggatactgctatttctagtattaatttatcascatttcttaggggtaacatgaaagaactttaaacgttaactcatggaatgccctgtggttgtaaaatgagcttaacttgcctagtatctgactcttcaacataaatctacagaggagaatctggtaatgaaatagcgtcaaagaacttggacccatccaaggggactctgaggttggaatatagtgagagcctaatatggctataaaaatgtaaattaactaactttcttaattatacaataaaatcggtaaaaccattttctctgttaaagtaaggacacagcagtt

SEQ ID NO: 199803 - DNA, 405 bp, Homo sapiens
ctttcacctactacaagcttgtacaacacatttaatacaatctaataccttgtgggtcagggagaaactcccatcatcactaytgggagtggtgtgaacaattatatacaagtgctagttttaggaacatacagatagatttggtgttttgaagacagggatggtaactgaggaacaactatataagtgtgctgcctgcacaactggtattactgtgcacttaggggccccaacatttcccagagaaaggagttgggatggcactagcgacaccacacatccaagctgaggctgccctctccaactacctgccccttccctaagagcacctataactctaataattatggttaaagtttatggatcgcttaccatgtgccttgtgtctgtctccactctacatac

SEQ ID NO: 199804 - DNA, 509 bp, Homo sapiens
tcagatatacttcaacatactaatgttaatgaaaaatgttttatataactataaaaaatgagcaagctaagtactgatatggaaagggttcctagatatattattatgtcaaaaaagcaaatttcagaatgatgtttttggtatgctaccttcagagtaaaaggaggaaaatctatatgtgtatctgcataracccataatattttaaaatctaagcacagggttgggaaactggcactaggggaataaacacaagaaggagactttccactatacactttttatacgttctgatttttaaaccatcggaatatactaccatttgaaatacaatttaataagcaaaatttgaatctatttatgttttgcctttacacttcttttgcaactaatgaaaatgaatattttttcgtttgtgtgttgaccagtttacttcttccctgagtatgtttgcccatattgacatcttagaggctttgctttttttaaaaaaaaatcagcaaatgtta

SEQ ID NO: 199805 - DNA, 509 bp, Homo sapiens
tcagatatacttcaacatactaatgttaatgaaaaatgttttatataactataaaaaatgagcaagctaagtactgatatggaaagggttcctagatatattattatgtcaaaaaagcaaatttcagaatgatgtttttggtatgctaccttcagagtaaaaggaggaaaatctatatgtgtatctgcatagacccataatattttaaaatctaagcacagggttgggaaactggcactaggggaataaacacaagaaggagactttccactatacactttttatackttctgatttttaaaccatcggaatatactaccatttgaaatacaatttaataagcaaaatttgaatctatttatgttttgcctttacacttcttttgcaactaatgaaaatgaatattttttcgtttgtgtgttgaccagtttacttcttccctgagtatgtttgcccatattgacatcttagaggctttgctttttttaaaaaaaaatcagcaaatgtta

SEQ ID NO: 199806 - DNA, 542 bp, Homo sapiens
ctagtcttttcacgtttttctgcctgctttatatcctggccacactagcagttgattagatggtgcccacccagattaagggtgggtctgcctttcgcagcccgctgactcaaatgtcaatctcttttggcaacaccctcacagrcacacccaggatcaatactttgcatccttcaatccaatcaagttgacactcagtattaaccatcacaacttctaatattccttcctaatttttaggtagaaaatgatttcaaaaagaagtttcctccatcaacatttagattcccagaggtatagttgtttaggcaatgcagaataaatgcttgatgtttctcgttgtttgtcagtttttaaaatgttaagtttcatacttaacaaccacaaaagtgacaattgttagctcatggatttaaaatgttgtatgtgtttcaattcattacaataattattgttgaagctcaattttcctatcttctgccaatggtcgattcctcttgctggattctctgaactttaaacaagaaaataagaatatttaa

SEQ ID NO: 199807 - DNA, 542 bp, Homo sapiens
ctagtcttttcacgtttttctgcctgctttatatcctggccacactagcagttgattagatggtgcccacccagattaagggtgggtctgcctttcgcagcccgctgactcaaatgtcaatctcttttggcaacaccctcacaggcacacccaggatcaatactttgcatccttcaatccaatcaagttgacactcagtattaaccatcacaacttctaatattccttcctaatttttaggtagaaaatgatttcaaaaagaagtttcctccrtcaacatttagattcccagaggtatagttgtttaggcaatgcagaataaatgcttgatgtttctcgttgtttgtcagtttttaaaatgttaagtttcatacttaacaaccacaaaagtgacaattgttagctcatggatttaaaatgttgtatgtgtttcaattcattacaataattattgttgaagctcaattttcctatcttctgccaatggtcgattcctcttgctggattctctgaactttaaacaagaaaataagaatatttaa

SEQ ID NO: 199808 - DNA, 542 bp, Homo sapiens
ctagtcttttcacgtttttctgcctgctttatatcctggccacactagcagttgattagatggtgcccacccagattaagggtgggtctgcctttcgcagcccgctgactcaaatgtcaatctcttttggcaacaccctcacaggcacacccaggatcaatactttgcatccttcaatccaatcaagttgacactcagtattaaccatcacaacttctaatattccttcctaatttttaggtagaaaatgatttcaaaaagaagtttcctccatcaacatttagattcccagaggtatagttgtttaggmaatgcagaataaatgcttgatgtttctcgttgtttgtcagtttttaaaatgttaagtttcatacttaacaaccacaaaagtgacaattgttagctcatggatttaaaatgttgtatgtgtttcaattcattacaataattattgttgaagctcaattttcctatcttctgccaatggtcgattcctcttgctggattctctgaactttaaacaagaaaataagaatatttaa

SEQ ID NO: 199809 - DNA, 501 bp, Homo sapiens
cactattgatattttgaaccaggcaattccttgatgtatatggctgtgcatggtagaatgtttggcggtattcctgccttctacccagtagatgataacagyatcaccagttgcaatgagcaaaaatgtctccaggcattggtaaatgtcttctggtacaaattcgttcacaattgagaaacactgggttagagcaataagataagaaaattcattttaacattctgttaactctgtatgatgattcaactctacatgtcttctttcatatgcttatgaaagagtatgtgtttctataaatgtatttttgaattatttcttctcaataaagttttcttttcagaaacctttttctcagtattaaaacatatatttggttatcttttccaatggcctttaatttagtgtacattttatttgtactctattatcatcattattttatagaaaagcaatggcactattattatttcatattttgttatctgtgccttaattcta

SEQ ID NO: 199810 - DNA, 501 bp, Homo sapiens
cactattgatattttgaaccaggcaattccttgatgtatatggctgtgcatggtagaatgtttggcggtattcctgccttctacccagtagatgataacagcatcaccagttgcaatgagcaaaaatgtctccaggcattggtaaatgtcttctggtacaaattcgttcacaattgagaaacactgggttagagcaataagataagaaaattcattttaacattctgttaactctrtatgatgattcaactctacatgtcttctttcatatgcttatgaaagagtatgtgtttctataaatgtatttttgaattatttcttctcaataaagttttcttttcagaaacctttttctcagtattaaaacatatatttggttatcttttccaatggcctttaatttagtgtacattttatttgtactctattatcatcattattttatagaaaagcaatggcactattattatttcatattttgttatctgtgccttaattcta

SEQ ID NO: 199811 - DNA, 501 bp, Homo sapiens
cactattgatattttgaaccaggcaattccttgatgtatatggctgtgcatggtagaatgtttggcggtattcctgccttctacccagtagatgataacagcatcaccagttgcaatgagcaaaaatgtctccaggcattggtaaatgtcttctggtacaaattcgttcacaattgagaaacactgggttagagcaataagataagaaaattcattttaacattctgttaactctgtrtgatgattcaactctacatgtcttctttcatatgcttatgaaagagtatgtgtttctataaatgtatttttgaattatttcttctcaataaagttttcttttcagaaacctttttctcagtattaaaacatatatttggttatcttttccaatggcctttaatttagtgtacattttatttgtactctattatcatcattattttatagaaaagcaatggcactattattatttcatattttgttatctgtgccttaattcta

SEQ ID NO: 199812 - DNA, 501 bp, Homo sapiens
cactattgatattttgaaccaggcaattccttgatgtatatggctgtgcatggtagaatgtttggcggtattcctgccttctacccagtagatgataacagcatcaccagttgcaatgagcaaaaatgtctccaggcattggtaaatgtcttctggtacaaattcgttcacaattgagaaacactgggttagagcaataagataagaaaattcattttaacattctgttaactctgtatgatgattcaactctacatgtcttctttcatatgcttatgaaagagtatgtgtttctataaatgtatttttkaattatttcttctcaataaagttttcttttcagaaacctttttctcagtattaaaacatatatttggttatcttttccaatggcctttaatttagtgtacattttatttgtactctattatcatcattattttatagaaaagcaatggcactattattatttcatattttgttatctgtgccttaattcta

SEQ ID NO: 199813 - DNA, 533 bp, Homo sapiens
tgtttttaagtttcttgcctacattgtagactaatccttggttgttcctgtgaacaaagcagcaatctccaactgcagctcagaaggaacaaaatggatgggtaatgtaaaaatctgcatcaatattctagttctgagcaattacgttgcaaatcctgccaggtgatggaaataaatagggtatccatcaccccaagttttcctttttgaaagtaagaccaagggagataaccaaagccaagccccatgcacccaaaccttagcaagcataaccatagccaccagttatctgggcatatcacaaggcatccttttttctcccttgttggaggaaaactaaattcccacccccaccctccgcaccccygcctggccccctgttaacctgggtgaaagctactttaacatccatcggcagcacgctgttgcggtccctgggacttggagatataaggatggaagacagaaagagcagtgcctcactttgtctccctcgtgtagcccgcgtattcgctaggaagagaaaggaacct

SEQ ID NO: 199814 - DNA, 593 bp, Homo sapiens
ttgttttttgcatcaattataagttttaaacctagactcagttgtctaatttgcccctcctttatgacgtggatatctgaacaccaaacctttacactatgtttatgttttctagctagcttgtgccagtaatgattacgaagcaaaggaaaccaagtactttaattgttcataaagaagttcacagctagagttattcacttgtgttaaagcaataaatggtaaagaaattgtcttactactgaagaagaatgctgataaatttattgagagtccctagcattcttcaagttgtaatattaaataattgatgttgctagacattttagtttctccagagaggacactttgttgccaggagagctgtgcattttgagaaagacctaaggacacactccaaggaatatgtataaattataaccataattatgttctgtcttcagagcagagatacagagtggttttgatatattattcacagttgcaatcagaggaaactgagtcataagaaatttaattaayatttttgatggcatggagttaatttggatggtaaatgtagatgaacttgtaaaaaactactttgcataatg

SEQ ID NO: 199815 - DNA, 445 bp, Homo sapiens
aagagcgtctccaggccgagaagaaggagataatccagactttgtccaaggaggaagagatcaagaaataaaagctcccgcttagtctgtacacactggcctccatgattacacagatcagccattaaaataaaacaagcctttatctgcttaaaaaaaaaaagtggtacataatagtagtgactattaattctctatattctcctgtagtccacatgaagtaccaatgcactttatagaaataggctcgccgattttctaagtacaaacttggtttccctaagaaaagatgtactgcttatcaaacacacacacatctctataaattaaagatattacataattccactttgtgaggaagtcattacttgcattycaattattaaacactatctcccctcataggcaaggtgcaaattacattaatgctagtgtacagttttat

SEQ ID NO: 199816 - DNA, 554 bp, Homo sapiens
agaattcagacaacaaaattgtcatttctatagtctaaagttttgagcaaaaaaaaaattagaattgatgtttgaatttcctgctgtttttgcctgaggtgattctattttacagatgaacaatactgttcaaaatgtttgatagctggatcacaacttcaaagggataatcgaaaaatacctctttgtagtagctatactttaaagtctgttgttaacagccttcagtttaaattgctgtcttctggctatgtattctcagattgaaaatctacagagttacttcatttactcttgtgtaatacagtctgattactgataagcttctagtttcggtgactatttgtagattatattttctatctttttgcttaatgaagtatttttataagctgtatttttcatttgatcttaatggcctaaaaaagatcaaactttgtttttaatttgctttcaaaaatattcaaattagaacttgcatttctcagttcactgtgttggtgatrattatcagaatgaaatggtaaatacaagaaagtgcatcttttatggct

SEQ ID NO: 199817 - DNA, 615 bp, Homo sapiens
gaaaacacccatacacagctgggtgtgtaagagaggagtcagtgcatattaggctgactgtatttctgagataaaacctctaacagactgttatagtctgaaactttgtgtctatccaaaattcatatatggacacttaatcaccattttaatgtttttaggaagtggggccgagggcagagccctcatgagtgggattatgcccttatcaaagaggccctagagttctgcctttccctttccaccaccccaggacacatctaaaagttgccatctgtgaaccagaaagcagcctacatgccttcstgaattggtgttttttaccagcgtgacaccactgaaaaaaaaatctggtcacgttattgaggacctaatctttcaatctttgaatcaccttatcatttaaatgttccccattgccttctaaacaaaatctaaatgcttttataatctgatcctgtctacatttacattctaatctctcacaaggcctatctttttgatgtgcatttaggtcttataactgcttacagaatacagaacatgtcatattttgggggactttcttgtctttttacctgttgttcttttgatttggactgccttcatccttat

SEQ ID NO: 199818 - DNA, 615 bp, Homo sapiens
gaaaacacccatacacagctgggtgtgtaagagaggagtcagtgcatattaggctgactgtatttctgagataaaacctctaacagactgttatagtctgaaactttgtgtctatccaaaattcatatatggacacttaatcaccattttaatgtttttaggaagtggggccgagggcagagccctcatgagtgggattatgcccttatcaaagaggccctagagttctgcctttccctttccaccaccccaggacacatctaaaagttgccatctgtgaaccagaaagcagcctacatgccttcgtgaattggtgttttttaccagcstgacaccactgaaaaaaaaatctggtcacgttattgaggacctaatctttcaatctttgaatcaccttatcatttaaatgttccccattgccttctaaacaaaatctaaatgcttttataatctgatcctgtctacatttacattctaatctctcacaaggcctatctttttgatgtgcatttaggtcttataactgcttacagaatacagaacatgtcatattttgggggactttcttgtctttttacctgttgttcttttgatttggactgccttcatccttat

SEQ ID NO: 199819 - DNA, 560 bp, Homo sapiens
ggtttaaagcaataaccgttttatttgctcatggttgtwctggagagcaatttgtcctgggctcaacttgtccagggtggttcttttggttgtcttaccagcgatcatttttgtagctttagtgaaatggtggcttatatggaaggtggttggtctagaaggccatggttgggtcactgtgtctctgctgcatatgattttatgctcctgcaggctagtttgggtttgttcatatagcagcgttgtgttccaagacagcaaaaacagaaggtgcaagaattctaaacttggatattgcaaaacatcagttctgctacctccctctaatcaaaataagttacgctgtgatcccagattcaagcattgggaaaataaagcattaaataaaagagtggtaatatcccattataaaagggctgcatacagggataggagaaacttttgcaaacgtcttggcaagttacctaccatgagaagtaatttattcttcaagggtcattggtagggtatatgcaattggaagagatgggctagaagcatggatgtcagagagaaatgaa

SEQ ID NO: 199820 - DNA, 607 bp, Homo sapiens
tttttgtcatggcaacactcatttcttggaaccaatttctgtatcacttatgtttctgagtaaaaaccacaccagttcttaatgtcttaatggtttaaagcaataaccgttttatttgctcatggttgttctggagagcaatttgtcctgggctcaacttgtccagggtggttcttttggttgtcttaccagcgatcatttttgtagctttagtgaaatggtggcttatatggaaggtggttggtctagaaggccatggttgggtcactgtgtctctgctgcatatgattttatgctcctgcaggctagtttgggtttgttcatatagcagcgttgtgttccaagacagcaaaaacagaaggtgcaagaattctaaacytggatattgcaaaacatcagttctgctacctccctctaatcaaaataagttacgctgtgatcccagattcaagcattgggaaaataaagcattaaataaaagagtggtaatatcccattataaaagggctgcatacagggataggagaaacttttgcaaacgtcttggcaagttacctaccatgagaagtaatttattcttcaagggtcattggtagggtatatgcaa

SEQ ID NO: 199821 - DNA, 573 bp, Homo sapiens
agagtagacaaactgactctctcatccaaaatcaattctggaaaaaccacaaaatctaaatgcagcaatttggattccagaagtggcaaaagttatgatgaatgctttgaaaatccctaagtcttcatagcctggcttccgtggggtgagaagaggtggggggattgaaatggggtgggtgacaatactctcagggaggggtcctgaagaggcaactgtgcaaaaataggctcaagcaaactttcaagtttcactcttgtacctcacccatagtgcattggaacaatgatacttgtatttcatactagagataaatgaaaaaagagcaggccacagacatgcaaggagtaaaatcaaggtagtttcattgtcctgctctggtgagaaaatatgaaaagtaatgcagcctatgccagtccctcgatcacttattcacctacactcccagccctcgtcttgtagggataagtattccatccctagaagaatacctcctttaaattctgattcttttaagagaatgattgctgggttgcytaaaatcctaacgttttgggaggccaaggaaggaag

SEQ ID NO: 199822 - DNA, 499 bp, Homo sapiens
ataaatatatataacactgattttaacaatgttaagggtaaataagtaatactttagggaaattacattcactccattgataaatacttaaattaatggcatataaccattgccatcttcttttaagcataaaggaatgggccatagatgaatgcactgttctcttattaaaaatgcattagactacaaagcccatctcatgatgtaggaagaattaagaagttttctaatatcattaggcagaactatacttaaatcactaccaagaattttaatattctttgtactgtgaaaccacatatattaaattactattacttgttttttgtgaatattaacatcyttcataacactactaccactaataaacactactactgaataaaatgatgcagaagaagcaatatgaataaatttttaaagttgaacttttagcacacatagtaatatatttttgaacattaccaagaattatatatataatacacatataaacatt

SEQ ID NO: 199823 - DNA, 501 bp, Homo sapiens
atctcacataaaatcctatcattctctactaactggtcttaggaatcaacaatggggttgggatttattacagtcaacggcccttcctcagtgtcctccttcttctccatctttgatttgactccctcaaatcagggcatgagagataaggacaaaaaaaaaatagctctgtttaaccagaagtgtttatagttcctctttaactagaagtgccctcagtcatgacaggctttcatgaaaatatcccaggcctctttcctctgatacagcagtgttctctctaactggcagtacgtccatctaatactgctctcagaacccatcccayggactggaagagagggaatggaagaaagagaatgtgctggaagagagagaatgaagaggaacagttcctgcctcactctcaacttcctgtggggaagctgtgagtcaatcaagtagcaactctgtgcatcactgattttaccataggaaagtttgctgcttacaatgacaaac

SEQ ID NO: 199824 - DNA, 577 bp, Homo sapiens
agccatctatttcatgtcaggtgagttgcaattgctttcatctttttaggattatatccattttgtcaaagttgtcaaatgtatgtctataaaattgtttctagtatgcaacaatcttttgatatctaaaagttccttagtaatacactctgttttatttccagtgtttgtaattttgctttctctcgctttaaatttctttataagtcttgcaagaggtctgcaaacacatttgtctttacgaagaatcagttatttgtttcctttattctttttatcttcctgttatatgatttattggtttttgctcttatctttattattttctttcttattcttgctttagatttacttccctcttcatttcctaagtcctttagggggagtttaaattattgatttgatactttttctcttttctaaaatatgaatttagagctattaattttcctatcagtaatacttaagctgtgccaaacacattttggtatgtggcattttcattttcactcaatttaactttttttttwaaatttccttgagccttccttcttgactcatggattaagaagcacat

SEQ ID NO: 199825 - DNA, 362 bp, Homo sapiens
gcacacaaggaagatgatgtgaagatacacggggaaaagacggtcgtctgcaaaccaaggaataccaaggattgctggcaaagaccagaaactgagggaagcaaagaccagaaactgagggaagtagtctcccctagagctgtccaagagagcatggctctttaggacatcttgattttggacttctcgcctccagaactgtaagacaatacatttctgttatttcaagccacccagtttrtggtgctttgcaatagcggccttagggaactaaagtagtgccccccaaaaaatgacaaagaaggaataaacctcagtgagggacttttagcccaatccttcaatttccagtgatgtggcct

SEQ ID NO: 199826 - DNA, 427 bp, Homo sapiens
agtgcaacaatagacacatagaaaaatagaacagaatggagaacccagaaataaagcagtgtatatacaactaactattcatcaataaagtcagcaaaaataagcaatggaggaagtactttctattcaataaatggtgctgggaaaactggctaatcatawgcagacgaatgaaactggacttctatctctcaccagatacaaaatttaactcaagatggattaaagacttaaatgtaagatttcatatcctaaaaatcttagaggaaaacctaggaaatatccttctgtacatcagccttggcaaataatttatgaccaagtcctcaaaagcaattgcgacaaaaacaaaattgacaattgggacctaactgaactggagaacttcgcacagcaaaataatatgtcaacagaataaagagacgac

SEQ ID NO: 199827 - DNA, 445 bp, Homo sapiens
gggcttgccaaaagctgaggctgcaatgatttgctcattaggtttacattttaaatactaaaatcaggagtaaaaagcctttcctgctcatgcatgtttatatcatctcttgcgtaatgatttcatcatcttctcgtctcaacacaaacatttgttttgtttttaaaatatcaaactggcttttgaatttagacttttaaartataactttttttttttaaacaaaggtttaggatgcaaatatatctatcaaaagaatggtgatcctttgcatataagtgaactcctggagagtttcaaaaaggatgcaagaagctttaaattgagggctggaaaacatcagcttgaagatgtgacggctgtgttgaaaagttttctctctgacattgatgatgcactgcttactaaggagctctacccatattggatctctgctttaggtaat

SEQ ID NO: 199828 - DNA, 568 bp, Homo sapiens
tcaacacaaacatttgttttgtttttaaaatatcaaactggcttttgaatttagacttttaaagtataactttttttttttaaacaaaggtttaggatgcaaatatatctatcaaaagaatggtgatcctttgcatataagtgaactcctggagagtttcaaaaaggatgcaagaagctttaaattgagggctggaaaacatcagcttgaagatgtgacggctgtgttgaaaagttttctctctgacattgatgatgcactgcttactaaggagctctacccatattggatctctgctttaggtaatatttatacagatatttgtagatatgtgtgtgtgtgtgtgtgtgtgtgtgtataatatagaccataatacatgcttgccttttaatacttagactttaaacatctttgataagctgaaattttaattgaaagaaacaatgtacataatggctgakaacagaaattatataaatatcaatagctgtttctctctacctcaagagaaattcaaaatattcactaaatcgtttggtatatacttagttttcaatggatttcttag

SEQ ID NO: 199829 - DNA, 530 bp, Homo sapiens
tctttcccaaccactacttctcatttatgtcagctccattattgtaaaactgattttcttattgcatcatacaaatatagtccacattatatagtcctatctctatgcctgtgagatgttgagacaaactttaatatagagaattttagcgtgcagcatggaattatagaggataaattgaatgattcattgtgtgttgtggtccaggggatgcttctatgcttcagatttaaagggacatatgaaytgggcgtgaaagaaatgagtgaaggataatgtctgggacataggagtactagaagatgacagagttatagttggctggcaggaagttgtggaaggctttgtaggtcatgcaaaaacatttggattttatcctttaagtgataagaagtaacagatcaaatgtgttaggataataatccctatgatggtattgttagggaaaatgtagcatagagacagataaactaactaggaaacagttttgttgagtttctggtgagaaaacctgggagagaagggactgg

SEQ ID NO: 199830 - DNA, 628 bp, Homo sapiens
cgttcatttctgttcattataaaaaggcattcttagttatatccaagaaaaatgtaattgcattttaaagtagtctgccttgtgataatattttatttagaatagctgtayggacacatgggcccagatattctttctcatttgatttgcactttctggaaaatttagcccagcttggcacctggaatttggaactgtcaattatatgtctaatgacctaccttttttgcctgttttctacatacctcctgccccatttcctcctcctatgctgcagccccacaagtcattttacgccattctgcaagcatacttctatactttggccacaggttgttttatagtttgcaattgtttgaatatggtcagccctttctctaaatcaacaattaagtatgactttgtaacttttactaatctatttaacagtactttttctgatgttcttaactatcattataagctacttagaagaaagaaccatatgcttttaagtcaccactgtatcttttatgtcagagaattccaatattgctgtgtttaaaaattgataaactggctttctgttctatgaaatttccaaataaaagtgtatcataataaactatgcttttctctgacagggttc

SEQ ID NO: 199831 - DNA, 628 bp, Homo sapiens
cgttcatttctgttcattataaaaaggcattcttagttatatccaagaaaaatgtaattgcattttaaagtagtctgccttgtgataatattttatttagaatagctgtatggacacatgggcccagatattctttctcatttgatttgcactttctggaaaatttagcccagcttggcacctggaatttggaactgtcaattatatgtctaatgacctaccttttttgcctgttttctacatacctcctgccccatttcctcctcctatgctgcagccccacaagtcattttacgccattctgcaagcatacttctatactttggccacaggttgttttatagtttgcaattgtttgaatatggtcagccctttctctaaatcaacaattaagtatgactttgtaacttttactaatctatttaacagtactttttctgatgttcttaactatcattataagctacttagaagaaagaaccatatgcttttaagtcaccactgtatcttttatgtcagagaattccaatattgctgtgtttaaaaaytgataaactggctttctgttctatgaaatttccaaataaaagtgtatcataataaactatgcttttctctgacagggttc

SEQ ID NO: 199832 - DNA, 541 bp, Homo sapiens
gtgaagaaagactgaacttaacttccaatatgacaaaatgtgagtatttatattatcagaataaaggaatcagtggaagaatactcactaataggaaacatcaaggctaggggatagttactaaattggcctaacagcattcacaggtcaagaasatagacaccaaaggtaggaggtaaagaaattgatcagatgtcaagggtaagagattctcgctaaagacaggccaaggtcaaggcctagtcaaggaaagggctcagaggagcctaactaatgttttgtcaatgagggagtgtttgtcaaagccattcaaaaacttagtttctactctttaaaataaattcacttttttattattcacagtaggtgatcatacttaaattgagtacagaaactaaatgctataggtaaatgaaatcttaatgaatacaaactacaagcaagaatagaagagagttaatataatttactcctctgaagagattaaatagtataatgaagcatttattattaactgttcaatttattttaagattataaa

SEQ ID NO: 199833 - DNA, 631 bp, Homo sapiens
agccttccttttcaaattggaccactggcggttaacctatctgggtctgtgcagcccacataggcttctgcttgtgccccctggtaggcttgaagctttggaagtcattcctggactgaatgctgagcctgaaaatcctgctcatatttttaagctggcctcatactcacactctaaatttgcttccttcccaagccttgtgacgatcatttgagcccttcccattaaaacgatctcctgtgcaagtccatgtctagggtctttggcttgaaattattccaagcttttccaaatactcttgacttagcaagtcactgtgataaaggaggatcagcaggactggaagaggtgtcataaagaaaggcatgaagaccaggtgtcagataaggatggaagagctctgaggacaaactttgttccctaaaatatattaactcagcagaagaagtttggttagggctgccaaragatgaaggcccagataaaaaagaaaacagtgaattgtggaaaaggaaataaacttttttagtttagggaaagtttctgaaggagaccaccattagaagaagttgtagactcatagctagagggatttgtatgagaaagcacataggaataaatggacatgtgt

SEQ ID NO: 199834 - DNA, 488 bp, Homo sapiens
aatgctgagcctgaaaatcctgctcatatttttaagctggcctcatactcacactctaaatttgcttccttcccaagccttgtgacgatcatttgagcccttcccattaaaacgatctcctgtgcaagtccatgtctagggtctttggcttgaaattattccaagcttttccaaatactcttgacttagcaagtcactgtgataaaggaggatcagcaggactggaagaggtgtcataaagaaaggcatgaagaccaggtgtcagataaggatggaagagctctgaggacaaactttgttccctaaaatatattaactcagcagaagaagtttggttagggctgccaagagatgaaggcccagataaaaaagaaaacagtgaattgtggaaraggaaataaacttttttagtttagggaaagtttctgaaggagaccaccattagaagaagttgtagactcatagctagagggatttgtatgagaaag

SEQ ID NO: 199835 - DNA, 578 bp, Homo sapiens
tttggaacaatgtgacttagtatttaataactatgtcacttatagtgaaaattataagcctcttcataattttataaagtaccatggtatgtaactaataaaaaagtaataattaaaatataaatgttctgttgttgagacgaagtttaaggtatattgggaaacaatgcaattcaattttataggctttatcatacaaccagtgmaatacactttttgattacatgttagtttggattctaagaattattcatacaaaacattttaaactgcttggaaatacaataaaggaagaaaacttaatgatatttggattttcttttcacaaaattttatttcttcagaacatacaaattgttgctgtacagctaaagatttttctatacatttcttagaaataaaattataaatgtcaaatggcaataatatacaaggataaggtaaatcaaacataatttattagggaaattgattttttatcaagtgtttctcttcaattaaatttcactgtgccaaatttagggttaatatcacatgaaatataatttgtatgttaataggaatattttaagaaaaaa

SEQ ID NO: 199836 - DNA, 314 bp, Homo sapiens
ctccccatggactggcccaggaagagggggcagtatgcaaaggagttgagagtccagggtccggtcacggaaaggggaaggtcgtgggccagggagtgtcctgatggcagaggggctatctccagatcaccagctctcagcctctgggccstgtccccatctcagacccccatgtcctcctttggtctggccctccctctctctctgccttagctccaggtccacgctcctggccctagctggggcatgtgtcctcccaaagcccctcccggccttggctgacagctcctagacaggactatgtctgtgctgta

SEQ ID NO: 199837 - DNA, 410 bp, Homo sapiens
ctgctgggtgaggaccctcctcccctcctgccctcccctacccccatcagggagcagtcatggctggtgagaggtgggccaccttgacaaacctagtggaaggggtctgctcagacaactataacaatagcagtagctgacattcattagataagctgagtgttctattaaacactttacaagcactgcctcattcaatcctgcagcactgtttgggaaatattagtatcattgtctctactgtacaggtgaggaaacgggcttagtgatgctaaggatctgtccaagtcacagggctagtaagtggagcagctgaagttggactgtgtgaccttctgcagccaggtccctgaaacggcttcaggacaccacttaygtctgtcgggctggcctcctctctcctgggagac

SEQ ID NO: 199838 - DNA, 614 bp, Homo sapiens
tcaagtaaattattgacatattaaataatataatttcctagccatcaataaatttagattttttaaatgcataatatcatatgttcatgagtcaactgttactgagactactatcagttgtaaatctaaccattaacatgagagtaatgagtagagtaatgagtctctactgattttaaggtttttgtctctcttgtcagatacaaaagaaaggcaggtatctttgaccgaaatttaractcaattttaaaagtgcgccatattacttcaaagacaaaaagctccaaatctaagcaccactgggtggttaaccctcagtctagtgacaccatttggcatgactcctggaagaaaactaatcagccattgtgaagggctaataactagataccgtgttgtatgatgttggcctgttttccagctgtgccagcttactcaccctcttgcctgagcctgaataagatccttgtttatcagatacagactttgctaaagtccatgtgacaatgttcccaggaacccttccaagaaatcaaatatgcctggtcttaaaactgctttcagcatgactgctgagagggacccaggaaacaaagaatggaagctattatagc

SEQ ID NO: 199839 - DNA, 565 bp, Homo sapiens
ttgccattgtaagtgagatttattccagggatgcaaggatggttcagcatgaacaaaccagtaaatgatacatcacatcaacagaataaaggattaaaaccatatgatcatttccttagatgctgaaaaacaytcaataaaactcaatatccttcatgatataaaacccttaaaaaattgggtatagaaggaacatacttcaacttaattacaactatataaaaaagcccacagctaacatgctgaatgggggaaaattgaaagcctttccactaagatctggaacaagacaaagatccactctcacttttattcaacgtagttctggaagtcctaggtagaacaattaggcaagagaaagaaataaaaggcatccaaactggaaaggaagaaatcaaattatccttgtttgcagatgacattatcttacactttgaaaaacctgaagactctgccaaaaaactcttaagactgataaacaaatttagtaaagttgcaggatgcaaaatcaacatagatttaattgaattcacctcatgcaagtactgacttaggagaacactat

SEQ ID NO: 199840 - DNA, 530 bp, Homo sapiens
gccatgttgaatggtagttcccttttccgttctctgagaaatctccaaactgcttcccacagtggctgaactaatttacattcccactaacagtgtataactgttcacttttctctgcagccttgccagcatctgttgttttttgacttttgaataatagccattctgactagtgtgagatggtgtatcactatggttttatttgcatttctctgatgattagtgatgacaarcatttttcatatgtttgttggcttgtttgtatgttttcttttgagaactatctattcatgttctttgccctttttaaaatggggctatttattttttgcttgtagatttgttaaagttccttaatagattctatatattagaccttttttggatgcatagtttgtgaatattttctcccattttataggttttatgtttattggtagtgttttttgctgtgcagaagatctttagtttaattaggttccacttgtcaatttttgtttttgttgcaatttatttcggggactcagcca

SEQ ID NO: 199841 - DNA, 530 bp, Homo sapiens
gccatgttgaatggtagttcccttttccgttctctgagaaatctccaaactgcttcccacagtggctgaactaatttacattcccactaacagtgtataactgttcacttttctctgcagccttgccagcatctgttgttttttgacttttgaataatagccattctgactagtgtgagatggtgtatcactatggttttatttgcatttctctgatgattagtgatgacaaacatttttcatatgtttgttggcttgtttgtatgttttcttttgagaactatctattcatgttctttgccctttttaaaatggggctatttattttttgcttgtagatttgttaaagttccttaatagattctatatattagaccttttttggatgcatagtttgtgaatattttctcccattttataggttttatgtttattgrtagtgttttttgctgtgcagaagatctttagtttaattaggttccacttgtcaatttttgtttttgttgcaatttatttcggggactcagcca

SEQ ID NO: 199842 - DNA, 616 bp, Homo sapiens
cacactatataaatccaaatatattaaattcttgaaaaaaaaatatagagacaccgaaaagatcagtggttccaagggtaagcaggaagtggggaacaaatarcagagcacagaggatttttagggcagtgaaactattctgtatgactctttttataagtctctttgttaaaatcaatacgatatgcaacaaacaccaagagggaactctaaagtaaatttttggattttgagtaataacaatgtatcaaggtagagccattgattgtaacaaatgtcccaccttggtgctggatatccataattggagaagttgtgcccgtgtggggacaggaaaacatgggaactctttgtaccttccactcaattttgctgtaaacctaaaattatcctaaaacataaagtttattttttttaaaaaaagagaatattgccaatactttgcaaattagctgtccttgccagtgtgtatatcattccttaataggaagttaggcagtgaggataatggactatttgttaggaagaaattgaacaattattggtgaaactaagcattttccaaagtactcttcaaaagaaagtttcttttaggaaataattttgagaaatgctg

SEQ ID NO: 199843 - DNA, 640 bp, Homo sapiens
catacctgtagtcctggctacttggaaggctggggcaggtagatcgcttgagctcaggagttcaaggttacagtgagttgcactccagactaggcaacagagcgagagcrgactcaacttaaagaaaatagtggtagtagctgtcatttttattaagcagttagtatgtatgaagcattgtattatacatttggtacttctgtgtctgaattgaaaatattaaattatattaaaacacatagcaagaactttctctatttaatccattgattacaataaagatttcttatcagtttctaaacttaaatgtccttgttttgctctctaactggagcataactgtattgattttatatacatatataaattaaatattaaatatatgtgcttatatatttttacattatactaatttcatcatattttgcaactcatttttaataattttatatatttatatatttaaaatatgttataactgtattataattaatcataatgtataattatatattccatatataaaagatagtttacatgtgtatatattttatatagtgaacatatattttataattttgttataatcaattaaattattatataattacacataatcatgtaataattatttctgtta

SEQ ID NO: 199844 - DNA, 524 bp, Homo sapiens
aaaaacctgactatagctaataaaaattttttattacagttcaactttagcaaaaaattaacatgtccttgagtgtaagttatctttaattttcttttgaaattaggatgtaaaacttaaattaattactctgaggaagtgtcgtcttctactcaaaagtctgaggcatcctttcagagagagaagactaaggatgtgctcgcatccttctcactcctctctcctcctgaaaatcccagtatatccagcaatcagtgcttctggtaattgcaaaggacatgctgtccttggctttcattatttcccaatttactcaggcagacaaagacatccatcgagtcttcaagccataaacttactggcatcctgtaaaacttccccaaaagtctcctgaagctgaacagactgcaaaaaactgacctggaaacttctataaytagtgtgctaacctataactcagtaagaagtatagacttgctaatgcccagttacccttcatgctcatggctaatcactaaggttgg

SEQ ID NO: 199845 - DNA, 499 bp, Homo sapiens
tgatttgaaacagatgtcaggcagcctttcatcccaaagggtcataaatgaatgtatggaatatcaggcagacaaaactgttcaagtgaatattaaacttgttttaaaaaaactttgtatcatccctcattagaagttattataaaaagctatgaagctttattgaataacttcaacaaatttcctaaattatgaatgctaattaatttttattcctatttataacaacacacacamaaaaaagtgctaactagtaagaaatgatgagaataaagtcaagaattaacacgtagataggattttagggttctgatttagagtgctcgatcactctactacctcagcatcacagcctcacatggtgaatgtgatttccaagttgcaaaaaaatgacattattttgaagactagagttccagtcttttattttagaaaaaaaaaagtaaggaagaagagtacttccattgttgctatattgtaagtctgacattataactcc

SEQ ID NO: 199846 - DNA, 318 bp, Homo sapiens
aaaattatgtccttcagagaatataaattttcattatgaaaaattatgtgattctattatttcaayggatggtacccatttttgtaactctgcattctgtttaatgtccaagttaaggttcccactgtaatgccaacgcagagttagcacctgagtgtgagtgcctccttaaattctgcatgtgggtgttttgctgtgtctttctctccttcgtgacactatcacacttatttgggagatcaacttcctcaaagatggctgatttaatacgaagacatctcaattccttaacttgatgccctttctaatcaatcatct

SEQ ID NO: 199847 - DNA, 461 bp, Homo sapiens
catctttctcttcagccatttgtttctatgtttacaccatagatcttgttactaccaaagactacaccatttccaaggcatattaagcttcctactttttgatacctctactaacttcacagctcagtctctctagcaccatcacttgaccaattcttatgcccagttgaaaaatctaatgttctttccccatcatgctccctcttacattcttttcactttacatgtttagaacccattattaaaatctttcccctgcatgcatctatatttctctatcgtctaaatttaccraaactcagatcccatttaaacccaagaggtctgctgcacacctgaaaccaacagatgaacagactgaataaaaccaaccagctggaaaacagaaaacacagtgggcttgtcccattttttataagtttcaagctttccactcagctctgtacaaatgttccactaat

SEQ ID NO: 199848 - DNA, 373 bp, Homo sapiens
gaaaaaaatcatgaaagttcctcaaaacattaaaagcaatactactatatcacccacaatcccagtactgggtgtatatccaaagaacatgaaatcaatatgtcaaagctatatctgccctcccatgctcattacattattattcacaataacccagatatggaatcaacctgtgttcattaactgggaataaagtaaatgtgttacgtrtacacaatagaatactattcagcctcataaaagaaggaaatcttgccatgtgtgataagccagatgaacctgaaagacattatgctaagtgaattaagccagacacagagagacaaatacgacatgatctcacttacaagtggaatctaaaagagttgaattc

SEQ ID NO: 199849 - DNA, 373 bp, Homo sapiens
gaaaaaaatcatgaaagttcctcaaaacattaaaagcaatactactatatcacccacaatcccagtactgggtgtatatccaaagaacatgaaatcaatatgtcaaagctatatctgccctcccatgctcattacattattattcacaataacccagatatggaatcaacctgtgttcattaactgggaataaagtaaatgtgttacgtatacacaatagaatastattcagcctcataaaagaaggaaatcttgccatgtgtgataagccagatgaacctgaaagacattatgctaagtgaattaagccagacacagagagacaaatacgacatgatctcacttacaagtggaatctaaaagagttgaattc

SEQ ID NO: 199850 - DNA, 538 bp, Homo sapiens
aacctcaagtatgaaccaccatacctggctattttgtttgtttgttgttttgtagagatgaggccttgccatgttgcccaggctggtcttggctcctagactcaagggatcctcccacctcagcctcccaaagtgctgggattacagagccaccatgcctggccttttacttttggccctctattttcttcatcattaagctcccccttttgttggattatacccaccagcatgtacatatgccttgatatctttaatttttataaaatgccttttctttascctttgcctaccaatttttaaaaatatatgccccattattacttttcctgcagtcacaatatatgtctttaatataacagtgcaccttcacagaattatactcagaggatgagaaggaagataaaataggacaggataaataaggtaaaagaaagatctcaatagctgagaactttcaaaatttctacaaaaatgattactaatatagccaggaaactcataaaatctgaaggaggggaaagctataacaaatatc

SEQ ID NO: 199851 - DNA, 501 bp, Homo sapiens
atgccttgttattagtatagccatcttttatgtcttcatttgtatggaaagacatgttcctaagatattgaaaacatctggtgtttcattggttttaaatatactcttcatatttttgaaaacacaaattatagaaagcttatgggcagttacctagtccaatcactcatttagtgaaaaaggaatattcacttcagtaaagtcaagtacgtttctgattattacacaataggttaagggcagaactgaatctataactctcactttctaaaatattccagtgtctttttccrcatatctaagagttcattagaatcattgttcctagatctagtgcaaaggcaaactagagtaaatgttttttcctgaattatattgaattttgaaataacattttacaaatacatgcatttatttttgttttattatgtgtgtgtgtatgtgtatattttgtgtgtacataaacacacacacaactgctaaaatccttggaatttactg

SEQ ID NO: 199852 - DNA, 457 bp, Homo sapiens
gcaatgcaggactgtgttctctgagtgttgggaggtggtaattaagcaaagtcctaaaattacttctgcttgtggatcactgataaacagttttcagaatgctgtacggtgggggaaactcaaaccaagcctggggttctctctggattaaggagacagatatctgagattagggagagtaagccagtcagtatttttgaagcagagtactagagaacagggcagtgaacagaaactctagagaactgcaggggacgctgttgagtgctcagagaaggcctgaagaagcracacttgggcataaatctaaatgtgaagaaagcaggattcttaagatcaaagaaagaacatttgaagtgtatggatgaacaagagtgaaaatctaacagaaaaatctggaatatctgaggttaaaaaattacgaaagtatcataggcagtaaagaaaagattggtaa

SEQ ID NO: 199853 - DNA, 541 bp, Homo sapiens
  misc_feature (1)...(541): n = A,T,C or G
nnnnnnnnnnnnnnnnagtcttttctttttgtaaactcagtgaaaattgataaacatctgacctcagacagaatttgtaggtaagcacaggaagacacatattcaaatgatattcagaaaaaaaaaaaggagagaaatcatggctcagaattgatttatagaagagaaagaagactagaatttttttttttttcagatttttttcctgggaggcttgtttctaatggcaccattaaacaaggtacagaaatcatggtgaaaaaggagcatttaaatccaggtattaaacagtaataaattaagtttcatatatgtcgaatttcctatgttataatgttggagatagcttgcagagagttgtactcagctaagcttgaaagagtrgataggatgtgaataaatagagaccaagagaacaatatttctaaaggtgagaaggcaccagataacactatgtagaaaggaaacacaggactacaagatgatttatagaacatcttggtcatgtgagaaagtgacaaaagttaagcccagaaatact

SEQ ID NO: 199854 - DNA, 447 bp, Homo sapiens
agaggcatacaaatatttgtatataatcattagggtgctggcattgatgggattaattatgcatattacattacttaatcatcttcacatgtgaatctattaaaatgatataaattgaaataatattaaacataatgctggatgtgagcagcgagcatcaaagtagaggaatcggatgcatatatgtgtgtataaatgtatgtgaattcatatgtatacacatacacacaaagagaggagttggtaagagacagagaaatgagacagagctttaaaacatgagaaatcatctcataaaagtgcttattttaaaaataaggacatttaggctatgagagagtacaatamttgaccaaggtcccaaataacagcctgtgttagtatgcccacttaatgagaatgacaatgaggtatggagaggagagagagcaaaagagagagagaaag

SEQ ID NO: 199855 - DNA, 295 bp, Homo sapiens
tggattaaagacttaagactcaagactatacaattactacacaaaaccatagmggaaatgccttagaacataggcgtaagtgaagactttatggttaagacttcaaaaccacaggcaaaaaaaaaaaaaatagacaaataggaccatattaaactaaaaagccttctgtacaacaaagaaaacaatcaacagaatgaggagactaactgttgaacagaacaaaatatttgcaaactcttcattcaacaagagactaaaattcagaatatataagaaattgaaataactcaacacc

SEQ ID NO: 199856 - DNA, 586 bp, Homo sapiens
acctgtacatcctgcataggtacccctgaacttaaaagttggaaattttaaaaaaaaagaaaagcattttgtgtatttaaaagaacatcaaaagtgtgagatagaaagaaatctgtagttttgccaaagcataaatttgaatcttgaatttacaagctaaaatgggttctgagagcaagtgggtccactagtgaatgagccacgcccactgctgatcctcccaatctcatagggccatgagaaaggtccattccaagtctggaccagggaatgctcacactgtgattttttttaaggtgtcttctttagaaatggctccccaaagaaagtcaagtgctagtatcagagatggaagtgaagaagactaagaaagtaattctacctaacccrgaaaatggaagtattgaccagattaaagagtggttaagtcatggccatgaatgaatttaccatatgaaaataagaaaaaaaattaaaattatttcagagcaaaatatgactaatgcaaaaatcactccttaagagggaaataagtcattagggggttgaggagatcccttacatttacagtcatatttatattatg

SEQ ID NO: 199857 - DNA, 553 bp, Homo sapiens
aaggacagatgccctaacgtgacttgaaagtcatgtggagcatagggtgtgtatctgtgggggtgtctgttgggaaacagaggttgactttaaatacaagtatggcaagaaaacaatacagagtgaaatctgaatgcagcacagggctggccaagaggcagggaggctgtttcccctttgtccaggcgtttgaaaaaatcagttccaaacctgtgccaaccagaatccagtcctgcagacactatgattttgtaatttgcttgcatctgtgttttgctaaaagctttcagttttagatgccctcaagaactcttcaggcctggcaggagaggcacactctctctcaccgccttatgtatgcaacctcatgatggcagatctcatttgggaaactgccggggatgaaraatagagtgtgtgtgtgtgtgtgtgtgtgtgtgtgtgtgtgtgtgtgtgtgtcccttaaaaagaaaactaacaacattttttccacgttattttttcaaaaggggagtactgtaggccacagggaaatagggtaagattgtatttt

SEQ ID NO: 199858 - DNA, 557 bp, Homo sapiens
aatgaaggtaagaactgcacagcttcttacaatatacagaacattagttaagccttgcttgcaggtgtcaagatagtatttgtctctaytacaaattcaggtggtgattattgatgttctgcctgtggttaggaaagtagtagagtttgaagctaccattttagagctgaataaatgtggttctctgacttcattggcaggaaaaaaagcttgtcaatgatgcaggcaaatgactcacttttgatgtgattccattttatggaaccttcaattctttatgacttaaaaaaaccgttttaaatcagttaagttctatttctttgatgatttctttatcacagagggagacccttagataattgcaaagggatgagtcataatgagttttcattgatgcatgttgcctctcatcaccaattccactgataccctatagggagaataaagagcctctcatctcactatttgatggcataaaagggcctacatctgacacctagagctttagcccaccctttctgaaccagatagacttgcctagagacagaaaggaaaag

SEQ ID NO: 199859 - DNA, 557 bp, Homo sapiens
aatgaaggtaagaactgcacagcttcttacaatatacagaacattagttaagccttgcttgcaggtgtcaagatagtatttgtctctactacaaattcaggtggtgattattgatgttctgcctgtggttaggaaagtagtagagtttgaagctaccattttagagctgaataaatgtggttctctgacttcattggcaggaaaaaaagcttgtcaatgatgcaggcaaatgactcacttttgatgtgattccattttatggaaccttcaattctttatgacttaaaaaaaccgttttaaatcagttaagttctatttctttgatgatttctttatcacagagggagacccttagataattgcaaagggatgagtcataatgagttttcattgatgcaygttgcctctcatcaccaattccactgataccctatagggagaataaagagcctctcatctcactatttgatggcataaaagggcctacatctgacacctagagctttagcccaccctttctgaaccagatagacttgcctagagacagaaaggaaaag

SEQ ID NO: 199860 - DNA, 449 bp, Homo sapiens
gaattcccagtagtgttgtcatatgccctagtttgtccaagacagccctggtttatgccygttgtcaaggcataatcaataatagctctctaaaaagtgtcccaatttgggagataaagtatatagtcacccttacatagacagccaaatggttaatccctgggtaagactaaacccacttgaaggcccttgaagcgctaggctaatgatttcttatatccacaagagatgaatggggttgaggagaacttgttctgtaataggaatactaaggaagtaacacccctcacacccagaaaaaaaggaaaacagagaaaccaaatagaaaacagcaggatccacaaactaggcagcataattagatttagtaaaaactactccaaagagggcatttcattgagcttactctgccaaacgcaacagctaggataaaagactgatttcctcag

SEQ ID NO: 199861 - DNA, 618 bp, Homo sapiens
tggggctatgagtttggggaaagaatactgcagaagtaaagtcccttctcatcacatcatgtcaagaagtacatgatatcagcatgacttattactgataatgctgtcaccttgattacttggttaaggtggtgtctgccaggtttctccactgaaatgctgctatttttttccctaacacactctattctttagaagcaagtctctaagtccagctcacattcaagaggaggggaataaagaaagcaccacctcctagacaaagttatrtcaaagaatttgtaatcccctaattataagctattggatagagctttcagacagcaagataaaagcttccaaatgcctggagaaagtattattcaatatcaatatgttaactctcagagggtgttcatatgcagggttgttagaattaacgtctttacaatgaccaggtaggcagtttcttagaaagctatagaaatctagtcaagtatctcaatttatgtttcgctaagtttgattatgctttatttcctatccaacttgccattggtaaaattggtgctgagataaaaagatttttgtgctattaatgcacaccagagtgtaattgaagaatacttgaaataattg

SEQ ID NO: 199862 - DNA, 386 bp, Homo sapiens
atactctatccttcaacccttgatgtatatcataatattaaccattgactacacccttcctctgtgtctggtgcagtgatatatgacatttattatttctactccataccacaacattggaagggaactattatctcaatttcacaaaagaaatgactgatgcccttttacctgtccctgccaacatgccaaatataaaacaaatacaatttatacaaagaagttaatataaaaacgtgtgcatattaataagcattgtcaaaggcagacwtttctcttctaatagagttccctcaacaatgcatttcatacattgtgctgccacttccacgcattctgtaatgaaacttctattaagtttggggcgtagtcaacaacttgtttaa

SEQ ID NO: 199863 - DNA, 597 bp, Homo sapiens
ttattattattttgtaggacattctttataatcatatggctatcactgttctctacgacaggggagtcacaggggaggcctcttcaagtcaagtgctaaataggaatgaaacaatctattctaataaaacacaggttttttttccctcccagttgagtgttcagtttgagtaaatttctcgctgtaacagctgatgtagtgtcttcagcatttcgtttgctccttttacaattgtaaaatgagakaaattaaacaaggcacaaccaagttgactgcttcaggtacattaatgaaaccgtctaatatatgtaagttggaatcaagctctgaacagcagtggggcacctgcattctatttcttaagagttatttagcaaaaagcaaggtgcagtgaaggaaaaggaaatagctgcctctatttagtgaccaacagtcttctctattctttatggtgtggctcatgcttatgaatgttaaaaatatggtataatcagctataatcaaccagcatttattcagcttctagtgagtgccagttgtcatgctaggagtcaaggaaatcaattagacacagttactgccctttttaggagcaag

SEQ ID NO: 199864 - DNA, 594 bp, Homo sapiens
atgtctttatcagcagcatgaaaacagattaatacaatggtctatctgtctcacatatgtatatgtctcttatatagtatactatactattaatgtmgttcttgcttatagatatcatattattcatttaacacttatttttctttgaaggaaggtatgtttgaatttatctctccattaaaaaaaatcagtattgaaagaactctaccagctcatgaatcctgtgccattcaatttaatgatctagagattttactctccatccagagacaatcttatgtgtctttcccaacccactctacctgtattggctggcatatgattttttaaaatggaaaatatggtttctttagaagctatgcttgggccagatttcacacatcaataccaatcgacatttcagttatcagcagggtgattctcaacaactccaaaagtcacacccctcttttgccaaaaataaatttaaaaaaattgaaataatgtgaacaaaagtatttcctaacatagggcttcagtcacctttaaagtaccacatggagttataaccacatgaccaaatgttccttccagtaaataacttgcagcagaatt

SEQ ID NO: 199865 - DNA, 565 bp, Homo sapiens
gtaccagctccctgggaaattgcagatgtcacagcagagaagggtgggatgatgaggtcaggtggggaacagtttgtttgccttataatttaaaatacttacacttcacttattttaagrtggccgtgctcgacaacaactgtctgacacctacaatcacgtggctgtctctttcacctacatgtaggactggtctagtgggaaaaataaatgtgcacttagaagtctaattaaaacacacactgtcagcaacactgtgctgaaagccccattaagcatcttatgaatgcccaagagcacccctgcccatgtttggagtgacacattttggctcggatggtgacaattaggatcaggcccaggacactggagaatatgcactgcatcccatatggccaagtctgtaggtggattgttcccctggtggctgaaactcaatgaaaaagctctgggtaagaattagacaaaaatgatggagaatgcaaattagtatactatggatggatctgcatcacgtatggctgcattatggattggattcagctgtcagatggttatgtattat

SEQ ID NO: 199866 - DNA, 594 bp, Homo sapiens
atgtctttatcagcagcatgaaaacagattaatacaatggtctatctgtctcacatatgtatatgtctcttatatagtatactatactattaatgtcgttcttgcttatagatatcatattattcatttaacacttatttttctttgaaggaaggtatgtttgaatttatctctccattaaaaaaaatcagtattgaaagaactctaccagctcatgaatcctgtgccattcaatttaatgatctagagattttactctccatccagagacaatcttatgtgtctttcccaacccactctacctgtattggctggcatatgattttttaaaatggaaaatatggtttctttagaagctatgcttgggccagatttcacacatcaataccaatygacatttcagttatcagcagggtgattctcaacaactccaaaagtcacacccctcttttgccaaaaataaatttaaaaaaattgaaataatgtgaacaaaagtatttcctaacatagggcttcagtcacctttaaagtaccacatggagttataaccacatgaccaaatgttccttccagtaaataacttgcagcagaatt

SEQ ID NO: 199867 - DNA, 560 bp, Homo sapiens
agtttgagaagcattgttacagaagatttaacaaaatatatatatttttctagcattcccactgtatccaataacctaatttcacctgaactgtggagttactaagtcctgtctaattgcttggggtgtctgaggattggtaaagatatctacagagattcttgcctcattagatgkgtagcgatattattattgcttttaaaaaaagccatgtctttatgtgtctttgagatgataaactcttgaatctcactgtatttgggaaggggtttagtagtgtttgaatctctgtaatggtttcttcccaacaagaaatgtattttcagctcaaactctaatcagtgagttactcttctgaccaaaacagatgacatggtagacataatgctgatcaccaacttcaaaatagctgcctagaattcagaatgctgagatcagagataactgcagggctaggcacatcagaaaaagtgtcatttttttgtgttctaacgtaattgaaagcatgcattttttcagagtctattgaagggaccaattgcacttagaattgtcattaa

SEQ ID NO: 199868 - DNA, 382 bp, Homo sapiens
ctgtaggagtttttttgaggaccagttttaagttgctttcctctaaagttaattttcttttgtttatgaaaagtaaacactaagttcaaactaacttctaagctttatatcctccccactatactagtagtgtatattctggctataacccaagtgagttccagtttgtaaacataaattttcagggaaacttttctacctcccaatttctttcacccagagytgagatgagagcaagtgtcctccttgtcttctttaacagactccccgccttggtttatctcctctcactgaggttcttgtgttctgcaggagctggcttgatgtgagattgtcctctaaagctgtaacatccttccctcaggtctttactggtttttgt

SEQ ID NO: 199869 - DNA, 517 bp, Homo sapiens
ctaaatctaattatcttccaaaggccccacctccacatacatcacattaggagtttggtcttcaacataggactttttgggggggggacacaaacattcaatgtttgtgaacactgatctaaaccactcatcagctgtgttgtgtaccaactgctgagggacacttctacagggaaccttagtactttttcccacttgcatgatctgtgcagagtttgttttgcttgattattctatttttatttttttctatttaccggggaaatttccttgccttgtaggcataagtaaaactcacccatatattgtaaagtagatgtagcctactcttgactccttcctctccagtattcccctataacacccagccagaagtgacctcatcttcctctgaattaccatttgatrtgatttggctgtgtccccacccaaatcttgtgttataactcccacaattcccacgtgtggtgggaggtgattgaagtatgagggtgggtctttcctgcactgttctcat

SEQ ID NO: 199870 - DNA, 443 bp, Homo sapiens
tggcctttcatgatgatgggtccttcctagttctcttaattttgaatcaaagtggactaaagacattgtagagagactaactccatctgaacagatgacaaaaacatgaataattgaaagatgtgaacagagtaaatttacattagaccagtacaaaaataatgctgaattcataagtgttaaaaattactcattaaattcaaagtttttaaaacaaatgactctgcaagacacactattaagagaatgaaaaacataagccatagactgggagaaaatatttgcaaatcacatacctgataaatacccagaatatttagaatatatatatctagaacatacaaaaactattaaaattaaacaaaargaacaaacaatccaatgaataatggcaaagatcaaataggcacctccccaaagaaaatatacaaatgaaaaataag

SEQ ID NO: 199871 - DNA, 635 bp, Homo sapiens
gactgttttcttcatgtcattagtcctcaaaagtttaattgctatttgggatgggttgaagaattgtcttttttagaagaatgcacttcaaaaagctactgtactcatctgtaaacagcaaaactaaacttttaaagtatattagtgttcttctgacatgcctatatatattcccatgcttatgtttatttatatgtgtctggggaggtataagaggagagcctttctttactataatcatcaaagcaataattaaatgtgaaacatacaacagctgtgtgatttaagataatttaaattcatatatgaaggactttgctaaacataatagtaatgcattacctaggtggatgattacttggcaacgttggctgaatttaatatttatcataaatacagtatttgttaaagaaatggcatcatacatactctcctccacctttatgaaaatggaattaaaatgtctttaaagaatacaacattcttttcattaaacttcacagaaaagctcagtgaaaataggcattcaccacaasttcctgtctccttatctttctttccagctgctctgattctcctaaaagtcaactaacttctcttggtggtttctgtgaataggtaataggacaagtgat

SEQ ID NO: 199872 - DNA, 573 bp, Homo sapiens
atgcagtgatttggtgtctggtcattgccttacttattgttaatagtatcttttcaggttctgattctatgccacattttgtatgctgatagaaatcgtgtatggatttagtctaggtggattgatgtctaatttctcatccaggtttgttatgctcatatttgctggaagtaaggaagaatgtcttccttacgaattctctgttaatcaagtagatttgccacataggttgtaaataacgcttatttttagcatagaaaatacattttccatcatttaaaacaaataatctagattttctttttagaaatgtatattattttccaggtacttttcattttatgtatacattatttaaaagttttaaaaatctctytatgagaaaagctggttttacatttcaagacagttgtcataagtttttaaaaccaaaaaaaaaaaaaagctaaacttttatcttataggccaatttttaactactttcttttttttaattttaattttaattttaattttattattatactttaagttttagggtacatgtgcacaatgtgcaggttagttacatat

SEQ ID NO: 199873 - DNA, 573 bp, Homo sapiens
atgcagtgatttggtgtctggtcattgccttacttattgttaatagtatcttttcaggttctgattctatgccacattttgtatgctgatagaaatcgtgtatggatttagtctaggtggattgatgtctaatttctcatccaggtttgttatgctcatatttgctggaagtaaggaagaatgtcttccttacgaattctctgttaatcaagtagatttgccacataggttgtaaataacgcttatttttagcatagaaaatacattttccatcatttaaaacaaataatctagattttctttttagaaatgtatattattttccaggtacttttcattttatgtatacattatttaaaagttttaaaaatctctttatgagaaaagctggttttacatttcaagacagttgtcataagtttytaaaaccaaaaaaaaaaaaaagctaaacttttatcttataggccaatttttaactactttcttttttttaattttaattttaattttaattttattattatactttaagttttagggtacatgtgcacaatgtgcaggttagttacatat

SEQ ID NO: 199874 - DNA, 534 bp, Homo sapiens
tttgcaatgcagaagtacagctctggaagtgttatgtgcatgtgatcrctccactttccttggaaataacaagagttcagtttccaactgaagcatatattcttaagaccctcaaaatccagcaaggcatgcttacaaaaatccagcctattaattaatctaatagttaggcacataataaatgtttaaaatccagtatttaaacaatagagactcttcactctagaccacaatttccagaattctgctgccaaatgttgtcaacagaaagaaggaaagtatttatttgctccctcggatactctagggttttcctgtatggcagtgattcctgaatagtagcaattttgtcatacgactgaacaaattcatcaatctagtcatgaggtattcctgaccaatagtacagtctataggtactatcacaccaaaaaagaaaaaaaatcctaagagttagtcacatcccccacagaatccattttctgtaaagagattgcattccctttgcattctttttccaattcagaaagaggg

SEQ ID NO: 199875 - DNA, 402 bp, Homo sapiens
tctgtagttctcaaattatttatttcaaactcaatttcttaaacaagtagtatttattacattccttttaaataaaaacaaaaattccattgaaatctagaggcaataagatgaaatataaaataaaatatttacccttgagaactctcaatcatggaaaaaatatgtaaatgcataaaataattctagtgaaattaagtaggtgattaagcacttaayaggaaagttacaggtataaagagagattcaatatgaagtagaatagtaaacaaaggaagactttgataactatgtaaaaattgagccagaaagataagaataactttagtagaaaaataagaagggtgaggtatatgttgcatataatcataaaacaatattttaattatccaatatacacat

SEQ ID NO: 199876 - DNA, 599 bp, Homo sapiens
gctttataacatctctttgttacagtcaaagggtttattaaagcatgtaccagagggccttgagggcctttctatgtggttctccttctgcttgaaatactttctgctttccttattttaccttaaacttggtaatatgtacttatttatcatttaagacttagttcacatacacattcctgatgaagcctttctaaccactctagagatgcttaatataccctcttccagactcctattacaccctaggtcatttcttttccatcgcatttatcatcatctattttatgagccggtaatgtctttttgctgtagaaagtaagctttttgagaacaatacgatattagagttatgtttatatctctggggctgatagaacagtatctggctcattgtagacacttaaaaattattgggtgaataaaaatggcaatgcctttaagcatttaaatatttgaaagctaggaagtaagttataaaacatgacaaacattgttttgacacagctggagaggttacttaccttgatctagaggaatttgaccaacrtaatgcaaagagtaattaaaaccaacataaattaaaattattaaaatga

SEQ ID NO: 199877 - DNA, 562 bp, Homo sapiens
atcatttgaaataaaataaccagctgttttcaaatgggaagtcggtgacacttgcttttctgcccactgaatccgttttctcaattggccgctgattgaaaatgtttatggaatcttttaaggaaattaagatgttggaagtgacaaaattttcttgcagaaggaaataatgaatgaggataaatattttgtgactttacaactgctgatctgagctgactcaggtagcgtcccaaatctgaggaaatgtgtttaagtgtgtgtggcaggaatagactttctcatcaaattctaaagtagtctacatttatgttagtaagaaaacaaaacaagaggaaaatagtattgggatcatttggctctgtttcaaaccaagaaattgaggcccagtatgctgttaataaagaaattttatcatgcaaattcctccccccacaaaaataacatttaagtaaatattcytacagaacatgtttttccaagtggtgttttctctcctattgacatttaaaggcacttgcctaaaaattttgttggtttgtgttattttctttagaaaaaa

SEQ ID NO: 199878 - DNA, 590 bp, Homo sapiens
ttatttttaaaatacagaaacctattaaatcagatgagatattagctacacktttaaatttagaacagacagcagtggcttaaacaagatagtatcattctcttccaaaaattatgtaatacaaggtgatgtgaaagaagaggattatcttttatacttttgcttcttcatcccttaggatgttaatctcatcatgccacatctgaaaagtcccattgaatgttagaaagcagacttaaatggagatcattttctatttaaaataatcattagacagttcaaacatcatttctgctcacatcctattggacagaagttagtcacatgacaagtttcaattgcaaaggatgcttgctaatactgtctctaactaggtggtcaggtacccaggtaaaattgtcactgttctgttatttaaggaaagaaaaacagaatggatattgggataagtaagcattaaagcaaagaacctgtaatttcaccaccatccaagaaaaaagaaagttaaatatttatatattttcatttttagtgatcttttaaattttttctctgagatttggactactaatttcttattgatacaattc

SEQ ID NO: 199879 - DNA, 590 bp, Homo sapiens
ttatttttaaaatacagaaacctattaaatcagatgagatattagctacacttttaaatttagaacagacagcagtggcttaaacaagatagtatcattctcttccaaaaattatgtaatacaaggtgatgtgaaagaagaggaktatcttttatacttttgcttcttcatcccttaggatgttaatctcatcatgccacatctgaaaagtcccattgaatgttagaaagcagacttaaatggagatcattttctatttaaaataatcattagacagttcaaacatcatttctgctcacatcctattggacagaagttagtcacatgacaagtttcaattgcaaaggatgcttgctaatactgtctctaactaggtggtcaggtacccaggtaaaattgtcactgttctgttatttaaggaaagaaaaacagaatggatattgggataagtaagcattaaagcaaagaacctgtaatttcaccaccatccaagaaaaaagaaagttaaatatttatatattttcatttttagtgatcttttaaattttttctctgagatttggactactaatttcttattgatacaattc

SEQ ID NO: 199880 - DNA, 562 bp, Homo sapiens
atcatttgaaataaaataaccagctgttttcaaatgggaagtcggtgacacttgcttttctgcccactgaatccgttttctcaattggccgctgattgaaaatgtttatggaatcttttaaggaaattaagatgttggaagtgacaaaattttcttgcagaaggaaataatgaatgaggataaatattttgtgactttacaactgctgatctgagctgactcaggtagcgtcccaaatctgaggaaatgtgtttaagtgtgtgtggcaggaatagactttctcatcaaattctaaagtagtctacatttatgttagtaagaaaacaaaacaagaggaaaatagtattgggatcatttggctctgtttcaaaccaagaaattgaggcccagtatgctgttaataaagaaattttatcatgcaaattcctccccccacaaaaataacatttaagtaaatattcctacagaacatgtttttccaagtggtgttttctctcctattgacatttaaaggcacttgcytaaaaattttgttggtttgtgttattttctttagaaaaaa

SEQ ID NO: 199881 - DNA, 587 bp, Homo sapiens
gattttcacccagtattgctagcttctgggcttgtgtatttattagggcataatttataatactgcctctgtttatggcaattacttgtgaactaatttggagttttaatagttaattttgctaactatgctaatttgctaattttgctaatagttaattttgctaattttgttaattacgcataatatgcatttatgcgtagtttatttaaaaagtgggcatatcttagcacatctcataatggctacagtgcatgctacccactctgtgtagayctcgtccttctttttacagttggcccttttgtatgttttaggctccaacttagatattacctccttcccttattgattttgcacttcactctaatttctctgcgaatttatctaatttcatctttgcttatgtgctttgtatgtgcctgttagttctttctcaaattagagaataaatgtcagaatggtggaaggcatttccattgcattcattcaggcatatccattacctttcataggtactagcactaagaaatgtgttgcataaagaattttcaatgagttgtaatcattttatactaaaatataga

SEQ ID NO: 199882 - DNA, 618 bp, Homo sapiens
gtattgggaggagatggcattacaatcaagcctgagaaaaacagttctcacttttattagaggtttgagacatgctcctcaataaaactcaagaacagaaaaaatctataaaatatattgtcatatcattaagcatcatgatttttttaacctagttaaaaggactggaattacatcactattacaggatgatgtaagaggccatgcttaggacaaccttagaaagtatcatatgcatataaagaaatatagtaatagtgtgatttggaacagagacagtgcaatgcagatggatgtttaatgacggggtccctggtaaatgaaaacctgatttgtaatgcttgatgaatttattgatataaataytcctatcatggcagatttcaagctaccaacatgatatcatcgcacatggaggaagagatgtgcatagtgagttcttctacctgcccattgtcttcatgactccacagaacacaatcctgagatctgactgtggaggtgcttaaatttcattaggagtttgaactctgttcttaatgaaaatacattgaaacttataaggtgaataatatgactatggtaataggtccaagtcttaatttgagttgtagttct

SEQ ID NO: 199883 - DNA, 540 bp, Homo sapiens
aatgaagtagcattaaatgtctttttagccccactccaccattagataaacaagtaaaaaagttgcaagacattaatgctgagggcaaatttgagatatgctatcgtgctttgaacaacaaaaaaatatcgaggamacaaggacacatctgccttgcttacctccatatggaataatcctgacaacatctgttctgcagatgggagaggaccgggtgacttggtttgtgtttctatttccagcaatttgtatcttgttagataatagacatagataaatattgtggtctatgactgggctcaatgagtgaatatcgtgggcctggttatgctgctctcagctgacaagagaacacttaatagaaaatttaaaggagtaaaggtgaatgaaagctaagggtaagacacatgatggctttctgagtcaaaacttctgggtcagttcaggtatttaaactgtcaaatacaaacacctgtagatactggaaacaggtctgcttttgtagggaagctcataaagtttgcacagcatggtagatcc

SEQ ID NO: 199884 - DNA, 531 bp, Homo sapiens
acgctaaaaatatttccaagccaaacctatgattaatttaaaatyagtcaaatatgggcaccttataactttgtaatttacactgtttttcagctttgagatctgttttgtcccttttgtggtaaaagtttttatgagtccaacatacgatacttttaaatagattaaatcaagcaaaactcagaaggacatgattctagcttacctatgcattgcacgtgtaattgttccttttaattgggcccaaaacttagaagaagtttaagtacttcatccaatgttttaattaaaagagccagaattgaaatgcaactgtgttcagtatgaagacacagcatactgtgttcatataatttgaagttttgtacaaggattctctttcaccagaatcttcatctttatttatatgtgtatgtatattgtataattagtagttagaataaatagcttattttggaagttgtttatgagtgtaggaccctacagtaaacttggcattcagggttctccactctaagtaacatgatgctt

SEQ ID NO: 199885 - DNA, 531 bp, Homo sapiens
acgctaaaaatatttccaagccaaacctatgattaatttaaaatcagtcaaatatgggcaccttataactttgtaatttacactgtttttcagctttgagatctgttttgtcccttttgtggtaaaagtttttatgagtccaacatacgatacttttaaatagattaaatcaagcaaaactcagaaggacatgattctagcttacctatgcattgcacgtgtaattgttccttttaattgggcccaaaacttagaagaagtttaagtacttcatccaatgttttaattaaaagagccagaattgaaatgcaactgtgttcagtatgaagacacagcatactgtgttcatataatttgaagttttgtacaaggattctctttcaccagaatcttcatctttatttatatgtgtatgtatattgtawaattagtagttagaataaatagcttattttggaagttgtttatgagtgtaggaccctacagtaaacttggcattcagggttctccactctaagtaacatgatgctt

SEQ ID NO: 199886 - DNA, 531 bp, Homo sapiens
acgctaaaaatatttccaagccaaacctatgattaatttaaaatcagtcaaatatgggcaccttataactttgtaatttacactgtttttcagctttgagatctgttttgtcccttttgtggtaaaagtttttatgagtccaacatacgatacttttaaatagattaaatcaagcaaaactcagaaggacatgattctagcttacctatgcattgcacgtgtaattgttccttttaattgggcccaaaacttagaagaagtttaagtacttcatccaatgttttaattaaaagagccagaattgaaatgcaactgtgttcagtatgaagacacagcatactgtgttcatataatttgaagttttgtacaaggattctctttcaccagaatcttcatctttatttatatgtgtatgtatattgtataattagtagttagaataaatagcttattttggaagttgtttatsagtgtaggaccctacagtaaacttggcattcagggttctccactctaagtaacatgatgctt

SEQ ID NO: 199887 - DNA, 450 bp, Homo sapiens
taagctccccaagggaaaaattcatgtataagctaaacttgcagctcccaaagtgacttgtacatagtgaacactcaatgcatatttgagcaatgaatcaatgaataaataaatgagtgaataacattgatagtcatgatgaaaaaacaaattattttctgtcacccttaaaatgaatgcatttcattatttcctctgaagaacaaaaggaaaatttccagtgttagtattctctagaactagatttaatcacagcagatttatgcactgagctgagtagtaaatccgttttagtattgatcctgtttagaatagtgagtgactttggacaatttcaatcttstaaagtagaacatttagcaatgacatgtcagaaaggcctatgctctattagaaatagcagcagatttattccagcatttatctggtttatgcagaattgctagtctc

SEQ ID NO: 199888 - DNA, 355 bp, Homo sapiens
tcttttagctttttgttcaagatgcttttctcttaaggattttgatgatctttccacrttcttacccctgagaaacttttcgagaacaagagggaaacaataagctattggagccaaacactgtgaaccagtaaggaaataattcggtgaatcaagccaaccagaggatgttagcattaacttgctgagtgcctgttatttcaggaggatgctggattgcagtatagacctaggatttatcaaactaaacatgtacatgccatcaaagatgtgactgcaaattttggacttgcacaagtaggcaatctgtggaagtctccacaattcccattttggcactcctgtgagtgccatt

SEQ ID NO: 199889 - DNA, 574 bp, Homo sapiens
tggatatccaggcatatccgtacatcctcagaaacataggtggaggttcccaaacttcaattcttgacttctatgcacccacatgtccagcatcatgtgtaagtcaccaaggcctggggcttgcaccttctaaagcagcagcctgagctctatgttgacctcttttagccatggctgggatgcagagcacaaagtcccaagactgcacaaagccaccaggccatgggcccagtcaagaaaaccatttttccctcctaggcctcctgttttgtgataggagggtagccatgaagacctctgactttccctggacacatttttcccattgtcttggtgattaacatttggctcctcattacttattcaaatttctgcagccagcttgaatttctccttagaaaatkggatttttttttatcgcattgtcaggctgcaaatttttcaaactttttgctctgcttcccttttaaacataagttccaattccaaaccatatctttgtgaatacatacaactgaatgcttttaacagcacccaagtcagatattgaactctttgctgcttacaaatttat

SEQ ID NO: 199890 - DNA, 622 bp, Homo sapiens
ggaaactcccctttataaaaccataagatctcatgagacttgktcaccatcacaagaataccacagggaagacccaccaccatgattcaattacctactactgggtcccttccacatcatatgggtattatgggagctacagatcaagatgagatttgggtggggacatagccaacccatattagtacatttctgggtatttataccattcaccaacataaaatcataaaaagccttcctctcccacagtgatccctgtccccttcatggcagctttatcattctaagtacacaaagtaaaagtcttagggttattgttgctactctttgtctaatccatgagcaaatcatttcagttctctcttcagaatgaatccagagacacatgcctctgaccacaacagtgatactggcatcagattaggctctgttgtgtagaacattggaaaatgggacaaaatatatgccataactatttgtcagaaaatggaattcagcaacacttataaaaaaggaaacaaatatatcatctttatgtttgcacagaatcttgtcctgaagggaatttctagaacacaatgaagcaaggggaaatattagaatagcaatgtgagccgcaccg

SEQ ID NO: 199891 - DNA, 622 bp, Homo sapiens
ggaaactcccctttataaaaccataagatctcatgagacttggtcaccatcacaagaataccacagggaagacccaccaccatgattcaattacctactamtgggtcccttccacatcatatgggtattatgggagctacagatcaagatgagatttgggtggggacatagccaacccatattagtacatttctgggtatttataccattcaccaacataaaatcataaaaagccttcctctcccacagtgatccctgtccccttcatggcagctttatcattctaagtacacaaagtaaaagtcttagggttattgttgctactctttgtctaatccatgagcaaatcatttcagttctctcttcagaatgaatccagagacacatgcctctgaccacaacagtgatactggcatcagattaggctctgttgtgtagaacattggaaaatgggacaaaatatatgccataactatttgtcagaaaatggaattcagcaacacttataaaaaaggaaacaaatatatcatctttatgtttgcacagaatcttgtcctgaagggaatttctagaacacaatgaagcaaggggaaatattagaatagcaatgtgagccgcaccg

SEQ ID NO: 199892 - DNA, 627 bp, Homo sapiens
tattttctgttaaccacagcattttgactgaggagtaattctaccttcacatttttgtcacatggtataactaataggctaaatttttccagcaaagcacattatatgtgtaaaaacaattcaaacccagtaaatgcagttacttggaaacattataaggaaatgtcacaccataacatttacctgctatgttttattctttaaccctcaaacacttttgttgtttcctgagctgagattagtatcttaaaaagcttttattaaacatgcacaatctaaatgaagcacacaaccaactgtaaattctctcaattagacttcctgcaaatgacaaatgagtgtgaatgtgcaataaaactttgaataccrgtgatttagtgctaagcagaactaggggatttctagcaacagattgaatgcaattgattgtgcggtaaaaggtaagaaaactgtgtggtgattcgtttgccctttcatttccttaaatcaagagaggatacttgcaatgcagaatttatattaacgtgctttgagaagcaacttaggtcaaagaaaagacacaacaactcacagattaacaattgcattatttcaaggcaccagacctcaattccttttgaaaaatgt

SEQ ID NO: 199893 - DNA, 627 bp, Homo sapiens
tattttctgttaaccacagcattttgactgaggagtaattctaccttcacatttttgtcacatggtataactaataggctaaatttttccagcaaagcacattatatgtgtaaaaacaattcaaacccagtaaatgcagttacttggaaacattataaggaaatgtcacaccataacatttacctgctatgttttattctttaaccctcaaacacttttgttgtttcctgagctgagattagtatcttaaaaagcttttattaaacatgcacaatctaaatgaagcacacaaccaactgtaaattctctcaattagacttcctgcaaatgacaaatgagtgtgaatgtgcaataaaactttgaataccggtgatttagtgctaagcagaactaggggatttctagcaacagattgaatgcaattgattgtgcggtaaaaggtaagaaaastgtgtggtgattcgtttgccctttcatttccttaaatcaagagaggatacttgcaatgcagaatttatattaacgtgctttgagaagcaacttaggtcaaagaaaagacacaacaactcacagattaacaattgcattatttcaaggcaccagacctcaattccttttgaaaaatgt

SEQ ID NO: 199894 - DNA, 622 bp, Homo sapiens
tcactctagtctgaagtcagctctcaaccacatcaccttgaataaaaggagaacaggaaactcaatggaaaagctattcttaacctacgcatcttccttttgtctgcagctaaaatgtatttacaagactgatttctagaaataaaaattcrttttgttcagaagttaggcctcttatttccattttgagaaataaggaaaaattaacaatattgacctagatagtattgagaacattatgggaatctcatttctgagttacctaacacatacaaaaaaaaatacactgtgttatttgtgtgtgttttgatatcttgaaagtctattgcagaggtttacacaatataaaacacaataagaggaaagaaacccttttggaaaatcttcagtctaaaactgattttgaattgtccatatcgatataatttattctctcatttctctatatgaatcaaagcggatatatatatatatataaaatcagacaaatttaaagtcataacaaaatactaaatggcaggctgtggagaaaatgaggtttattaacttgattttttagtaatagaagttagagtctgagttctgagtttatttaataatttaaaatatttgatcaattagt

SEQ ID NO: 199895 - DNA, 621 bp, Homo sapiens
aatggtgacatcataaaatgaattataataaaaagaactccctcgtcttcaattttttgggatagctcaaaagaattggtatcattctttttaaaagtttggtaaaatgtttcagtatagccatctattcctgggcttttctttattgaaatactttttattactgatttgatcttgttactcattggtctgttctgttattttttaaaattagtttgttttaatctttatcatttaaaaaaattttaattatattaaaattttttaaatgtttaaacaatttttwaaaaatttactttgttttaatctttacatgtcctgaatttatccatttcctctaggtttttaaatttgttggtgtatagttgttcatagaagtctcaaataattatttatatttctgagttatcacttgtaatgtctccttttttatttctgattttatttatttaagtctctctttttttcttggttagtctagcagtttatcaattttatcttttcaaataaacatcttattgtttcattgattctttatattttttgtgctctattccatttcattctgctctggtctttattatttctttccttctactaatttttggtttggtttattct

SEQ ID NO: 199896 - DNA, 621 bp, Homo sapiens
aatggtgacatcataaaatgaattataataaaaagaactccctcgtcttcaattttttgggatagctcaaaagaattggtatcattctttttaaaagtttggtaaaatgtttcagtatagccatctattcctgggcttttctttattgaaatactttttattactgatttgatcttgttactcattggtctgttctgttattttttaaaattagtttgttttaatctttatcatttaaaaaaattttaattatattaaaattttttaaatgtttaaacaattttttaaaaatttactttgttttaatctttayatgtcctgaatttatccatttcctctaggtttttaaatttgttggtgtatagttgttcatagaagtctcaaataattatttatatttctgagttatcacttgtaatgtctccttttttatttctgattttatttatttaagtctctctttttttcttggttagtctagcagtttatcaattttatcttttcaaataaacatcttattgtttcattgattctttatattttttgtgctctattccatttcattctgctctggtctttattatttctttccttctactaatttttggtttggtttattct

SEQ ID NO: 199897 - DNA, 375 bp, Homo sapiens
tctatttgctgttttgattctcatctgtgcagaagtcaagtgctgagtgcctcaagtaagccatcctgatgatgtcttttgtgttaaatttaaaytgaaagacaaaaattaaaataaatttaaaatggcttatttaacttggcacataaaaaaagaaaagcatgataaaagtgcatatatcttaaaacttttgattaaaattttaagaacaaatgtaatagaaatgaaaaagattttcctttctgaaataaatgcaattctaatattcactgaaagaaattttatataattttcttgttttatttcaccaggtttatttaaagataaatgtattacattgctagagtcaaagaaaaatgccataaagttgtaaaa

SEQ ID NO: 199898 - DNA, 514 bp, Homo sapiens
attctagcctttacctatagatctgtggtttgtatttatctacttcatagttggaaaaattgaggcccacatcaagccctttcgatgtgtatggaatcaaatggcaaaataaaaaaaaatagtagctattttgaatgtactgtagtgatttgttcagttattcattaattctaacctgataaataagaatggatatatgaataattatgttcataaaatatgttccagcaaaatccttttccacaagatcacttttttaccattctaatcttcttcatcatttatgtatgccaatattcagcatcttcctttttcttccatctcaaaagtttatccacatygacatgtggaacccacactgtagaagggatgcatttcaaaaaagaaggaagcccacttattcaacagagcaggggaatcaaccagagcaatcaataagatgtcaggtagccagccagatttctctctaatttctatttctttttaggattactaacctgagaaagtaggagca

SEQ ID NO: 199899 - DNA, 616 bp, Homo sapiens
tttcatgggaaaagcaatatgtgttttcatttcaggatattgccaagattaattaccttagaaaatgttcagaaattacctacaaactcagtgagctcttcaaaagtatttcaacagagaactgctttttaaaaaagtactttgaaggaatgagtgatagaaaacttctgtctggaaaagctacaatgatatagagtaaaaattagaatcaaaagaaaaggatgtaatatagtcagtaatgtcacatgatatccacagtaaaacattgctgtcaatcaagtttttctactatgcactccagtttactcattcctggaggaaaacagtgtatcttgaaagttgaaagggaaaggaggaaaggggaatgtctgagggtgctctgttgttagtgataatgcaaattaaaccaatataatttggtggctgccaaaaatatgagaatgggttgcagttttttaaaattattttctattaattttcttgtgtcattcatgacaacatggatgaacacggagaacattatgttaagcgaaataagccaggcacwgaaagataaatacaacatgttctcactcatatgtggaagctaaaagagtttgtcttacaaaagtagaga

SEQ ID NO: 199900 - DNA, 568 bp, Homo sapiens
tgtgttctcatatgcacttgtatttatcactgtataatacaattttggtttatgtttgtattcaccagaagattatgagtcattaataggtaactgccatcatatagctttcttctctgttcttggggcctggcatataatacaggctcataaaaagttcactgaacaaaagcatacattatatgatttctgaagtactttgtctctgtgatggttaatattgagtgtcaacttgattggattgaaggatgcaaaatattgtttctgggtgtgtctgtgagggtcttgccaaaggagactaacatttgagtcagtggactgggagagccagacccacccttagtctgggtgggcaccatctaatcagctgctagaacgactrgaaggaaaagcaggcagaggaaaattgagagactagactttcttagtcttcctgcctacatctttctccagtgctggatgcttcttgccctcaaacagtggactccaagttctttagctttgggactcttgaacctttgaccacagactgaaggctgccctggtggcttccctaattttgagattt

SEQ ID NO: 199901 - DNA, 531 bp, Homo sapiens
ccccaaaaatctctgaggaacattgtctctcactaattctgtcttgaatattcttagttgctcatttatactccagtttttttcatgactaggatcttgcattgaaccctcatgctcaggactaagtctatcacagcccttgttctgatgagcctggtcctacctaatctcttcagcctgagcttgagatcaactacaagtagttgaatcactttcctttgtccctagatccatgtggctgtacctgctttataatgactatcactgcttccttaagattactattttagtatgttgactaaaacctctggacttgaagakaaatagatcttgtttaaaatcttttaaacctatcttttgttaattgtaggcaaatatctttctctgactctaaattttcttatctattaaaagagataacaataggtgctacctcatagaaattttgcaataatttgatcagacaatattcctaaattaaaagagagaataattggtgctacttcatagaaattttgcaatgatttgatc

SEQ ID NO: 199902 - DNA, 531 bp, Homo sapiens
ccccaaaaatctctgaggaacattgtctctcactaattctgtcttgaatattcttagttgctcatttatactccagtttttttcatgactaggatcttgcattgaaccctcatgctcaggactaagtctatcacagcccttgttctgatgagcctggtcctacctaatctcttcagcctgagcttgagatcaactacaagtagttgaatcactttcctttgtccctagatccatgtggctgtacctgctttataatgactatcactgcttccttaagattactattttagtatgttgactaaaacctctggacttgaagagaaatagatcttgtttaaaatcttttaaacctatcttttgttaattgtaggcaaatatctttctctgactctaaattttcttatctattaaaagagataacaataggtgctacctcatagaaattttgcaataatttgatcagacaatattcctaaattaaaagagagaataatyggtgctacttcatagaaattttgcaatgatttgatc

SEQ ID NO: 199903 - DNA, 402 bp, Homo sapiens
tctgtagttctcaaattatttatttcaaactcaatttcttaaacaagtagtatttattacattccttttaaataaaaacaaaaattccattgaaatctagaggcaataagatgaaatataaaataaaatatttacccttgagaactctcaatcatgraaaaaatatgtaaatgcataaaataattctagtgaaattaagtaggtgattaagcacttaataggaaagttacaggtataaagagagattcaatatgaagtagaatagtaaacaaaggaagactttgataactatgtaaaaattgagccagaaagataagaataactttagtagaaaaataagaagggtgaggtatatgttgcatataatcataaaacaatattttaattatccaatatacacat

SEQ ID NO: 199904 - DNA, 481 bp, Homo sapiens
ccaactgttactcctgagttgtctccaaagaatccccactgattcctcttaccccaaggtcatagagtgactatggaggtatctagcctcttgccacctgggccaggcagaagtggctctttgaccctccaggcacagttttgctgaatgaagttcttcccggacagacccgtagtctctgggccatccctttatctccagtcatctctgccatctcagccttgcacatggccctcaccacaacactgggcaggcctctctgccagctctctgactgagtgtcagccttgcccgtggaactctttctmtgagttccagatttttcaggaccattctttacctttttggacaatctcaccacctccaccctgttcaaggccaagagctcactcttgggcctgctttgtcacttgcttcatttagaaactcaatggagcaagggctggcctacaagggtccacctcacagtggcaagggtcaa

SEQ ID NO: 199905 - DNA, 486 bp, Homo sapiens
tccacctgaatacatacaagcacttcccttcttcccatggccctgatgtaggtctatcaatactcagtgcttacattaatgtcactatgagccctgagatgtcctatggttacaygtccttccctggatactttctgtgttccccagaattaataattgtcttcattttttgtgtgtgtttgctttgttttctgtgcacttataagtaatttatccccaaactgtttgctagagagtaaatctcatctcaatatgttcaaacatctttttcttggaaccatctctcctggagtcctccatgatcctgttccagctggcctgcttgggttctaggattactgcttggctgcctattgtctggggacatcccttttgccattatcctggggaacagctccacctttctcttatgttagattctctgtttcctgggttttctgtctacctcttttcttggcttactcttcattttgttggattggatcc

SEQ ID NO: 199906 - DNA, 495 bp, Homo sapiens
gagatgagtggggcatctcagaagacagaaagaaactacagagtcttcttatgtttgttttatccagcagtctctccacccacccctgccctacgtggatgtacttcaggatctactggggtggaggggaatggtattctgtaggtccctggaaaacacattaatcktccctttataaactatgcggatatatggggtggggtggggtgggtattcttgggccatggtgtctgtgggtgcatgtgcacagtaaagggtaaaacatggtctggaattcatcctagtggttgcctctggggaagaagtgaagggaatgggattgggcagggattaaaataaagctggatttcaaccctacataaaaacttgtagtttatggaagtatgcaaatgttaacatttactgattttaggtagcaagatggaggctctgggtgacagtatggcagtgtactttggcaagctcaccctgagttacagtgataatgggactgag

SEQ ID NO: 199907 - DNA, 445 bp, Homo sapiens
gcttgagaatcattttcaccttaaaatttttgaaggcattgctccattgccttctagctactgggctgccattaaaaggactgaagacattagaatccctggccttttgaatatcaacagtttattcctctctctggataaaggaaggattatctctttgtccctgtgggctccaaaatttagtgatcatatgcctttgtatgggtctatttttgtcaattttgctgagcatctgataggccctttaatgtgaaaggtcatgtccttctgttaarggactttttattactagttctttaacaatctctttctctcaattttctttgtcttatttttctgtaattcttaataattgcatgttgaaccatctggattggttctttaaattttttttatccttaccctattatctatttgtcttattgctctactttgtggaaatttt

SEQ ID NO: 199908 - DNA, 519 bp, Homo sapiens
gtggagctaggagtaaccagttctcaggtgccccaggcccattccctttctactttactatgggagtaggatcttgcagaaaaattttctcaatgtaatttacttttcataaaataataataattaatgatttggtatttttaaattttttgtttagaaataatttaaaacttgcaaaatagttgcatatacaatacacatgactttctgtagtttgcytaagacatttaatttattaattattttgaaaacagttaagataaatacctaaatttcttacacttcatttgtagattggataagtttttattaattataataatatttaagtgtatataaatataaatataggtcttctattaagttgagccataatcttaacatatattatttataaatttggttcttataaactttagacaatattccatgtatttggattgatagtttcaccacttacaccaactgcgtacagttttatgatgtcctcatttctgtcaaagtgttattataaagtat

SEQ ID NO: 199909 - DNA, 579 bp, Homo sapiens
ttttgcatgcttacttaataatcctaaactctccctgcctttctgatgccattctggggcttcatgccattcctccaattcatatttggttagttgcctccatctcatctttgtgtttttaagatctttgtctttcagcaaattctctctgcaactccaatgaactcttcagctgcctctgtattaggcaggaactcaactcgccctgaatttctccaaaagagaactgatgggttgaaaccaagagatcctggcatggcttacactaagcgctaaaataatgatgtgaaatttttctccctttctcctgcctcctcttcctccttgtcctctcctcaccccaggttggattcattttgaggcaggctttttctacagtttagcaatcttcgtagaaaaagagtgtttctctgtggacacataaaggggaaccacagacactggggyggtggacagtgggaggagggagaggatcaggaaaaataactgatgggtacaaggcttaatacctgggtgacaaaatgatttgtacaacaaacccccatgacatgtgtttacctatataacaaacctgcacat

SEQ ID NO: 199910 - DNA, 522 bp, Homo sapiens
agacatattagaattttaggaattccatacaatttttgaacatatattaataacattcattaaaatataggctgaagaaagttaaacattatttcttatttggcaatgctttgcatgtaacttaacatgtcaaataatcctgtttacctctcttttggatgcttcaagggccctctgtagcatcccaaagttagaggtcaaaaaagacttatttttgaartagaaatttgattttggtattggttacagctcagggtttgccttatttgaatatgatttgaacagttggccacagttgattggccaaaactcagtgattggcacaagagtaggctacagtctatgtacaacccatttaagttatacttcatgatgtacagagaaacttttaggctgaccttaaaatatgtaaggaggctgctttaggctaaatttgatttaataatacttggttttatagaaagaaacttctaatatttgtacatgtaaaagaaaataaaatttcaggactccctaaattaa

SEQ ID NO: 199911 - DNA, 461 bp, Homo sapiens
tgaggatgtcaccgattatcctctctatatgtacatgaatgagacaaacacatttcactgagaaaagcaatgatccccaaccaggctacacaagtcattactttgacaataacaacctaaaaaatgcaagtacaacagcagcttccggccctgggccagtctgaggacaagctctggcctgactcctttaacctctggatcctactcaggaggattttagaactgaatctcaacttcctgggtatttatatactccagaatcacaccctactgaaattgcagtgaggaaacagaaggataggacatgtgtacataggtgtgtgtgtgaagttcaaagwgacagacctgatgtgattatttcacattgcatgtctgcatcaaaacatctcgtgtaccccataaatatatacacctactatgtacttataaaaattaaaaataaaacaaaattttttaaaaag

SEQ ID NO: 199912 - DNA, 608 bp, Homo sapiens
taagtcatgagggtggagctctcatgaatgggattcgtgctcttataaaaggccccagagagctcacttgccctttttgtaccatgcaaggacacagtgataagttggcagtctgcaacccagaaggttgccctcaccagaayctgactgccctcaccagaacctgacaatgctggaaccttgaccttggactttgagctgccaaaactgtgagaaatctatttctgttgtttactagccacccagtctatgagactttgttatagtatcccaaatagacttagacatgtagccaaactggccccagaataaaggctgtgttggtcctgcataacaaagcttaaatgcaaaccttgaatacgtttcctagctcagccttgttctgcattgcattgcatctgcattgcattgcattgcattctgcattgcagaatcctcccaagaggattaaattcatgactgacatctggttcaagattaccaagtagccaaagaagaagaaaaatattactcatagttaggagaaaagagacttttagaaaaagacccagaaatgacatagatcaggcaacagaacaagtcctaattaatttaaaaggatgcaaatc

SEQ ID NO: 199913 - DNA, 625 bp, Homo sapiens
catctttgtttccccaggatttaacacagtttctagcatttagcaatcttcagtaagtrcctggacaaaagatgttaaacaggacataaaactccaaaaacagaagggctgtggaagtgtattaccagacagaaccctgggctagatgtgttttcttaaggcacttgtaattcctcagaaacttcccaaaccaatagggagttgcaaacctgctatggagcatcctccaggaaagcagctttggagctatttttcccgccaaactcttttgaccataacacaaagccagaaattgattttgcattgcaagccagtatataactgttctgcaaaacaaaaatgcatctttactctgtaatacagtccaatatcttctatgccctctgtggtatagaatgctgatcatgaccctttaaactgattttaagactcgtgaataggttgcagcccacagattgagaaaaccctgtttttgaggacagagatagtcccctgaggtgagcttcagaggaagaagcatgagctttacctggaacccataatatctcactgtactctgactgtttgttgaatatttgtataaatttagcaatgaccaagcgacaaccaattaaaacaaggcatc

SEQ ID NO: 199914 - DNA, 631 bp, Homo sapiens
gcagctcaatggcctgaaggcattgctcatttctccctttctcttcttgcaaagagctcttgaagtattcttttacaggctgttctcaactcactgggggctgtgacctaaaatttaggataagagaatagttccataaacacttggtacagaccaacaacaatgccctaatgagccatcccaaatgtgcaccattctgaatcaatcatcccaagtccacaccctcttcactggatatatattaagattcacttcatggtatttataagggaattactaaagaaatcatggggaaaagattcctctacttattattttagtcaaggtatttcatatatttataagttacaaatatctttcaaagtatattttaaccagttcctcaatacttgaaaaaaatgctatagattrtctccttttggaagataatctatttcttcctgctatttcaattagattaaattaaaacactcccaaattaaggctttctggtaatgttttctaaccgtattctgtagtttcctcaatcagttgttccactagtcatttagtgcatgcctatattctggctgagcaaatgtatcaatattcatgcaagggtgtccatctctagcatcaaaagccacgtgcc

SEQ ID NO: 199915 - DNA, 390 bp, Homo sapiens
attttgctattttaatactagttgaactaatgctttgtaactatctgcttgttttagtatgtcttagaaagttgtataaagatagctattttgatcttagtaaaattttcccacttttcttctatgtataaccaaaatatttttcttttatctcacacagtttattttctgttttttgttttttkttttttttgtaagtggctgtcaaccgctttttctttccattgccagaatatcctgtctacctcattttctgtattttccattttaaaccaaccttctagcttattttctggctactatactgtcctctaaaacataaacataaatgtgcacatgtcctgttcactagtccctgaattctactctagagtttatctaaacaaatag

SEQ ID NO: 199916 - DNA, 553 bp, Homo sapiens
atttattttcttaaacacatcattgaaaaggggggattccttagtttagtttaggatatcaaagacgagacaagtcaattgattttcccaaggtcatacaaaatccagctctcctaacttctcacttcattgttctttcaagaactaaaattttctcaaaggttatatagtattaatttagtggttctgaatatttattcaattcagtctgccctatagcgaaaagaacagatttagtcatggtattttggttggcatcatattcagcaggtagccatctgctacctgtaattgcgaagtcatcaycttttttttttttttgcaaataacatctgatgccaagctctcactggaatgaatgttccccaaaagaaatgaaccaaaaagctagcaactcttattgtctcatttcctgtgtgtgttaataagtgtgtttataaatgttatgggttatggcataggacaaactgaggttgtttttgatagatagggtgaatatttactcagttgtcatgagaaattctaatgacttttggcagaagtatactgacag

SEQ ID NO: 199917 - DNA, 401 bp, Homo sapiens
tcacgtttcctttaagctacaatcccaatggtcttcctacttcccttaccaccaatttctttcaaagagttgtgaacaatgagcagcttccaatgtgacaacactgatttgctcctcaaccaaatgcaatatgacttttcgttctactactcccctgaacctgcctggaacttgttaaacactgtataaataataccaagaaaaaaaaatttcttacatttattcattcaatagtactacytaagtcttcctctaccatatgtgatagtgttgactaccttctaccaccagcttccacaatccttcccttttctgtacaattgcttatttcagtcttttctcagttcactttggtacaacttttcccttcattttagccttacttccaaggtttcactgct

SEQ ID NO: 199918 - DNA, 562 bp, Homo sapiens
atgtgtttgtctgtcttctctttctagaaggtatgttgatgaactcagatcatcatctcttttgtccactgttgtatctgtagtccctggcacaatgcctggtgtgtagtggtcagtcaataattatttgctgaatgaatgcataaacaaatcaaattaacaaattaaactctagattttcatcttcttcagaattttttttttcagtgttccaagactaaggacttttcattgtctttcaagttgggatcttaatcttatttactgcttttcatacaacaaaygtgttaaacatgtatcagaaaaaattagaaacattatctgtgattcttatatagggaggtgatttcattccattagctttttggggggaattcatgggtttgtcactctgttaatccagctgacaagcagaatccaaagggtgacagttagaaggctggaagggaaagggattgttgatgtggaaatgaaaaatagacttcagggaaagaggtagttagatgaaaatatggcaaaagagagagagagagaaacacctagagtccagtgggggtcatca

SEQ ID NO: 199919 - DNA, 515 bp, Homo sapiens
gtgctctcctacagcacactgggaaacagaccactgaaactgactatctataaccatmttcaaagaaaattttgaacaaaatcttacattctgtacatgtttatagacacttagggccttcccagaacctagtacacaatgtatactcaattaatattaaataattggaaatttgtttttaggtgggctttctgggaactaaaaagaaaaagcctcacaatagcctaccatcagctctgattttccatctataaccctgtaattatcagaactaacaggaatgctcttatttaaaatactgatatttcaaaacagagaagggacaagttccattcaaaataagtcttcacattattatgagcctaatggtttcaatgataagccctgtgactggggaagtagcttatttttaacaaatatgtatcagttacacatgatatacttgacaaaatactttttaaaagaacagaaggataaaatttggtgtgtgtgtgtgtatacacacataatacata

SEQ ID NO: 199920 - DNA, 426 bp, Homo sapiens
aagaaaaaagacatcataacaagtgttggtgaggatgtggagaaactgggaccatacwctgctggtgggaatgtaaagtggtgccacaggtttgggtaacagcctggtggttcctcaaataattaaccacagaggtatcatgtggccccagccattccactcctaggtatatatttggaagaaatcaaaacatgtgtacatgcaaaaactggtacaaaatgttcacagcatcactattcataatagctaaagagtgctcacaacaagtgtccatcaacttataaatgaacaaataaaatttggcatatccataaaatgaaatattatttggcagtaaaaagaaaataaagtactgatacttgctacagcatggatgaaccttgaaaacatgctaggcgggaaaaggcagtcacaacacaccacata

SEQ ID NO: 199921 - DNA, 426 bp, Homo sapiens
aagaaaaaagacatcataacaagtgttggtgaggatgtggagaaactgggaccatacactgctggtgggaatgtaaagtggtgccacaggtttgggtaacagcctggtggttcctcaaataattaaccacagaggtatcatgtggccccagccattccactcctaggtatatatttrgaagaaatcaaaacatgtgtacatgcaaaaactggtacaaaatgttcacagcatcactattcataatagctaaagagtgctcacaacaagtgtccatcaacttataaatgaacaaataaaatttggcatatccataaaatgaaatattatttggcagtaaaaagaaaataaagtactgatacttgctacagcatggatgaaccttgaaaacatgctaggcgggaaaaggcagtcacaacacaccacata

SEQ ID NO: 199922 - DNA, 426 bp, Homo sapiens
aagaaaaaagacatcataacaagtgttggtgaggatgtggagaaactgggaccatacactgctggtgggaatgtaaagtggtgccacaggtttgggtaacagcctggtggttcctcaaataattaaccacagaggtatcatgtggccccagccattccactcctaggtatatatttggaagaaatcaaaacatgtgtacatgcaaaaactggtacaaaatgttcacagcatcactattcataatagctaaagagtgctcacaacaagtgtccatcaacttataaatgaacaaataaaatttggyatatccataaaatgaaatattatttggcagtaaaaagaaaataaagtactgatacttgctacagcatggatgaaccttgaaaacatgctaggcgggaaaaggcagtcacaacacaccacata

SEQ ID NO: 199923 - DNA, 553 bp, Homo sapiens
aaggaatagagagcaagtaactatgacagggctattctgagagtagagggaaaggtgggagaacattctacgcagagggaccagctagtacaaaggcactagggcagtctgggtgaatttggaaagatagagagccaaggaggccagggtggctgcagtgtagtgggtgggcagagaagagccagatgagacagagtcaagcctgatatagacagtcttttttctattttattttaaaatatttaatttacaaataaaaattgtataaattatacatgtacagggtgatgatttgatctgtgcatgcattgtgtacttattaccacaatcaaatcaacacattcatcatcatccttagttaccatttgtgcatgtgtctatatggtgagggcacttaaaaatcttctstcatcaaatttcaggtaaacaacacagtattattaactatatttaatgctgtacatgagatccccagaatttatccatcttgtaactgaaggtttataccctttgaccaacttctcaacacttcctccaacccttcatccatggc

SEQ ID NO: 199924 - DNA, 518 bp, Homo sapiens
ttattactacaaaaaaaaaaaaaacaaataatcaagggaaacaataagaggatgaaaggaataaaggatgtacaaaacaatcagaaaacaattagcaaaataacaagaatagatctttacttaacaacattgaatgtatatggtttaagttcccrttaaaacttagacactggctgaatggatgtaaaaaaagaagaccgaattctatgctacctacaagaaactcaacttcacctgtaaaaagcacaatagactaaatgtaaagggaaggaaaaatcccatgtaaatggaaaccaagagcgtacagaagcagttattttagacaaaatatactttgtaaaaaaccataaaaagagacaaggtcaatatcaaatgataaagggatcaattcagcgaaaggatataacaattgtaaatatgtacctaatactggagcacccagatatatgaagtaaatattgttaaagatagagaaacagactccaatacaatagtagttggggacttcagcacaccag

SEQ ID NO: 199925 - DNA, 550 bp, Homo sapiens
aaacaccatgaatttccagcttctgcatatcaagaaaggccatttccttcatgtggctatacttcttagatagcagatacatggcttatgacttccccatgcctcaccccacacctacttttgtgctcatggaggacatcatgaatccatcttaacattcttttctactgacactagtggcttcagcatcctttcaacataggttgcaggaagctgtcattgtttagaattagtaagcaagttagaagctgtttatcatctctgggcttgactctatgaaatcaattcaaagagaactgtcaaatgttaagatgggtgtggaaaagccttctgaccaaaggcttttggtctgatccttgatttttagtctctttagatttctttttttttttttttaaaggtctgtatgtctcagttatttgttctacagaatggagccaaactttactggaaraaacagggatgccataagagttattaattaacctttttgggtttttaggtagtggaaagctgagagcctaaggaactgaagacatctgtctaagtg

SEQ ID NO: 199926 - DNA, 550 bp, Homo sapiens
cattttatacaggaatacattgttttattgtgctttgctttatcacacttcccagataatgcaattttttttacaaattgaaagtttgtggcaacactgcaatgagcaagtctgtcagcaccacttttccaatagcacgtgcttatttcatgtctctgtatcacattttggtaagtctcatggtatttcaagctttttcattattattatatctgttaaggtgatctgtgatcagtgaactttaatgttactattgtatttgtattagggtgccatgatccattaccatataagaggttgaacttgatcaataaacgtgtgtgttctgactgctccactgaccagtggttctcctctcyctctccctgtttctcctcaggcctccctattccctgagacacacaatattaagctaattagtaacccctactaagtattcaagtgaaagaaagagatgcacgtctctcactttaaataaaaaaccagaaatgatgaagcttaatgagaaaggcatgtcgaaagctgaaacgggctgaaaagtaggcctctt

SEQ ID NO: 199927 - DNA, 401 bp, Homo sapiens
acaacacgggctaattatgcagtcaaagttctaaaccgcactggatttgcacagcacatctctcctccctggcgttattgtattggttttcccgaccctgtcagactgagatttaaatacctgaacctgacattcattgtgttctgtgtatcagcttttcctgcctttctgaattacgtgcccaataaagttctcatctctgtcacaggtcaggacttrgtcttttataaattcttaggctgggaccatttaaattctgtttttgattttatcctgcctcttcaaattatttgccttgtaagcgctttaactttttggtctttagccctagcttcttagactattaatttttttttttaacctgtgtgaccattgaagcacatttatagaaaatctcactg

SEQ ID NO: 199928 - DNA, 575 bp, Homo sapiens
agccctgaccctgagggggcatgtgcttgagaaacagctaggagaaacagctggagcagaggtgaacaagggagaaaactggmgatgagatccaagtaggagcagcgaccctgtaagccaaggtagggagtttacaattcattctgaatgaatgaattggatggatctgaacagaggagaggcaggatgcaaaactgtagtttgagatgaatgcatacatgcatgcatattatgcttgaaacagatataagcaaatactttggttatttagaggttccaatttatgcagatctgatgggcatttgtatttcatgagacagtgttgaattacaaccattttggtcagaactgatttgcttacatgcttagatagccctgaagctagttgctttcaaaagttgctttgctttggtatgtctgtgtaagactgagaagtatgaagtgaaggagggcagtaagaatttgaggacagttggaatttcaccaggtaccaagaattttaagaatgatgtttcaggctgcaaagagatcccagagtactttatgctttgtgatgggtgaatttaagtccgagt

SEQ ID NO: 199929 - DNA, 575 bp, Homo sapiens
agccctgaccctgagggggcatgtgcttgagaaacagctaggagaaacagctggagcagaggtgaacaagggagaaaactggagatgagatccaagtaggagcagcgaccctgtaagccaaggtagggagtttacaattcattctgaatgaatgaattggatggatctgaacagaggagaggcaggatgcaaaactgtagtttgagatgaatgcatacatgcatgcatattatgcttgaaacagatataagcaaatactttggttatttagagkttccaatttatgcagatctgatgggcatttgtatttcatgagacagtgttgaattacaaccattttggtcagaactgatttgcttacatgcttagatagccctgaagctagttgctttcaaaagttgctttgctttggtatgtctgtgtaagactgagaagtatgaagtgaaggagggcagtaagaatttgaggacagttggaatttcaccaggtaccaagaattttaagaatgatgtttcaggctgcaaagagatcccagagtactttatgctttgtgatgggtgaatttaagtccgagt

SEQ ID NO: 199930 - DNA, 575 bp, Homo sapiens
agccctgaccctgagggggcatgtgcttgagaaacagctaggagaaacagctggagcagaggtgaacaagggagaaaactggagatgagatccaagtaggagcagcgaccctgtaagccaaggtagggagtttacaattcattctgaatgaatgaattggatggatctgaacagaggagaggcaggatgcaaaactgtagtttgagatgaatgcatacatgcatgcatattatgcttgaaacagatataagcaaatactttggttatttagaggttccaatttatgcagatctgatgggcatttgtatttcatgagacagtgttgaattacaaccattttggtcagaactgatttgcttacatgcttagatagccctgaagctagttgctttcaaaagttgctttgctttggtatgtctgtgtaagactgagaagtatgargtgaaggagggcagtaagaatttgaggacagttggaatttcaccaggtaccaagaattttaagaatgatgtttcaggctgcaaagagatcccagagtactttatgctttgtgatgggtgaatttaagtccgagt

SEQ ID NO: 199931 - DNA, 511 bp, Homo sapiens
tgatagcaatccatttccaaatgcaaaatagtggcaatgatgccagtgttatacattaaagtaataaatgctgtatttatgacttatttactgtttgatattaatgtccactaaggggactaagctgataatatattaatataaacaaattaaaacaaggttttctcttcatcagtctcagtagatcccctttgatcttttataattctycatgtgatgacctcactcaggttctgatgctgcctttctttactggaatatcaaattattattctgctgctgccttctatccatcacagccattgcacaaaaaatccagagaactatgctatctgaaatgagatataggattggcataataagtttttctttgttaatgattcaagaagttttgtaacattaacattactgtttaaatagtatctccaaattaaaattctgatgtattctcaaattaagttccaggtttttacctgctctggaggatgaagaaagattagaatatgttgtt

SEQ ID NO: 199932 - DNA, 524 bp, Homo sapiens
ctttcaaaacatgggtcatcttcttctgggctccagtgttcaacaaaacaatcgttctctctgtggctccagatcccacagaactagcaatgagacaattttacctttctctgagaccctttatacccttcaggtggtagttgcctcttgtttctaatctgagttgtgtcataatcactgcttggcttctaaattcattatcacttatgcgatcagttccgtcttttaatttcttctactggaaatgcaaggagtgtttttatttgactgamccataaatgaaatacaaatagagatagatattcaacattatcaagaagattgttttagattttctctttatataatttttgtcttttctaacttatcagaactgagaaagagatgctgtttacccccatctactactgcgtagtttctgtcagatccttctatatattgtaatttaaaaataatctatgatagcatttcattttgcatattatgctcatgtatgatatttttcatcttaaattacatatata

SEQ ID NO: 199933 - DNA, 417 bp, Homo sapiens
tccagtatcaggcctcatgtcacatagctggagtgtatgtgtactgggagaagatgaggatatttctattctcactggcttcgaatacccagttcagtgtagtctgaaatgtgatggcatatgccctctttactgttttcttctgttttacaaatgcttgcctgyggtgtttcactatactaaaccagaaaacttacagatatctatcctatttgatacttttcaacagattttagtagtgttagcaaaaattctcagtttgaatcatcaaaatagcaactagaatgtggggacaggaacagaaatcgaaccctactgtgccttgctcttatcctctggaaccatgtttcttttccttgttttgttgcagttgatttcagaaagatcccccattactttgtgtatatatacaaatat

SEQ ID NO: 199934 - DNA, 662 bp, Homo sapiens
tttcaggtatttgttataacaataccttacttatggtaccaatctgtaagccaaaaataaaatcctaggccctcaaccaaatgactggaccctctttgggccaaacagacccctagagaaacctgaaaaactgaattctcagccatgacaaaaagggaggtcagacactccttgttatactctcttcctgttggagtttaggcacaactgaccagcaytgacattaaaatagagatcataagactgatctccttgaggcaataagatatcatattagaacctactctggtacagcattacatgacagatagcagaccctgaaggaaatcaaaatactttactccaaaatacatttctgtgacataatttaaaatggccctgcaaagctgcctttggtgggggaaatttgcatctgtagacaatctccattaatgcagccaggactttccctgatttaggaaagattaactaagagtctaacaccttttaaggtccaaaaagagacatttacatctattctctgtgatggctgttacctataaagcttcatctgtctttggtctccacaactccccttatgttaactcaagaatgtctttctacagactttaagtctttaggtaaagcttaactcctttcaaccaattgccagtcagaacatc

SEQ ID NO: 199935 - DNA, 570 bp, Homo sapiens
accctgtctctaaaaaaattctttaaattaggtgggcatggtagtgtgtgtttctgtagtgccagctactrcggaggctgaggtgggagcatcacttgagcccgggagatagaggctgcagtgagccatgatcacgccactgcattccaacccgggtgacagtgagaccttgtccccaccgcccccccaaaaaaaaagaaagaaaaagaaaaaatgtagagaatggcactcatgactggaaagaaatattttaaaattatctgaaaggaaaagtgattaaataatcctatggttctagtaagacaaatatttatagcactctcaaagagtccactgtctgtaataagtcagattatcctcacgaattttactagaaaactgttataaacatttgagtccaacaagctgtcaatgtgaagttcaaataaagagtctcatctcaggaaacaataacaacaaacaagaaaatactatacaacttgagtcacaaaccacagtgtagccaacagatttgaaaatcattcaaaaagtttaaggacaacttcaaaaagagacttcaaaagtaaaagg

SEQ ID NO: 199936 - DNA, 527 bp, Homo sapiens
ctggctaatttttgattttttgtagagcagggtctccctatgttgcccaggctggtctctaattcctgcatcctgctcttctaatgtgactttggctctactcccacggtgtgctaaggccctagccacccttaaacytaagtggacatctgtaactgcctcaactagtaaaacacagtggaagttatgctatgtgacattggagactagttcataaagatgtcaaatgtcatgtacttccaacttgcttggtgacatttgctcttgaatccagctgcgatgctgtgaggaggctcaaactaggccacacagagaaaccaaatggagaggctatgtgtaggcgttccagcccatagccagactttatattctatagaagggtagggtcacttttatcttcatgtccctatccccacctccaagtgaaagtagaagttaaagatttcattttccaagaacactgaagaaaatctccttcacccccatgcctttgtgaatattacacctatgaataagttatataagag

SEQ ID NO: 199937 - DNA, 452 bp, Homo sapiens
ggatagcctccaaaacatcttctttcagagtccagatgttctaaaccttttactttttgttctatgcaacttggagtattttatgtcaccctcaagatcttttttatttgttaaaacaattatttttcttttcctgagtgtatagcytatgaaacaattgatatagacccaggagtactggattatatcttcctagtaatgttttgttattttatttttttttttagacagaatcttgctttgtcacctaggctggatggagtacagtggcgtgatcatagctcactgcagccttgagctcctgggctcaagtaatcatcccacctcaacctcctgagtagctggggctacagtagtgtgccactatgcctggctagttttttttactttttgtagagacagcatcttggttagttgcccaggctggtcttaaatgcctgggctcaaggaat

SEQ ID NO: 199938 - DNA, 452 bp, Homo sapiens
ggatagcctccaaaacatcttctttcagagtccagatgttctaaaccttttactttttgttctatgcaacttggagtattttatgtcaccctcaagatcttttttatttgttaaaacaattatttttcttttcctgagtgtatagcctatgaaacaattgatatagacccaggagtactggattatatcttcctagtaatgttttgttattttatttttttttttagacagaatcttgctttgtcacytaggctggatggagtacagtggcgtgatcatagctcactgcagccttgagctcctgggctcaagtaatcatcccacctcaacctcctgagtagctggggctacagtagtgtgccactatgcctggctagttttttttactttttgtagagacagcatcttggttagttgcccaggctggtcttaaatgcctgggctcaaggaat

SEQ ID NO: 199939 - DNA, 648 bp, Homo sapiens
ctgtaatatagcatgcgaaaaaaatattcttctgtgtgacctgatattaaaaacaagtattacccttttttcttagttttataatttaaaaatataaatcattttaagtagctaggatattatttattttattgattaaaaaaagtcaagctttttttaatagacaacataatatttatatactttataagcactaaaawtatgtagattatgatttgcattcttgtatcattagtaccaatgctttaaaatagatgaaatagatggaaagctagagtagtacctgtcatgtctacctcaaggttcctctgaagtagatacaatctataaaattaattacttaataaatattttattgaatgaatagcaagtatccatttattgatagtctatatcaggattttcctagatacttttacaggcagaacaatggcccccccaaatatggccatgtcctaatacttggaactcgtaaatatgctgccacatagcaaaagggaattaagattgcagatacaattaacgttggcaatcagctgaagttgagatgggagaatattctggatattggagaggtccaatgtaatcacatgagtccttaaatatatcactttgaacctattttttgcctattctctaagagaatta

SEQ ID NO: 199940 - DNA, 339 bp, Homo sapiens
tgcacgcagccgtgacaggaggaaagaggactgcaagcaggactgtttcagggagtggggcgtggcggggtggagcacagttcagattgcaggcaactgagtcacaaataagagaagctggaggtgtagaccagagcgtagacttttaagaggttcgaacaaaaagcggaggaaagatgatggggtgatgactctggagggttaaggttggtcaagagctgagccacctgaagagcagggcctggagctggaggggaaggccggtgagacaggatccggggagaggctcagtcagggctgactcargcggctgggagctgagcccgggtgggctggctg

SEQ ID NO: 199941 - DNA, 557 bp, Homo sapiens
gccagtaactgtgccatcccctyggagggtctaggaagcctcatcatttgtttgttatttgggtaacagcttgattgagatataattcacatgccatacaatgaagtcatttaaagtgtacaatttactggttcttactgtatttggagttgtgcaagtatgacctcgtttcattttagaacattttcatcaccccaaagagaaacctcatgcctatcacagtctctccccattcccctcgccgtgcaaccacgaatctacttttttctctgtggatttgctaattcagaatccttcatatcaacggttcacacaatatggggccttctatgtctggtgtcttttgtagcataacgtcgtcagcgttcatctatgccgttgtgcgtgtcagcacttccttcctctctaaggccgaatcacgttctgtcgcatggatggaccacatttcgtttatccagtcatcagttgatggacttggggctatgatgaatcgtgctgccatgaacatttgtgtactggttttgatgtggatatgcattttcgtttatgattcattt

SEQ ID NO: 199942 - DNA, 567 bp, Homo sapiens
actgccagtaactgtgccatcccctcggagggtctaggaagcctcatcatttgtttgttatttgggtaacagcttgattgagatataattcacatgccatacaatgaagtcatttaaagtgtacaatttactggttcttactgtatttggagttgtgcaagtatgacctcgtttcattttagaacattttcatcaccccaaagagaaacctcatgcctatcacagtctctccccattcccctcrccgtgcaaccacgaatctacttttttctctgtggatttgctaattcagaatccttcatatcaacggttcacacaatatggggccttctatgtctggtgtcttttgtagcataacgtcgtcagcgttcatctatgccgttgtgcgtgtcagcacttccttcctctctaaggccgaatcacgttctgtcgcatggatggaccacatttcgtttatccagtcatcagttgatggacttggggctatgatgaatcgtgctgccatgaacatttgtgtactggttttgatgtggatatgcattttcgtttatgattcatttttatatg

SEQ ID NO: 199943 - DNA, 557 bp, Homo sapiens
gccagtaactgtgccatcccctcggagggtctaggaagcctcatcatttgtttgttatttgggtaacagcttgattgagatataattcacatgccatacaatgaagtcatttaaagtgtacaatttactggttcttactgtatttggagttgtgcaagtatgacctcgtttcattttagaacattttcatcaccccaaagagaaacctcatgcctatcacagtctctccccattcccctcgccgtgcaaccacgaatctacttttttctctgtggatttgctaattcagaatccttcatatcaacggttcacacaatatggggccttctatgtctggtgtcttttgtagcataacgtcgtcagcgttcatctatgccgtygtgcgtgtcagcacttccttcctctctaaggccgaatcacgttctgtcgcatggatggaccacatttcgtttatccagtcatcagttgatggacttggggctatgatgaatcgtgctgccatgaacatttgtgtactggttttgatgtggatatgcattttcgtttatgattcattt

SEQ ID NO: 199944 - DNA, 458 bp, Homo sapiens
gaattcagggctataatatgcccaactaaaagactgtacttcctggttctcttgaaggcaggtgtggtcatatggctaagttctggccaatgaatgaaagcagaagtgtcagagggacttctaggaagattccttaagggagctgactcatctcgatcgagcatyccttccttcctccttccaggtgtctggaatgcagatgtgatgtctggaactctagcagctctcttgtatcctgagaggactttgggtctggaagccacatgctaagctggggggacagcatgatggaaagagtctgggtcctgaactttcacatgtgtcttccatgtggtcttcatgagatagtgggtatcgtcgcctgcactttacagatgaagaaactgaaggagagagagccaagattcctacccccagaaaggccgagattcaaacccattctgtcttatgtcagaact

SEQ ID NO: 199945 - DNA, 622 bp, Homo sapiens
ggactccttgccttaagttaccatcccacctcagcctctcaaagtgctaggattacaggcatgatccactgcacccggccagaggtcagttttaaacagagactgatctactgattttggagaayttgccccagtggggtaggggagcagtccaccaaagagaatgacctgtgtggtgctggaagtgacagagcgtaggtgtgatgcagtgcagtggggcagaggagagaagggtgtgagaaagagctggggaagtgggcagggattctgcagcgctttccccacatggcctgcctccaagcctcaggaagcattctcaggataaagctctgctaacaaatcacatcttcccaataaaatccatcactgtttatttttgatggattgtgtggctggcaatatctccttgggcctttggatgttgatgtttgcaaactgttctttcatttctctgcaagtctgtgttgttaaagccagatatttcatgccaaaagcacaaatgtaatgtgttcctggtggactctggctcagagcagggggatgaactgatgaaggtcttcccatcacaacactgtgagtcctggaatcacgttccctcccaagccaaaggtctgatgatgct

SEQ ID NO: 199946 - DNA, 521 bp, Homo sapiens
tgaatgttaaaaaccttacacaaaaatagaaatttcaaacctaggcacggtgatatgtgtctgtagtttaaataatcaggaggctgaggcaggaggattgcttgaacccaggaatttgaggctgcagtgcattgtgactaagtctgagaatagccactggactccagcctgggcaacataatgagacattgataatggtttggctgtgttcccacctaaatctcaccttgaattrtaataatctccacgagtcaagggcggggccaggtggagataattgaatcatgggagcagtttcccccatgctgttctcatggtagtgaataagtctcatgagatctgatggtttcataaagggaagctcccctgcacatggcccttgcttgccaccatgcctttgcccttcctttgccttctgccatgattgtgaggcctccccagccatgtggaactgtgagtccgttaaacctctttttttaaataaattacccagtctcaggtgtgcctttagtagcagtgta

SEQ ID NO: 199947 - DNA, 426 bp, Homo sapiens
atggtgaaaccaggtttctacaaaaaatacaaaaattagccagatgtggtagcacatgcttgtaatcccagctacttgggaggctgaggcaggagaattgcttgaacctaggaggtggaggttgcagtgagctgagattgcaccactgcactccagcctgggcaacagagcgagactcagtctcagaaaaaaaaaaagaggaattccatggaaaaaactcaactgacctttctgtgttcaatatttaaataaatatagcccatatgctctggatataaaawacaatcttttagaacattttcaccctcagagttctatgattttatgatactgacatgaagaaggaaaaaaattaacactcagtttattcatttatttatcacattgtttcttactgctttttaaatcatttttttatgcttataa

SEQ ID NO: 199948 - DNA, 523 bp, Homo sapiens
gttttcctatcaaaagagagacatgaaaggccaggctaagcagtcaagactagttgcttctttcttaaaattgggaagatagtgttggaaataatattaatagtatytggaaaagagtatataataaaaaagatatctttgtgtttatattaattaaattttgtcctcaatcatatatcatttataagtagtaaatgttattaagcataaaataatagattttttttcaaattatgcttattacttttaataaagcaacttatgttctgaaaaaaaatcattgagtgggaaagcatgaaaattctgcttctcagtctaaattggttcaaagggaaaagaaagtggtttggatcttgaggtcataagcagggctctgatacttgttattaccaatgcaggcaatagtcttcagaagaaataaatgcctcctgcagcactgatcttataaactctaaaaacaagtaatagatgtcagtcataaaagcagacaggacaatgaaagtcaaatctggtttgtgagttt

SEQ ID NO: 199949 - DNA, 567 bp, Homo sapiens
atttatttatttttataaaacaaatttgtaaattattaacagttatacatttttaatgttaaaagttattcatggaaattgggtggtacttaaattttgtatttataagatatttatctagtktttcatttatttactattgctgacaaatcaataaataggtggatgtgttcaaaccaatacgggattttaaaacagggacttttcagtatatagttgcatagatgatgaaatagatgaaaggcaacatatttagatttaatggaagaagataaaactgtgagaacacgaagaagcacacagctgagaaggttttctgatgatagcagagctatcatttagtaatatgactattttggtcaggggatttaaaaaaatttacgtagggtgtgaataaatagaatagtttttataaaaagagagacacaaactatttgagttatagttttcttttggttatatgtctctttggtgcgtgggcattatgttagatcgtagaatcaagttaagagatgaacaacaaagcgtaagactacaacccagggagtccccaggttcttggctcta

SEQ ID NO: 199950 - DNA, 506 bp, Homo sapiens
caaaaaggtgtcatagtctgactaaaaagctatatcaggaatctaagttctacaaatccaagctgcacctgacaaaaaagcagagtcagctgaagtctcgtctttttttatcaggctgcaacaaataattaagagtgcagttcatagttttaaaattagaatgccttgkagtttgctacttggctctcagccttgtgttgaggcttccttcactaaccagagtatgtcttaatgctattgacctccattctctgctgccagacaggggcactctcagacacaagggtgcacaccattctgctatgtaagtttgaatggaaaataattcattgccattacttttgaggatacaaatgttaactctttggtagagggtgtctgtgtgtaaaggtaggagaagctctttttatacttatttcttaaagggcatggtcaaagcaagggtcacatgtaaactggctgctcaatctcggtccattgtaggcacaatataatagatgtaagtg

SEQ ID NO: 199951 - DNA, 542 bp, Homo sapiens
ttatctatgaattaaactttaaaaaacttaaaaataaacatcatattgtttctaaggaagcctgttaaatctttatagacaaaagatagcaaaaatctacccattttaacttaaaatgagatcaatttttttcacaaagaaattcaatacatattattttttaatgactatatataacaggaatagcatatctacccttttcaccaaagagtgaatgttttgataaagctttcaaaacaaacaaamaaaaaaacaaacatacagaagcaaaataaaaaagggtatgtactgaagttgactgattacagggttttttctttcacgttgtgtcttttcaaaatttcaaacgagtcatgtctatgcattacttgaaattgaaaaacatgaatcaccaagcctctctcacattacaatatgtcaagttttaaccttctaatctctaatcaaaaggataggattacaattaaaaccttatgaacaacagggataaatatttcaataccaaataatttattctcatagtactgttcatagttaaaaca

SEQ ID NO: 199952 - DNA, 631 bp, Homo sapiens
tgcaactaccgttttacaactgatggaagcacaagtatttcaccaagtaggatatgccaaagaccttttaagttattctcttcccccaagaataatacaagttcctgaaggtgaaaagtgttttacaagttacttctatcctctggccataaattttttacttttccattttccttgcarggaatattattaaacattattttttatatagtatctcaatattcatcttttctttgcttttttcctgtcttgccaaaggaagtttttagtgactcctcactcaaaacagaagaaaacatcaaaaatatttccaagattttttaacaaaagcttgcaaattcaaattttttcttttccttttggaaatgggaaagaaatattgtgcgaacttctgctgaatgtaaatatgtatatcctccctgctttctctgagctcttggttgcctccggctcatagctcagtttagatttttggtggtactttgaggaggactttagagccattgtttcagaagtgtgcctaaaatagaaatgttttatttctttatagagttggttttgtaaccacccaagggatccaccttgcctactgcctagacagagccgattcatcaagacagagggattgaaa

SEQ ID NO: 199953 - DNA, 644 bp, Homo sapiens
cttaattgtatctaaatcttagaaataaacctgatgctttttatatgtctttcttggactatactaaattattcatgtgatcaatcatttgtgtctaaattaaaatgccagagacaaggaaaatgaaacgttggcaggtcagagttggaatattgtattttaaaattatgttgttattttgttttatagaaaaggttttattatttttgccttcttagtattctctgcactaatttttttaaaattttgcctcttttaaaatttgccttatagttttattagcacctaagagtttacaaatataaataattctaagctactattctctgtttcacaatttacttatttagaaacattatgctgctttgaggaactagaaccattttgtgtaagaatttttattttctgggctccttataccattcctttattgaagtgtttaaatttttaaacaaactcaaaactataatgaaacacttccccacaaagtacctacatcattagcatatatgtaattayatctacataataaacatgatcataaagaagaacacttctaaatgttttgtctaaatgtaacagcctcaccttccctcgctgtcccagcatccaccactttgatgtggttttgctacctcatttgc

SEQ ID NO: 199954 - DNA, 611 bp, Homo sapiens
ggcaggggagtacatcaaccacacaggtgcgatgtttgtgaacaagagtcccactcaggtccaatgctrtaagcagtccccgcaattatgaatctaaaaagtaattaacaccaaaggtggccacattgctttcccacttagaggggcaaatgagagtgcacattagattaagtacagactaacacagcatatgcaaagtcgggagtttcaaatgaaaaaaacaaacctggattgaagtatccgagaggatacatttccaaccatcaagataataaggaaaaaggtcaactggaaatggacttcaacaggacctggcagtttctaattctttgagaaaaatattaactttgagacacattaaaaatcaggggcgggcatggttgctcacacctgtaatctcagcacattgggaggctgaggcgggcggatcacttgaggtcaggagtttgagagcagcctggccaacatggcaaaaccccgtctctactaaaaatacaaaaaatagctgggcatggtggtgggtgcctgtaatcccagctactcgggaggctgaggcaggagaatcagtggaacctaggaggcagaggttgcagtgagctgagattgagcca

SEQ ID NO: 199955 - DNA, 551 bp, Homo sapiens
atattttgcataatgtttttccaattaaataatcggcgggcacggtgctcatgcctgtaatcccagcagcttaggaagccgaggtgggtggatcacctgaggtcgggagttcgagaccagcctggccaacatggcaaaaccccgtctctactaaaaatacaaaaaattagccaggtgtggtggcaggcacctgtaatcccagctacttgggaggctgaggcaggagaatcacttgaacacgggaggtggaggttgcagtgagccgagattgcaccattgccctccagcctgggtgacacagtgagactctgtctcaaaaataaataaayaaataaataaaaattaataatgaccattagcgataatgggaaaatttaaaggaaaacacaacacttaggaagaaaattaacaccccaaatcccaccaggtggatacaactattattcatggttgctatacttctcttcagtttttcctttatgtgggtatactgtatacatttcattgattctgagactttcttttcatacgtgctatctctgaaatgagaa

SEQ ID NO: 199956 - DNA, 598 bp, Homo sapiens
ttaatgttttaacctatggaaaaaacctaaataatttcttttaaatcttagccaccttgtttatacccacagaattttttttataagattaaccctttacaaaccctttttgctttgtttaaaccttcagttttgtccsgttactctaagttaagaaaatctttaaaaccctctgaactagataaaattacattccctttaacaaaaaccatattatcatgccttcttattatcttttaccaaaaacacattccctacacaccttgtatgtaaaactgtttctccagtaactcaatttcatgttacaatgttaactcttagcaacttttatttttagtgaaaaacctgataagtaagcagttttaattatgtactggggtggagcctaggacatcagatagaaatgaagataaggtctgactgttttcagcatagctacgggagtggctatccacaggtccccaggcctcatctataatctaatgctccaaagtaggtaaattgacaattttcaaaagtcaaggaaatagtttgaccttaaagcatttagcagatttgatatctgaccttaatttagaccaaatgtctacattttcaa

SEQ ID NO: 199957 - DNA, 598 bp, Homo sapiens
ttaatgttttaacctatggaaaaaacctaaataatttcttttaaatcttagccaccttgtttatacccacagaattttttttataagattaaccctttacaaaccctttttgctttgtttaaaccttcagttttgtccggttactctaagttaagaaaatctttaaaaccctctgaactagataaaattacattccctttaacaaaaaccatattatcatgccttcttattatcttttaccaaaaacacattccctacacaccttgtatgtaaaactgtttctccagtaactcaatttcatgttacaatgttaactcttagcaacttttatttttagtgaaaaacctgataagtaagcagttttaattatgtactggggtggagcctaggacatcagatagaaatgaagataaggtctgactgttttcagcatagctacgggmgtggctatccacaggtccccaggcctcatctataatctaatgctccaaagtaggtaaattgacaattttcaaaagtcaaggaaatagtttgaccttaaagcatttagcagatttgatatctgaccttaatttagaccaaatgtctacattttcaa

SEQ ID NO: 199958 - DNA, 598 bp, Homo sapiens
ttaatgttttaacctatggaaaaaacctaaataatttcttttaaatcttagccaccttgtttatacccacagaattttttttataagattaaccctttacaaaccctttttgctttgtttaaaccttcagttttgtccggttactctaagttaagaaaatctttaaaaccctctgaactagataaaattacattccctttaacaaaaaccatattatcatgccttcttattatcttttaccaaaaacacattccctacacaccttgtatgtaaaactgtttctccagtaactcaatttcatgttacaatgttaactcttagcaacttttatttttagtgaaaaacctgataagtaagcagttttaattatgtactggggtggagcctaggacatcagatagaaatgaagataaggtctgactgttttcagcatagctacgggagtggctatccacaggtccccaggcctcatctataatctaatgctccaaagtaggtaaattgacarttttcaaaagtcaaggaaatagtttgaccttaaagcatttagcagatttgatatctgaccttaatttagaccaaatgtctacattttcaa

SEQ ID NO: 199959 - DNA, 587 bp, Homo sapiens
ggttaggagcacaggtctccatcagacagtgagggtgtctgagtttgagtctgagctaggtaacatcagatgagatacttaacttgtctggaccacatttttttagtaaaataatagtgcctatctcttatargtgattaactattaaatgggttcatttgcaaaagaaaaaaagtgtttcaagcacagtaagtgctcaaaagttaattttgataattattgttcaataccaggctttcatttccacatggcagtggtgatctagagctgagaagtagccgccaattttaggtaggcacatactctgcatccaaatggtcttttcccctctactgtattacatctggccagagtcatgctttaccacacctagtataggtgtaaaaaacagactatgaggctagagtccttgagtgcaaccagcgagctctgtgtcctgagacaagggctttaaatgccttgactcctgtagatatggagctttcaaacccttgagttcagctgttatataatcagctgtttctgccatgaagattttggttctacattctgattccacagggccagggggacctcaagccctccat

SEQ ID NO: 199960 - DNA, 587 bp, Homo sapiens
ggttaggagcacaggtctccatcagacagtgagggtgtctgagtttgagtctgagctaggtaacatcagatgagatacttaacttgtctggaccacatttttttagtaaaataatagtgcctatctcttataagtgattaactattaaatgggttcatttgcaaaagaaaaaaagtgtttcaagcacagtaagtgctcaaaagttaattttgataattattgttcaataccaggctttcatttccacatggcagtggtgatctagagctgagaagtagccgccaattttaggtaggcacatactctgcatccaaatggtcttttcccctctactgtattacatctggccagagtcatgctttaccacacctagtataggtgtaaaaaacagactatgaggctagagtccttgagtgcaaccagcgagctctgtgtcctgagacaagggctttaaatgccttgactcctgtagatatggagctttcaaacccttgagttcagctgttatataatcasctgtttctgccatgaagattttggttctacattctgattccacagggccagggggacctcaagccctccat

SEQ ID NO: 199961 - DNA, 623 bp, Homo sapiens
gattgatattatctctaaacttgtatcttcacatgtgagttatagtaaaaacaaagargagacaaagaatatttcagcccctctctgggcaccctctccccatttgcctagccacagttctgtgacctctctggctgcattatcaaagtcaccttgctgggatcctttccttgactgtatgattctgggttatggtctccatctgggtttttctgtagcatccccagcttcctgcatcaaaacacgttatgctttgctgtgattctctatgcactccagtgtgtgatatgccagggagcagaaatgacacgcaaggcttttttctctgctgtattcacagtctttaagagagtgcctggtaaatgtcaggtactcaataaatatttgataaacacgtgaatgaataaatcaacatgtggattatgctttttatgtcacaaagagcagattctgtttttacactaggatgttattcactgtcctcttggcttccatcactgtaatcggaatcctggatccttttatcccattaagagctccgtgtaatcctggtgatacgggactaaggaagatgggcctctccatgtaatgagactcctataagacctatatcagttgataca

SEQ ID NO: 199962 - DNA, 623 bp, Homo sapiens
gattgatattatctctaaacttgtatcttcacatgtgagttatagtaaaaacaaagaggagacaaagaatatttcagcccctctctgggcaccctctccccatttgcctagccacagttctgtgacctctctggctgcattatcaaagtcaccttgctgggatcctttccttgactgtatgattctgggttatggtctccatctgggtttttctgtagcatccccagcttcctgcatcaaaacacgttatgctttgctgtgattctctatgcactccagtgtgtgatatgccagggagcagaaatgacacgcaaggcttttttctcygctgtattcacagtctttaagagagtgcctggtaaatgtcaggtactcaataaatatttgataaacacgtgaatgaataaatcaacatgtggattatgctttttatgtcacaaagagcagattctgtttttacactaggatgttattcactgtcctcttggcttccatcactgtaatcggaatcctggatccttttatcccattaagagctccgtgtaatcctggtgatacgggactaaggaagatgggcctctccatgtaatgagactcctataagacctatatcagttgataca

SEQ ID NO: 199963 - DNA, 617 bp, Homo sapiens
tggtactgtttacaatttcgtaaatgtctttaaygtctgacttagcagataccagctaaattctcatatctgcttttgcatccactctgtagcaataatgtttttattgaagtatagttagactattcagcctcatatatatatgtagttggaaaagagaatattttaatagctttttcagattattgcatatatacttttttaatattacactaaaacttgtcatgtggtggcttcttacagttagttgcaatgtggattctaaaatcctatcaatgaacttctggtctatcttgcattttgaatggttcttgtatctacacgtgattgtataatatcatgaattggtaatttggaaaatattgattcactagtgatgttgcacttccaaatgttgacccatttcattttacaatatcaaaaaatcacattttcttttaaatatcagcaccaatgtcatcaggaaagcttgcaagtattgttgacaaagagtcaaatactgtaaaatatttgaagagatttattctgagctagatatgaggaccatgacctgttacatagccccaggacgtcttgagaactggtcatcaaggtagtccagctacaagctggtttta

SEQ ID NO: 199964 - DNA, 617 bp, Homo sapiens
tggtactgtttacaatttcgtaaatgtctttaacgtctgacttagcagataccagctaaattctcatatctgcttttgcatccactctgtagcaataatgtttttattgaagtatagttagactattcagcctcatatatatatgtagttggaaaagagaatattttaatagctttttcagattattgcatatatacttttttaataytacactaaaacttgtcatgtggtggcttcttacagttagttgcaatgtggattctaaaatcctatcaatgaacttctggtctatcttgcattttgaatggttcttgtatctacacgtgattgtataatatcatgaattggtaatttggaaaatattgattcactagtgatgttgcacttccaaatgttgacccatttcattttacaatatcaaaaaatcacattttcttttaaatatcagcaccaatgtcatcaggaaagcttgcaagtattgttgacaaagagtcaaatactgtaaaatatttgaagagatttattctgagctagatatgaggaccatgacctgttacatagccccaggacgtcttgagaactggtcatcaaggtagtccagctacaagctggtttta

SEQ ID NO: 199965 - DNA, 617 bp, Homo sapiens
tggtactgtttacaatttcgtaaatgtctttaacgtctgacttagcagataccagctaaattctcatatctgcttttgcatccactctgtagcaataatgtttttattgaagtatagttagactattcagcctcatatatatatgtagttggaaaagagaatattttaatagctttttcagattattgcatatatacttttttaatattacactaaaacttgtcaygtggtggcttcttacagttagttgcaatgtggattctaaaatcctatcaatgaacttctggtctatcttgcattttgaatggttcttgtatctacacgtgattgtataatatcatgaattggtaatttggaaaatattgattcactagtgatgttgcacttccaaatgttgacccatttcattttacaatatcaaaaaatcacattttcttttaaatatcagcaccaatgtcatcaggaaagcttgcaagtattgttgacaaagagtcaaatactgtaaaatatttgaagagatttattctgagctagatatgaggaccatgacctgttacatagccccaggacgtcttgagaactggtcatcaaggtagtccagctacaagctggtttta

SEQ ID NO: 199966 - DNA, 617 bp, Homo sapiens
tggtactgtttacaatttcgtaaatgtctttaacgtctgacttagcagataccagctaaattctcatatctgcttttgcatccactctgtagcaataatgtttttattgaagtatagttagactattcagcctcatatatatatgtagttggaaaagagaatattttaatagctttttcagattattgcatatatacttttttaatattacactaaaacttgtcatgtggtggcttcttayagttagttgcaatgtggattctaaaatcctatcaatgaacttctggtctatcttgcattttgaatggttcttgtatctacacgtgattgtataatatcatgaattggtaatttggaaaatattgattcactagtgatgttgcacttccaaatgttgacccatttcattttacaatatcaaaaaatcacattttcttttaaatatcagcaccaatgtcatcaggaaagcttgcaagtattgttgacaaagagtcaaatactgtaaaatatttgaagagatttattctgagctagatatgaggaccatgacctgttacatagccccaggacgtcttgagaactggtcatcaaggtagtccagctacaagctggtttta

SEQ ID NO: 199967 - DNA, 450 bp, Homo sapiens
taagtgttttcaaagaagatgtacattaagacccctggatgtcttgcttggtgcccacctatgaagagttgagcccactcctagaaatctacatattgccacacactttatgtggttgcccatagagctgtcagcgttacacttttcacattgaattaaaatatgcttcctttaacattcatacattgttctggcctcaacagctgttggttttccatccaaaccctccttaccctgaacagtactcttttcactggaggccagcagctgtattccacgtgcatgctatcctgttttcccaggggrttttctccatgaacatgttccttggatggttggatttagattagattcacacgacagaaagcaagggtatgcttgtgatttttacatcgataaatattgtaaagaaattgaagtatattaaggcaggcttaatattaaagattc

SEQ ID NO: 199968 - DNA, 464 bp, Homo sapiens
taaaacttaaagtataataataaaaaaaaaawttttcttctaaaagtatttgtgtactgatacacaaaacaaaagctctaaacttaattcaacaattgccttttgcatgaacttttttcatattatttacatttaaataagtataattagatttttatcaaaatgtattgttataaacccattgtactgttttaaaactccaacaccaagtaagggtttgtttaccaaacaagtgttattgatttcttgctgaaaccacctttgcaaaaattatgtcagataatcatggtggttgaggagatctgatctagccagccaccatcttgcctttcgccttcaaactgctttaagtaatcatgggcttaggccagctaactttgggagacatttagtttatagtttaaatgacagtagccatttcccaaaactcagctgcctttgtaaagctaatgagagatcacaaa

SEQ ID NO: 199969 - DNA, 464 bp, Homo sapiens
taaaacttaaagtataataataaaaaaaaaatttttcttctaaaagtatttgtgtactgatayacaaaacaaaagctctaaacttaattcaacaattgccttttgcatgaacttttttcatattatttacatttaaataagtataattagatttttatcaaaatgtattgttataaacccattgtactgttttaaaactccaacaccaagtaagggtttgtttaccaaacaagtgttattgatttcttgctgaaaccacctttgcaaaaattatgtcagataatcatggtggttgaggagatctgatctagccagccaccatcttgcctttcgccttcaaactgctttaagtaatcatgggcttaggccagctaactttgggagacatttagtttatagtttaaatgacagtagccatttcccaaaactcagctgcctttgtaaagctaatgagagatcacaaa

SEQ ID NO: 199970 - DNA, 458 bp, Homo sapiens
tatgatttattaattgcactccttggtatttaactcatttaccaaaatgagttaaaaacttatgtctacacaaaaacctgcatgtaaatatttctagcaactttgttcacaattaccaaaacttggaagcaaccaagatatctttctgtaggttcttgaataaataaactatagtacatctatacaataggatattattcagtgctaaaaataaatgaactatcaaaacacaaaagacatggagaaaccttttatgcatatcgctaagtgaaagaatccagttctaagtggctacatggtatacaattcaaactgtataataytctggaaaagacaaacctataggaaaaatgaaaagatcaatacttatcaaagatacagagaggggaagtaaggatgcataggtgcatcacggggaatttcagaataataccgaaactattctgtataataatata

SEQ ID NO: 199971 - DNA, 465 bp, Homo sapiens
tagtgttggcttgtgtttactataaatggatataaggccggaagtggtgcctcatcctgtaatcctagcaatttggaaggctgaggcagtcgaatcacttgagtccagaagtttgaaaccagcctgggcaacatggcaaaacttcatctctacaaaaaatacaaaaattagctaggcgtggtgcctaacacctgtagtccytattattcaggagacagatgggaggatcgcctaagcctggggagctgaagactgcagtgagcagtgatcatgatcgcagcactgcactccatcctgagtgactagtaagaccctgtctgaaaaaaaaaaaaaaaaaaaaaagatgtaacactcttttccaaagtgatttacctcagaaaatagaagagttccacttcctgtacattctctccagcacttggagtccacgtatttccaatatagtcattgaattagtggtgtatt

SEQ ID NO: 199972 - DNA, 465 bp, Homo sapiens
tagtgttggcttgtgtttactataaatggatataaggccggaagtggtgcctcatcctgtaatcctagcaatttggaaggctgaggcagtcgaatcacttgagtccagaagtttgaaaccagcctgggcaacatggcaaaacttcatctctacaaaaaatacaaaaattagctaggcgtggtgcctaacacctgtagtccctattattcaggagacagatgggaggatcgcytaagcctggggagctgaagactgcagtgagcagtgatcatgatcgcagcactgcactccatcctgagtgactagtaagaccctgtctgaaaaaaaaaaaaaaaaaaaaaagatgtaacactcttttccaaagtgatttacctcagaaaatagaagagttccacttcctgtacattctctccagcacttggagtccacgtatttccaatatagtcattgaattagtggtgtatt

SEQ ID NO: 199973 - DNA, 601 bp, Homo sapiens
gtggctttcaaagtcttttcataggtatagaaatacttattttatgaatctggttgctgcaatgttgggtgcatatatatgtaggattgttaagtcttcttaatgatttgaaacttttatcatgtaatgcccttctttgtccatttttactcttgttggtttaaagtgtgttttatctgatacaagaataactatccttgctctttattgttttccatttgcctgatagatcttactccattctgtaccttgagcttatgtgtgtcattacatgtgacatgagtcattgaggacagcagaatttggggtcttgttttttatccaacttgccattctatgcctgttaagtggggtgtttagactgtttaccttcaaggttaatactgatatatgaagttttgagtcttttgtgggattgttagctagttgctttgtagtcttaaatgtgtagttgctttatrtggcctgggcctatgtacttatgtgtgtttttataatagaagttattgttctttggttttcatgttcagaactcccttaatcatatcttgtaaggttagtctattgtcaaaaaaaacttagcaattgtgtgcccagaaaa

SEQ ID NO: 199974 - DNA, 468 bp, Homo sapiens
aaagggaagatggaaacattatacacagaagagtaaaaataagacttacagtggggcacctttaaaatactaaaaggacttacagatgtagaattctgtacgtagtgaaaaatatctttgaaaaatgaaagtgaaataaagattttctcaaaagctgaraaaatttgttgctaatagtcctaattatggcaaatgttaaagaatgtctttttcttttaacttttattttagattcaggaaatatacgtgcagatttgttacaaaggtatatggtgtgatgctgagctttggagtacagttgatcttgtcctggtagtaagcatagtacccaataggtagtttttcaacccattcctcccacttcttgtagtccctagagtttattgtccccatctgtatgtccatgtgtacccagtgttcagcttccagtgataagtgagtatatgttatacttggtattctgtttct

SEQ ID NO: 199975 - DNA, 583 bp, Homo sapiens
atcatttttagggaggcagtgtgataactgtcgaaccatacccaatgatcgtttgacattcctagtgggtgggggaagagccctctcctgccctgctcatgtgtgtctaactacctgtaacaccttgatgccaaaggacagacgaaccttaaaaaatgaaatttctgacagcctgggatcccttaggaaaaacagaaaggtgccaaagactctgttgtttggaggaacgtgtttttcctcagggaatcccaagcactgtaagcagacaaattccccttaggtctaaggctctgcggtcttttggtctttgttattatgttacttgattgctttggcttttcagagctatgagaaaatgcttggtattgtgggaggactggactctggtgtatagtggcttttagtcatgwgagctacagtgttagtcatagcagacagcagtgttgtttgtaagtggttattactatagggaactacttggctctttgcatgttttggccctaaaactttcctgatgttgttccttaaagggctctaccctaaagctagtaatctaattaaggaacaagccaagttaaaagac

SEQ ID NO: 199976 - DNA, 498 bp, Homo sapiens
tatggagtcttcaaatttatttagtcaaatattagaacaagtcatttaattagcaaaggtaaatggctaattgagcttgaacggattaaaggcatcatatcctttcctctgccrtggactaaacaagaacttaggaaattttaagattagtcagatactgtcatctatggatagattcttatgccctaaaaacaaaacccttatacaagaagctcatgcaagactggaaaaaccccctcctcatttggtgattaccagaaatccaacaggtggaaaggttaaaacatctattagtttgaactgcccctgtcctagttttaccctccttaagcagccattccaccttgttgtcagtataaacaagggtgtagcctgaaagcatggaggccacagacaatcaaaaattctgtgataaccttcctatcaaaaattcttaacccagtaacccacggatggcccaaatgcattcagtctgtagtggcaactgctttgccaaca

SEQ ID NO: 199977 - DNA, 498 bp, Homo sapiens
tatggagtcttcaaatttatttagtcaaatattagaacaagtcatttaattagcaaaggtaaatggctaattgagcttgaacggattaaaggcatcatatcctttcctctgccgkggactaaacaagaacttaggaaattttaagattagtcagatactgtcatctatggatagattcttatgccctaaaaacaaaacccttatacaagaagctcatgcaagactggaaaaaccccctcctcatttggtgattaccagaaatccaacaggtggaaaggttaaaacatctattagtttgaactgcccctgtcctagttttaccctccttaagcagccattccaccttgttgtcagtataaacaagggtgtagcctgaaagcatggaggccacagacaatcaaaaattctgtgataaccttcctatcaaaaattcttaacccagtaacccacggatggcccaaatgcattcagtctgtagtggcaactgctttgccaaca

SEQ ID NO: 199978 - DNA, 498 bp, Homo sapiens
tatggagtcttcaaatttatttagtcaaatattagaacaagtcatttaattagcaaaggtaaatggctaattgagcttgaacggattaaaggcatcatatcctttcctctgccgtggactaaacaagaacttaggaaattttaagattagtcagatactgtcrtctatggatagattcttatgccctaaaaacaaaacccttatacaagaagctcatgcaagactggaaaaaccccctcctcatttggtgattaccagaaatccaacaggtggaaaggttaaaacatctattagtttgaactgcccctgtcctagttttaccctccttaagcagccattccaccttgttgtcagtataaacaagggtgtagcctgaaagcatggaggccacagacaatcaaaaattctgtgataaccttcctatcaaaaattcttaacccagtaacccacggatggcccaaatgcattcagtctgtagtggcaactgctttgccaaca

SEQ ID NO: 199979 - DNA, 578 bp, Homo sapiens
cctatcaaaaattcttaacccagtaacccacggatggcccaaatgcattcagtctgtagtggcaactgctttgccaacagaagaaagtagaaaaataacttttaaaggaaaccccattatgagcacacctcaccaggtcagaactatcctaagtcaacaaaagcgaaaaagtagcttactgactcaagaaccttaaagtatgaggctattctgttagaaaaagatgatttaacattaaccactgataattcccttaactcagcaggtcttctaacaggagatctaaaccttaattaatgaccatacagaggtctgaccagacctaggaggaactcccttcagggcaggatgatagayggtttctcctgggtgactgagggaagaagacactatgggtatccagtaactgatagggaaacaaactcttgtagaaatgaagttaggaaaattgcctaataattggtctgctcaaatgtgtgagctgtttgtactcagccaagccttaaagtacttacagaaccaggaaggaaccatctataccaattctaagttaatttggactaaatgatgtcttatta

SEQ ID NO: 199980 - DNA, 578 bp, Homo sapiens
cctatcaaaaattcttaacccagtaacccacggatggcccaaatgcattcagtctgtagtggcaactgctttgccaacagaagaaagtagaaaaataacttttaaaggaaaccccattatgagcacacctcaccaggtcagaactatcctaagtcaacaaaagcgaaaaagtagcttactgactcaagaaccttaaagtatgaggctattctgttagaaaaagatgatttaacattaaccactgataattcccttaactcagcaggtcttctaacaggagatctaaaccttaattaatgaccatacagaggtctgaccagacctaggaggaactcccttcagggcaggatgatagacggtttctcctgggtgactgagggaagaagacactatgggtatccagtaactgatagggaaacaaactcttgtagaaatgaagttaggaaaattgcctaataattggtctgctcaaatgtgtgagctgtttgtactcagccaagccttaaagtacttacagaaccaggaaggaaycatctataccaattctaagttaatttggactaaatgatgtcttatta

SEQ ID NO: 199981 - DNA, 526 bp, Homo sapiens
tctgttctgttttgtattgtgttatctgatggttttaaggttttggggcatcagaaattactttgcattatgagagaactttggtgtgtaataactaggtagaaaatatactttaagtgttggctaatagtaactatgaagggatacttaactctttgcacatttgaattgaagaagcatggttttggccacctgaaatatatggaaacatcccccaccacctattaagagatgagacttccatgacagatgggctaattacaaaattgattgattggctttgggttgccttgcaatgaaatgaatggtagaagcaatgcactgtcttctcccttrctatctccctccttttgggaacccaagatccaatataaaatagcacacttaattttggcgatctgcctttgcttcactgtgcctgcttattaagccctaaagatgcatgctttcctggccctgttcctccaaaggctccaccctgaagccagtaatccaattaagaaactagaaataaaaaatcttacaa

SEQ ID NO: 199982 - DNA, 389 bp, Homo sapiens
tgcattcacttatgtgctttacaggctttggtgaaagagatggtcttcatgtgtaatccttgcagaggaattttctggacccgtatgctttctttctggcagttaagaacttcatttgattattgtgaccattcaaagcccacaaatcccactaagtataaggaaatggtagaaaccgtgactgctctttgcaaaccacatactgatgaggctctamataactttgaggatcactgtatgcatctggaaaaaagaaatctgacagctaatttttatgcagataattttaaggaaaggaagatcaaaatttaaatagaaattctaagtcatagggtagacttgttgatacatgaaagcatcttaactgttattacttaagaaaagcaatg

SEQ ID NO: 199983 - DNA, 413 bp, Homo sapiens
tacattctcaaatatgccaatgtgagcatttgaacttgacaacaaagggcatgtcttgacatgcagagatgcgtagactacctgcaaataggcgcatatttttttaaagacagtagttagttccaaatatattattttatggatgaacaatttaatctaaaggggactatatcaggatattggaatcacttattggaccrtaagaattgaaacctagatcaaataaatttgagtagaaggaaaaggtaagagaatgacacaaaaagcacccagaggagagtatttctgtgtaaacaggtaaattaataggtggatatttaatacacaaattcacatttgtttcaagattggccttgtgtgtatggatactaaaaaggaaataacgctaatgcttcattcatttttttattcca

SEQ ID NO: 199984 - DNA, 583 bp, Homo sapiens
aaaggagtggcagaaaataagaaatggtcaggaaggacacaatcaaagttattacgactgtcaaaaaggtgatgagggtgactagaatcagaatgttcagcagtaagagtggcagtgaggcaaatattagagagccaagtaagcatttgttcatgctagaatccattaaatgtagaaaaagtcaatgtttatatatatatatatatatttttttttccccgaagtctctctctgtcaccaggctggagtgcggtgtcacartcttggctcactgcaacctacacctcccaggttcaagcaattctcctgtcccagcctcccgagtagctgaatatttttcagttttaaaataatttacattaaatcatttctaatgtctctatgtgtataccacactcagtgtaatattgggtattacattaaacctaggtgaattttttctttttgtaggtcagatataattaaatatcagaaatttgatacatttcaccttaatataattagatgttaggttgcccattaaatcatgggactggggtgaaagaagtgagagatcattaaaaaaagcattaaatgttaaggt

SEQ ID NO: 199985 - DNA, 583 bp, Homo sapiens
aaaggagtggcagaaaataagaaatggtcaggaaggacacaatcaaagttattacgactgtcaaaaaggtgatgagggtgactagaatcagaatgttcagcagtaagagtggcagtgaggcaaatattagagagccaagtaagcatttgttcatgctagaatccattaaatgtagaaaaagtcaatgtttatatatatatatatatatttttttttccccgaagtctctctctgtcaccaggctggagtgcggtgtcacagtcttggctcactgcaacctacacctcccaggtycaagcaattctcctgtcccagcctcccgagtagctgaatatttttcagttttaaaataatttacattaaatcatttctaatgtctctatgtgtataccacactcagtgtaatattgggtattacattaaacctaggtgaattttttctttttgtaggtcagatataattaaatatcagaaatttgatacatttcaccttaatataattagatgttaggttgcccattaaatcatgggactggggtgaaagaagtgagagatcattaaaaaaagcattaaatgttaaggt

SEQ ID NO: 199986 - DNA, 643 bp, Homo sapiens
tagaaaataaaaattgaagaaaaaaaaacattaggcaagattagaatataacaacaggtttactatcattttgaaacaatattttttttttactctctccagtttaccattttactaaagacaaattatgatagaattggtttgcttattatacttggcctaattatttgtgtacagtgcaacaagtataattatttttttacataggctttaaaatgagattttatggaactttgttccataggaggaatctcagataagacttttttaaagcaaatccaggccatggatttgtgccatgaaatacctatgagttgggtgaatttcttctccccttgaggttccgagataaacctgggacttctgcacctgtcagaaagtggcattttttacttaccacaggtcagaaaacttgtgtaggaatgtgtacacaaaatatgaggccagttttatcaagagctttattggcttcataagccaagtttgattccttaaaggaaagcacaccattccagtcaaagccttggtaaaataaggcacccatagtcaaaagacacaattgtcaaggaaakttgttaactctgtggcacgcaataattttaacataacaattatcattattactgatagcgtacactaagtt

SEQ ID NO: 199987 - DNA, 575 bp, Homo sapiens
ttagtgtggtacagtagttataatcaatgaaccaatattaatacattattaactaagatctgtactttattcaaatatttttatttttatgtactgcctctttctgttttatgattccattcaggataccacatgacatttcactgccatgtctccttaagctcctcttggtgataatttctcagccttttcttggtttgtttttgatggtcccaagcattttgagtactgatcaggtattctgtggaatagtattggcttagtctgtgctgccatwacaaaatacttgcgtctgggtgtattagttcattctcacgctgctataaagaactgcctgagattgggtaatttctaaaggaaagaggtttaagtgacccacagttccacattgctggggaggcttccagaaagttatagtcacagtggaaggcaaaggagaagccggcaccttcttcacagggcggcgggacagagagagtgcaagcagaggaaatgccagatgcttgtaaaaccatctggtctcatgagaactccctcactaccaccagaacagcttgagggaaacagccctcatg

SEQ ID NO: 199988 - DNA, 618 bp, Homo sapiens
tattaattttactcttctcaagtaccaaaacaccacctccccctgacaaatgaacttatgctttttatgttctacctgtgagtactaggatcatcaatcatatctacagcttcccctcagttgatttatggatagtttgtattttcactgtatctgtctcacacctttttgaaaagggaacattgtatggctacttttatgtgattaactcctccatcaatttatgtgtcaatgattgccttcctgtaatggattcaatttctctgtccccattgtttctttctcactaragaagttctttaaaattctatgaaaatgaaactgtgctaaattaaaaatctactcatgataataggagacactcaaaattatgggtttcagtttcaggcttctcaccatgtcctcagattgtactccctttctagcccttctgcagcaaataaacctttgccatcagttcaccaaaagcactcatgagaggaaaaatggcatatcactaaatatagagttctttgtcacttcttgatttcaaatttacaactaatactcaacactttaattaaatctttcttttctcttcttcctaaaacatacatgcaaattaaaaaaaaaatcttg

SEQ ID NO: 199989 - DNA, 412 bp, Homo sapiens
gaattcaataacattaaaaagatcttcattgtgaccaagtgggtcacatccttgaatctgagggattcaagcatggtttaacatatgcgaatcaatcaatgtgatacatcataataagagaataaaggacaaaaaccatatgatcatttcaattgatgctgaaaaagcatttgataaaattcaayattctttcatgataaaaacccttaaaaactgggtacagaaacaacatacgtcaacccaatgaaagccatcaatgacagatccaaagctagtatcatactgaacatggaaaaactgaaagtctttttcctctaagatctggaacaagacaggatgccctgttgaataaccactgttattcaacatagtactgaaggtcctcactagagcaatcagacaaaagaaaaaa

SEQ ID NO: 199990 - DNA, 412 bp, Homo sapiens
gaattcaataacattaaaaagatcttcattgtgaccaagtgggtcacatccttgaatctgagggattcaagcatggtttaacatatgcgaatcaatcaatgtgatacatcataataagagaataaaggacaaaaaccatatgatcatttcaattgatgctgaaaaagcatttgataaaattcaacattctttcatgataaaaacccttaaaaactgggtacagaaacaacatacgtcaacccartgaaagccatcaatgacagatccaaagctagtatcatactgaacatggaaaaactgaaagtctttttcctctaagatctggaacaagacaggatgccctgttgaataaccactgttattcaacatagtactgaaggtcctcactagagcaatcagacaaaagaaaaaa

SEQ ID NO: 199991 - DNA, 411 bp, Homo sapiens
ttctgctatactagttgtgtgaccttggaggaattatttaatcctctcctgaacttcaatcttttttttttttcccccgagatagagtcttgctctgtcgccagrctggagtgcagtgtcatgatcttgggctcactgcaacttctgcctcctgaattcaagcgattctccttcctcagcctcccaagtagctgggattacaggtgtatgccaccacgcccggctaatttttagtagagatggggtttctctggccatgttggccagtctggtcttgaacccctggcttcaggtgatccacccgcttcggcctcccaaagtgtggggattacaggcatgagccaccgtgccgcctaatcttttcatctgtaagatggatatagtagttttcctctcaaacagaacaaatta

SEQ ID NO: 199992 - DNA, 416 bp, Homo sapiens
gttatttggttgttctgctatactagttgtgtgaccttggaggaattatttaatcctctcctgaacttcaatcttttttttttttcccccgagatagagtcttgctctgtcgccagactggagtgcagtgtcatgatcttgggctcactgcaacttctgcctcctgaattcaagcgattctccttcctcagcctcccaagtagctgggattacaggtgtatgccaccacgcccggctaatttttagtagagatggggtttctctggccatgttggccagtctggtcttgaacccctggcttcaggtgatccacccgcttcggcctcccaaagtgtggggattacaggcatgagccaccrtgccgcctaatcttttcatctgtaagatggatatagtagttttcctctcaaacagaa

SEQ ID NO: 199993 - DNA, 548 bp, Homo sapiens
cttctttttgtttacctgaattttctaaaatttccacactgaaaatgtgttattctttataaaaagaaaaaagagtttttaatcactcattagcttagaagccaggacacgcttccaaggtatatggccttatataagccactgtgcctctctccaagtcttcgtgtttctcattttccttgaccttcacatctctttcgtggtctttcccttcccttctttaaatttggttagcgacctactacttctagaaattcataccccacgaactacagcattgcttggagactgttttttaacayttacatgttgtatgctgacatacagggtttgcatcctctaactgttgagtggcaggcactcaaggagcaaaggacaccaaaaggaggaagacactcctagaagttcagactctagtggaagagacagatatttgatcagaaatggcactgcaatgtggaaaaacacactcataaaagtatgagcaaagtggtctaacatcacagaggtcagcagtgacttcttgaagaggtaagactggagttgga

SEQ ID NO: 199994 - DNA, 463 bp, Homo sapiens
ggaataattgtgaattaccagtatagcaaaaagagcatagatttgctgattagaaaaacctgtattagaatccaggctctagcatttactagctgtgtggctttaggcaaatcaattaaatcctccgaacttcagtgtcctctatctgtcacagggggctaatgaaaataaatatctcataraactgtgtggaatttaagaagacaatacgtagcaccgtgcatgaaatgggctcttgagaagtattagttccctttctggtctttccttccccgtctgtccaaagcggatgataaacatgcttcgcgcagttcctcaggtataagtatactgcatgctttgagattgacaagagggacacctgagcagtgcagtgttgaggggccaggaaagtttccccaatatgggcccttcagcatctaaacagagttaaggatcatcagcacaaacagcattggccatt

SEQ ID NO: 199995 - DNA, 420 bp, Homo sapiens
tgtaattaagcatttttattagcagtaagttgaatattttgctcacatatattgaacatttgtatttctttgtaaatgctctgagtttttgagacttttctattaggaaattggttgtttaaaagctaaaggcycctttaaagctagagcaaaatgtttgttcatcattttaatttttaaaaattagcatttttaaattacacaagcaattgttcttcactgtcagaaaattagaaagtagagaagaaaagtattagatgttttaagattaagccattcttatagtccagggatttaaataaatcaatttagtcatgatggattattctttaaaacggtgcttcccaaactgtcccatacaaaactagttctaagatagatagaccactagccagactaataaagaagaaaagagagaag

SEQ ID NO: 199996 - DNA, 420 bp, Homo sapiens
tgtaattaagcatttttattagcagtaagttgaatattttgctcacatatattgaacatttgtatttctttgtaaatgctctgagtttttgagacttttctattaggaaattggttgtttaaaagctaaaggctcctttaaagctagagcaaaatgtttgttcatcattttaatttttaaaaattagcatttttaaattacacaagcaattgttcttcactgtcagaaaattagaaagtagagaagaaaagtattagatgttttaagattaagccattcttatagtccagggatttaaataaatcaatttagtcatgatggattattctttaaaacggtgcttcccaaactgtcccatacaaaactagttctaagatwgatagaccactagccagactaataaagaagaaaagagagaag

SEQ ID NO: 199997 - DNA, 393 bp, Homo sapiens
tttcacaatgcttttgctatctttactgccctaattgtttttatagttacatcttttattcctaagccacagaattttttttctgtcaaatgtataaatactttatctccttgaaaacaacaaatttcagtattaatgttcattatccagtaatcacaaagtctacctgtccttaaaggttaccaaatagatggtttaaccttgatttgtgatcaaagtgtacwttttattagcaagagaaggaacatgcagatgaaatcctttaagtatggcaaatcaatgaatggttaatagtaacttagctttcttccaaagtgattcagcaaactcctgaaatggagatggaggctttacgttcatctgacagtatttgttcatccatggtattgtaag

SEQ ID NO: 199998 - DNA, 565 bp, Homo sapiens
tttttattgactacaaaaaagtttacacatcctcacccatatctctcaataaaattttgatgctactgtttgcactttttaacattcttgacaaatggttaagtcctttttctcataagccatgataatgttgaaacctttatagagtagctgcttcctttgtgggcaagaygcttttgttgatctcttcctgctcagtttgtgagagagtacaggagaagttaaaagtgaacatgggccactgaaggaattcatttgaaattttctgaactaaattcttgcaattttttacctttattctttacggtaatatttattacatattgagtagagctatatataagagttagtatctgtaattagcaagcgcccaggaatcctcgaagaggattgctaatattcaatgttaattttaaatattaaactaaaaaaaaacacagcttctggcatttgagggtaaatataccatggttctcttttctgattaacctcaaaaagtaaggcttttactttttaaggtaagaaagattatttcttagaaattaaactttagccatgcttatat

SEQ ID NO: 199999 - DNA, 565 bp, Homo sapiens
tttttattgactacaaaaaagtttacacatcctcacccatatctctcaataaaattttgatgctactgtttgcactttttaacattcttgacaaatggttaagtcctttttctcataagccatgataatgttgaaacctttatagagtagctgcttcctttgtgggcaagacgcttttgttgatctcttcctgctcagtttgtgagagagtacaggagaagttaaaagtgaacatgggccactgaaggaattcatttgaaattttctgaactaaattcttgcaattttttacctttattctttacggtaatatttattacatattgartagagctatatataagagttagtatctgtaattagcaagcgcccaggaatcctcgaagaggattgctaatattcaatgttaattttaaatattaaactaaaaaaaaacacagcttctggcatttgagggtaaatataccatggttctcttttctgattaacctcaaaaagtaaggcttttactttttaaggtaagaaagattatttcttagaaattaaactttagccatgcttatat

SEQ ID NO: 200000 - DNA, 585 bp, Homo sapiens
tgtgtttattggaagtgcattcatacctatggataaggatgccaacaatggatgcatacaaatattcttttactttctagattatacatagcttactgcaaaaataaattacctcccatttaagtctgaaatgattgtamctatgctctgagataaaactggatatgctattttctaaaggagaaatttcatctttcttttaaatcacgtcttttttttcttttctgacagtctagttttctgtttttaagcaggcatctcccaacttgagacaatgtcagtgctgctcaaaaatatacctctagatgacaagataaaagaaatattgtctatccttaaaggtaaacagctaggagcctaactgatagttctcacttccccataagcccctgtttttcatcacatttaaatagccagttaggcttgaacaatgagaaagcctaagttcagggtctaatgtgtgttcttatatgtatcagcacttcagcaaatggtcaaatgcttgaggtcagaatgcttcctagggatttagtttttaattttaggaagtatggttgagataaaatatgtcaataaatctccaag

SEQ ID NO: 200001 - DNA, 585 bp, Homo sapiens
tgtgtttattggaagtgcattcatacctatggataaggatgccaacaatggatgcatacaaatattcttttactttctagattatacatagcttactgcaaaaataaattacctcccatttaagtctgaaatgattgtacctatgctctgagataaaactggatatgctattttctaaaggagaaatttcatctttcttttaaatcacgtcttttttttcttttctgacagtctagttttctgtttttaagcaggcatctcccaacttgagacaatgtcagtgctgctcaaaaatatacctctagatgacaagataaaagaaatattgtctatccttaaaggtaaacagctaggagcctaactgatagttctcacttccccataagcccctgtttttcatcacatttaaatagccagttaggcttgaacaatgagaaagcctaagttcagggtctaatgtgtgttcttatatgtatcagcacttcagcaaatggtcaaatgcttgaggtcagaatgcttcctagggatttagtttttaattttaggaagtatggttgagatraaatatgtcaataaatctccaag

SEQ ID NO: 200002 - DNA, 461 bp, Homo sapiens
acaaaattaataaagttcagtgtcaccacctgaaatacagagacttcactgggttaaataaaacccagtgaggggtgcatggcacagcwgttaaaaagaaacaaaaacttgtgctatgtccaggtaacagtttcttccacccctcactgactaacttctccagaaatgaaatggctatttaactacattcacaaaaatggagatcctccttttagcattttaaaagataaatccttagcctaataaggttctttgctcgtggttctttttcttacaacttcagtaagaatgggctttatgaaaaataagaaggcatattgtttaaaaagtgatgtttgggggctgataactttcattagttctcatgcacaacaattttgacggcattcagtcacaaagtaccatgcaaatgtttggattttagtaaatattgagtataatgttaactgaaaaccgaattc

SEQ ID NO: 200003 - DNA, 543 bp, Homo sapiens
atacatgtaatttgtccccaagaccaaggacatcatattatctctccataatgtattgccactgaaggagtcggtgtctgacgatcagctccaccagaagcaatctggcattctataagcttgcatttctgagccacattcaccagtatttctgaatggagatagtcagataattttaacttttgttctgattacttaaagttctttaaaaccgaaaaaggaaaagaaaagtttcttgtaatttcctgacccaaagataatgtgtctgcacccccaggtacggatcacactgcctgtgctaagaagaatctgaggtgtgarcttgcaaagcaaggccaaatcaaggaatgatgaattcatcaaagtaaatcagaccttgccggccatttggtagctgggctgtcagctgacttattccgagacactagaactctttgtaccttccattcaaacctcaacaaccaaatactcaacttctgaccatattttacaatatagctgttttataataaagagggcatgaccattacacctgtaagcaat

SEQ ID NO: 200004 - DNA, 532 bp, Homo sapiens
aggcttctcctggggaggccttgggaaacttacaatcatggtggatggtgaaggggaagcaagtatgttttcatatggccggagagagagaaagagaagtgttacacactttcaaacaaccagatctcgtgagaactcacgatcacgagaacagcaagagggaaatccacctctatgatacagtcacctcccaccaggtttgtcccccaacactgggaattataattcagcatgacatttgggtggggacatagtatcaaaccatatcactctattttctcagtgtcttaattagtaaaatgaagaaygtaacactcctacttcatagggttgtgaagggccttaaataagttaatatttatgaagcacttagagtagtgccaggtcatagtaagtgcctaataagcattagttgtgattattataattgtccttattaataacttttcactcttatattgtattttttatcagtaccacccaagtagcacttacttcttttctagctgctttatttaagatgttagtttat

SEQ ID NO: 200005 - DNA, 532 bp, Homo sapiens
aggcttctcctggggaggccttgggaaacttacaatcatggtggatggtgaaggggaagcaagtatgttttcatatggccggagagagagaaagagaagtgttacacactttcaaacaaccagatctcgtgagaactcacgatcacgagaacagcaagagggaaatccacctctatgatacagtcacctcccaccaggtttgtcccccaacactgggaattataattcagcatgacatttgggtggggacatagtatcaaaccatatcactctattttctcagtgtcttaattagtaaaatgaagaacgtaacactcctacytcatagggttgtgaagggccttaaataagttaatatttatgaagcacttagagtagtgccaggtcatagtaagtgcctaataagcattagttgtgattattataattgtccttattaataacttttcactcttatattgtattttttatcagtaccacccaagtagcacttacttcttttctagctgctttatttaagatgttagtttat

SEQ ID NO: 200006 - DNA, 588 bp, Homo sapiens
ctgaattttacacattttactaaggcacatttctaatgcaaattattggctagacattagaattgcttggtgagctttacaaaatctcaatacccayaccatacttcaaaacagttaactcagaatctctgggtaacagtatttattaaatctcctggtgccactgggcagccaactgggagaactatgctagaatgttagattgcaagaatattgttctatggcatattcacccaaggtaggacgttaaggtagcaacttataaaattgtcaagtaatatgtggcctagacattgactcatttttgaagagggttttgaggaatcaggaggcatttgaccatgattcctgttattaaggctctataacgctgaaaccttattttgcttgatttgtttcccttcccacaggactgtggctaggactttgttttcctttttggccaggcagactcctgcagacttgtcattttccatacacctgatccctgctttatgcctgaccagaggggagtggcagctcctgagtcacgctattgagtctccttgggcactctgtgattttcctgggactctcttattctcccca

SEQ ID NO: 200007 - DNA, 588 bp, Homo sapiens
ctgaattttacacattttactaaggcacatttctaatgcaaattattggctagacattagaattgcttggtgagctttacaaaatctcaatacccataccatacttcaaaacagttaactcagaatctctgggtaacagtatttattaaatctcctggtgccactgggcagccaactgggagaactatgctagaatgttagattgcaagaatattgttctatggcatattcacccaaggtaggacgttaaggtagcaacttataaaattgtcaagtaatatgtggcctagacattgactcatttttgaagagggttttgaggaatcaggaggcatttgaccatgattcctgttattaaggctctataacgctgaaaccttattttgcttgatttgtttcccttcccacaggactgtggctaggactttgttttcctttttggccaggcagactcctgcagacttgtcattttccatacacckgatccctgctttatgcctgaccagaggggagtggcagctcctgagtcacgctattgagtctccttgggcactctgtgattttcctgggactctcttattctcccca

SEQ ID NO: 200008 - DNA, 542 bp, Homo sapiens
aaatgtaaatttaattttgtttctcccctgtagctttcatttatttttaataaatcacaggtgatgatgtgaacccttcaatattgctttttcattcaaattctatcattccaagcatcaatctgaatragtatatttctaccatatggcttcttttaggctttatgtagaaaatattatctttcatgtgaatttgtaatcaaaaattgcttcttacattattggcaaacctgacatcatttccagtttgtattattcaagagaaacaaatttatttttaaatttggaattatttcacctacagtttctaattgaaaagaacagcaaataattttttttttaaattcatttatatacctctacctatagttgggaataaaatatgagaatttttatattttaatgtcaaatttatatgtctcataatatacaaaatatgttagaacatgagtttattatataatttgtagattaaaagttaatagacaaatatgtaattatacatgcatgataaaaaagtttactaatagaggaacccagta

SEQ ID NO: 200009 - DNA, 518 bp, Homo sapiens
aaagtgctaatgtccaaaacaatgggaaaaagccctcaaaagcatttcagagatcttagagacagcccctcccatcacaggcccagaaggctagaaggaaagaatggttttggggaacaggcctaggaaacccctgtcctgctcagccttgggacattgctccccacawcctggctgctctagctacagttgtggcttaaagagccccaggtacagctcaggtcacccctccagaaggcacaagccataagccttggtggcttccacatggtgtaaaacacatagaatgcgagggtgaaggaggtttggtggcttccatctagatttcagaggctgtatgagaaagcctgggtgcccaagtagaagcctgctgcaaagatagagccctcacagataatctatactagggcaatgacaagaggaagtatggtgttggggctgccacacagtcaccactggggaactgcctaatggagctgaagaaggtgagtgccaccctccagaccccagaatggtag

SEQ ID NO: 200010 - DNA, 518 bp, Homo sapiens
aaagtgctaatgtccaaaacaatgggaaaaagccctcaaaagcatttcagagatcttagagacagcccctcccatcacaggcccagaaggctagaaggaaagaatggttttggggaacaggcctaggaaacccctgtcctgctcagccttgggacattgctccccacatcctggctgctctagctacagttgtggcttaaagagccccaggtacagctcaggtcamccctccagaaggcacaagccataagccttggtggcttccacatggtgtaaaacacatagaatgcgagggtgaaggaggtttggtggcttccatctagatttcagaggctgtatgagaaagcctgggtgcccaagtagaagcctgctgcaaagatagagccctcacagataatctatactagggcaatgacaagaggaagtatggtgttggggctgccacacagtcaccactggggaactgcctaatggagctgaagaaggtgagtgccaccctccagaccccagaatggtag

SEQ ID NO: 200011 - DNA, 535 bp, Homo sapiens
ttaattttacactttaaatggatgagctgtatgatgtgaattctctgtcaataaatgcaaagctccttttgaaaaaatcaaacacaaataaaaacagcattggatattgggtgcttccctagtgacaagaattactgtattctcagaatacgggtccaaaaggggagaagcaacttgtcctaggccccactttgagccaataatgaaacaagatccctaagatttctgcttccaggtgattccctagactccagtaacattggcaaatttcttaaccctttatggttcaaatttattttttattttttttgttggtgtctttttccctcagtgatggtagtcttactgacacatttgcccagaaacatttctttaaggtgatataaacggaagacaggataacctaaaggaagtagkcaatatcaacctacagaagtctatttccctggacaatagtaagttacaaaacctgggcatggtctaaatagttccctgaaaagagtattagatggaaacatgcatggtttttaggcct

SEQ ID NO: 200012 - DNA, 428 bp, Homo sapiens
agcacacacaaagctttgagaagccagaaaggaaagaaagagcctcatctcagctgcaatatttccagaaccttcaagcatcttattttaaaatcagaagagacaaaatgcctcagacaccagtggtatcctcatttgtacaatggagaaagtgaacaccacctacccgaaaaaaaaagcccaagtaagaaaaarcagcaaacgtgtgtgtgtgcatatgtgtgtgtgtgtgtgtgtggcctatgtgtgctggtagctcgggtgcaaaggtttctgggagagctaaggctgaacatcagaacctagagcatttttagagttttctagaacacagcagagatgatacagaatttccttacgcctgaagaggaggcgtacacgagatggaagactgtaagttagatctttgttctccctactgcactcta

SEQ ID NO: 200013 - DNA, 510 bp, Homo sapiens
aaatgatccctaaaagacttttaaaaatatcgacaaacattgcattcaatatccagaaacagtgagtatttctcaatggagaatcactcacctcatgaagagtcctcatgtggagtcccagattacaagcctcctttctcaattccacagagggttctcagtctttaagtatcatacatccamgttacctggatgcttaccctctggtttgtgctccaaagcccttcattccatcaatatttttcatctgtattaaatttgagagcagaaatgcaggctcctgacaggaatgagctcatacatctaataggtggtcatgtcatctaccaaccaaaccagtctcccaataaataagctgttttccatactgtgttctacagacttgtattctatgggatgttttctctccctgtgtctccctatctgtctccccacttccttcttttctctcttcctctcttttatacaaacacacacacatacacaaaggagtttgtaatgaaataagct

SEQ ID NO: 200014 - DNA, 510 bp, Homo sapiens
aaatgatccctaaaagacttttaaaaatatcgacaaacattgcattcaatatccagaaacagtgagtatttctcaatggagaatcactcacctcatgaagagtcctcatgtggagtcccagattacaagcctcctttctcaattccacagagggttctcagtctttaagtatcatacatccaagttacctggatgcttaccctctggtttgtgctccaaagcccttcattccatcaatatttttcatctgtattaaatttgagagcagaaatgcaggctcctgacaggratgagctcatacatctaataggtggtcatgtcatctaccaaccaaaccagtctcccaataaataagctgttttccatactgtgttctacagacttgtattctatgggatgttttctctccctgtgtctccctatctgtctccccacttccttcttttctctcttcctctcttttatacaaacacacacacatacacaaaggagtttgtaatgaaataagct

SEQ ID NO: 200015 - DNA, 491 bp, Homo sapiens
tcttcatggctgaatagtgctttatcatgtatataagtaccagattttctttatcaatggatatctgttgataggcacttaggttgcttccaatctcttaagatgtrcaaatgtgaatttaaaataagagcaatccaaacagttgtatgtttttctccagccaggtccagctgctctactttgggcctagagttggtacacagtttgttttcatagagtatgaaatcttacaggactatagaatagagatgagcaaaggaattaaagatgtataaaaggcataactataatgacaagtcattgaccctaacctggggtggggagataaatgggaccaggaagtggatgatatgtgattttaaaaagtggacaggatcaaagagttatggagtgagggagcaggggatcagaaggagtaagtggcaaaaatatgacatgccctcagagcctggtggtgccaccactggtaatggccagatcgagggtgtgac

SEQ ID NO: 200016 - DNA, 491 bp, Homo sapiens
tcttcatggctgaatagtgctttatcatgtatataagtaccagattttctttatcaatggatatctgttgataggcacttaggttgcttccaatctcttaagatgtgcaaatgtgaatttaaaataagagcaatccaaacagttgtatgtttttctccagccaggtccagctgctctactttgggcctagagttggtacacagtttgttttcatagagtatgaaatcttacaggactatagaatagagatgagcaaaggaattaaagatgtataaaaggcataactataatgacaagtcattgaccctaacctggggtggggagataaatgggaccaggaagtggrtgatatgtgattttaaaaagtggacaggatcaaagagttatggagtgagggagcaggggatcagaaggagtaagtggcaaaaatatgacatgccctcagagcctggtggtgccaccactggtaatggccagatcgagggtgtgac

SEQ ID NO: 200017 - DNA, 613 bp, Homo sapiens
gggccatctacacccagtatatctctcaggatattcacagtgttgcttttctccactctctccttgtttccagcttccacactcgatttctcaccgagatttgaatcccagtcactgaactcccttgtatctctttctcatgactttccttttaccatttggactttaacttttctacctgattattgacttagtttaaaccccaggattccaggccctcggactcccaccttccactcaaagtcagactggtccagcccttcttcttatattacaggaatctagataaaaatacagtaaacccaagagaacagtactaaacatcatatgatagacacacattttttaattgcaagttactcctatgctatcattatttcttatatcaggacatttgtaaatttacagcaaatacagtatcacagggaatatgcacaagtttaagatgaatccccttcctgagaggtgattagatataaacaaagaagttgaaaawtgtatacaatattgaaatctgacttcagttcacttgaggacttctaatctggccaaattcatgctctagtctgaacaaaaggcaaaatattctttaaaaattattttcacaatgtcg

SEQ ID NO: 200018 - DNA, 571 bp, Homo sapiens
taaaagagtacactgtagcctatgcccccttaggctcctgcacctgttcgtctgcatgctccaccttccataagggggttgagcagcagcagtgaccaaacagatgagccacacmcctgtcagatgccctgagagtggggtcagggaactctcctttttcagttttgatttgcatttttctatgatcagtgacactgaacttttaaaaatatgattcttggccacatgtgtgtcttcttttgagaagtgtctgttcatgtcctttgcccacctttttaatggggttgtttgtttttttcttgtaaatttgcgtatgttccttatatatgctggatattagacctttgtcagatggacagattgcaaaatttttctctcattctgtaggttgtctgtttactttgctgatggtttccttttctgtgcagaagctctttagtttacttagataccatgtgtcaatttttgcttttattccaattacttttggcattttcatcataaaatctttgcctgtgccttcatcctgaatggtattgcctagcttgtcttccagggtttttatagtttt

SEQ ID NO: 200019 - DNA, 463 bp, Homo sapiens
ccatgaaagttcagtatagctgaaggggagagactgagtggagaaggaagcaacaaacactactggatggatgtgctgctgccacataaagggccatgcaagccaagggaagaggcagaggcactccgaagagcaaaagagcgcsgcagaacagcttcgagctatggaatggcattatcagattggtatttcagaaaagtcactctggctgccttgataagacagctaagaggggcccaagaggaggcagagagcagcaactgcaactggctattgcagcaatccagaagaaaggcaaatatcgcctaggcaagagtggccaataaatcaagatacttggaaggtaaaaccgacagggtttggtcactgggtgtggagaatgagagagagagaaaagtcaaagaaaaccttctggctgagccactgtacaaggaacagccaagaggaccaggtttaagggaaa

SEQ ID NO: 200020 - DNA, 599 bp, Homo sapiens
tgctttcctcccccaagattctgtcttatttctctttaagtgttcagcatagtgtacagcatgcaaggacttggtggttaaaaggcatgggtgataactgttgcctgaataaatgaacaaatgaatgaatgtcttaattcatttggtaatgatgctgtctctgttcttcactaacttggccttcaggtataatggatgatacaacaaaccaatagtgggttttcttattgttgtaagaattcagccataaactctcaaatctccagcccacaaggctcagtgaacaaaaagtgaaactaacttaatcagggaataagtcaattatgaaccctgggactgaaaccgtgccaatatgttaatattaggaacctacaacttcacagtgcctactatgagaaggcccacacatttcagtcattgaatattatgttagcatttttatgtatatatacayagttacatagtctctctctctctctatatatccatacatttgtgtgtatgtgtgtgtgtaatgacttcccagtctctcagagggtagaatgtaacgtcatcacagagaataagaacaaaatggcatatgctatgaagtataatgt

SEQ ID NO: 200021 - DNA, 599 bp, Homo sapiens
tgctttcctcccccaagattctgtcttatttctctttaagtgttcagcatagtgtacagcatgcaaggacttggtggttaaaaggcatgggtgataactgttgcctgaataaatgaacaaatgaatgaatgtcttaattcatttggtaatgatgctgtctctgttcttcactaacttggccttcaggtataatggatgatacaacaaaccaatagtgggttttcttattgttgtaagaattcagccataaactctcaaatctccagcccacaaggctcagtgaacaaaaagtgaaactaacttaatcagggaataagtcaattatgaaccctgggactgaaaccgtgccaatatgttaatattaggaacctacaacttcacagtgcctactatgagaaggcccacacatttcagtcattgaatattatgttagcatttttatgtatatatacacagttacatagtctctctctctctmtatatatccatacatttgtgtgtatgtgtgtgtgtaatgacttcccagtctctcagagggtagaatgtaacgtcatcacagagaataagaacaaaatggcatatgctatgaagtataatgt

SEQ ID NO: 200022 - DNA, 435 bp, Homo sapiens
ctgtctctcttctaaaccaactgcccattttacttacttactttttttttcttgtaaagatgaggtttcctcatgttgcctaggttggtctcgaactcctgagctcaaacgatcctcctgcctcagcttcccaaagtgctgggattacagatgtgagccatagcacctggccagctgcccattttatactggagttttatactaacatatacagttatttaaatatgaagataacagacactacaactaatttatgtaaacaaccaatcagatgaccccctcacccacctaccccctaccatgattagtgacatatattttcaagacagccggccagggttatacaaatgacacacaytgaaaaaaacatcagaaaaccatcccaaaagggagatacaagtagtggatatagtttctggccttaaatgatccact

SEQ ID NO: 200023 - DNA, 615 bp, Homo sapiens
acaatctcatgtactgatttgagacttataacaatttttggagggggcatagagaaaggagtgcccacagttgaggcatgaccccctccattcagacctctaactgttgcctgagtacacagatgtgccctgatttctggcccattggccatagtactgtgcctaatcaatgtaataggtttattttcccaatcctcaaactaaaaatgttcataacaagatgaattgtagactagtaacatttgatgcttttaaatatttgcttctttttaaacaaaaactaaaacccagaagtgaatttttaggtggatttttaaataaaaaagattgattgagtttggtgtgcaagctgttttataatgaaacmacaaaatgaaatctaaaatcctgaaatgtgcctaaactatcaaaacacacgatacagctaatgtgtaaagatgctaaattctgttacttggaggatgaatatatttaagatttaaaacacaataataaatacatgattaattcaaaaataaaaatctttacagctgcctatcaagggtctaaagcacttaatgaatgtttttagtctaacttatcattaactttttacaagtcaccatatttgaagat

SEQ ID NO: 200024 - DNA, 564 bp, Homo sapiens
gatttgcaagaaggttggcttgctactggtttgtttcatgagaagaggtaaagaaaaagacaaaagcagaatatggagaactatgtactgggtggaggcttatgaaatattgtattagttacggtgtgtaatcagaatgtagtgactttaaaaagtcatctattctcacagtttccatggtcagaaattcaggagtgtcttggccgaacagttctggtccagagtctctactgaaattacagtcaaattacctgagactggagttatctagggctgaaggatctgcctcaggtggtttactcacatggctggcaagttggtgctgcctgttgctgggagcctttgttcctcttcatgtggctgcttcacagagctgcttgagtatctttgaggcatgggggctggcttcccccaaagctagtgatcccagagaccaaacaaatgacctagccttagaggtcacacactgtcatctctgctgtgcagtaatgggttgtacagttcackccttgattcactgtgggaggagacttgcaagggtatgaataccaggaagtaaggatc

SEQ ID NO: 200025 - DNA, 590 bp, Homo sapiens
tatacgtattgtcaacagctatccagtccaatatctgtgtcctcacttcctgccacctagtcamtaagccaatatagtatttttaagtgttgttcccatggcccactcaatttaaccatggtcagagacaatccgaaataaagcttaaacaagacagatgcttgtttatgtcttaattagaagtcagctaggtggtccaaagatgatatggaggcaccataatcatcagggtttcagggtcattcaatcttcttgtcttgccattttcaacacatgatttctatttagtgatacaagttgctacttcagctgtcaccactatgtctgcattccagctaaaatagaagtcaggagaagaaagaggccaaatttccttctctcaaaggcacaaccccaaagcagcatacttcccttctgtttatattctttcagggggaagtcacatggtctttcccagctagagggaggctgggaaatgtagtcaaaatgcagctgtctatcatttaagaagaaaagaacaggtatttgaggaaaatccagcagcctttttcatttgtgtatgtcactgaaacaaaaatttaacacaaaat

SEQ ID NO: 200026 - DNA, 555 bp, Homo sapiens
agatctgaacaaggactgtttatggagagayctggggaatattagagtggttcatttaacaatccttggtaatctattcaatgcagaaaataaagagggaatatttctggcatgagtgattaggtgaatgctgttataattttccacagtgaggaatatgatttagtagacaggcatggtgaaaatagattagtgtattacaggaaaattccaacaagtaaaactatgagggaaaaagaagattgaaaatcaaatgatagtcacagctacattgaaaagatatacatagaaagaggatacaagaaaggagaaacaaaatagatagttagaaattggaaggctttctttcaacaaaagcatttcaagagagccctccatattgaaatgcatttgaataatgtttctagtgtgataaagctatccattaatatgaaaaaactgtatatatttaacagttcatccttgcaccatgtagaagcatcatttgatatttaccacaaaactgtgtgcctagattaggtattattatccctcttattatttataagaagagat

SEQ ID NO: 200027 - DNA, 555 bp, Homo sapiens
agatctgaacaaggactgtttatggagagatctggggaatattagagtggttcatttaacaatccttggtaatctattcaatgcagaaawtaaagagggaatatttctggcatgagtgattaggtgaatgctgttataattttccacagtgaggaatatgatttagtagacaggcatggtgaaaatagattagtgtattacaggaaaattccaacaagtaaaactatgagggaaaaagaagattgaaaatcaaatgatagtcacagctacattgaaaagatatacatagaaagaggatacaagaaaggagaaacaaaatagatagttagaaattggaaggctttctttcaacaaaagcatttcaagagagccctccatattgaaatgcatttgaataatgtttctagtgtgataaagctatccattaatatgaaaaaactgtatatatttaacagttcatccttgcaccatgtagaagcatcatttgatatttaccacaaaactgtgtgcctagattaggtattattatccctcttattatttataagaagagat

SEQ ID NO: 200028 - DNA, 588 bp, Homo sapiens
tattcttactcaagtcagagaatcaatgtaatttttcctctcgagtactgccagactcaaggtgatattacccattacctgtttcagatatataaacaggatactcaattttagactcaccaagtaatatagcaatctcttaaatgagccaaagaatatgatcaaaagaaagggtaaaattgttccaaatatttccttaagayaataaaaatcgcacgcataaatttcttgcatagatccataaagggtaaatggcaaaacgcttgggaaacctatctgttttcaaaaagcttatataaaaaatgataaaaacatcagattgagaactgaaaccaaagccacatttgcacaaatgtctcttagagttgtgataaatccatccagagccacatagaaatcagcaggtgtcataagaatcacttccatttcagtgtggtcacggagaatatctcactcttactaatactttgcaataacaaaaattagtattttagagcataacttgcattccattaataggttctttacaatttaaaatttttaattttagttatgaaacttctttgtgataggtaaatagatattgtt

SEQ ID NO: 200029 - DNA, 614 bp, Homo sapiens
atagcacaggatttaatataattaaatagacacccataaatactgcaatgtttggcatcactgtaaatgcccataggcctctctgcactgctgcatatgctgctcatgcctgtrggttctgagaagagttataagtgacacagtagcatcataccttctgctatagtataagaggccaatataatattacatatattagatatatatataatggttttcatgtatgtataagtaatgaattatttttgatatattaaacaatctcccccttgtaaattccctcttttccctctgctcagcttctgctcttccctcacaaacttcctcccctacttcatgtcactgtggtgttcagtactcagacagtggaaaggaaagcaacatggaagccatttagcctttgatttgtaaaagcacagaagccatttacagaaagggggagaattttaagcataaagcaaacatttgagagagtaggttgaagagactcgggatgttccaggattaggaatcacaaacaaaaaaatagaggactggtggatcagggctcacctggccaggtagatagaataaggcatgttttttaacagagacctgtgtcgacaaaacaacta

SEQ ID NO: 200030 - DNA, 598 bp, Homo sapiens
aagggtttttaattctttaaactatgcttttaattatgaaatagctatagagaacttctgattccaaaatggcggtgtagaagcaaactggcctcattccccaacatggaaaacagaaaaatacacaatgccaagattatcaccagtgatattctacaactcgcatgtgaggatcagtcagttcctggagctgcaaagcagtgaaaatattctgaacaaatggtaagagaatcagacttcatagccacgwtgtacctccttccaatctgtccagcaccaagcaaatagagaattgacacctgactcatgatttctacactggaaaatgtgagattgaggtggagaatcagcttgttcaccatcttgggttacaaggcggaagacctgtcactgcctcaatccataggaagcatcacaaagggagacatattcctgaagacaatcagagacaaaggggagaggtaggactaacattccaagatctagaaattactatgtagcttggctaaaggagacaccagatcagagtgttggttcagcaggagaacaatataagaggtgtgtcctacgatcctatgagtacaatcccctagctggc

SEQ ID NO: 200031 - DNA, 578 bp, Homo sapiens
tctgcacggaagaggaaacaattaacagaatgaagagacaacccatagaatgggagaaaaaaatgtgtatatatatccatctggcaatgaatttacgagaatgtataagaagcacaaacaactaaatagccaagaaacaaactgatttttaaatgagcaaaagatgtaaaaagacgtttttataaaaaaaagacatacaaatgactaatagatatataataagatgctcaacattactaattatcagagaaatacaaattaaaatcacaatgtgagatagctcactccacttagaatggcttttatcaaaaagggaatagcacaggctggcaaggttgttgagaaaggagagtcctcactacattgttggtrggaatgtaagtacatccaccatgaaaaacagtatggaatttccttacaaaactaaaaataggactaccacatgatccagcaattccactacagggtatgcgaccaaagaaaggaaatcaatatatcaaagagatagctgaactcctgtgtttatgacagagctattcacaatagccaggctagggaatcaacctagatgcccacca

SEQ ID NO: 200032 - DNA, 537 bp, Homo sapiens
tttcgtaaaactagaattgatgcataaccaatacagccccattcctcatgaggctcctgggagagtccctgctgtgctatactttaattcactatttaatccgagctgcaggtgggcggaggggggcgggggggtggggaggcggaagaaaaagagamatttaacattatcaaaattaaagttgaagaaagcagtcatagtaattctcagtatcagtgcaattgttaccaacagctagtttaagacaattctctgcattctatgcttaaacagaatacactactaaaataaaaattgtgagtcataccaaagaactagaattctgaattcatcagcaaagaaaaatacaagtgaaaagcatattgtctttttaaaaaaaaaattcaaatcttttacattacttctctgatttaaatgttttctagtagtgttttttctatagtggccacaatttcctctgtaaaaaacaccagtttctgggaagcacattgtaccaatatcattctgctagaatatagcaattacctaacagcttaa

SEQ ID NO: 200033 - DNA, 537 bp, Homo sapiens
tttcgtaaaactagaattgatgcataaccaatacagccccattcctcatgaggctcctgggagagtccctgctgtgctatactttaattcactatttaatccgagctgcaggtgggcggaggggggcgggggggtggggaggcggaagaaaaagagacatttaacattatcaaaattaaagttgaagaaagcagtcatagtaattctcagtatcagtgcaattgttaccaacagctagtttaagacaattctctgcattctatgcttaaacagaatacactactaaaataaaaattgtgagtcataccaaagaactagaattctgaattcatcagcaaagaaaaatacaagtgaaaagcatattgtctttttaaaaaaaaaattcaaatcttttacattacttctctgatttaaatgttttctagtagtgttttttctayagtggccacaatttcctctgtaaaaaacaccagtttctgggaagcacattgtaccaatatcattctgctagaatatagcaattacctaacagcttaa

SEQ ID NO: 200034 - DNA, 569 bp, Homo sapiens
gttttataaatcttatgtcattcaaaaatctaaatacattttatttgaaaaagaacagtcacttatactcttttacttactctttatgaaacaggaaaatagggtgaagaggcagggaaaatagggtgaggaggcaggaaaatagggtgaggagctaargtggattcacacttcagctaggacaggaaatatcctctccatagggcgtaggctgtaaatgactttgtaactttacttcattctctccatttacgtagggtgtaccccaactaaccaatggaatcctctagagggtatttaaactcccagaaattctgtaacagggcctttgagccccactatgctcaggcccgctcccacactgtgaagtgtgctttcattttcaatagatcccttcattccttccttgctttgtttgtgagttttgtccaattctttgttcaagatgccaagaacctagacaccctttaccattaacatttaattaacatttgatcagctcaagtttaatggtttaaactctcaaacaattaattccttgaataaattagttaattaaatccccttaa

SEQ ID NO: 200035 - DNA, 619 bp, Homo sapiens
tcaaatatcatacactttgcccctgctgtttctgtttcttccttctgaactactcagaccagtaccagcgacaaggaaatgactccttttgattacaaaataaatgaaaattgaagatctgtcaaaatgtatccagtagaattgcacagagcaaaataattcttcaactctgtgatgaaaggatgagctccctctgtgatcatcacttactaggattgaagaattcatggttgtgtggtttgaaattaaactgagttcaaaagtctgaaagaatttttttttctttctggttatctccttgaaaacaaacaaacaaacaaacaaaacctgaaaagtccgtaccagtaagatatttggattactatgcagcaaaattcactattgagctattaagtaaatgaacgacrgtggttgttaaaattttcttatatcattatattatccagatatccataagttatgctaattttaacctacatattttgatatttaattctctgttattaaactcatgttgctacaaatatttgaaaaattcctaactgtatagagattttgatgtatggcaattatgactagcttatgtagaatataaactaaaaataccagagaacatgga

SEQ ID NO: 200036 - DNA, 609 bp, Homo sapiens
ttttttataggggttaagcagagggaactttctttctatactgacttatgtagactggaatctccagttttcaggaaaracttatgtttctggatgaacctactttcctagttttattttgattatgttgtatttagtatgaggggctccattttggtttggtctggtctgctaaggcacagtgcaggagctcagttgtcaacaatggcctcccacacttggtttaaaaatggcaaagaggagttaaggttgtggacagaattaagattgctagtgaggagacattgagaggaaaagattatcctgggttattatctagtataatcacaaagcttcttataagtgaaagagggaggtaggagaggaagaaccagaaacatggcaatgtgagaaacactccacctgacattgtgagctttgaagatgaagtaaaagaacaatgaaccaagaaatgtagggtggtctctagaagctggaaaggcttggtgacagattcttccccagggccttcagaagaaatatggttctgctgacaccttgatttttagctcagtgatgcttatttcagaattctgacctcaagaactatgtgaaaaataaagaagaact

SEQ ID NO: 200037 - DNA, 512 bp, Homo sapiens
tattttgacaaaagcgccacaaccattcaatgggcacaaggcagtctttgcaacacatggtgaaggcaaacctgaatatccacatgcacaagaaagaggtagataccatatgcaaataatttttaaaaaactcaaaatggatcaaaggcattaatgtaatatctaaaactattagaagcaaacatagggcataaacttcacgacatttgatttagcagtgacttcttcaatatgacaccaaaggcttaagcacaaaggaaagtattgacaaactggatttaataacaatttaaatatttagggcctcaaaagatcctataaacagtgtaaagacattgcgcaaaatgagagaaattatttgtaaatcatgtatctgacaaaatrgtaaaatccagaatgtaaaagaacacctaaagctcaacaacaacaacaaaaacaaacacacacaaaaaagatgaaaaaaatgggtaaaggatttgaacagacatttaacctgagaagtatgcacaaat

SEQ ID NO: 200038 - DNA, 559 bp, Homo sapiens
tttaaagttttaaaatgtattaccaaattactctttaaaatgtttttacaatttatcatatccactgtcataatatgagagtgcctatttttccacaccattgccaggtggtaatatttgatatttataaagaggtttgtcaattttatggagtaaaacaaaaatgacacatttcatgaaagaaacatagtagaagattgctttagaaagcttagttgatggtataaattttatctgaagatggcataactggctataaatggtgaaataatagacattgcaartcatgagttgtaatgtttgttctttgggtcacaaaacacagaagcctcaattatagatttggtgaatatgaactgattgtgaaataaaaattacctatcagagcaagtatttgtgacttgatatattagatattaatttccatataaccaatcaccaaaaacctaaaatcacatacatttattatctgacaacatctataggtcaggaatctaagcaaggcttgggtggatcttgggctcagggtcttaaaagactgctaacaagctatgagctg

SEQ ID NO: 200039 - DNA, 529 bp, Homo sapiens
tatacaatcctaaacctaaatatttttaaaagatgcattcaaaattgttttctaagatgatggctaaaatctataatacatggaaaaaatatttaaaatatagwttaattataaaaaagattccacaataatattttaacataattgccttcttgtaaaacatattacatgtatattgtttatatatatatttatatatgtttgtatataaacttattgcatatatgttatatatataacacattatatactatatatatatttttatatatatatatagtgtactgcataaggatagagggttttcattagctctataagttgtgataaagtattttcattggttctaacagaagcaggaaaatattgtggtaggctctttcaagcaggctgccccagtattttgatatgtcacaacttaaagatattttattgagattttttgattccaatgccaaagtttcttaaggatcttgattttaaaggatcagcttctcaatacaatatccttgatactgatttaaatcaa

SEQ ID NO: 200040 - DNA, 623 bp, Homo sapiens
aactttattagctctttaggaaaattacttgtttacagagagcatgtaattggatcctaaatgtaacagtgtctaaaagtctttgaaagcaattttcatgatgcaaaaagatagtcaagtgatttgaaactccaatttctttgaggatttcagatgtaccaaatatcatacaaaccatagatattgttgcattatagccaatttgctggtaatatcaaatgatatttttcttttaagtagaaatagtaggagagagtaccatttgtcctcaaccaaggcattttaaataagcacacactgtcatctagcatgcaaagccttcttccttagatgggaagctgaaatgaacacattatctggaatgtattgaaaaggagatctgaaacatagttgtttattaaagttttaattgtgaggttctttgaagtctttaggacagcaatttgtttmtagtgagtttgggacgaggagggtgggaaatagctcagtatttcctttctctcagtggaaccattatgtaaaagattacaaacagatttctctccaagaatcaaagtcaaaactgaagtaaaacagatgcttcctattgataagttgaaaatcagaaacttttaagaaaagta

SEQ ID NO: 200041 - DNA, 344 bp, Homo sapiens
gcacttacacacacatcataatagaagttctaaacaccacagactaagagggaatttttaaagcagcaagagaaaaatgactcactacatacaaggaaaccctaacagaagaattagctggcttttcattagaaacagtggaagctagaaagcagtgaggtaacattcgaaaagtactgaaacaaaaacatctaccaagaatcttatatctaggaaaaccatgtttcaaaaatagaggtgaataaagacattcccagaaaaacaaaaattgacagaattctttgattaaagwaccaactagaaaaactaaaagaagttcttcaggctgaaagcagatgactcca

SEQ ID NO: 200042 - DNA, 414 bp, Homo sapiens
cctctcatttctgccacaaagtggaagaggaagaaaaaaaaggtaatcttcccctataattctttcataaatttttaattgaaggtaactttcrtatattaaaattcaaaaattgaaaatatacagatatttgcattttgcatttaaataaaacaggtaagatgaaaggatacagaaatttctatcaccccagaaaatttccccatgcatctttccagtcaatacgtcctctatccctgaggtaactattattctggcttttagcattacagattagttttgcttgttcttgaacttcatgtacatagaatcacatagtatgttcagtgttgtgtttgaatttcttcactcactttgataggcaaaataatgggccccccaaacaattgcttcacctacattcagaggcaaatt

SEQ ID NO: 200043 - DNA, 510 bp, Homo sapiens
acttgtcaggtgaaaaaaattggaatatttagtctaggaaaaagatggaatawgagggtggctatgaccaagaggatggattattatttgtgcccctcagagaaagaacaagaatgaatgtgtagaattagaaagaaactaattttgactctattatctggaaaaatagcttaagaatttcctttgtaaggagttattcaagcagaaataatacaatcacttgagcaaaattcctccaagaaaatttaagaactagttttattttctgattaagactctaggtgatcagtttatatacagagagatacttctaattttaaaaagaaatttgggcatagattgctccttctgagtatggggtagtgggaaggggaaaggctcaatgctgcactttggggatggttaatattgccgtctcttcaggaacagtagaaccaactcccaggcaaatagccccattacaggtctgaagaatttccaaagttagccaaccttcaaagacaaacacac

SEQ ID NO: 200044 - DNA, 456 bp, Homo sapiens
taatttattaattttttttcaaaaaaccagttcctggcattgattttttgaaggtggttgttgttgttgtttgtttgtttgttttgtctcattctccttcagttcagctctgattttggttattttttgtcttttgctagttctggggtttctttgtacttagttctctagttcttttagttataatgttaggttgctaacctgacagctttctagccttttgatgtgggcatttaatgttataaattttcctcttgacactgtgttagttatgtcccagagattctggtatgttgtatcttcattttcattagtttcaaggaacttcttgatttctgygttaatttcattatttacccaaaggttattcaggagcaggttgttcaatttacatgtagttgtgtggttttgagtgaatttcttagactttatctctaatttgattacactgttgtc

SEQ ID NO: 200045 - DNA, 566 bp, Homo sapiens
ctattcttgtctgcctgtcttatttcagaaaaacagtcttcaagctctgagcttctttcctttgcttggtctattctgctattaatacttatgattgcattttgaagttgttgtagtgtgtttttcagctctattacattggttttgtttctctctataatggctattttggctgtaagttcctgcattgttttatcatgtttcttatcctctttgcactgggttacaatgtgcttctttagctcagtgaagtttgtttttattcacactctgaagcctacttctatcatttcagccatctcagcctcagaccagctctgaacccttgcttgagaggtgttgtggtcatttggaggaaagggggcactctgcctttttgagttttcagcrtttttgtgttgatttttttatcattttgtgggcttatctacctccaatctttgtgatcgccaacctttggatgggttttttttttctgttttgttgttgtttttgttgttgttttcattgttgtttgtttatttttcttttagcagtctggccactcttccatagggctgctgcca

SEQ ID NO: 200046 - DNA, 447 bp, Homo sapiens
agtttacaaatcagttttacccttattatattaaattccactgataatagcactatgagaaagacaagaaagatgatcattcctgtttcaccgaggttaaatgatgtttccctatgtggcagagaatctacatttcctgtctctaattctaccatgctttccactaccccaaactgctgcagagaacccagcggtttctaagatgaatgacttgctatcaccaccctgacacatagcctatctatcgccacaaattggcatagattacaaaaatggtggcagcccgaaatatacagtccctctcctaaagagcacaaacataattatataataaataacatgttcatttagaatctcattagagggtattgaaataattttgctacttccaaatagcgtcagtggtagcgggagaagaasaaagagggagatgataagagtaataat

SEQ ID NO: 200047 - DNA, 603 bp, Homo sapiens
agtatttgcaaataaacaaatataggcacgttgtaacatatctacaccaaacattgttaaatttatttagactaaacaaaaatataactggcagaactayatatatgcagcaaattatcaagagtaataaaaaggcaaatacgtaggtaagtataaatgaacattgactataaataactaaacttttaaattaaaattatactttgagttaaaatgcatgacaacagtaacatgatagtaagagaggttgttatatagagttatcatgtttaatgtcctatctttgcagggaagtaattaaaaattatatttttgattatacggtaaaaatgaagggtgaatgttaaactctgaaataattttaatagatgctaaaaataatatttaactggtaggctaatagatggacaatacattcacaagttgaatattccaaaataaggaaagaaaaactattcaagcaaagtataaactagtagacagaaacccaaatatgaaagtaatcacataaatacaaatgttagacgaaaaattcaaatagaaagactaagattttaagacagccttttaaaagctcaactataaactgcttagtggaaacac

SEQ ID NO: 200048 - DNA, 603 bp, Homo sapiens
agtatttgcaaataaacaaatataggcacgttgtaacatatctacaccaaacattgttaaatttatttagactaaacaaaaatataactggcagaactatatatatgcagcaaattatcaagagtaataaaaaggcaaatacgtaggtaagtataaatgaacattgactataaataactaaacttttaaattaaaattatactttgagttaaaatgcatgacaacagtaacatgatagtaagagaggttgttatatagagttatcatgtttaatgtcctatctttgcagggaagtaattaaaaattatatttttgattatacggtaaaaatgaagggtgaatgttaaactctgaaataattttaatagatgctaaaaataatatttaactggtaggctaatagatggacaatacattcacaagttgaatattccaaaataaggaaagaaaaactattcaagmaaagtataaactagtagacagaaacccaaatatgaaagtaatcacataaatacaaatgttagacgaaaaattcaaatagaaagactaagattttaagacagccttttaaaagctcaactataaactgcttagtggaaacac

SEQ ID NO: 200049 - DNA, 409 bp, Homo sapiens
aactttctttatacctttaattagaaatatgtctgtagagtatggactctaacaaggtgtgaatcactttttatggattttcctgtgaattcattgggtatattaaatctgcattctgtatttttctattgattgttttctagtagttttggtctcatcatagatatagaaagaaaggtgtgaataggatgagaggtaataggcagcattgtgtcccttcaccaaatcaagcagccacgtaatasagtgcctatagctcccatttggtattgattccaagcttgcatttcctgaacagagagagtttcctggggtagagatctaagtgactttctgcttactctggtgcaggtcgtcctctctgttctggcataaacagtatactgtttgatctttgtaaacttattct

SEQ ID NO: 200050 - DNA, 539 bp, Homo sapiens
aaactccttcaaacaaagaacaagctgaaaatcaaactgcaggccctagataagaaatattctgtgtccttgaatggaaacagctactgtgtgaacccagatgaacaaattccactccttttttggtcatatttctctctccttgtcacgccttagtctcttacttttcacctacattatatacgcctacctttctgtgattggccataggytgagtcttcatttacttaggataaatcatcacttcagcccctgattggtcttatgccaaggtctcggaccaagccttcacctctgcctctaattggttctttgcactatcatacctctttctaagtggtgctttctccaagatggcctacagaccagtcagcacactcatctccctccagttcataaaaaccctcagactcagcttcatagctggcagccatctttcaggccccctctccactgtgaggatctttcctcttttgcttattaaacttttgttctaacctcactctttgtgtccacatgccttaattttcttggttgtg

SEQ ID NO: 200051 - DNA, 516 bp, Homo sapiens
agatctgccttccccagcccactgactcaaatgttaatctttttggtgacactcacacagacacacccaggattaatactttgtatccctcaatccaatcaagttgacagtcagtattaaccatcgcaggaggagagcatgagctaccttccaggtaagagccacttgacttcaagccctttctgtgtcaggttccttttggggtctgtactcactctggcaccacagattcytataaacaccaaaggaagcaggtttagggaaaggagatctcttggaaaaagcacaatgaggcccacagttgaggcccccaaatggccacaggcttttctctgaagaagccatggagctccctcctgatgataaagctagctcagcttggacgtcaagcatggctctggggcactgagcccagaatttgacctttgttcaagaacagagatcccagatgctggctcccaggactgtgcctgtccacagtgatgttttcactgagatgcagtgaactgtcagtgt

SEQ ID NO: 200052 - DNA, 633 bp, Homo sapiens
gtttgtggaattgaaaattaatataaccactatggcgagtagtttggaggatcaaaaaaaaaaactaaaaattgagctactatatgatccagcaatcccactgctgggtacatacccaaaagaaaggaaatctttatatcaaagagatatctgyactctcatgtttgttgtagcactgttcataatatccaagaattagaagcaacctaaatgtccattaatagatgaattaataaagaaaatgtgggacatatacacaatgaagtactattcagccattaaaaaatgagatcttgtcatttgcaacaagatggatggaactggaggttattatgttaagtaaaataagtcagacacagaaagacatacatcacatgttctcacttatttctgagatctaaaaatcaaaacaattgaactcatggagataaacagtagaaggatggttaccagaggctgggaagggtagtgggtggtggaaaggagataggttaatgggtacgaaatgtagaaagaatgagtaagacctactaattgatagcacaacaggatggctatagtcaataacaatttaattgtacactttgaaataactaaaagagcataattggattgtttgtaacacaaggcata

SEQ ID NO: 200053 - DNA, 508 bp, Homo sapiens
tatgtttgctgtttaagctgaccagcctatagtattccattatagcagcccaaactgactaagacatcatataactgtttataattttattataacattgtcttataaaatttataatatatgttggtgtaccacatatacaattatatcataagagatagagagatgaatttactaagtggtaagatttctattttttatgtgcagtagtgcattgtaattatatactgtgaaagttatgaatgtatattgaaatctctaaagcacccctataaaatgaaattataaacaataactaaaattcaacaggaaaattaagataaaatctaaaaaataatagaataatacaaaamgggggcaggaaaggaaaaccaaaacacagaagtaaatggttggaactgttggaaagaaagacataagctacgtattttcagatggcatgattatgatcttgtttaaaagatactgaaaataaaaattagaaataatatataaattcaataaggtt

SEQ ID NO: 200054 - DNA, 508 bp, Homo sapiens
tatgtttgctgtttaagctgaccagcctatagtattccattatagcagcccaaactgactaagacatcatataactgtttataattttattataacattgtcttataaaatttataatatatgttggtgtaccacatatacaattatatcataagagatagagagatgaatttactaagtggtaagatttctattttttatgtgcagtagtgcattgtaattatatactgtgaaagttatgaatgtatattgaaatctctaaagcacccctataaaatgaaattataaacaataactaaaattcaacaggaaaattaagataaaatctaaaaaataatagaataatacaaaacgggggcaggaaaggaaaaccaaaacacagaagtaaatggttggaactgttggaaagaaagacataagctaygtattttcagatggcatgattatgatcttgtttaaaagatactgaaaataaaaattagaaataatatataaattcaataaggtt

SEQ ID NO: 200055 - DNA, 609 bp, Homo sapiens
tacaaaatacaggattaatatataaaataagttgtattcctatacattagaaaagaaaacctgaaatgaaattacaaaaacaatccatttacaatagcaccaaacagaacaaaatacttagatataaatttaacaaaaggagtgcaagacttgtacactaaaaactacaaaacattgttgaaagaaattaaagaaaacttaaataagtgaaaagatatcccatgtccacggtttggaagacttactattgttagaaatcatactgcccgctatggactaaattacgttctaccaaaatttatatgtggaagttttaacctgcaatgtgactwtatgtggaaatacagtctttaggaggtaattaaggttaagtaagatcataagagtagagcccaaatccaataggactgtggccttagttttctaagagagagagagggagatctttttctctaccacatgagaacacaataagaagatcgccatctgcaacccaagaagaaagccctcaccagacattgagtccactgacaccttcatcttggatttccactctctagaatgtgaaaaataaattcctgttttttaagccacacagtctatgatatt

SEQ ID NO: 200056 - DNA, 609 bp, Homo sapiens
tacaaaatacaggattaatatataaaataagttgtattcctatacattagaaaagaaaacctgaaatgaaattacaaaaacaatccatttacaatagcaccaaacagaacaaaatacttagatataaatttaacaaaaggagtgcaagacttgtacactaaaaactacaaaacattgttgaaagaaattaaagaaaacttaaataagtgaaaagatatcccatgtccacggtttggaagacttactattgttagaaatcatactgcccgctatggactaaattacgttctaccaaaatttatatgtggaagttttaacctgcaatgtgactatatgtggaaatacagtctttaggaggtaattaaggttaagtaagatcataagagtagagcccaaatccaataggactgtggccttagttttctaagagagaragagggagatctttttctctaccacatgagaacacaataagaagatcgccatctgcaacccaagaagaaagccctcaccagacattgagtccactgacaccttcatcttggatttccactctctagaatgtgaaaaataaattcctgttttttaagccacacagtctatgatatt

SEQ ID NO: 200057 - DNA, 458 bp, Homo sapiens
ctaaaacctaacaagcatcaactttattccagttcccaacaagctcctcatctccatctgagaccaccttggcctgggccttattgtccatatcactatcagcatttttgtcaaaaacattcaacaagtctctaggaagttccaaactttcccacattttcctgtcttcttttgagccctccaaactatttcaatctctgcctgtcacccagtttcaaagtcacttccatacttgttgagtatcttatcagcagcaccctactctactggtaccaaggtactgtattagtctgttctcatgatactgataaagacatacctgaaactgggtactctataaaggaaagaggattaattgactcacagttttacatgactggggaggcctcacaatcatgacagaaggagaatgargaacagagtaaggtgttacatggcagcaggcaagagagcttgtg

SEQ ID NO: 200058 - DNA, 522 bp, Homo sapiens
tcatattgctagctctcccacatactgtcataatctaactaaatatttttaaaaatactccttagagaaagacaagctcttcctgggtctcaaattatttctaaaaatcatagtgtgattacaggataattcacacgattaaagataatcagacacacaaaaagaaaagatgccatgagatggaaccagcaaaactaataggcaatataggggaggaggcagacaactatggccaaatagaaccctctakagatccccctgcaggaaaaacaagttaaacaactatccacatacaaaaaaccacctttatgagaatcaaaaatcaggtgagcaattacagtgcctagttttaaatttatatcaaggaaacaggcactgaagagggtaagaaagagagttttcaatcacctacaccacacgacccccatcactggccacatggcacagagagagaatctgtgtgcttggtggagggagagcaaagtgattgtgggactttgcattggaacccagtgctgccct

SEQ ID NO: 200059 - DNA, 445 bp, Homo sapiens
ttcaggtatgatagtaaactgttgtatacttgttggataaatgcgacctcattcttgctttttaaaaactatatttattcttaaaattattatgtaaaaattttttaaattataaaaacattttttcctaatgaaaaatggaaaaatcccaaaagtagaaaatactcataattacatctaagtatattaaatattaatgttttagagaatttctatcaaatctttttccttagtagattttcacacatgcttgttatgttgaatatatggttttttagttctgtttaattacctaacattttatagtattttccaacattatcacagatttcttaatatctgcttatttcatctactgtaaaaataataatttacctatatattcatttatagytggacatttaatttgtcttggggtgaggctaggttcattgaagctgtgatg

SEQ ID NO: 200060 - DNA, 368 bp, Homo sapiens
atgaattataggttttaaatttaccctggcttttaaaggaataaggcacactgttttttctttactacttctatctctctttttctctctctccctctcttttctctcttttctctctctctctctgtctctctctctctgtatcttccctccttgacttactcaatttgctttcatcctaatctmttacgttttcatagacccagttccagttgttaaagtactgggttatcagttctaaggccctggccaaggagccaaggcttggagattgtattgcagaggggtaagctgggtagaaatcaggggaggagagcatcttacaaatgggagagcaatcctcctagccatttgcaaacttggggccc

SEQ ID NO: 200061 - DNA, 607 bp, Homo sapiens
ttttgtaaaatatttgtaaaacttacatgaagcttctgattttcctttcatttttgtcttaggtaatctgctttgtctttgtcactgagcactcacatacctcgaaagtggagtgatgggaggaaaggacrgcttacacaatgaatgtcacttgtgaaagtgactctgtccatgtaaaaccctcaaatataccatgaggtacactcaatgatactaagtccaaatttctggaacagggaaatgtgacttttgccttatgatttaaaaaaaataataatcacataaagtacactaagactttatgtgaaactgttgatatttctaactttattgtcaaaaaagcaagtcagcaaacgagatagagagacagatcttaaaatagttttcattttaactatggaagtgtttccagatgggatacaaactatacaaattaattgtgaatgcttctggataggttttttttcttcttttttgaaaaaaataattttagagagttgtatttttcagactgcttgaacaatcaccctgtaataattatcaactgcttgccaataattatcaagaacctgttttactttttgcacaataatgcattattttaatg

SEQ ID NO: 200062 - DNA, 632 bp, Homo sapiens
taaaagaaatgtacaaaatccacaggaccacgtagaaaatggaggctgcatgccacagtatttttagtgttgaatggatgaagcatcaattgtccatttttcttaatggctcctgcaagttttctcctgactactgatgttggtartcaagatctgtgatcctaacaccagttcatccactgttgcattactctagattctgtgacttgagtatttaacccacatgcattgtgaccctgagctcctctttgatcttgcctgtgaattaactgtattgatttgtatgaagattgtgctactttaatttttatattgtgaatattgtgaccatgttttcttacagttcagtgatgcaaatgagtatgactataataccaaagctaacatgacaatactgaaaaaaaaaggctaaacaactgtgttactttaaaaatacatagaacgatccatggatctagattagggagaaaatcaaaacagagtagtctacaataaatagaaataaatttgagactagacagaaggtcatatgaatacaattgtggagcctacatctcacaagtttaggatgagacaggcaagtttttgtaagtcaatcaaaaccattttttatctcctcccaccccccaaaa

SEQ ID NO: 200063 - DNA, 632 bp, Homo sapiens
taaaagaaatgtacaaaatccacaggaccacgtagaaaatggaggctgcatgccacagtatttttagtgttgaatggatgaagcatcaattgtccatttttcttaatggctcctgcaagttttctcctgactactgatgttggtagtcaagatctgtgatcctaacaccagttcatccactgttgcattactctagattctgtgacttgagtatttaacccacatgcattgtgaccctgagctcctctttgatcttgcctgtgaattaactgtattgatttgtatgaagattgtgctactttaatttttatattgtgaatattgtgaccatgttttcttacagttcagtgatgcaaatgagtatgactataataccaaagctaacatgacaatactgaaaaaaaaaggctaaacaactgtgttactttaaaaatacatagaacgatccatggatctagattagggagaaaatcaaaacagagtagtctacaataaatagaaataaatttgagactagacagaaggtcatatgaatayaattgtggagcctacatctcacaagtttaggatgagacaggcaagtttttgtaagtcaatcaaaaccattttttatctcctcccaccccccaaaa

SEQ ID NO: 200064 - DNA, 580 bp, Homo sapiens
tttgctaagtagctcttaccaatatggatctttgaatcacaaaagagtgccccattcccaccccagccctgaagttattgtaaaaatattcaatttgagtggtagaattagaaaaaagggcattttgttttcttctggaacaaytgcttggctagcatcatgggtttttatttttccctgatctcctatcctccatcttgtcaacctcccacacaagttaatttgatttagatttttatgcatagagatctgactagtaagggtatatttatttaagccaaatttagttgttatatataggaagactgatctgtagatgtgtggcacttgtttataaatgctgatggattctcttttcagagttcagacctttattaatctgcagaagcattctcagtaaatatatgtaattggtaaaattgcgatttcctatgacaatggatttattttcatagatttttaagggtaaattttggctcgtagctagtggcattactacctactgaaaagtgaccccacctgttaggagtatggttgatacagaggggaaagatgctgctatcaaatagatatttgcaag

SEQ ID NO: 200065 - DNA, 527 bp, Homo sapiens
gctttgtgcatccaggcccttataaaactttgtaattggttatgcataagcgcaacttatggctttttcattgtgtttccagcacagtgatgcggtccatgacctccttctggatgtgatcacgtgggttggaattttgctgtcccttgtttgtctcctgatttgcatcttcacattttgctttttccgsgggctccagagtgaccgtaacaccatccacaagaacctctgcatcagtctctttgtagcagagctgctcttcctgattgggatcaaccgaactgaccaaccagtaagcaacctacattgataccagtgaagaatttttccacttccagcttttcagtagcgccaatactaaaaatacttatgtttgaaagtatcatttcttctagtcatctaagatagatactaattttcaggccttactcagttttccatttttcatatcccattgtcataaataagcagcaaactttatgaataaggtgtatatttcatttttaaatagacttttgttttttaga

SEQ ID NO: 200066 - DNA, 527 bp, Homo sapiens
gctttgtgcatccaggcccttataaaactttgtaattggttatgcataagcgcaacttatggctttttcattgtgtttccagcacagtgatgcggtccatgacctccttctggatgtgatcacgtgggttggaattttgctgtcccttgtttgtctcctgatttgcatcttcacattttgctttttccgggggctccagagtgaccgtaacaccatccacaagaacctctgcatcagtctctttgtagcagagctgctcttcctgattgggatcaaccgaactgaccaaccrgtaagcaacctacattgataccagtgaagaatttttccacttccagcttttcagtagcgccaatactaaaaatacttatgtttgaaagtatcatttcttctagtcatctaagatagatactaattttcaggccttactcagttttccatttttcatatcccattgtcataaataagcagcaaactttatgaataaggtgtatatttcatttttaaatagacttttgttttttaga

SEQ ID NO: 200067 - DNA, 608 bp, Homo sapiens
gagagatggctttttcaggatggcagcaaggaacatttcatggagcacacattggatttgagcttgcccttgaggatctggacgacagaaaaaggtaagttgcgtggcagcaacrgggagggacgtggcacagtctgggagtgaagagccgtccatttggctggagggcaggcaggaaaagtgaatgagagggttttgctggcaatagcaagtttggctttcaggctaaggaatttagagtctatttgtcaaaccatgaggaacaacagcaactttttgcatacaaaagtgttgggcctggaaatattcaaggtaactgttacagccgtggtgctccatgaatggaaggggcctgtgttggtctgctcaggctgtgtaacaaaataccacaggctggatgcttaaaggcagacatgtactttgtcacagttctagagcctggatgtccaagagcaaggtgctagcaggttggtgtctggtgagagctccctttgtgtcctttcttgctatatgtcccatgacctttcctccatacagagagcagagagggagtgagccctcaggcatgtcttcctgtaaagacactactcttatgagattaggacccc

SEQ ID NO: 200068 - DNA, 596 bp, Homo sapiens
ctccaccccctcattagttatttttcctggtcatccccctcctcccacctgtcaccctctgaaaagccccaggtgtcttgctcccctctatgtgtccatgtgttctcatcatttagctcccacttataagtgagaagatgtggtatttggtttcctgttcctgtgctagtttgctaaggattatggcctccagctccagtttacgggcagggktggaaccatgtgtataagaatctgatttggttcttggaatctggacactgctgatttttagtcatcatcagtgatgctcccattatgattgaccacagggctgcaaactaagtttatttgattacccttctttggcctcttgactttccagaaatgggactttctgcttctatagggcatagtcagaagtgtctggggataggatattaaaaggaaaaagcagcagccatgaggaaggccaactctaatacccataaggaccctatctgatgggcaggggatgcgtaatggcaggaacctttggtagtgacaatacttgaggcctgaagagtggcaacaccttagttcagcatggtctctatggagggggaccttggctagca

SEQ ID NO: 200069 - DNA, 607 bp, Homo sapiens
taaactagttaacatttataaaccattaactctcacctacaccccttgtaaactattaactctcagctacaccccttggtaaatgttaacagttaaagttctctttcattcattaaaatgcaaatagcttaacatgtctgtgacaatacacactaataatttcccactttttattaaatgtttaatagcactgatacccaatctgaaaaaacttcccatattagagagatagactgtggtgctaatattttcctagcaaacgacagaatttttaaattggaacagactttagagatcatttcatccagcttctcattttaaagattaggagatagaaccagagcctctgaaatgtccaaagccacagagtttattagtaaatataaaatcagaacacccagggtcgggtgcggtasgtcacgcctgtaatttcagcactttgggaggccaagccaggtggatcactaaggtcaggagaccagcctggccaacatggcaaaaccctgtctctactaaaaaccccaaaattagcctcgcttggtggcgcacacctataatcaggaggctgaagcaggagaatcgcttgaatccaggaggcgaaggttac

SEQ ID NO: 200070 - DNA, 607 bp, Homo sapiens
taaactagttaacatttataaaccattaactctcacctacaccccttgtaaactattaactctcagctacaccccttggtaaatgttaacagttaaagttctctttcattcattaaaatgcaaatagcttaacatgtctgtgacaatacacactaataatttcccactttttattaaatgtttaatagcactgatacccaatctgaaaaaacttcccatattagagagatagactgtggtgctaatattttcctagcaaacgacagaatttttaaattggaacagactttagagatcatttcatccagcttctcattttaaagattaggagatagaaccagagcctctgaaatgtccaaagccacagagtttattagtaaatataaaatcagaacacccagggtcgggtgcggtacstcacgcctgtaatttcagcactttgggaggccaagccaggtggatcactaaggtcaggagaccagcctggccaacatggcaaaaccctgtctctactaaaaaccccaaaattagcctcgcttggtggcgcacacctataatcaggaggctgaagcaggagaatcgcttgaatccaggaggcgaaggttac

SEQ ID NO: 200071 - DNA, 599 bp, Homo sapiens
caagacaactcaatgtgagaaagaatagtttcaacaagtagtgttgggacaactgggaatcaacatggaaaagaatgaatttggacccctacctcataccacacacaacatttaactcaaaatagattataaacctaaatgtaggagccaaaaacgatcaaactctttgaagaacatatagtagtcaatctttgtgacctgaggtcagataatattttcttaagattygaaaccaaaagcacaactgacaaaagaaaaaatagataaattgaactgaactgtatctaaaggttaaaactctgtgctacagacaaggctgtcaagaaaatgaaagcaacacacagaatgggagaaaatatttataaatcatatatctggtaagaaactggaatccaaaatatataaagagcatttatcattcaataaaagacaaataattcaatggaaaaattggcaaaggatttgaatacacttttctccaaagaagatatcaaatggctaatgagcacatgaaaagatactaaaaatcattagccattcaggtaatgcaaatcaaaaccacaatgagatactactttgcacccataataatggtataa

SEQ ID NO: 200072 - DNA, 599 bp, Homo sapiens
caagacaactcaatgtgagaaagaatagtttcaacaagtagtgttgggacaactgggaatcaacatggaaaagaatgaatttggacccctacctcataccacacacaacatttaactcaaaatagattataaacctaaatgtaggagccaaaaacgatcaaactctttgaagaacatatagtagtcaatctttgtgacctgaggtcagataatattttcttaagatttgaaaccaaaagcacaaytgacaaaagaaaaaatagataaattgaactgaactgtatctaaaggttaaaactctgtgctacagacaaggctgtcaagaaaatgaaagcaacacacagaatgggagaaaatatttataaatcatatatctggtaagaaactggaatccaaaatatataaagagcatttatcattcaataaaagacaaataattcaatggaaaaattggcaaaggatttgaatacacttttctccaaagaagatatcaaatggctaatgagcacatgaaaagatactaaaaatcattagccattcaggtaatgcaaatcaaaaccacaatgagatactactttgcacccataataatggtataa

SEQ ID NO: 200073 - DNA, 599 bp, Homo sapiens
caagacaactcaatgtgagaaagaatagtttcaacaagtagtgttgggacaactgggaatcaacatggaaaagaatgaatttggacccctacctcataccacacacaacatttaactcaaaatagattataaacctaaatgtaggagccaaaaacgatcaaactctttgaagaacatatagtagtcaatctttgtgacctgaggtcagataatattttcttaagatttgaaaccaaaagcacaactgacaaaagaaaaaatagataaatwgaactgaactgtatctaaaggttaaaactctgtgctacagacaaggctgtcaagaaaatgaaagcaacacacagaatgggagaaaatatttataaatcatatatctggtaagaaactggaatccaaaatatataaagagcatttatcattcaataaaagacaaataattcaatggaaaaattggcaaaggatttgaatacacttttctccaaagaagatatcaaatggctaatgagcacatgaaaagatactaaaaatcattagccattcaggtaatgcaaatcaaaaccacaatgagatactactttgcacccataataatggtataa

SEQ ID NO: 200074 - DNA, 514 bp, Homo sapiens
aaacaggggagactcctgaaaacgctgctgctctccataagtcccaggaagccacaagaccccaaattgaacccatcaatatgtaagctggggtggaaaattgctacccgggagtatcaaaccacagccatgaccaggatgaatttggacccacagccacatcctgagaaccagctatagttggaggctcagagcaatcytctcactaacctcacaattacacaaccccacatcttaccatttgtgttttggaacacgacattatggaagggtcttactataccaaactcagcagaactgacaaaacctaaaaattaaagacatatcattaagagagcaataacttctagactatattgcattcattaaacatcagctcaagatactggaaagtaaaacatgtaatggctaaaatttgttaatctaatgaaagatggacacagcagaagcttttgtcagtgacccgagaaattaagctgagacagcttctcattaactcgccaaaagttaaaga

SEQ ID NO: 200075 - DNA, 594 bp, Homo sapiens
agatctactctccctggatcaggccacaaacaggggagactcctgaaaacgctgctgctctccataagtcccaggaagccacaagaccccaaattgaacccatcaatatgtaagctggggtggaaaattgctacccgggagtatcaaaccacagccatgaccaggatgaatttggacccacagccacatcctgagaaccagctatagttggaggctcagagcaatcctctcactaacctcacaattacacaaccccacatcttaccatttgtgttttggaacacgacattatggaagggtcttactayaccaaactcagcagaactgacaaaacctaaaaattaaagacatatcattaagagagcaataacttctagactatattgcattcattaaacatcagctcaagatactggaaagtaaaacatgtaatggctaaaatttgttaatctaatgaaagatggacacagcagaagcttttgtcagtgacccgagaaattaagctgagacagcttctcattaactcgccaaaagttaaagagataaacagaacattatgaaattgggagggtatttctaaaaatgaagcaaagc

SEQ ID NO: 200076 - DNA, 594 bp, Homo sapiens
agatctactctccctggatcaggccacaaacaggggagactcctgaaaacgctgctgctctccataagtcccaggaagccacaagaccccaaattgaacccatcaatatgtaagctggggtggaaaattgctacccgggagtatcaaaccacagccatgaccaggatgaatttggacccacagccacatcctgagaaccagctatagttggaggctcagagcaatcctctcactaacctcacaattacacaaccccacatcttaccatttgtgttttggaacacgacattatggaagggtcttactataccaaactcagcagaactgacaaaacctaaaaattaaagacatatcattaagagagcaataacttctagactatattrcattcattaaacatcagctcaagatactggaaagtaaaacatgtaatggctaaaatttgttaatctaatgaaagatggacacagcagaagcttttgtcagtgacccgagaaattaagctgagacagcttctcattaactcgccaaaagttaaagagataaacagaacattatgaaattgggagggtatttctaaaaatgaagcaaagc

SEQ ID NO: 200077 - DNA, 621 bp, Homo sapiens
tctgtgttagtagctataacatcattattattgtaaaaataattacacttagtatttaagtatacacttaccaaactttgtttttgattatgaagcttctttacacttcagagaaagtttaggcccatcaacaacttcatcttcaaagctctgagtttttgaaatgggttttgacaagaacacctcccagaaggataaatcttctgctcagaatctctttccaaggctgatatccagttgtcatataaatagtggaataaaaaagacagagaagggacagtgggccaggaacagagccgcataaaatgacagacagtaaatgaaaaggaatgtaatttagaatcgtcytaatgtgaaacagcatgcatcaagacaagtggagtgatagctctgtcagctttgctggcaaggtgacccccaaataagtcatgtctacttaatacaatgtgagcatcagttgtggcagcgccaagagcgacaactaactaaggcaaacacaacattgcacctggctcacagtatctccaagagtaatttgtaacactatttcaagtgattccaatagaacatgttgttctctgcataaatcatgcttttgggaaacaggttagggttcatggc

SEQ ID NO: 200078 - DNA, 492 bp, Homo sapiens
cccaccccctccctgcttacttctgatgccagttgcaagccttaggttattttgtctatgcttctgaccaactggctataaattagggtttacacaatcccctcctcaggttcaattaatttgctagagcagctcacagaactaaggaaaacactcacacttaccagattattgcaaaggatattgtaaaggatacaagtaaacagccagatgaagttatacatagggtaagatctggaagagtcacaagcacagaagcttctatcctggtggtgttggggcgcaccrccttcccagcatgtagatgagttcttatttaccttcctgtaggaatgtacatgttcagctatctagaacctctctgaacccagtcttttggggtttttatgaaagtttcactacataagcatgattattaaatcactggctattggcaataactttcagcccctctcttcttcctggaggctgagggtgagctgaaagtcccag

SEQ ID NO: 200079 - DNA, 492 bp, Homo sapiens
cccaccccctccctgcttacttctgatgccagttgcaagccttaggttattttgtctatgcttctgaccaactggctataaattagggtttacacaatcccctcctcaggttcaattaatttgctagagcagctcacagaactaaggaaaacactcacacttaccagattattgcaaaggatattgtaaaggatacaagtaaacagccagatgaagttatacatagggtaagatctggaagagtcacaagcacagaagcttctatcctggtggtgttggggcgcaccaccttcccagcatgtagatgagttcttatttaccttcctgtaggaatgtacatgttcagctatctagaacctctctgaacccagtcttttggggtttttatgaaagtttcactacataagcatgattattaaatcactggctattggcrataactttcagcccctctcttcttcctggaggctgagggtgagctgaaagtcccag

SEQ ID NO: 200080 - DNA, 586 bp, Homo sapiens
ggattaaaaaatcacaagccaaatatctgctatcttcaagagactcacctaacacgtaaggattcttatagattcaaggtaaaggagaggaaaaagatattccatccaaatagaaaccaaagcaaggaggagtcacttactttaaagcaataatagtaaaaaaaaaagamgcaaagaagattattacattacataacgatagaatataatgatagaatgattcctgcaacaagaagatattacaatccaaaatgcatatgcatctaattctggagatctcaaattaccactagacctgagaagagagatagagagccacacaataatagtgggggacttcagcattcactgacagcactagaaagattatccaggcagaaagtcagcaaagaaacaatgaacttaaacttcactctagaacaaatggatgtaacagatatttacagaacattctatccaagaactgcaaaatatacattcttctcatcagtatataaaacattctccaggatagagcatacaataggacacaaaacaagtcttaataaatttttaaaattgaaattataccaatatgattttatgg

SEQ ID NO: 200081 - DNA, 630 bp, Homo sapiens
atataaacattcttgaaaagatagtctggaacaaaatctgtcaattcctctgctcagaagatatgtagaaatgtgagagacccatggagaattttcttccaaagtaatctttcatctctccaggtcatggtaaactgccaaaatagtattatattttaaaaaacctccttatacttagcaaaaatacctgtaattgttctctattagctagacaaaatataaactccttagcagagcatcaagaagattaaatatyggtttcccaactaacctttataatcttaatcctaaaacttcccaacatgtatcattcataccaaccaatacaaacctttgtgctctttttcttgtttaactagttctatatttcattccttccagcctctctgtctcaaatgctatgcccatattaacaacttcattgatacaatgagacctatttgttcaggcattaaaccaaatggtacctctcacataagacatttttaaatgaatcccttccttctccagaactcttctagcacttttttttcccataactcaatttaagtatactttataaagttgtctatttgcattttctctctattagtgtgcaaaaaactagggcctatatctcaattttgtttt

SEQ ID NO: 200082 - DNA, 646 bp, Homo sapiens
ttaccttgggtgaggggtgggggtaggaaactggaggagaaatctaagatgaattttaaaagatgactgatgtgcatctacaggttggaacaggggctttccagaaagagagccacatgggccaatgtaccaagacctgccttgctctgaaaggtcacagagcacctttcagrccaaactaaaaatgtttatatgtatgatgaatgaaaaactgacaaagaatttaaagctagagagaaacatgatccattttgctttttaaaaagaactatggtttgattgttgtttttttccccccaagatggtagatgggaggcattgttagtatgcctctcccacttgcaaagacaaaatagagtgtagagattcacactgtgagctttttttccaagaagcaacacaggaacttaacaggaaaactgaaagaaagcacagatgctttgaaagaagctccctacatggagcatcaacattcttgcagatgaaaaaagggtctttctgatctgaatacccagaacactgggtcaggagtatgaatgacaggtggatgactatctagctggcctggcaggggagctgaggtggctccctcccttccccatgaaagctccccagccacctctgttaaggctgcaacatctgccaa

SEQ ID NO: 200083 - DNA, 646 bp, Homo sapiens
ttaccttgggtgaggggtgggggtaggaaactggaggagaaatctaagatgaattttaaaagatgactgatgtgcatctacaggttggaacaggggctttccagaaagagagccacatgggccaatgtaccaagacctgccttgctctgaaaggtcacagagcacctttcaggccaaactaaaaatgtttatatgtatgatgaatgaaaaactgacaaagaatttaaagctagagagaaacatgatccattttgctttttaaaaagaactatggtttgattgttgyttttttccccccaagatggtagatgggaggcattgttagtatgcctctcccacttgcaaagacaaaatagagtgtagagattcacactgtgagctttttttccaagaagcaacacaggaacttaacaggaaaactgaaagaaagcacagatgctttgaaagaagctccctacatggagcatcaacattcttgcagatgaaaaaagggtctttctgatctgaatacccagaacactgggtcaggagtatgaatgacaggtggatgactatctagctggcctggcaggggagctgaggtggctccctcccttccccatgaaagctccccagccacctctgttaaggctgcaacatctgccaa

SEQ ID NO: 200084 - DNA, 646 bp, Homo sapiens
ttaccttgggtgaggggtgggggtaggaaactggaggagaaatctaagatgaattttaaaagatgactgatgtgcatctacaggttggaacaggggctttccagaaagagagccacatgggccaatgtaccaagacctgccttgctctgaaaggtcacagagcacctttcaggccaaactaaaaatgtttatatgtatgatgaatgaaaaactgacaaagaatttaaagctagagagaaacatgatccattttgctttttaaaaagaactatggtttgattgttgttttyttccccccaagatggtagatgggaggcattgttagtatgcctctcccacttgcaaagacaaaatagagtgtagagattcacactgtgagctttttttccaagaagcaacacaggaacttaacaggaaaactgaaagaaagcacagatgctttgaaagaagctccctacatggagcatcaacattcttgcagatgaaaaaagggtctttctgatctgaatacccagaacactgggtcaggagtatgaatgacaggtggatgactatctagctggcctggcaggggagctgaggtggctccctcccttccccatgaaagctccccagccacctctgttaaggctgcaacatctgccaa

SEQ ID NO: 200085 - DNA, 646 bp, Homo sapiens
ttaccttgggtgaggggtgggggtaggaaactggaggagaaatctaagatgaattttaaaagatgactgatgtgcatctacaggttggaacaggggctttccagaaagagagccacatgggccaatgtaccaagacctgccttgctctgaaaggtcacagagcacctttcaggccaaactaaaaatgtttatatgtatgatgaatgaaaaactgacaaagaatttaaagctagagagaaacatgatccattttgctttttaaaaagaactatggtttgattgttgtttttttccccccaagatggtagatgggaggcattgttagtatgcctctcccacttgcaaagacaaaatagagtgtagagattcacactgtgagctttttttccaagaagcaacacaggaacttaacakgaaaactgaaagaaagcacagatgctttgaaagaagctccctacatggagcatcaacattcttgcagatgaaaaaagggtctttctgatctgaatacccagaacactgggtcaggagtatgaatgacaggtggatgactatctagctggcctggcaggggagctgaggtggctccctcccttccccatgaaagctccccagccacctctgttaaggctgcaacatctgccaa

SEQ ID NO: 200086 - DNA, 606 bp, Homo sapiens
caatgtataatcatcaaatatgggtagtcgggatacccatcacctcaaacacttatcattactttgtgttgggaacattccaattctactcttctagttattttgaaatatacaatgaactattgtcagctaaagtcgccctaagtgtttgtgctaccaaatactagatcatattccttctttctaactgtatttytgtacccattaagcaacctctctttatcccttcctctccactattcttcccagcctattttttggctcccacatatgagtaagaacatatgccatttgcctttgtgtctttggcttatttcacttaacgtaatgtcttccagttccattaatgttgttgcaaatgactgtatttcattctttttatggtgaaataatattccattgtgtatatataccacattttctttatctgtttatctgttaatgagcacttaggctgattccatatcttggctattgtgaatagtgctacaacttttgtattttttatgtagctcttttagtggataagaagagcactatttgggacctaatgaatatcacactcataattcattaccaaatgagaaaaatattcaactaagtaat

SEQ ID NO: 200087 - DNA, 576 bp, Homo sapiens
aacaattttcaaaagtcaaagaagcagtttatgaccttaaagcatttagcaaacttaacatctgacctgcataatttaaaccaaatatttacacttttgaagacattttaattttaccaataatcttttaaactgtctttacttmccaaagaatactaaagttacatgaactaaataaaaggcattatactttttacatttctgacaaaatatttgatttaagcacttattattattaaaccaattagttaaaactctttcacatataaacattacacacacaatacgtatataaaactacctagacagacagaagattactacagtagttgtaaaatttttcatttgccagttattaattttcttaattggattattggctttcagatggagtccttggaaaaacaggtccaggaaagggtctctggtgcctcctgttttttccaaggagtctcaggctgttagagcctgaatatctacttttaattaagctgacttttaaccataacactctttaataaagtccttttaaacattcttattacttgactttagccaggccaaatggccaatatt

SEQ ID NO: 200088 - DNA, 586 bp, Homo sapiens
ggattaaaaaatcacaagccaaatatctgctatcttcaagagactcacctaacacgtaaggattcttatagattcaaggtaaaggagaggaaaaagatattccatccaaatagaaaccaaagcaaggaggagtcacttactttaaagcaataatagtaaaaaaaaaagacgcaaagaagattattacattacataacgatagaatataatgatagaatgattcctgcaacaagaagatattacaatccaaaatgcatatgcatctaattctggagatctcaaattaccactagacctgagaagagagatagagagccacacaataatagtgggggacttcagcattcactgacagcactagaaagattatccaggcagaaagtcagcaaagaaacaatgaacttaaacttcactctagaacaaatggatgtaacagatatttacagaacattctatccaagaactgcaaaatatacattcttctcatcagtatataaaacattctccargatagagcatacaataggacacaaaacaagtcttaataaatttttaaaattgaaattataccaatatgattttatgg

SEQ ID NO: 200089 - DNA, 582 bp, Homo sapiens
  misc_feature (1)...(582): n = A,T,C or G
ataatgtaaatcctagggaggcagattttgtttcaaattaagaaataacatactaatcatcagacttgcatataagcaggatgggcaaaaattagtaaactttcacctctttaatatttyatttgagggtagatgaccataaatataaaatatgtttatcagtgagaagtcagattaagtgacctataaaattcaagcctctcctaagattctgtgaatttccatgacatgcatatattcagaaggaaaaagtagtaagagcactccaaggatggaaactgatgcaaaggcaggaaggcagttgttcaagggaccctgagtacacaaacctggctggactagagtttactctttagagagtagtacttagtaaagttaaaatattaggtaggatccagagagtagaagaccttcaatgcctacccatattttgactttanagaaaaaaggaggggatagtatactgatttaaaaaataacagactggtcagacagatctgggttcaaattccaacccatcacttggtagctgttagacctccctaaaacccaatatccttatctgtaaaatagggttaatga

SEQ ID NO: 200090 - DNA, 404 bp, Homo sapiens
aaattccaacccatcacttggtagctgttagacctccctaaaacccaatatccttatctgtaaaatagggttaatgaggataatgatattayccatccacagggttgttgtgggtattaaatgagctactggatataacacctgctacatagtagcaattaatgttagctattaccatttttatgagacagagaagtggtggaggctgagaaagaaaaaaagagaggtggatgtggttgctcacgcttgcaatcccagcaatttgggaggccaaggcaggaggatcacttgaggtcaggaatttgagaccagtctaggcaacatagtaagacccctctctctacaaaaatgataattttttaaaaggtagccaggcatggtggtgtgtgcttgtggtcctaact

SEQ ID NO: 200091 - DNA, 619 bp, Homo sapiens
cttgtaccccttccccttttgaaatccttaataaaacttgctggctttatggctcaggtgggcatcacggtcctactgatgtaatgtcaccccyggcagcccagctgtaaaattcttctctttgtactgtttctctttatttctcagccagctgacacttatggaaaatagaacctacgttgaaatactgggggcacgttcccccaatactatattaatggtgtttattgtattgagtgttgacatggtttagctgtgtcctcacccaaatttcatcttgaattgtatctcccatgggacccagtgggagataactgaatcatgcgggtggttcccccatactgttcttgtggtagtgaataattctcatgagatctgatggttttataaggagaaacccctttcacttggctcccactctctcttgcctgccaccatgtaagatgggactttcatcttccaccatgattgtgaggcctccccagccacatagaactgtgagtctattaaacctctttttatttataaattaccagtctcaggtatgtctttatcagcagtgtgaaaacagactgatacaagtgttaagtgtacactcaatgtgtctccatgattgcat

SEQ ID NO: 200092 - DNA, 619 bp, Homo sapiens
cttgtaccccttccccttttgaaatccttaataaaacttgctggctttatggctcaggtgggcatcacggtcctactgatgtaatgtcacccctggcagcccagctgtaaaattcttctctttgtactgtttctctttatttctcagccagctgacacttatggaaaatagaacctacgttgaaatactgggggcacgttcccccaatactatattaatggtgtttattgtattgagtgttgacatggtttagctgtgtcctcacccaaatttcatcttgaattgtatctcccatgggacccagtgggagataactgaatcatgcgggtggttcccccatactgttcttgtggtagtgaataattctcatgagatctgatggttttataaggagaaacccctttcacttggctcccactctctcttgcctgccaccatgtaagatgggactttcatcttcsaccatgattgtgaggcctccccagccacatagaactgtgagtctattaaacctctttttatttataaattaccagtctcaggtatgtctttatcagcagtgtgaaaacagactgatacaagtgttaagtgtacactcaatgtgtctccatgattgcat

SEQ ID NO: 200093 - DNA, 617 bp, Homo sapiens
cttcagtctcagcccttctccttcctctttattctttgaattccatgtgaatgtcagttccttgcaaatatccactgattccctmgaatttaatctttccttttctgtgcatcataggagttggtatgtatgttgaagatgctgcattcggctgcacagcactcaagctacgtgaataaaggcagctagctaccttgattaattcatagatctcatatcactagtgtaattatgggttaacttctctttctcccttttagatgataagaactttctccctcttcagggtcacgaacagagctggagtctctttcacctttataatccaatcataaagcaaagctcccagtaaggcttgtctccttgtagaatgttgcaaagctaaataaatcataacaaataacagatagagcttgaaaaacaagtttaccttctatatgggcaatgaatggccacacataacttaaattggagttctattgaaaagattccatttcttgtcacattctcactaaaaattagtgggcaaagtttaatagacttttctaattctaccaatcactggggaattctagttcacaattatttaaggactgagtttttaatggttcccagct

SEQ ID NO: 200094 - DNA, 480 bp, Homo sapiens
atctttccttttctgtgcatcataggagttggtatgtatgttgaagatgctgcattcggctgcacagcactcaagctacgtgaataaaggcagctagctaccttgattaattcatagatctcatatcactagtgtaattatgggttaacttctctttctcccttttagatgataagaactttctccctcttcagggtcacgaacagagctggagtctctttcacctttataatccaatcataaagcaaagctcccagtaaggcttgtctccttgtagaatgttgcaaagctaaataaatcataacaaataacagatagagcttgaaaaacaagtttaccttctatatgggcaatgaatggccacacataacttaaattggagttctattgaaaagattccatttcttgtcacattctcactaaaaattagtgggcaaagtttaatagacttttctaattcyaccaatcactggggaattc

SEQ ID NO: 200095 - DNA, 613 bp, Homo sapiens
ctactttactgttcacacaggacacttttgacaccagatgtaggtttcccacaccaagtaattctgacactaactgcctggagttagcacagaccccacaggccaagggctcagtcccacaagactacccattcccttcccacttcagatgcaaatcacaagggtgtttctccaggtaactgaatacttgtatctgacttgactacaaatcagaggttcccaggacccccctcctcaggcttgatcatttgctaaaacagctcacaaaactcaggaaaatagtttatttactagattactagtttattacaaaagatatattaaataatacaaacgaacatccagatgaagaaatacatagggtgaagtccagaaggatctcaagcacaggagtttctgttcccatggagttttggagcrtgccaccttgctggcacatagtgtgctcttgttcaccaacctggaagctctctgaaccctatccttttgggttatcatggaggcttcaatttgtagtcatgattgattaaatcattggccattggtgattaagtcaatctctagtccctcttccattttcagaggttggagtagagatgaaagttcctaatct

SEQ ID NO: 200096 - DNA, 518 bp, Homo sapiens
taccagacctttgtttctaaatgcccataccataggcaggcaatcaaacytattatgactagactgggactgctatggtctgaatttttgtgttccacaaaattcacatgttgaaatcttatctcctaaggtgatggtattagaaggtgaggtctttggggaggtcatgaaggcagagtcctcatgagtgggattagtcgtgttataaaataggcccaagggagcgttatttgccccttccaccatgtgaggacacagcaagaaggcatcatctatgaccaagggagtgggctctcatcggacagtgaatctgatggcatcttgatctgaatttcccagccttcagactgtgagaaataaatttcttttgtttataagccacctaggttatggcatttcgtatcgcaacctaaataaactagtgcaggaactaatgacgctatgtgccccttcatgcaatataaagtaaaatagacaaaatccatctactaagcatgtttgccaaaattatttaatct

SEQ ID NO: 200097 - DNA, 518 bp, Homo sapiens
taccagacctttgtttctaaatgcccataccataggcaggcaatcaaacctattatgactagactgggactgctatggtctgaatttttgtgttccacaaaattcacatgttgaaatcttatctcctaaggtgatggtattagaaggtgaggtctttggggaggtcatgaaggcagagtcctcatgagtgggattagtcgtgttataaaataggcccaagggagcgttatttgccccttccaccatgtgaggacacagcaagaaggcatcatctatgaccaagggagtgggctctcatcggacagtgaatctgatggcatcttgatctgaatttcccagccttcagactgtgagaaataaatttyttttgtttataagccacctaggttatggcatttcgtatcgcaacctaaataaactagtgcaggaactaatgacgctatgtgccccttcatgcaatataaagtaaaatagacaaaatccatctactaagcatgtttgccaaaattatttaatct

SEQ ID NO: 200098 - DNA, 527 bp, Homo sapiens
gtacctctatgagtatgtaacaactacagtgttattgggcctagggggtctcctaaagcagatacagattgaatcacaacaccaagtcctttakagtatctggaaagccttcccaagaagaatgagtacaaacaagcccagactacaaagactataataaatacctaactcttcaatgcccatatatagacaaacatctacaagtatcaagacaatccaggaaaacaggaccttaccaaataaactaaataaggcaccaaggaccaatcctggtgaaacagaaatatgtgacctttcaggcagaaaattcaaaattgctgctttgagcaaatccaaagaaattcaaggtaacacagagaaggaattcagaagtctatccagtaagtttaagaaagagatcaaaataattaagaagaatcaagcagaaattctggagctgaaaaatacaattggcatactgaagaatgcatcagagtttcttaatagtagaattggtcaagcagaagaaagaatttgggagtttgaag

SEQ ID NO: 200099 - DNA, 414 bp, Homo sapiens
ctggttattaatctcttctcagatgggtagtctgaaaacatctcccattctgtgggttgtctcttcactttgttgattgtttcctttgctgtacagaagcttttwaacttgatgtgatcccatttgtcaattgttgctttggttgcctgtttttgtggggtattactcaagaaatttttgctcagaccaatgtcctggagattttccccagtgttttcttccagtagtttcatagtttgatggcttagatttaagcctttaatccattttggtttgatttttgtatatgttgagaaataggggtctagtttcattcttctgtgtatggatatccagtttgcccagcactatttcttgaagagaccatcttttccccagtgtatcttcttggtacttttgtcgaaaatgagttca

SEQ ID NO: 200100 - DNA, 415 bp, Homo sapiens
tctggttattaatctcttctcagatgggtagtctgaaaacatctcccattctgtgggttgtctcttcactttgttgattgtttcctttgctgtacagaagctttttaacttgatgtgatcccatttgtcaattgttgctttggttgcctgtttttgtggggtattactcaagaaatttttgctcagaccaatgtcctggagattttccccagtgttttcttccagtagtttcatagtttgatggcttagatttaagcctttaatccattttggtttgatttttgtatatgttgagaaataggggtctagtttcattcttctgtgtatggatatccagtttgcccagcactatttcttgaagagaccatcttttccccagtgtatcttcttggyacttttgtcgaaaatgagttca

SEQ ID NO: 200101 - DNA, 612 bp, Homo sapiens
tctcacctctttgtaaacttgttttccattatagctttggcatggtctctgcttatctagacaggcacataattcaggatagtgttgaaaattatttccccaatcagcagctccattgaccaaaccrcagcatttaaactgtttgataaaaggtagaatgagaagcagtcagtaagaagattaaaaacattggcaatacattaaattatagtcttctgaaatcattattaaaggttattatgctaaaataccatgtaagtcacctttcacctttctctgtgtagaagtaaaaattaaggatttttgcattttgatctttacattaatgatggaaaaatggagttgcagactcaaaaatctgaagaagttgggaagatgaaaaactcacctactaggttttttatttttatttttttgagatggagtcttgctctgtcaccaggctggagtgcagtgacgcgatctcggctcactgcaacctccaactccctggttcaagggattctcctacctcagcctcccgagtagctgggattacaggcatgctgcaccaccacgcccagctaatttttgtatttttagcagagaccgcgttttaccatgttggccagg

SEQ ID NO: 200102 - DNA, 612 bp, Homo sapiens
tctcacctctttgtaaacttgttttccattatagctttggcatggtctctgcttatctagacaggcacataattcaggatagtgttgaaaattatttccccaatcagcagctccattgaccaaaccgcagcatttaaactgtttgataaaaggtagaatgagaagcagtcagtaagaagattaaaaacattggcaatacattaaattatartcttctgaaatcattattaaaggttattatgctaaaataccatgtaagtcacctttcacctttctctgtgtagaagtaaaaattaaggatttttgcattttgatctttacattaatgatggaaaaatggagttgcagactcaaaaatctgaagaagttgggaagatgaaaaactcacctactaggttttttatttttatttttttgagatggagtcttgctctgtcaccaggctggagtgcagtgacgcgatctcggctcactgcaacctccaactccctggttcaagggattctcctacctcagcctcccgagtagctgggattacaggcatgctgcaccaccacgcccagctaatttttgtatttttagcagagaccgcgttttaccatgttggccagg

SEQ ID NO: 200103 - DNA, 612 bp, Homo sapiens
tctcacctctttgtaaacttgttttccattatagctttggcatggtctctgcttatctagacaggcacataattcaggatagtgttgaaaattatttccccaatcagcagctccattgaccaaaccgcagcatttaaactgtttgataaaaggtagaatgagaagcagtcagtaagaagattaaaaacattggcaatacattaaattatagtcttctgaaatcattattaaaggttattatgytaaaataccatgtaagtcacctttcacctttctctgtgtagaagtaaaaattaaggatttttgcattttgatctttacattaatgatggaaaaatggagttgcagactcaaaaatctgaagaagttgggaagatgaaaaactcacctactaggttttttatttttatttttttgagatggagtcttgctctgtcaccaggctggagtgcagtgacgcgatctcggctcactgcaacctccaactccctggttcaagggattctcctacctcagcctcccgagtagctgggattacaggcatgctgcaccaccacgcccagctaatttttgtatttttagcagagaccgcgttttaccatgttggccagg

SEQ ID NO: 200104 - DNA, 612 bp, Homo sapiens
tctcacctctttgtaaacttgttttccattatagctttggcatggtctctgcttatctagacaggcacataattcaggatagtgttgaaaattatttccccaatcagcagctccattgaccaaaccgcagcatttaaactgtttgataaaaggtagaatgagaagcagtcagtaagaagattaaaaacattggcaatacattaaattatagtcttctgaaatcattattaaaggttattatgctaaaataccatgtaagtcacctttcacctttctctgtgtagaagtaaaaattaaggatttttgcattttgatctttacattaatgatggaaaaatggagttgcagactcaaaaatctgaagaagttgggaagatgaaaaactcacctactaggttttttatttttatttttttgagatggagtcttgctctgtcaccaggctggagtgcagtgacgcratctcggctcactgcaacctccaactccctggttcaagggattctcctacctcagcctcccgagtagctgggattacaggcatgctgcaccaccacgcccagctaatttttgtatttttagcagagaccgcgttttaccatgttggccagg

SEQ ID NO: 200105 - DNA, 576 bp, Homo sapiens
gatgaaaaactcacctactaggttttttatttttatttttttgagatggagtcttgctctgtcaccaggctggagtgcagtgacgcgatctcggctcactgcaacctccaactccctggttcaagggattctcctacctcagcctcccgagtagctgggattacaggcatgctgcaccaccacgcccagctaatttttgtatttttagcagagaccgcgttttaccatgttggccaggattgtctcaatctcctgacctcgtgatctgtccacctcagcctcccaaagtgctgggattccaggcataagccacggtgcccagcctcacctactagtttttaatgacaaaagagagtcagatctctgtaayttagatattgtcaaaaaagtttccaaagaattcacaagagagtcaaagaattgttgctcaaaagagacatgaagttttaaaagtgaaatttccactccatgatctctgatcacttttgaaagacaggaggaaaaaaatgagagatattgcaaagacccaaatagatgctcaaggagcctcccataagattgaattttatgaacatc

SEQ ID NO: 200106 - DNA, 391 bp, Homo sapiens
ctcacttgcttacagcagctgtgctccctctcattactttccagatgaagtcctttgcacataagcacatattcacaatctgatttctgttcggactttagaaaaagattctctactgttttctctcactgttaggatgtcatggatattaagttaccctcctgaattaatgcaagcttttcaaggaaaaacaaaaacaaaaaaacaaaaagagtggctttttggtttttgcttttgaaacaaggatgccaaaatgcactgacaccactgtagttaatatgtggtttgtaattttcccaagttggattcttcctggtcasgcagaggccccttttaattgctgtgagcaaatgtctaaacagagagagcttctctagagatgactgttttt

SEQ ID NO: 200107 - DNA, 391 bp, Homo sapiens
ctcacttgcttacagcagctgtgctccctctcattactttccagatgaagtcctttgcacataagcacatattcacaatctgatttctgttcggactttagaaaaagattctctactgttttctctcactgttaggatgtcatggatattaagttaccctcctgaattaatgcaagcttttcaaggaaaaacaaaaacaaaaaaacaaaaagagtggctttttggtttttgcttttgaaacaaggatgccaaaatgcactgacaccactgtagttaatatgtggtttgtaattttcccaagttggattcttcctggtcacscagaggccccttttaattgctgtgagcaaatgtctaaacagagagagcttctctagagatgactgttttt

SEQ ID NO: 200108 - DNA, 568 bp, Homo sapiens
ttaattagtttacctcctataactgtgagaaagtaggaagtgttttcctgatggaagcatgtaattagttcttttatgtgttgacagtttcaaactacaatctaggaaagcttcctttagcctaagggagaaagtgggctcaagtagcatcttggtgtcatgtggtgaaggaaaggatcagtcctctggsaagtggctgtgcaggtcaccagaaagtgattgtctgtgatctgggagagctaggaccttctgcttctgctgctaccacagggcaagttaggatgaagggttcttcaagcagtggaaccctaggtaggtagctttcactgtcccctgagcctcacatccaaagaagtctaagagagctctggacttcatctggaaagtaatgagagggagcacagctgctgtaatcaagtgagtgcacagattgaattggattcactatagtgccactttgatcaattgccaccttgactccgaaacttaggtttttgttattgtttctgtttttaagagacagggtctcactctgttgcccaggctggaatgcagtgctttaatcatg

SEQ ID NO: 200109 - DNA, 571 bp, Homo sapiens
tgatggtactatgactaagaaaacatgactcaataaactcagttgtttttctctgccttcagattttaagagaaagaggcaaaaggtgtctttatttatactataaatagtgtaactttataacagagttatttaaaattcaaaagccaagcaaataactttataggtgtatattatatgtgtatcccctaaccttgaagggcaaacacacacacacacayacacacacacacacacacacacacacacacacacgctctggcacatggcaatacttaataatgatttcttaagtgaataaatcttaagtgaataaatctttctttatatactgggctgactcccctataccttctcaatcttttagcatcattatactttttatatatacttattattaatgtccagcatgtcaaagttaatcataatggctaacacatacttacttaggattattattgttaccaaactatatatatgtggatatataaatatttctacacaataaccctaagggtctaagagttagatactactattattttggtttgaaagataagactgaagcata

SEQ ID NO: 200110 - DNA, 509 bp, Homo sapiens
acaggtgtgccatttaaaaaaatcattaatactgtatttttacctttttctatgttcagatacacaaatacttatgtgttatggtaacttaaccgtattcgctataataacatgctgtacaggcttgtatcctaggagaaatagrctatgacatatagcttaggtgtgtggtaagttatgccatctaggtttgtggaagtgactctaccatgttcacatgatgaggagctcacttaacaatacatttctcaggatgtattcctatggttaagtgacacacacagtgctctcaatgtttttttctattgcttccttcacatactaatttttcacataattggtaaattgaactacctcagtttaactgcattcttaaaaaaagaagaatgctgcagtaagcaaaataagatcgaaccagaaaattaaaccagaagatcaaatctattttcactgagttgataactacttttcatcctcatttactcctgagctttggcatccagcttgtt

SEQ ID NO: 200111 - DNA, 545 bp, Homo sapiens
aaacaaatatcctctcaagtgtattagtaagtgtgaaactttttatcaataccacatctcatatgttgggtgttaagggtggtatattagaaggcagctttcagttaaacttacaaaggattgtttttgtcttcaatgcaattattaaatgatttgtcaatttttttctaaagggacatacttatatacgtatttggtaaatttgtaataaaatagaattsataaatgatttacaccaacctgtataggaatacactgacagtattcattactggaggactagagagaatgttaaaggaaaattaaaagattaaacaaggaactgtgatggaaacaaacagaagagagaaagagaatgaagaataaagaaagaagagaaaaaagataagacttcagaaagtgatcaggaaatagcagctttacatgttcatttgtatctgtgttttcctaatggtgaagttagaattgttccatgtgatctaattcattctattaataaaatataatgatttaagacattagaaatagagagtggaagcatttta

SEQ ID NO: 200112 - DNA, 549 bp, Homo sapiens
tttttaaaaaagcttctaaactatggggaacagcttaattcaggaatttcttttgaagtgaaaaagcacagctgaaaatctggggcataatttccatctcaagtagctctcccaagaatgagggaccccaaaatttgctctaattggctctacagttggtgacttgcatgctgtatctttgacgtagaaatgatagacaggacctgtgtgcattaccaatagaaagtttcctcccccaccagccccttttgaagggaggatggaggarggcaaagtgacatttatgctgagtcaacttaaatgcttctactgtgttgagactttctgcttactaacactttcctggaaatgtaattcaaatgagaactgctaaccaatctttcttccttcttaaaaaggttgacaccaattctctgcaaaagtaataatttccattcaaaatgtgctacaattgaagactgaaatttagtctttttgtcttgatcctgagccttaagtctgtgggacaagtatcaagaaagaatttttttaatggggaaaaaataatgg

SEQ ID NO: 200113 - DNA, 602 bp, Homo sapiens
gagcactaatcccattcttaaaggcttcatctttatgatcttatcccctcacaaaggccctacctcttaataccatcacctcagaagttaagatttcaatatatgaattttgggagaacacattcagaccatagccatcttataaatagaaaaccttaaagactataattaaaaactattaaaactaataaatgaattccggaaagttataggatacaaattcaacatacaaaaaacagttgtgtaattatacacctayaacaaatgatctgaaaagaaaattgggaaaacaatctcatttacagtggcacctaaaataataaaatactaggaataaacttaaacaaggggtgaaagactcatataccaaaaacttcaaaactttgatgaagaaaaggaacttaacacaaatagaaagacatcttgtgttaatagactgaaagatttaatattgttgaaatgtccatactacccataatgatttatagattcaacagaatccttatcaaaattccagtggcattttttacagaaatagaaaaaaaaagacactaaaattcttatgaaaccaccaaagaccatgaatagccaactcaatcttt

SEQ ID NO: 200114 - DNA, 370 bp, Homo sapiens
ttaagttgagcctgaaacagcctacctcaaagacctctcttgggtggcttagtaattttatctttttctactcaggccatctacatagttacgcagaataaactcacatcatttcttttgcacatttggcttcactcctttggggcaaatttactccttgaataaaacagaattgtaatgggtgtctgagatacttgatgatttaaaaggaaacaaaayatacactccatgttcaacatgcattaggtcattggcatttttgcataatgatttcataaaaatatagccatgtgcgggactgaaaataaatttatttaagtttcactcagtaaaaaagcattcaaggaagtaattcaaagagtttaaaata

SEQ ID NO: 200115 - DNA, 542 bp, Homo sapiens
aaacatggcacaaccctgtctccacaaaaaatacaaaaattagccaggcctggtgatgcacacttgtagtcccagctacttggggggctaaggtggggggatcacctgagcctgggagatygaggctgcagtgagccatgattgcaccactgcactcttgcctgggcgacagagaacctgtctcaaaaaaaaaaaaaaaaaaaaaaaaaaaaaaagaacacaatatttctgaacactgacctggagttctgtaagagggggtttggggaacactggacccacatggctctgtgacataccaaagaaacaatatctcacacatcatcttataaagccctcttttcctgtaacctcacccttgtggctattctttgagctaattacacaaaagttgtttgttcggtagtttttttttggtaacaccgacataagatcagcaatataagagatactttcaaagcatacttaatactcaaatatcttctgtacctttgctcatgactatgaatacagcaggtaaaagtacacttaaagaccatgtt

SEQ ID NO: 200116 - DNA, 542 bp, Homo sapiens
aaacatggcacaaccctgtctccacaaaaaatacaaaaattagccaggcctggtgatgcacacttgtagtcccagctacttggggggctaaggtggggggatcacctgagcctgggagattgaggctgcagtgagccatgattgcaccactgcactcttgcctgggcgacagagaacctgtctcaaaaaaaaaaaaaaaaaaaaaaaaaaaaaaagaacacaatatttctgaacactgacctggagttctgtaagagggggtttggggaacactggacccacatggctctgtgacataccaaagaaacaatatctcacacatcatcttataaagccctcttttcctgtaacctcacccttgtggctattctttgagctaattacacaaaagttgtttgttcggtagtttttttttggtaacaccgacataagatcagcaatataagagatactttcaaagcatacttaatactcaaatatcttctgtacctttgctcatgaytatgaatacagcaggtaaaagtacacttaaagaccatgtt

SEQ ID NO: 200117 - DNA, 520 bp, Homo sapiens
cgaattctcaccaatttggggtatttaaaacaaacaccagctcacaggtcagaagttctgctaggccaagtgactgcctcctgctcagagtcccacgagggacctccaggatgggtctggctgtgcggtcgttgcctccacctgagaagggtctggcttcgatccgattcgagttggtggcagrattcaacaatgcctcagggttgtgagccccaggcccacttgtttgttctgcctgctgccgtgaggatgctctcagctcctacccgtgctgcccaggtctgggccgtgaggctccctgggtgtgcacagccagtgctggggaatctcccacaggggagcgtaatcacaggggggttcagtcctcccttatacagggctcagatgactgcattagacccagcccttagcagccgttggttcaggataccccctaatctaatcaggaagtcgggcgggcacatcaattcgtgcttccgcccacacccaagggaggggcagacacagggcgactctctga

SEQ ID NO: 200118 - DNA, 520 bp, Homo sapiens
cgaattctcaccaatttggggtatttaaaacaaacaccagctcacaggtcagaagttctgctaggccaagtgactgcctcctgctcagagtcccacgagggacctccaggatgggtctggctgtgcggtcgttgcctccacctgagaagggtctggcttcgatccgattcgagttggtggcagaattcaacaatgcctcagggttgygagccccaggcccacttgtttgttctgcctgctgccgtgaggatgctctcagctcctacccgtgctgcccaggtctgggccgtgaggctccctgggtgtgcacagccagtgctggggaatctcccacaggggagcgtaatcacaggggggttcagtcctcccttatacagggctcagatgactgcattagacccagcccttagcagccgttggttcaggataccccctaatctaatcaggaagtcgggcgggcacatcaattcgtgcttccgcccacacccaagggaggggcagacacagggcgactctctga

SEQ ID NO: 200119 - DNA, 573 bp, Homo sapiens
tcactgaaccactgaacccaggtcacagctgataccttcatatttctggctccatgagaaaaaataaagcaaacaaaaacaaacaaacaatcaaacaatacacatacaaaaggcccctattttggtacactattaacaggcttctctgatacttgtagtagaaatttaatacccttgtatgcaatgcacggaccatgcacagaacaggaaatcccatgacaatcaatactcacaaaataagttcatattcctgttttaaaaggagagctacttttgtagaaaatctttaggttcacagcaaaatcaggcagaaggagcagagatttcccacatcctctttccccacatatgcatagcccccttcactatcaactttctgctccagagtagtatgttggttacagtcattcaacctgcacggacacagcactctgactccaagaccatagctctccttagggactcacttgggtgttgtacgttctatggactcgagcaaaggtgtaattacatgtatcyaccgttattgtattctgtggagtagttttacttctgtacaaatgcactgtgtcc

SEQ ID NO: 200120 - DNA, 205 bp, Homo sapiens
gaattctgaaatgccccctgcatttcccgcccctcagagagtcgccctgtgtctgcccctcccttgggtgtgggcggaagcacgaattgatgtgcccgcccgacttcctsattagattggggggtatcctgaaccaacggctgctaagggctgggtctaatgcagtcatctgagccctgtataagggaggactgaacccccctgt

SEQ ID NO: 200121 - DNA, 205 bp, Homo sapiens
gaattctgaaatgccccctgcatttcccgcccctcagagagtcgccctgtgtctgcccctcccttgggtgtgggcggaagcacgaattgatgtgcccgcccgacttcctcattagattrgggggtatcctgaaccaacggctgctaagggctgggtctaatgcagtcatctgagccctgtataagggaggactgaacccccctgt

SEQ ID NO: 200122 - DNA, 531 bp, Homo sapiens
aagcctggtgtagctctgtcttagcttgtaggcttatgtctgggttccagtaattggagcttgcagaaatgtttccccgattgttgttcttctgtagaatttcaacgctcatatgtatttttgtgagtcaccacgaaaacagttaaactgatcaaccgttttccaaactgcagacaccaaaatgaaatcacaaagcactttctttttttcccctaagttgactcttctattcctgcctgctgtgctttatgtcagcaagtgaccctttcctgtattataatgcagtatagtatagatgcatcatgtaagaccagagagaaaccgattccaaaaccacctttcctcaagccgccgtttgtaacgaccatatgggcggtttgaaggacacagagagagcctattgacacttcactttcgctacacgtggtgatttttccagtgcttccggagacactgaaatttagttccaaacattgccttagaggattcttsattttattcattctaccgatgatccactcagaaaatcaa

SEQ ID NO: 200123 - DNA, 510 bp, Homo sapiens
tagcttgtaggcttatgtctgggttccagtaattggagcttgcagaaatgtttccccgattgttgttcttctgcagaatttcaacgctcatatgtatttttgtgagtcaccacgaaaacagttaaactgatcaaccgttttccaaactgcagacaccaaattgaaatcacaaagcactttctttttttcccctaagttgactcttctattcctgcctgctgtgctttatgtcagcaagtgaccctttcctgtattataatgcagtatagtatagatgcatcatgtaagaccagagagaaaccgattccaaaaccacctttcctcaagccgccgtttgtaacgaccatatgggcggtttgaaggacacagagagagcctaytgacacttcactttcgctacacgtggtgatttttccagtgcttccggagacactgaaatttagttccaaacattgccttagaggattcttcattttattcattctaccgatgatccactcagaaaatcaa

SEQ ID NO: 200124 - DNA, 496 bp, Homo sapiens
gaattcacagctcgtgaggacattctttagttcggctgaagccaaaaaacctggaaccatcgaaatgggaagaagtggagtctgccaaattctgcctcttacactttcagctaccacgccatgttcaactattgtacttgataaggattggaaacttaaggtactgataatttcagcagagtttcaccagagtagtatttcttgtgagaaagccatratctcatcagtaacgcctttctaaaagatccaacagaaaatatgaactagcaactcatcctgacaaggaagtaaaactcaggaaaaatcctaaggcagagcagcgtcaggcttcagtgtgaaactatcatagtctgggcgcggtggctcacgcctatagtcccttcactttgggaagccaaggtggggcagatcacctgaagtcagcagttcaagaccagcctgggcaaaatggcgagacctcgtctctacttgagcaaatacaaaaatttgcccggcg

SEQ ID NO: 200125 - DNA, 496 bp, Homo sapiens
gaattcacagctcgtgaggacattctttagttcggctgaagccaaaaaacctggaaccatcgaaatgggaagaagtggagtctgccaaattctgcctcttacactttcagctaccacgccatgttcaactattgtacttgataaggattggaaacttaaggtactgataatttcagcagagtttcaccagagtagtatttcttgtgagaaagccataatctcatcagtaacgcctttctaaaagatccaacasaaaatatgaactagcaactcatcctgacaaggaagtaaaactcaggaaaaatcctaaggcagagcagcgtcaggcttcagtgtgaaactatcatagtctgggcgcggtggctcacgcctatagtcccttcactttgggaagccaaggtggggcagatcacctgaagtcagcagttcaagaccagcctgggcaaaatggcgagacctcgtctctacttgagcaaatacaaaaatttgcccggcg

SEQ ID NO: 200126 - DNA, 439 bp, Homo sapiens
gaagtgtgtcgccggtcagcgttcccgagagcacgcgttgcgggtctgatgcgggctatcactggcagttcggtgtcggagaacgcggccattgccatggctggaatagccaagctctttgttggagaggtggtggaagaggccctggacgtgtgtgagatgtggggagagacgcccccgctgcagcscaagcatttaagggaggccgttcgcaggttaaagcccaagggcctcttccccaacagcaactgcaaaagaatcatgttctaggcccacggccagagggcagggtctgtttgtgcaggaataagtaacgcgttcatcttccaatgacaggagtgtgtgcgccggagctcccgcatctcagtcccacctggatttacccacgatcttcgtgtcttaaaatgcgaagttgcccttacctggatgaagacagcag

SEQ ID NO: 200127 - DNA, 439 bp, Homo sapiens
gaagtgtgtcgccggtcagcgttcccgagagcacgcgttgcgggtctgatgcgggctatcactggcagttcggtgtcggagaacgcggccattgccatggctggaatagccaagctctttgttggagaggtggtggaagaggccctggacgtgtgtgagatgtggggagagacgcccccgctgcagcccaagcatttaagggaggccgttcgcaggttaaagcccaagggcctcttccccaacagcaactgcaaaagaatcatgttctaggcccacggccagagggcagggtctgtttgtgcaggaataagtamcgcgttcatcttccaatgacaggagtgtgtgcgccggagctcccgcatctcagtcccacctggatttacccacgatcttcgtgtcttaaaatgcgaagttgcccttacctggatgaagacagcag

SEQ ID NO: 200128 - DNA, 529 bp, Homo sapiens
tattcattctaccgatgatccactcagaaaatcaaacctgagtacggagacattggagaagtcgttaaagtattggaccaagtcggttcgtcacgagtgacaaagttattccacactctacttgtacatactctgctttgccttcakgatggcaaagagtaatttttcgctatagagtaaaaacccgagatttattacggaatcagcgtgaaccttcccagcacagctcacagagcatacgccaaaaattacagtgtgattcagtttcaaaaattgtctgtagtgacctgtgaattcacagctcgtgaggacattctttagttcggctgaagccaaaaaacctggaaccatcgaaatgggaagaagtggagtctgccaaattctgcctcttaaactttcagctaccacgccatgttcaactattgtacttgataaggattggaaacttaaggtactgataatttcaacagagtttcaccagagtagtatttcttgtgagaaagccatgatctcatcagtaacgcctttc

SEQ ID NO: 200129 - DNA, 554 bp, Homo sapiens
caaactctcactttcaaatgaaacacgtcatatattataaacttattttccttccttagtaaaatacacaaacatgattcaaagttttcttgatagctgaagatcataattctgagccactatttctttatataatatttctttatataatatttctttatataatatttatatattatataatatttatatattatatattatatattgtatataatattatataatataatatttctgtaatataatcagcccttcgtgggccatgacgtgtagcatggtgactttctacacagcaaaatagttcyggttttcttctcctcagacctgacaccccctcttccctgtcactgcctgctagtcactgatagcctaagaaaattacagtctccatctgcagccaatcagccaccacacttgtacctttccactaggctaggctgcttttattttattttgacttattttattctgtttctgctccccttctccaagcttccttcccttcacttctggtctttcagctctcaggctggctctagctgaaggctgtc

SEQ ID NO: 200130 - DNA, 551 bp, Homo sapiens
aagtgatgtgttcttcactctgtctggaatgctcttatctgaaatacagacatggctcttttatttattttgggtcactgttcagattttctgagcctgagactttcatttagaaaatgacacaccactatcactctccaagtcttttactttgctttttgcttttcttatataatcatatgggtgggtggtgtatatatagatatttattgtgtgtatataaatttatatataaatatctatatatacacacacacatatcaatttgctgtggttatttatttayattcttgtcaccccaaaataaaaattctttttacatagaaacctaagtgtattttaattttgttctacctattctgaaatcctcagctcccaaaataacgcatggtacacagtaggagctcaatagacgaaaaaatccagttttgaataaaattatcataatcattacagaaggtgaagaggcagcaggcatacttcacttggccagagcaagaggaagagagtagggggagggaggtgccacacactttccaacaactagatct

SEQ ID NO: 200131 - DNA, 579 bp, Homo sapiens
ggaatcgtgactgtcatatgtatatcttgccgtaagtgggatggtgactcatttctggactcagctcacaggaatagtgatgactctgatacctggaccaagccagtaagagagatgttgactctggtagctagayttaggggtctgggtcttttacttgtaggaaggcaacagaagattatgaaacttacacatatggtataaagctcttggggaatacagagtgtcattacagggcccagtccacaggtgagattgtaaccctcctatatacatctggccaacaatttgaattgccaccttcacatatagaccgagcccattgctgaggtcctgaatctcacacataaacctatttcaccattgaaattgttactgtcatatgtggattcagccacaggttggatgatgacaaatttctgaacccaacccacttgcacaatgaacccagccagcagaagatgtgttgattttgaggcttagggcaagaagcaaggttttgtgtttctcacttgtatgaaagtcacagaaaattttcaaactcactcatgttgtataatgccctcaggttgtacggag

SEQ ID NO: 200132 - DNA, 579 bp, Homo sapiens
ggaatcgtgactgtcatatgtatatcttgccgtaagtgggatggtgactcatttctggactcagctcacaggaatagtgatgactctgatacctggaccaagccagtaagagagatgttgactctggtagctagacttaggggtctgggtcttttacttgtaggaaggcaacagaagattatgaaacttacacatatggtataaagctcttggggaatacagagtgtcattacagggcccagtccacaggtgagattgtaaccctcctatatacatctggccaacaatttgaattgccaccttcacatatagaccgagcccattgctgaggtcctgaatctcacacataaacctatttcaccattgaaattgttactgtcatatgtggattcagccacakgttggatgatgacaaatttctgaacccaacccacttgcacaatgaacccagccagcagaagatgtgttgattttgaggcttagggcaagaagcaaggttttgtgtttctcacttgtatgaaagtcacagaaaattttcaaactcactcatgttgtataatgccctcaggttgtacggag

SEQ ID NO: 200133 - DNA, 488 bp, Homo sapiens
ttcaataccctagtatatattatagataaagatgtagaattacttctctactctaacacaatagtattccagaatgaaacatagacatacratgttgtttgtttaaatgtaaacaaagcttctcctgcatgagaaagatttgggaagatcacagtacacgaactaatagtttatgttcagattagcattttatggccctgcttttattttcaatctatgcatgcactactcccatcaaccattgtaattctgccttgagaaattcactgttgatattttgataattgactgatgggtctaacttctttgagctaactggctgattggaatcacctggcctgagctaattggctgattttattcacctgggctgagctaattggctaattggagaacctgggctgagctaattgaatgattgaaatcaccggggctgacctaatcagctgcatcaattaacctgtcttgagggaaatgagtagtaaaat

SEQ ID NO: 200134 - DNA, 488 bp, Homo sapiens
ttcaataccctagtatatattatagataaagatgtagaattacttctctactctaacacaatagtattccagaatgaaacatagacatacaatgttgtttgtttaaatgtaaacaaagcttctcctgcatgagaaagatttgggaagatcacagtacacgaactaatagtttatgttcagattagcattttatggccctgcttttattttcaatctatgcatgcactactcccatcaaccattgtaaytctgccttgagaaattcactgttgatattttgataattgactgatgggtctaacttctttgagctaactggctgattggaatcacctggcctgagctaattggctgattttattcacctgggctgagctaattggctaattggagaacctgggctgagctaattgaatgattgaaatcaccggggctgacctaatcagctgcatcaattaacctgtcttgagggaaatgagtagtaaaat

SEQ ID NO: 200135 - DNA, 576 bp, Homo sapiens
ttagggcttttcagcagaggctaatttaattttggttctgtgttcactagaataaaaagggttatccttgatttggcatgaatgactctcatggccttagtgaatttttatctcccagaagtcagcaacaaggaccaatgcttattttgtataagttaaatgcagatggatggacgttatagcatgcctccatttgtgtactactctagatagagtttattggtcagaacgctttatacatctatggaattatttttatatatcagtatcagtatcaatacctatcaaccctttcaccttctgcatctttactttttatgaataaaaatacaaaaatgaatatatctggatatagatatacacaggtagatgtacatctatgtaaatatttagatagataagtacatctatgtaaatatttaggtgtacactggatgttcacaaaaaggcattttcaataccttagtatataatcaggatgcagatacggacttattaccctactgtatgccacaatacaaacccaggattgtacattgccrtacaatgttgtctacataaacacaaacaaagctt

SEQ ID NO: 200136 - DNA, 600 bp, Homo sapiens
cccattgataaaaaagatctsttcctcacagattgacaggaatgggtgtaatgagggggcgaatagttccaatctgtccttcagggcctgtgcaatgtaaaattatggagctttcatatacctgtgaagcctgaccaacacccactaatgctgtggaggcatgctcctttggccagtgtcggggccattgatgtaaagcgataatggaaacatcagcgcccgtgtcaatcattccctcaaacttctttccctgaatatgcatggagcacacaggacgagtgtcagaaattttgctggcccagtaggctgctttaccttgataatctgtgctaccagaacctccctttcttgtactagaactagatcccaaaggaatgtaaggaagtatcaggagttgagcaatgtggtccccagctgctgcattacaagggactgcagagctaatgacaatacgaatttcacctgaatagtcagaatcaattacaccagtatgtacttgaacaccttttaaatttaaacttgaacgtcccactagcaaaccgacactgccagtcggcaagggaccaaaaacacctgtaggaacagcaataggtggctctc

SEQ ID NO: 200137 - DNA, 545 bp, Homo sapiens
aatgggtgtaatgagggggcgaatagttccaatctgtccttcagggcctgtgcaatgtaaaattatggagctttcatatacctgtgaagcctgaccaacacccactaatgctgtggaggcatgctcctttggccagtgtcggggccattgatgtaaagcgataatggaaacatcagcgcccgtgtcaatcattccctcaaacttctttccctgaatatgcatggagcacacaggacgagtgtcagaaattttgctggcccagtaggctgctttaccttgataatctgtgctaccagaacctccctttcttgtactagaactagatcccaaaggaatgtaaggaagtatcaggagttgagcaatgtggtccccagctgctgcattmcaagggactgcagagctaatgacaatacgaatttcacctgaatagtcagaatcaattacaccagtatgtacttgaacaccttttaaatttaaacttgaacgtcccactagcaaaccgacactgccagtcggcaagggaccaaaaacacctgtaggaacag

SEQ ID NO: 200138 - DNA, 565 bp, Homo sapiens
ttcataatggatatttcaggtcttgttacatcatatcccatgatcagttgttcaatctctaaagaagtgcagtggcaagccaagacctatttccaatacatttgtcaaaactagatttttttttacatccctggaattctgtactgtggttgtcagttgggcttgccaactgtcagttctgcagtaggtcacagcaccgtgacctgctgcagatgcttcagctccatcctgtgtcctctactgcagagctgccttccctccagccacaccagctgcagaactgcctcttgctctgggcttcagtaaagataggcagctttctgggtcactctgtacatgtgttgaagcagcattctcaaatgtggcatattttgtctccaaaatataaagagattaacaatggttgtgccccttttgcagaaataggtgayttcagttccatgagcttttcttacatgttgaataggctgtcttgacaatctgcagaccagagcccctagagattgacctggtgcattaatctctgcagtggcaaaccaagcaaattcagttgagctataacaga

SEQ ID NO: 200139 - DNA, 522 bp, Homo sapiens
atgtaactaaagtttgtcactagcattgacaaaactgcaaaatattcttggtagttgaaaatgacacaaacttcatgcaggacacccatctcccaacaaaaaatacatctgtgcttacctctggtaatctgtatgcttttatgcaagggttaaaatgtagaagggcattacaacatagcataaacaaagaggtttttaagtcaggtggtcttaaattccctcattcaagacctagatctaccctttactttctgtatgtgaccttgcacragtcattcaaccacttcaagccccactagactgtcagctccacaggagcaaagaccacttctgcctgactcactactataaaccgtggcccacagcacggagaaatcagtttcttcctgtataaaataaagatattaacagtatttatctcgaagcgttaactagataaatgggatattatatatataaagtctggcgcagtgcctgattatggtaaatgctcagtaagttaaccgtttgacattaactacc

SEQ ID NO: 200140 - DNA, 567 bp, Homo sapiens
cagaaggcaaggtatgggatataccaccttctcagcactttgatgttgtttaccatctgaatctctgtcatttgagtttttataacccaatctccagcttccttcctctcctgtaagtagtgttgaaagttatcaccctctaatcaagggtttagtttttctggtaaccagcccccattctgaagccatctaggcgccccactctaagtcacttcattagtatgaactcagatatggtctaaagggcttgttatgaataactaaagaaattctatgcttaggaaattccaagagtttgggaaatmtgtggcaagaattcaggacaaagaccaattacaatattattattataccaaattcttgttatgcttcaatgttaagacggtttctcttttgattatatcgttcatgctataatctaattagtatattgtttattgtggaacatttaattaaaaaatggaaaatacgtttttatttttagcaaaagtttaaatttattgctttttctcttacaggtcactgatgaatgttggaaaaaatgcatcaagaagtcagaatataatt

SEQ ID NO: 200141 - DNA, 500 bp, Homo sapiens
gcttttttcagtctcctgaaattgtcttttccttgttrgtatgccttttaatttttcattgaaaggtggacacgatgcacaggttgaatgtccctaattcaaagttccaaaatccagtatgttccaagattggaaactttttgagtgctgacaggatactcaaaggaattatgcattagaacattttggattttggattttcagattaagcatgctcaactgataaatgtaatgcaaatattcaaaaatctgaaaaaaatccaacaattaaaacgcttctggtcccaaacatttggataagggatacgcaacctatactgggaaatgcaactttcataaatgggcctttagtaatgtagtggttaggtgtggggagaggaggaatgatctatagttttaggattaggttttaatattttggcaagtctgtgccactgggctacctttaccagtgcttctttttttccccttacccttaggtgggctgggatggctagaga

SEQ ID NO: 200142 - DNA, 400 bp, Homo sapiens
ggtatgttttatgtagttcccatatacggattaaattgggcatgtggaaagcaatgttgatccatttaatggactcccccaaaatatatatcagcatctttgtcacggagctagacggcttctttatcctttcaccaaaatgcagtaacaaaaataattaaacatctctcagacctgaactgcacagtcattagacaatagtcaatgactggaactgccgtgagagcctgaaccacactttaccttggcttttctagccatttctattcggaaagctttccatatctggatttcccctgagaactattttatgatgctataaagactgttaaccagaggcaggatctccccagcacctgagccacacacasaaatatcaaataacatttaattgctggat

SEQ ID NO: 200143 - DNA, 492 bp, Homo sapiens
aattctttttgcagtaaaaaggacatgatggcaacatgattcgcaaaaggaaatgacactgctgtctgaaattaaaagggagcctgcgatgatatggggctggcttctacgctggacatggtaggcccagtgcctaagaccccagcagtgttttaatttcttttaaaataaataaaatccagccttgatcacatttgtatttacaccaacacagtcataagacaaaattttaatttttttaatggaggaaaggacccataaagacaaaagtgcataaatggtgtccacaygaagcacactgtggccctgatcaactctgccacttcctgcttgcccactgcatgccttgaactctacataccctctctactcttcccaacaaccctggaagttaagcattaacactgtccttattttatacagaaggacattatagtgcaaaaagctttggtaatcatgatgcagaagaaagaccatagattttggacacaa

SEQ ID NO: 200144 - DNA, 519 bp, Homo sapiens
catgcttaaccgaccagatgaaagtgttctcratccccatacatttcaggaagtttactgtaatagaaaaaaaactgaagtccaacagaaatgaatctctgtgcttggagactgtcactgacaccccaagttcacggcagtccttagcctcaggaaagcaagtaattgattcatctgttgtatttttaacgtctttaccacttgtcaatgtgctgctctgtttataagctgcaaaatgtttgggattagatgtctgctcttaaaatctgctacttttgggagggttttcagtaatacctcagggtactgttttggacaatttcaggaattctctttgtaagcttatgaagggccattctcttaaaacgcactggattgccccctcttatttggtacattttctctaacacagacaaatttgtctctctccaagtctccaagtttagtgcaggcaggaaaaatagtatattgtgtctcttgaagatactactaaatcatcccctagcatgctattatata

SEQ ID NO: 200145 - DNA, 519 bp, Homo sapiens
catgcttaaccgaccagatgaaagtgttctcgatccccatacatttcaggaagtttactgtaatagaaaaaaaactgaagtccaacagaaatgaatctctgtgcttggagactgtcactgacaccccaagttcacgrcagtccttagcctcaggaaagcaagtaattgattcatctgttgtatttttaacgtctttaccacttgtcaatgtgctgctctgtttataagctgcaaaatgtttgggattagatgtctgctcttaaaatctgctacttttgggagggttttcagtaatacctcagggtactgttttggacaatttcaggaattctctttgtaagcttatgaagggccattctcttaaaacgcactggattgccccctcttatttggtacattttctctaacacagacaaatttgtctctctccaagtctccaagtttagtgcaggcaggaaaaatagtatattgtgtctcttgaagatactactaaatcatcccctagcatgctattatata

SEQ ID NO: 200146 - DNA, 519 bp, Homo sapiens
catgcttaaccgaccagatgaaagtgttctcgatccccatacatttcaggaagtttactgtaatagaaaaaaaactgaagtccaacagaaatgaatctctgtgcttggagactgtcactgacaccccaagttcacggcagtccttagcctcaggaaagcaagtaattgattcatctgttgtatttttaaygtctttaccacttgtcaatgtgctgctctgtttataagctgcaaaatgtttgggattagatgtctgctcttaaaatctgctacttttgggagggttttcagtaatacctcagggtactgttttggacaatttcaggaattctctttgtaagcttatgaagggccattctcttaaaacgcactggattgccccctcttatttggtacattttctctaacacagacaaatttgtctctctccaagtctccaagtttagtgcaggcaggaaaaatagtatattgtgtctcttgaagatactactaaatcatcccctagcatgctattatata

SEQ ID NO: 200147 - DNA, 603 bp, Homo sapiens
tacctcccctctcattttcaaacaacaattctagagctatagagttcagaaaaatgaaacaggggttgttggtactctattttggtttctgatgcttttggtatatagtaaaagaaatggttccacccatagttcttctcccttcatcccaagttcagccatggggacactactgaagcacccaagatgataggatatagtttccagtctatataggcaccacatggccatcaccatgtaaaattcttgcatccacaaaggcattgctttccagtgggatcagatatctatcaytaacagaaactacaaaccctgattcctttcctagttctcaagtatcatctaatattccagagtttctttcattttcctcttaattctctcccttcccacctctcaaacaaataaacaaaaaaatgtattcatacctgctttgctatatctcataatggtgtgtaatcacctattcttacagatggacagaacacagaccctagaaacaaaaatatttgacttgtctttaaggaacaaataaaagccaggttttaggacattcttgatttaggtggtgaagtagggaatttcaggtaggattgggttcag

SEQ ID NO: 200148 - DNA, 206 bp, Homo sapiens
ggaattctgaaggaatttccatttgagrttgaacaagccaagcagctgagagaggaaagcaccctgactcagtctggacactcttggggcttgttgatcactgctgcagttggattgtgtcttggtgactgcttatgtgtatgtcaatgcagacatgggaggctggggttcgatcccagagtgcagcccacttgggtgcatttcag

SEQ ID NO: 200149 - DNA, 557 bp, Homo sapiens
ggaattctgaaggaatttccatttgagattgaacaagccaagcagctgagagaggaaagcaccctgactcagtctggacactcttggggcttgttgatcactgctgcagttggattgtgtcttggtgactgcttatgtgtatgtcaatgcagacatgggaggctggggttcgatcccagagtgcagcccacttgggtgcatttcagggttggtctgaaggtagttgtgggccaatggastaagggaaaatctatggccataccacccggaatgtgcctgactttacccaatcttggaaagtctttgaatgtagtactgtccttaatgggaaagcaggatatagttccttgcatccaggcttttatgctgctgttctaagcagggtcaggcctagttattacatgatgttctgcgttgctgtttggccctagtattctttggagtgtgaagaaacttggcctttaaaaattaaacttctatgaaaactgctttacccaaaatcttggctcacagccttcattggattacctattagggcaaagtttagccatgtgaac

SEQ ID NO: 200150 - DNA, 596 bp, Homo sapiens
ctgtttaaggaattatgtggaggaaatctcacctccgacccccgcccccgttgagcacggccggccagggtcgctgggtgggccaggaggaaagaaaggggcggggaagaagcagcaattttactttaaattaaaatgacacaaaaatattttttcaactcagatctttctgagacatccccagaaagcgttgcaagctgtgattacacctaatgtgagagcatgaactaatttaagaggtgagagctgcataatgaggctgcctcccgtgtagcagccaagactggcagctctggcggcgcgctggaggggaccgggagsggcacccttgtagaaccagtccctggcgccctgggatcttctcagtgccctggcgctgtgttgtcggtcactccacagatattacagggtgcctcctgaatgccgggttgcaatcaagagcaagagatggggcgagtgaaagagcctgttttcaggagctcagcatcaggatgacgattacctagagggaggtggtggccagcctccccctcttctcttcatgctgaggctctggtgggcagtgcccaagcctgaactgccatctgtatgccagt

SEQ ID NO: 200151 - DNA, 563 bp, Homo sapiens
tttcttctcttgctgtacaaaagtccagacagtaatgtctttttttcatttttatagatatattccattgaaagtcctcattctcaaatttaaaacaaagactttttgtgtacctcaatagcaatgcacacacagttggcttcacaaacatattgtacatttctttttttcatatttattcaacaaatgtatattgactacccaccgtgtgacaggtgttatttgttgrcggaaccaggcatcatcagcaaacaaaactgacaaagcttcctgccctctgtggaaggcatctgaggaagagactggattttgtagcaacatgttattctcattataaactttatcattggaatactaaagccaaatcatcccccatctccttgatcaggatacccacttaatctaggcagctacacaattgtgagagcctttgtttttttctgctgaaacatccttaaaaagatacctcacaacccaagatttggcttttcttaaatacgatttttaatttttttcatttctatctagagatttaattggaaatggaaaatcatcaattttcc

SEQ ID NO: 200152 - DNA, 495 bp, Homo sapiens
gcaattaaagctccatgactaggggtrcatgtttgtgttgtttgccactgtaaacatagcacctagcaagaaaataggcaggtactcagtacttatttgttaaaagaagagataattatatgatatgtgtgatagtgaaccactggattttggaaagtgtagtagcttgttcctttttgcattttataagcatcattgtggcagtgctttggaagacagattagaggggaaggaaactaatgacaggaagaccagttaaaagatgattgcagtggttgaagtgaaaaatgaaaaatttcaaacccaaaatagatgtgagcaacagtgtatgtgaaaaggaaaaatatagaattaacaggaatttaggaagagatgtagatttgtggaaaagagggttctctctgggatagctttgtgtttgaagtggctgtgaagtattacagtgatggtaagcaggggacaattgtcctggtggccatccagaagtgtggttgg

SEQ ID NO: 200153 - DNA, 495 bp, Homo sapiens
gcaattaaagctccatgactaggggtgcatgtttgtgttgtttgccactgtaaacatagcacctagcaagaaaataggcaggtactcagtacttatttgttaaaagaagagataattatatgatatgtgtgatagtgaaccactggattttggaaagtgtagtagcttgttcytttttgcattttataagcatcattgtggcagtgctttggaagacagattagaggggaaggaaactaatgacaggaagaccagttaaaagatgattgcagtggttgaagtgaaaaatgaaaaatttcaaacccaaaatagatgtgagcaacagtgtatgtgaaaaggaaaaatatagaattaacaggaatttaggaagagatgtagatttgtggaaaagagggttctctctgggatagctttgtgtttgaagtggctgtgaagtattacagtgatggtaagcaggggacaattgtcctggtggccatccagaagtgtggttgg

SEQ ID NO: 200154 - DNA, 383 bp, Homo sapiens
cctgtacccatgtcctttgcaatatgactttatctagctcattccatcaagaggtgtatttttttttttagatagagtgtccttctgtcacccaggctacagtatagaggcatagtcatagctcactgcagcctcacattttttggctcaaacaatccttccacctcagcttcctgaggagctgggactacaggcaggtgctaccacacccagctaatctatttttatttttgtatagacagagtattattttgttgcccaggctggttttgaactrctgaccttaagtgatcctcctgccatggcctcccaaattgctgggattgcaggagtgaaccaccacacccagcccaagaggtggaatctgttcctctttcccttga

SEQ ID NO: 200155 - DNA, 550 bp, Homo sapiens
tgagcatctctcaaaggaccacctcctaataccatcacttagaattttaacataaaatttgagacattctgatcatagcagtctttcttttttaaatcacatctgggaacccagaacccccctctgcagaatgagaagtggttacactcagcaggggtgcctccctttaaatggggtacccactttccagtttgccattcagtatctacctactggggctgcttcatacattggcaattcctacctggcccctgtaggttttagagtttgagttcctctaaaacctatggtggttcttagggtttcctttatattctctcctccacacccctcagtttcatgccaggaaagagagttaattatggctcaaggctgaaggacaacgtttgaccagggcatctggaggtgtatggtttgtgtccttttaaaattcatatgttggaactttaaccccaaggtgatggtattaagaactagggccattgggaggtgactaargcataaggacttggcccttgtgaatgggattcatgatcttacaagagaggct

SEQ ID NO: 200156 - DNA, 566 bp, Homo sapiens
ccacaactggatcacatcagtagagttcaagaaggcacgaggcctgtcttgcacctaggktaaaaatttctcaacttgcgagcatacagccacaacatttgcatttgggctgcggaacacaaacagacttcgcctccatctgaaaattgagaacttcacccaacttgccttccgccatgtccccgtgtgagcctcatcgagtgcccctttgctctcagcagcccctaccttaaacttttaaacaccaacaaaaaccttcaggtgccacattctcctggctttgtggttgtcttttcctcctccctctctctcgctttttcagctgccttcaaaacagagaggagaagcctctatttggttctgacaacaagatctcctggtgcatatttcgccttgtgttttccttctgtcattgatcaatagactcaaatgccaggcctccatcacagctgcagactttgatagcccaaactgtcttggcccagcggagcttgtctgcttgagttctgatgctgagaaatgtcacagcagggaggggctaggagcccctgtcagcaagcaaggga

SEQ ID NO: 200157 - DNA, 609 bp, Homo sapiens
catgaggggtaaattgtctccctcacccagtcttgggtaatttgtactgtaagttctaggccttaggagggcccaagaggaagcaaaagacaccgccttgcaacagccagcaccaaacctgcacaaagaggactgtggacttgctggtgcattctctcccctaacttacggcttactcaacatttcggggaattttaggaacgtgaccagccagagttgggctgagattttctctcttgtggcagatgtttccaaaattgatgattctcacaacttcttgaacttcatagtcatgcaaggagtttgttcaacctgaggttcctggtgccatgcctgagtctgatctgtatgtgaagctgttcccactctcagcgttcactgaattgtatttcttccttccatccaacatcagtttctctgggggcaggttaacataacccagtgtttccagaccttcctcatcctcayattccctggggaaggctcgataaaaatgcagatagcctgccccagctctactgaacctgaatctgcaagaagaggtgctaggaatttgtatttttaaaacaaatattgcaggagattctaatcggcaaagcttgggaagta

SEQ ID NO: 200158 - DNA, 502 bp, Homo sapiens
taacttcaggtgtgacatttcaaagtggctgcccagttttctattagatgagtgagggggaagggataaatgagtgaagaaaagaacctgagagaatatatttacattgcacaaaatggcaaaatagaatgtaggaatgatgcttcagccatccggtatacctctggaggcattttggtgtggcagagcaggaggtgagaaaggcggaaaggagcatcttttataccttctttccccaatttaacaaaggttgatatgatactcttcactcaagcatccaagatgcttatggttacaccaccagattgtagtttttgatgtataktcattacctgaacatcctgttttcctagtcagttttgaatctcaaagctgactttttaagaccacagttaggttgagtttcaagagctgccttatttataaatcaataaccaggtcttgctactttggaccctacagcttcactagtaagcacaggcagagaaaattcagcagctaa

SEQ ID NO: 200159 - DNA, 502 bp, Homo sapiens
taacttcaggtgtgacatttcaaagtggctgcccagttttctattagatgagtgagggggaagggataaatgagtgaagaaaagaacctgagagaatatatttacattgcacaaaatggcaaaatagaatgtaggaatgatgcttcagccatccggtatacctctggaggcattttggtgtggcagagcaggaggtgagaaaggcggaaaggagcatcttttataccttctttccccaatttaacaaaggttgatatgatactcttcactcaagcatccaagatgcttatggttacaccaccagattgtagtttttgatgtatagtcattacctgaacatcctgttttcctagtcagttttgaatctcaaagctgactttttaagaccacagttaggttgagtttcaagagctgccttatttataaatcaataaccaggycttgctactttggaccctacagcttcactagtaagcacaggcagagaaaattcagcagctaa

SEQ ID NO: 200160 - DNA, 499 bp, Homo sapiens
cacagcaagtggataaagaaactatggtatatacatacaatggaatagtactcagctataaaaatgaatgaattaatgacattcacagcaacctggatgaaattgaagactattattctaagtgaagtatcacaggaatggaaaaccaaacatcrtatgttctcactcataagtgggggctaagctataaggatgcaaaggcataagaatgacacaatggactttggggacacaggagaaaaaggtgggaagggggtgagggataaaaggctacaaatcgggttcagtgtatactgctcgggtgatgggtgcaccaaaatctcacaaatcgctactaaagcacttactcatgtaaccaaacaccacctgttccccaataacctacagaaataaaaaaaaattaagaataataactaacatttgctgggtgcctactgtgtgccttgtaccattttaagtgtctcacatattcctttaattaagcctcaccaccatctga

SEQ ID NO: 200161 - DNA, 582 bp, Homo sapiens
cgctgtctacagctttgggcaatcaagatgcccagtctgcccctagatgaagctgtctgggtttgtatcccagctctgccctgatcagctgtgtaggtttcagcaagttatttattttgtgtgtgtgggcctcagttttctcaagtgaaaaatgaagagtcttctctctagggacattaaatgttgagcttagtgacacaagaataaaaatcactgtcgttgatacatcgtgaaggtgggatcccaaaggcactgtcatcattcctgtcccctagaacccacagctcagagctgtcctcctgctccctgtcttttcctgagcccacttctttagctttcacttcaatgctgtgtgctgcccsagggcataggaagaaattcctttttgcctaaaatagacaatttctgttctttgcaaccagagtcctcatagaactcccagttgaggctcaaatcatggactatggcctttgatgttctatggcaggttttcttacacttggatattaagccaacactgtatcaaaaaaaaaaagagggcagcagggagctcagtgcctgtcacagggaaactcaaggagg

SEQ ID NO: 200162 - DNA, 582 bp, Homo sapiens
cgctgtctacagctttgggcaatcaagatgcccagtctgcccctagatgaagctgtctgggtttgtatcccagctctgccctgatcagctgtgtaggtttcagcaagttatttattttgtgtgtgtgggcctcagttttctcaagtgaaaaatgaagagtcttctctctagggacattaaatgttgagcttagtgacacaagaataaaaatcactgtcgttgatacatcgtgaaggtgggatcccaaaggcactgtcatcattcctgtcccctagaacccacagctcagagctgtcctcctgctccctgtcttttcctgagcccacttctttagctttcacttcaatgctgtgtgctgccccagggcataggaagaaattcctttttgcctaaaatagacaatttctgttctttgcaaccagagtcctcatagaactcccagttgaggctcaaatcatggactatggcctttgatgttctatggcaggttttcttacacttggawattaagccaacactgtatcaaaaaaaaaaagagggcagcagggagctcagtgcctgtcacagggaaactcaaggagg

SEQ ID NO: 200163 - DNA, 590 bp, Homo sapiens
caaactcataacatgggagcttgttagaatcgggaaatctcaggccctagcccatatcaaaggaatgagaatcttcctcttaatgagatctccagatgatctgtatgcatgaataagcattattaggccacaaggagcttgtgctcttctgcagaaaaaaagacacatttgtgatataattaaataacaatgctagggtgcataagcattggcaaaattgccttgggagcaatagtaataacaactctactatttactgtgcactaactctgggaaggagctgcccatctcactatcagttggctccacagcaatgcaaagaaataccagctgactaatggtacgggatccagccataactggcatacagctgtgagcaaagaagagcctttggagcatgcttcaggaggcatctcacaattctaacaaagaccaagacatgctcaaaattatattmcaccattcggtaaaatacagacatttgcttttgaacccctgtggaaattctagttcccattttcataggtaatgacttatcaatcctaatagaactagacattattgctccattcattttaacagatgagcaa

SEQ ID NO: 200164 - DNA, 483 bp, Homo sapiens
ttatcttctgaccacaaaacccacacacctgactttctctgccaaacaacctctgtcactttcctcaggaatgaatggatgctgttccttccagcctcctgtcaaaggccaatcttttgcctttgcttcgaatcctgtcccaatccccattctccattcccccctctggtgcttgcctttctcttctgcatttctaacctgacctctctatgggaggctttgtatcagcatccaggtacattcckccctttcccatgttaaagcaaacaaaaccttctctggacttcacatctcccatattacctcaggacctttctcatcacttttgttaccaagcttccagagagatttgtctatacatgttaactccatttctttacctcttactgtttctttgctaagttaatttttatcttttcaaagtaatacatggttatgatttctaaagtcaataggcattaaaaaacttatgccctggaacag

SEQ ID NO: 200165 - DNA, 472 bp, Homo sapiens
ctccataatgtaattttgtcaggacctgtttgtttggttctcaaaacctatttacccctttctctactgttcctccaaatgcyaaagcaccattggagaaccaaaaattataaaagaatccctgaaaaatgaaagcaggagaaaatttcctgagaagaaactttagccaaaatgtatctgtaagaggatttctgcaaggtggtagccttgggaaacaggacggactgcctaaaatgtggttggtgcagtggtttgtgctctaatagaagcagtgacgggatacagacattctttctgttcctgctagtgcaaagcagtgagcaacagaggcatctgttacagctggagcagtgagtggctcagaatcctagaatcagaaccgtttcattaacccccacaaaactatgtcagcgccctccccccaagaaaaccccacactgttaaccagctgattttactaaaaatttgaggc

SEQ ID NO: 200166 - DNA, 658 bp, Homo sapiens
agtttttactatttgtctacaatttggactgaattctgaataatgtcccagctctaacaatcctccaaagaagaaattggatttaatttccttcatgatatttttagttgactccccagtagaataggttttgttgttgttgttctgatatacaaattctttttttgattataattcctatrtgcattacatatatctcttgttttacttcttccacaaagactaaactcatgatattctgaagactaacaatgattcaacaagcaacagcaactacatacttgactgaggtgccatttttgccacctgtgatgccatctcaatttggcttttgacagtcttaaaattcctcattgtaacatttcctcacctctccttcccatgtgagacagcaccatcatgagccttctcaaactgaaggaggaaggatattgatcactctaacctaagcagaaattgatcattaatgtttccatggaaagatttttgatcaacaggtgggaaatgagaaaaaaaattgctcagagccatctaagttatgtgaagcatacaaaatttgtcaggcccagagagacatgagtatggttatgggacctcaatcacacctctcacacccatacccagggccaactgtttaaagacattttgttcctgacta

SEQ ID NO: 200167 - DNA, 580 bp, Homo sapiens
ttcaaacttgggagggtccaactgggaaccatcagattctaaactccaaatgggaatacacttagccatttaagggaataattcaatttgcttcgtgtaacctgagaatatgttaaaaaaaattttatgggacatctttttgttgtctatacactggatgctcactggagatccgttttcacatgaagctaagtcacatagactcaaattaattcaaatcaattaattatgcttttcgttgttcatttatatctctgttcaattaataaatctactatctaattaccttccagcaacactgatagtcacaggagcttcaaaactgaaaaacccctgcccttgagggactcacagtctgttgtaatcacagggtctaaatggccactgaatccaaacttttacatgtatctacttttacatgtatctaagaccaggctgataaaaataagtttgagctgtcaacatatgtttgactatggaatgatttaacaggtgtatygatccattcagtcttttagccagtcccaatggaatgaatttatgactttgccagattgcatgggcaggtggatagtgttct

SEQ ID NO: 200168 - DNA, 545 bp, Homo sapiens
caaatcctcaaaagcctcaacccaacacagcatcaactaaagcccaaaatatcatctaaatatcatcagcttgaaagtcctaaatctcattatctaaattacctaaatcagatataggtaggatactgtgtatgatccatcctggggcaaaatttctctccatctgtggacctgtgaaacaagaagacaagatatctgttccccaaatataatgatgatacaggcatcatgatgtaacagtaatagacatttacattctaaaaggggggaagtggaaggagggaaaaggtcatcagacccaagcaattctgaagttcatcaggrcaaacacggcatttcaaggcctatgaataacacttagtgactcaatgctccatgctctgggtctgagactaatattttctgtgtgcactgctccaacctctgcaccatggctctaaatcctagacccaaggctccagcttttgggccaaagggtttgttcttgaagttatcctttctttttcttgataggtagcacatatttgtagctgattagttttatc

SEQ ID NO: 200169 - DNA, 605 bp, Homo sapiens
catgggaacgtggaggctctggtctagggagacgatgactataataatggcatttcctatcagggtcaccagataaataaccaggaaagccacaaagagctgcccctggagctcaggatagttagaaaagcccaagaggatgaattcaaccacacagctttgattttgtctttccattttcagtaatgaagtcgtgcattgattttatggacatagtatatacagaataaagccacagtccattarctaagagttccagtctgcattcaccccagaaattctggcagaagatgaggagcctatcctgacagaaattttctttggcaattttagacaatgaccaaatacttggattatattccaaatataaaaaatagaaatgaagaattctggctcagagatcttgtcaaataatatcaaaatttatttgatattatttgaaaattaaacatagccttaatggaaatataaatactttataccttaggttccaatcccataacattggtgcaagtgttctttatttaactgaattttacataaatgcaaaacttaagactacaaaaaataaaatataaaaaagcagatagattgaaaaagatatc

SEQ ID NO: 200170 - DNA, 505 bp, Homo sapiens
atgaattcaaccacacagctttgattttgtctttccattttcagtaatgaagtcgtgcattgattttatggacatagtatatacagaataaagccacagtccattagctaagagttccagtctgcattcaccccagaaattctggcagaagatgaggagcctatcctgacagaaattttctttggcaattttagacaatgaccaaatacttggattatattccaaatataaaaaatagaaatgaagaattctggctcagagatcttgtcaaataatatcaaaatttatttgatattatttgaaaattaaacatagccttaatggaaatataaatactttataccttargttccaatcccataacattggtgcaagtgttctttatttaactgaattttacataaatgcaaaacttaagactacaaaaaataaaatataaaaaagcagatagattgaaaaagatatctcaacaaatgtgataatagcctaataatccaatgttaca

SEQ ID NO: 200171 - DNA, 448 bp, Homo sapiens
tgtcaaataatatcaaaatttatttgatattatttgaaaattaaacatagccttaatggaaatataaatactttataccttaggttccaatcccataacattggtgcaagtgttctttatttaactgaattttacataaatgcaaaacttaagactacaaaaaataaaatataaaaaagcagatagattgaaaaagatatctcaacaaatgtgataatagcctaataatccartgttacagcatatttgatataaacttatttaaaatattaattagattcaaagtacctatatatgacttggagaaagaaaacaacattctgtagaaacatagaggggatttgaattttcaacacaaccatattaggtgacctatagactatgtgaattggcttcaagcttgcagatttctgcccatcctggatctggccaattatattgggattta

SEQ ID NO: 200172 - DNA, 472 bp, Homo sapiens
  misc_feature (1)...(472): n = A,T,C or G
nnnnnnnnnnnnnnnnnnnnnnnnnnnntttaaactggcttgagcaataaaggaagccataggctctgtcccaggagacagagatgaatgaatctgcaggcttggctttatccagaaggcagatgatgtgctcacgccgaggctccacttctcttcttctcatctatggttttgtggggtaggttctattctcaagaaagccctcttgtccttgcagcagtaaggctgccaacaacacatagggatattctccctaatccgtctccagtgggaaatgtcccagtgatgctgaggaaagggggttctsaaagaagcagtccagggacgcctcccatattagtccccatggtgggattacatgcccattcatgaactagtccggtgccccaaagatgggaaaagctgtctaataggtacttttcataattcctaccccatgacatcccatgcaggcttctgttgtactaatatg

SEQ ID NO: 200173 - DNA, 571 bp, Homo sapiens
tatgatttcatattgtaattccttaaacacaaattcagtcaactctatatgaattgaaataataccagtaaacaattcagatatttatgtcaaatttcatatgtaatagagaccacgtaaacaatcagtagggatttgtttaacaattataaacctaaaaccagtttaaatagacacacagatatatatatgtattgcctattcccaaataatatacacaaattataatgacaccccttcatttagcagaatatgtrtatctaatcttaacatcacagtatcagttttattccaattatttttaagaacaattgagggaggtaacctgggaagataggtgaccggatatcttgtagctatctatttaggaacaaaaggaaaggcaatttttttgcctgagccagtttccaagcttaacttttcttttggcatagtgagtttggggttccaagattttactttcctgtcacagactacaaaaggaaacttcataaaagtttctaaatcagtggtctgtaaatgaaaaagatactgatattatcaaatgagaatttgagaaacttcccatgta

SEQ ID NO: 200174 - DNA, 500 bp, Homo sapiens
ttggcaggaaaaaaaaatgcctaagtatcattttaatagacaaaactacattttcagctccaggcctataaaaccaaatacgtttgtaaaatgagaaaatttagagtatcctactaaaaatgggcaacttttaaggagctgataaagcaaagttacaaaacaaatctaaattwctgccttcatgagtaatttttttaagctgaacttaaatgctccatcttttccctttaacataaaacaacataatgctgatttagctaattcactgatatgttctactggctctggcattaactttctgtataatcttgggcaaataactccctcatcagggtttcatctttctaaccaattggacttatttctgaccgctttcaccccgctccctcaactacatacctctaagaattgatggtttgtgcaagcaaaccgtctatagatctaattactgtcgaacttttatgtgaatatgaagggcacagcaattgactttcttacct

SEQ ID NO: 200175 - DNA, 500 bp, Homo sapiens
ttggcaggaaaaaaaaatgcctaagtatcattttaatagacaaaactacattttcagctccaggcctataaaaccaaatacgtttgtaaaatgagaaaatttagagtatcctactaaaaatgggcaacttttaaggagctgataaagcaaagttacaaaacaaatctaaattactgccttcatgagtaatttttttaagctgaacttaaatgctccatcttttccctttaacataaaacaacataatgctgatttagctaattcactgatatgttctactggctctggcattaactttctgtataatcttgggcaaataactccctcatcagggtttcatctttctaaccaattggacttatttctgaccgctttcaccccgctccctcaactacatacctctaagaattgatggtttgtgcaagcaaaccrtctatagatctaattactgtcgaacttttatgtgaatatgaagggcacagcaattgactttcttacct

SEQ ID NO: 200176 - DNA, 525 bp, Homo sapiens
tctcctgactcccattttggtgtttcttgtgttgatcaaactgcctctattagagccttcttggaatctccagaaaatactttgtacagagcatatatactgatcataataagaaatcatctggaactacattcttccattaaaaaaattttgaatggctgctatgtttaaggctctgtgttgggcacttaaagacccagcatctttctgttagccatctcttctttgggccaacagcctcctagtcagacaggtctaaaactccagcatcaactttgacacctgtattggctcattgtctgtctctttcactagcattattcgctyactatacatttagattatggtagcaacctttcaatttggcccctgcctgtaggcttgacatttgtcactaggagggtccctagtttggagttaatatagggtatatataactttggagttaatatagggtaaaatctcaactgaagatttaagactatttcccaaatgggatcgatttcttaatttctgtttatttat

SEQ ID NO: 200177 - DNA, 478 bp, Homo sapiens
gagcaggatggtaagggtcagacaggagtggtatgatacataaacagttaacattttagacatgaaagtctcaacagttatacatgtcctttaaatatttgctgtcccccagggtaaagaaagaagcttatactttacattctctgaaagaggacctcttytcttttgcatagaaatataaatatatctatcactgccaagaaaaatgtaaatttctgttataaaatcctccaggaacatcacaattgacagtctctaaggtagcatccctaaaaccatagggaccctaaggggcctctccccagagaaccaatccccagtaatctctaagtatcagcctggtcttgcaaaacttcatgcctagggcagagtttctttcattctttcctcagatttgcctttcaggaacttgactgtggaagcagcagggagaatggatttgaggaggctgctaaagttaaccaggtgaacagtgggt

SEQ ID NO: 200178 - DNA, 509 bp, Homo sapiens
ttttccaattgcccatctgtatttccacattttcaaattgtctacaatgtcaaattgtccaaatcatttatctaagaggtagacaacccatgatatccctccttggtccaaaatgatacagcatagatgaggtttaagaaggctttccttatagctttgaaattcatagcagacctcaggctctccagattagcataatggtgaggtttctagactttctttgagctttattctaggccaagcttctctaacccrtggcccgtgggctgcatgcagcccaagatggctttgaatgtggcccaacacaaatttgttaacattatgagacttttgtagttttttttttttttctcatcagttaccattagtgttagtgtattttatttgtagcccaagacaattcttcttccaatgtagcccggggaagcccaaactggacacccgctgtactaggccacaacagtaccttttacatatagtaaaaattattaatcaactaatcttgtccc

SEQ ID NO: 200179 - DNA, 522 bp, Homo sapiens
ctctgccttgcatggggaaggtcattattttcctcaatcactactgcctgaagattctaaagcagtgagggtgcttatgtatagcaggaaactaattacttcatttcattcttttgttggatcgttcttctactcacttgcaaataatcttccctttcctttaacagcgtctctctgaggagatcaacaacagcacattcatcaaaagagctgcagtaggatcccaggagacaatggaaggctgggaccaggggagccaggctaaagatcagcctccatggctcctgggtaattggcctccccayctctccaaagggagctcttaaccgatgcagatggagacttccatttaattccttgtatgtagaaaaaaataaataatatgtaattgtttcacccataaaaggagccatgtttttataacaatgacaattcagggcatttgagagtcattattggtagttcttggggactttataagcaatcatttccttgatctgaagcaaaagaagaatcagaaca

SEQ ID NO: 200180 - DNA, 529 bp, Homo sapiens
gagcatttaagatgacaaaaatcagtgcttgaagagatttagcaacttttccaaggtggaccaattagtcagtggtggaggtgaatcttatacccacgtctaactgattacaaagtctagatgactaaatgaggccacattgcctttatttttccaacctgacattttacaaaatccttctttatttatctacaactgacattccagggaaaatgcagtcccttaaaagtcatatggagtcaatacaatcyttaaataatatttataaactgacaaattttaaggaatctagctgtatacaatgcaactctgcagagttttgtgggttttttttttttaaacagtattctgaaacaacattctaactatcttatgacttttatattggggcattaaggttgtggctctttaatctgaggtacacaacaaattccaaaatctctgagtgatgatatagctcttcacgtgaaatattttctaaaactaaaatatggtcccccagtaattatgtgagtcaccattcaaactg

SEQ ID NO: 200181 - DNA, 416 bp, Homo sapiens
taatggactgtagcatacaactacttccacaactactgttttataaggttctagtccttgagaagtataaaaatccacctggacagatctccatagtataagacctagctgagattccagccaaagttccctttttttttttttttttttttcagacagagtgcagkggcgcgatcttggctcactgtaagctccgcctcccggtttcacgccattctcttgcctcagcctctcggagtagctaggactacaggcgcccgccaccacacccggctaattttttgtatttttagtagagacgaggtttcaccgtggtcttgatctcctgacctcgtgatctgcccgcatcggcctcccaaagtgctgggattacaagcgtgagccaccgcgcctggcctccaaagttcccatttaat

SEQ ID NO: 200182 - DNA, 426 bp, Homo sapiens
atggactgtagcatacaactacttccacaactactgttttataaggttctagtccttgagaagtataaaaatccacctggacagatctccatagtataagacctagctgagattccagccaaagttccctttttttttttttttttttttcagacagagtgcagtggcgcgatcttggctcactgtaagctccgcctcccggtttcacgccattctcttgcctcagcctctcggagtagctaggactacaggcgcccgccaccacrcccggctaattttttgtatttttagtagagacgaggtttcaccgtggtcttgatctcctgacctcgtgatctgcccgcatcggcctcccaaagtgctgggattacaagcgtgagccaccgcgcctggcctccaaagttcccatttaatatgttaagtcaa

SEQ ID NO: 200183 - DNA, 416 bp, Homo sapiens
taatggactgtagcatacaactacttccacaactactgttttataaggttctagtccttgagaagtataaaaatccacctggacagatctccatagtataagacctagctgagattccagccaaagttccctttttttttttttttttttttcagacagagtgcagtggcgcgatcttggctcactgtaagctccgcctcccggtttcacgccattctcttgcctcagcctctcggagtagctaggactacaggcgcccgccaccacacccggytaattttttgtatttttagtagagacgaggtttcaccgtggtcttgatctcctgacctcgtgatctgcccgcatcggcctcccaaagtgctgggattacaagcgtgagccaccgcgcctggcctccaaagttcccatttaat

SEQ ID NO: 200184 - DNA, 413 bp, Homo sapiens
tggactgtagcatacaactacttccacaactactgttttataaggttctagtccttgagaagtataaaaatccacctggacagatctccatagtataagacctagctgagattccagccaaagttccctttttttttttttttttttttcagacagagtgcagtggcgcgatcttggctcactgtaagctccgcctcccggtttcacgccattctcttgcctcagcctctcggagtagctaggactacaggcgcccgccaccacacccggctaattttttgtatttttagtagagacgaggtttcaccgkggtcttgatctcctgacctcgtgatctgcccgcatcggcctcccaaagtgctgggattacaagcgtgagccaccgcgcctggcctccaaagttcccatttaat

SEQ ID NO: 200185 - DNA, 426 bp, Homo sapiens
atggactgtagcatacaactacttccacaactactgttttataaggttctagtccttgagaagtataaaaatccacctggacagatctccatagtataagacctagctgagattccagccaaagttccctttttttttttttttttttttcagacagagtgcagtggcgcgatcttggctcactgtaagctccgcctcccggtttcacgccattctcttgcctcagcctctcggagtagctaggactacaggcgcccgccaccacacccggctaattttttgtatttttagtagagacgaggtttcaccgtggtcttgatctcctgacctcgtgatctgcccgcrtcggcctcccaaagtgctgggattacaagcgtgagccaccgcgcctggcctccaaagttcccatttaatatgttaagtcaa

SEQ ID NO: 200186 - DNA, 528 bp, Homo sapiens
acatggtcattaaagaaaatggcttacagcagtctacttttaagacatgatctccagaagaaaattatgtcaagccagcaataacctaacatttatttgccttgacaaagccccagactgaactcttactttatctataccttcctccccatctcagccaatggcaactttatctttccagttgctgagaacaaatatcttgatgtcatctttgactcctttttctgtcatatttcaggatctgaccacttttcaccacctccacttcaacaattctagtcttggccatcatcacatcttgtgtggattaaaaaaatagcagcttgtctcctggcttctaccctttacacagtaacatataagtctattctggagagyagacagagatctttctaaaattaaatcataatgtcactatctgcccagcccctcatctaactacttgacctttggctttcccattccagccacatcagcctccttctcattcctgcacactatacaaacttctgttctctatattgtttg

SEQ ID NO: 200187 - DNA, 581 bp, Homo sapiens
cctctacctcacagacccagtgtcttctaagcttttctactttaattttctcagcacttgaaaaattcaccttttaagaccttaaagagccccacttaagacataaaggcaagggccaggtgtggtggctcacacctgaaatcccagtgctttgggaggccaggtgaaaggatcacatgaggccaagagtttgagaccagcctgggcaacagtgagactctgtctctccctctctctatacataaaaatacataaagagaattatttacttaagaactgctaccctgaytgcttccagagagtccaacttaataaactacaggaattatctgtaatttattctacagatttagtcccctaatgaagaccaatgtgactttttgttgtggggaaggtgaagactgtcaagtattaatattctttttgaggggggttcttttaaggtggttaagatacatataatatacaatttgccattttaactatgttatatatacaattcagtgactattaattatattcacaatattgtgtaatcatcactaccatctatttccaaaactttttcataaccacaatca

SEQ ID NO: 200188 - DNA, 581 bp, Homo sapiens
cctctacctcacagacccagtgtcttctaagcttttctactttaattttctcagcacttgaaaaattcaccttttaagaccttaaagagccccacttaagacataaaggcaagggccaggtgtggtggctcacacctgaaatcccagtgctttgggaggccaggtgaaaggatcacatgaggccaagagtttgagaccagcctgggcaacagtgagactctgtctctccctctctctatacataaaaatacataaagagaattatttacttaagaactgctaccctgactgcttccagagagtccaacttaataaactacaggaattatctgtaatttattctacagatttagtcccctaatgaagaccaatgtgactttttgttgtggggaaggtgaagactgtcaagtattaatattctttttgaggggggttcttttaaggtggttaagatacatayaatatacaatttgccattttaactatgttatatatacaattcagtgactattaattatattcacaatattgtgtaatcatcactaccatctatttccaaaactttttcataaccacaatca

SEQ ID NO: 200189 - DNA, 558 bp, Homo sapiens
gctaacacccctccctttgaaaaaacatccagtatatggatccctgtagatagaataaaaagacataagctgcttgtattgagataagaatgcagagtttttgatttcagtactcaaactcccttcacctcccactgtggtgtttaaattacctctgcggaatcatcatttgggctccactgttttggttaaattgaaggataatccattttgcctcaatccttgttgaaaatcttaattaacctgcttttctgccttagataactatactttcttatgcttaataaagtttttattcagcagttatagattttatagatcctgtgtccttctgaccattgtagagtactaaagatgaggaagatttagaatactgataactttttctrttgaccttagaatataccttaaaagaattcatatataatgattcacttttcatatgcattgttttttcttttgaaaactaatagagaaaaatattgtgttgattagctcatctgacaaataaacacatgtagaatgtgtcaagtgcacagatatctgactcagagctgt

SEQ ID NO: 200190 - DNA, 595 bp, Homo sapiens
gtttctactttttggctatggttaatagcgctacgatgaaacagcacacttggtgtatacttggtgtacaagtatctgagtctttaaattatttgggatatatacctagaagcaggattgctaggtcatatggttcttctttaactttttgaggaatctctaaactaccttccataatggctccattattttacattcccactagcaatgttaaaggatttaagtttttccatatccttgccaacacttgttattttctgtattattattatattattattgccatcctagtagatgtgaaatggtatctcattgtgattttgatttgcatttccctaataactaatggtgtagagcatattttcaactgcatgttggctatytgtatatcttcttttgagaaatgtctgttcaagtcctttgatcagtactttttttaactgggttctttttgttgtggggttgtagaagttctttatatattctgtatgttaaatctttatcagatatatgatttacaaatattttcttccattctgtaaattgtctttttactttctttacaatgttctttgatgcccaaaagtttttaatt

SEQ ID NO: 200191 - DNA, 200 bp, Homo sapiens
gaattcggagactgaaatctttgcacttgttaagacatgctatcgattgttccatgtgaaatactggcagtagtaaggcctcctggtgatctttcccagatggcctcattagcttttgcttagaagttccagttrtgaggtaaggcatttgaaaaaccttggtcaatattggagttgtttctaaatgtatgcatcagatg

SEQ ID NO: 200192 - DNA, 200 bp, Homo sapiens
gaattcggagactgaaatctttgcacttgttaagacatgctatcgattgttccatgtgaaatactggcagtagtaaggcctcctggtgatctttcccagatggcctcattagcttttgcttagaagttccagttatgaggtaaggcatttgaaaaaccttggtcaatattggrgttgtttctaaatgtatgcatcagatg

SEQ ID NO: 200193 - DNA, 557 bp, Homo sapiens
gatcacacaaacaataaatggcaatgtcaggatttaaatctgtttctgtccasgtacaaaaaccatactattttatgacaccatgttgcccttaaacatttcttttcttggctttctaacacttttagttctgccattaggattaatttaggctgcagctggggcagaaggtcaggaatccagtcttcgtcaacattttccttaatgacatagctgaagacaaagaagatattactaatttttgcaatacaaaaatagaggaagaatagtgaatcttatgagataagatgaaacttactggcatgaaacttcaaagcaaaataagatacttaaaagaaatgaagaaaaccaatgatggggttgcttgtgctctgagacagcataaatatttgtgtccaaaaaagaataatggcattaagatttggaaaacctggcttcctatcactttataaaagagaaataaattaaaaatcaagtattttgaacataaactaatattggttaacaaagtgacacaattgcaaaacaatcttatttaaactatcctgataagaaaa

SEQ ID NO: 200194 - DNA, 429 bp, Homo sapiens
gggagaaaatttacataaaattgctacaaagcaagccaatgtgccagacaatatcaagaaaatttcagtgttttttgagtcagaggtagggaaattttgaaagatgaccagtctaataaatagccccattaataggagaccattacagaatgtagagggaaataataggtgccaaaggaaggcaaaaaactatggaaacaaatacttcattcactgccttgatcttgagaaaataaccctctccccaagaagaaaacatgacatagaaggtggagacaagttaaatgtgaagttttcacaattggtatgttagaaataccaagaatggagagatcaatgtgaattgtagtgaaggraattttatgaagttggcacttaagtggggccctgatagatgagtaggatttggacaggtgactaaagcattcc

SEQ ID NO: 200195 - DNA, 508 bp, Homo sapiens
atctttactataatctgttcctgatgccatgtccctcttcacccatctggaacctacaccatttccattccctgtttcagaaaatgacacgcaactgcccaagtcagaaatctatgagtacccctgttacttttccttcatttcctcttttctaatatcaaattttgactcttatttccttaagtatctctcagrtccacccctccactctcactgtcttagtccttcaagtaatcaccatctcttatgactcatcttccttgtactattgcaatattcacaagatatcctctagttatttcccacaccagtccaacctccattctattaataatttttctaacgtgaaaatacgatcattatacttctctgctaagaatttttcattacccaccggcagggcctttcatgatcacactgttaaactcatcgccattcttcctccagttcctccacattaatctttctaaagtccttgctttctatgttcttggttctctcaagatcc

SEQ ID NO: 200196 - DNA, 569 bp, Homo sapiens
taacattttcagatctggaagttatcattacacgctgccattttcttactgtaaacaacaaaaaaagtcatttttcagttaaagagkgaaggaaacatttctggatctttttggtgtgtttcagagaacagcactcaaagaatcttttcttccattagtgagatagtggattcttcctaatgtaagaagggagaatatggtttccctcctctgaacatcttctggatcctctctaccacatcaggagctatctgtaagctatctgtaatctcctagagatttaggagttagaaagaaaaatgtttgtaagaaagcaaagaatgagccacaaagaaataaagtctttacccattttttccatgaacttgtcatagttttcactccggtctaccttccaagtgctgtcaaacgccatgatttcagttgagtcagcctctaggcagctagagattcaggtctgtccttgggcgagaatttattatatttcttatcttagaaccaacttcatactgtgatgtggaagcttaaagttcaggaaatcacctaactatgtcaagcaattaattaat

SEQ ID NO: 200197 - DNA, 570 bp, Homo sapiens
tgccattttcttactgtaaacaacaaaaaaagtcatttttcagttaaagagggaaggaaacatttctggatctttttggtgtgtttcagagaacagcactcaaagaatcttttcttccattagtgagatagtggattcttcctaatgtaagaagggagaatatggtttccctcctctgaacatcttctggatcctctctaccacatcaggagctatctgtaagctatctgtaatctcctagagatttaggagttagaaagaaaaatgtttgtaagaaagcaaagaatgagccacaaagaaataaagtctttacccattttttccatgaacttgtcatagttttcactccggtctaccttccaagtgctgtcaaacgccatgatttcagttgagtcagcctctaggcagctagagattcaggtctgtccttgggcgagaatttattatatttcttatcttagaaccaacttcataytgtgatgtggaagcttaaagttcaggaaatcacctaactatgtcaagcaattaattaattcttattaattaattcttaattctcgttctgtacat

SEQ ID NO: 200198 - DNA, 565 bp, Homo sapiens
tgctgttctgcaatatatgctgttgtgcagcctctgctggtgatacccaggcaaacagggtctggagtgaacctccagcaaattccaacagacctgcagctgagggacctgactgttagaaggaaaactaactaacagaaaggaatagcatcaacatcaacaaaaaggtcrtctacaccaaaaccccatctgtaggttaccaaaatcaaagaccaaaggtagataaaaccacaaagacggggagaaatcagagcagaaaagctgaaaatgctaaaaatcagagcacctcttctcctccaaagcatcacagctccttgccagcaacagaaccaagctggacagagaatgactttgacaagttgatggaagtaggcttcagaaggtcagtaataacaaacttctctgagctaaaggaggatgtttgaaaccatcacaaggaagctaaaaaccttgaaaaaagattagacaaataggtaactagaataaacagtgtacagaagaccttaaatgacctgatagagctgaaaaccatggcatgagaacttcgtgacatatgcacaagctt

SEQ ID NO: 200199 - DNA, 481 bp, Homo sapiens
acaccaagtgtctcaagggaataatcttaatgataagmaagtcaactgatattgcataacccccaagaggatcaggaattcaaggcatcatacattgtgtaagacagggctgaaagtaaggagatcgatataaatttgaataaggagaatttaagaagtctgcgaaccatgaaacctttttagaactgattaaaaacattacatttttgaaaagagcaatgaagtccaaatgaggtaaatgcagctattgctttgggagagattttattgcttccttcactaccttaagtaatgccaccggctcagtggggcctttgattcacagaggttttcctaaatgcatagtcctggtgtactgatgatttggctaaactaaaaatccaacagtgtccagtgaatttaaataccctgtgaaaattagggttcaggggagcaaagcaataaaattataaatctctggttaccactagtgtgagtaaaa

SEQ ID NO: 200200 - DNA, 572 bp, Homo sapiens
cttgtactttttgcaaattatgttatctagcattgcaaatatagcttttatttgggtacaggtttgtcataagaaggacatacctataaactctaatatgatttgagaaaaagtgaagtcattatgtgataacctaataaaaagaattcgaagtctctaaagtcrgagaatttaatgccagcaaaagatggtttgataattttagaaagaggtttagctttaaaaatgacaagataacaaaagaagtaacttttgctaaccaaaaggcacagaaaagttcccagacaatgtaaagaaaatcattgagagggaaggatatatgcctgaacaggatttgtttgtttggagacagattcttacactgttgcctaggctggaatggaatggcatgataatagctcactgcaacctcaaacacctgagctgaagccatccttctgcttcagccttccaagaagctgggacttcaggcacataccaccactgaacagatttttcatgcagataaaagtgccctattctaaataacgattccaaagacgatatttattggtagggtagaaaagcaagta

SEQ ID NO: 200201 - DNA, 551 bp, Homo sapiens
agtggggccttcggagcggagggagcaaggaaacggggctgagcacagacctggagtctgatgttctgagcataacactggaaggagctaagagccccaaaataaataagaccggaatttaaaaacgttaatcccacgccggcttggcgctggcctggctgttactcattaacgctccccacggcggagactccggcgactccgtctgcgtttttattacttaatctggctgggtttggctgcagggaggctcgtggatttgctggccgggtgtgctggaaggcagtttattcacagaataagcagcttcccacgctggacccygagccccaggcgccgtccgcgtagaccccgcgccgcgcaccgcggccggcggggggcgctcgggtcgcaccgagagcagcgcgggcagccagcgccgggtcgcagccgacccgcagagcccttcgcgccctccgaggaaacaaagtgcatctttgtccgcggcccgaggcgccgcgtgggagacgctgggcaggggccaggccgggccggccgccgccgcgtgcggg

SEQ ID NO: 200202 - DNA, 487 bp, Homo sapiens
tatgtgggttagacctctaataaatgctttgatagttaacttggtgttttcttttacatgggtcttcatttccttttgargtagatgtttatcagaaaaaaatgcaaatctttgaagttttaaatgcatagtaaccagttaatttatgtaggtaataaaaattcatagaagtggaaaatgacagccttaagatagaggggcaaataccaatttaaatgaacataatgcagattgggaattcagggagtagatagtgacacctttgcagtgtgtacatattgtgggaagaatttgcactgttttctgatgaacattgttttggtttttaatcacatggcaaagtaggaaactgtctaaaattgttttcaacatttttttctttgtagtgttctcctaagtgctgtaagtggtgaagacactcaggatcgtactgacagattacttttaactccatgggttaaattcctgtgggagtcttacaggcagt

SEQ ID NO: 200203 - DNA, 487 bp, Homo sapiens
tatgtgggttagacctctaataaatgctttgatagttaacttggtgttttcttttacatgggtcttcatttccttttgaagtagatgtttatcagaaaaaaatgcaaatctttgaagttttaaatgcatagtaaccagttaatttatrtaggtaataaaaattcatagaagtggaaaatgacagccttaagatagaggggcaaataccaatttaaatgaacataatgcagattgggaattcagggagtagatagtgacacctttgcagtgtgtacatattgtgggaagaatttgcactgttttctgatgaacattgttttggtttttaatcacatggcaaagtaggaaactgtctaaaattgttttcaacatttttttctttgtagtgttctcctaagtgctgtaagtggtgaagacactcaggatcgtactgacagattacttttaactccatgggttaaattcctgtgggagtcttacaggcagt

SEQ ID NO: 200204 - DNA, 474 bp, Homo sapiens
cctctaataaatgctttgatagttaacttggtgttttcttttacatgggtcttcatttccttttgaagtagatgtttatcagaaaaaaatgcaaatctttgaagttttaaatgcatagtaaccagttaatttatgtaggtaataaaaattcatagaagtggaaaatgacagccttaagatagaggggcaaataccaatttaaatgaacataatgcagattgggaattcagggagtagatagtgacacctttgcagtgtgtacawattgtgggaagaatttgcactgttttctgatgaacattgttttggtttttaatcacatggcaaagtaggaaactgtctaaaattgttttcaacatttttttctttgtagtgttctcctaagtgctgtaagtggtgaagacactcaggatcgtactgacagattacttttaactccatgggttaaattcctgtgggagtcttacaggcagt

SEQ ID NO: 200205 - DNA, 604 bp, Homo sapiens
agtaggtggcttattgggattaggaaaaagataagcatgccttcttaacatctcatgatatttagtcagcactggagccttgggtatttcaggggatttggagaagcccttcagcaactagccattggctcaggagaagggtcttctttcagtgtgctactctagtatgtggaggagaagatccaatggaaggagaaagaaactccattactctttcttgtggaatattagggagaatcaaaatatcctctaattttgagtttaatcatcactaatgatagatttggctgggaagcattaaagtaaattccccccagcttayaggcttccgaacgtagctcctgatcttacacagctctttgcctggaaggctgcccaactgctacccttaactgcaagccttagttccccctatgtctcccatagcccctctaattgccctgtacaactacttcatcagatcttcaaaagagaataaaattaaatactatgtatttgataattgatttaattaaatgtgtgactcacttattctttaaaaagggtgcagttatttttaacacaaatggtgcttctaataatgtgtataaatatttagttattt

SEQ ID NO: 200206 - DNA, 547 bp, Homo sapiens
gttgttcagcatcttttaccttttccacaatttgactatgtttataaacaactctgatgatgtaaatcgtttctagtatttaccaagaatcaaggtttagagtagaaggctgagtaactttcactgaagagcttctcctacagcttctgatagggttcttggtgtctggggcactacctaggtcactgagaacaacttaagttcctggtctctactggagccctgcctttaatttagagggtgagaaacacctagtgggagcttcrtgctcaccaagcaggtcaaacccttaatgtttttatctatttttcccgtagttaaatgcaggctatggatatttgctagctgacaatctcagtgtgtattctaaagtaaccaacatactggattctttaaaataattgagaagatgaataaaaaggtggagaaatttttgttcttgaagaggtagacaggttatttcggttactaacttcctacagaaaataaatcccatagatggtggaacaacagaacaatgtactcactgcaacaccagagtatattc

SEQ ID NO: 200207 - DNA, 437 bp, Homo sapiens
acggccccgtactgtgatcatcgttcaggratgaagtaaaggagatgaaaactaggacattctctttgacttagcgtcagttatgaaagatgaataagttcagcatgtctactgtatagtaatgtgactatagttaaaaacactttatcatgtacttgaaatttgccaagaaggtagattttaaatgttcataccacaaaaataaaaaggaaatggtaactaagtgacctaataaatatgttattcacaatgaatatatgtatcagagcatcaccttgtatacctgaaatatacacaaatttttatttgtcaatcatacctcaatacagctggaaaaaaaaagtagttgatctagttaattattacaaaaatattcttatcttcaacattaaaattagaaattttctgaaccaaaaaaaaaaaaaaaaaagttctat

SEQ ID NO: 200208 - DNA, 435 bp, Homo sapiens
acggccccgtactgtgatcatcgttcaggaatgaagtaaaggagatgaaaactaggacattctctttgacttagcgtcagttatgaaagatgaataagttcagcatgtctactgtatagtaatgtgactatagttaaaaacactttatcatgtacttgaaatttgccaagaaggtagattttaaatgttcataccamaaaaataaaaaggaaatggtaactaagtgacctaataaatatgttattcacaatgaatatatgtatcagagcatcaccttgtatacctgaaatatacacaaatttttatttgtcaatcatacctcaatacagctggaaaaaaaaagtagttgatctagttaattattacaaaaatattcttatcttcaacattaaaattagaaattttctgaaccaaaaaaaaaaaaaaaaaagttct

SEQ ID NO: 200209 - DNA, 561 bp, Homo sapiens
gattaggaaattccagcctggcaaattctagtcagactggttgtctgctctcgaaccctgttgcctgttaagatgtttatcaagacaatacgtgcccagcgggacatggaacctcatcagtattctaattttgccctggccttgtgatcttgctctgcccttctgcccttgtgatctttgaagcatgggatctttgtgacttactccctgttcataccccactccccttttgaaatccttaataaaaacttgctggttttgcagctcagggggcatcatggaatctgccgatatgtgatgtcacccccagaggcccagctgtaaaatttctctctttgtacyctttctctttatttctcagactggccgacacttaaggaaaatagaaagaacctatgttgaaatattgggggctggttcccctgataatcataagtgatgatgaatattggttttaatattagcactttggaaacataaataaatttatgaactattttttaaaaaattaactgctgagaatatgagtaaaaaatgcacctttttacaaacatccctgaa

SEQ ID NO: 200210 - DNA, 639 bp, Homo sapiens
gaatgacagcacttcttaataagccacactgtcatgcccaggcatcatccatacaccactgggaggaaactttgagaggctaccaccatagcatgcactttggagtttgactttctttttgtgctgcacactccagagagcagatttgctctgggaaatagaggaaaagaaagagcaattcttcacatgggccctgcctccctggagaggtgcacttggtgacttttctcaggaaggggagcagagaggatgctggctgcatttctgccatcagtgatgtgctgctgcctgtccagctctggccttggggagaatctggccatatcaagtgagaaagctctgttctcctcttagccttggttgtgtgggtggatgataaacccagttctgcctgctccagtgggtgtgcatttcctcaggtgcaaagtgagagggctgggctgggtattccctgaaagggtgcataagaaacacctgagggttttttcaaaytttatattttcttttttaaatttcaactttattttatttattttatttgattttttactttaagttctaggatatatgcactgaacttgcaagtttgttacataggtatgtatgtgctatggtggtttgctgtacctatcaacccat

SEQ ID NO: 200211 - DNA, 621 bp, Homo sapiens
caccagcccatcttttctgcttggaagacccctctctctctatagagagagctgtttttctttctctttccttctgcctattaaacctctgctcctaaactcctcatgtgtgtctgtgtcctaaattttcctggcaccagatgatgaaccctgggtatataccccagaaaacatagccacttcacatccatgccaacatgcatgcatgcatscatgcatccatccatccataatgcatgcccacatgcatccatctagccatccataatcatgcatacatgcatccataataatgcatgtctacatgcatccagcatccatccatccatccataatgcacgcctacatgcatccatctattcatctatccatccatccatctataatgcatacatacatacatgcatccatccatccataatgcatgcatacatgcatccatccatcaatctgtaatgcatgcatacatgcatccacccatccatccatctatccatccatccatctataatacatacatgcattcacccatccataatgcacacatacatgcacccatccatgcacccatcatccatccataatgcatgcatatgtgcatccatccatccatctataatg

SEQ ID NO: 200212 - DNA, 621 bp, Homo sapiens
caccagcccatcttttctgcttggaagacccctctctctctatagagagagctgtttttctttctctttccttctgcctattaaacctctgctcctaaactcctcatgtgtgtctgtgtcctaaattttcctggcaccagatgatgaaccctgggtatataccccagaaaacatagccacttcacatccatgccaacatgcatgcatgcatccatgcatccatccatccataatgcatgcccrcatgcatccatctagccatccataatcatgcatacatgcatccataataatgcatgtctacatgcatccagcatccatccatccatccataatgcacgcctacatgcatccatctattcatctatccatccatccatctataatgcatacatacatacatgcatccatccatccataatgcatgcatacatgcatccatccatcaatctgtaatgcatgcatacatgcatccacccatccatccatctatccatccatccatctataatacatacatgcattcacccatccataatgcacacatacatgcacccatccatgcacccatcatccatccataatgcatgcatatgtgcatccatccatccatctataatg

SEQ ID NO: 200213 - DNA, 621 bp, Homo sapiens
caccagcccatcttttctgcttggaagacccctctctctctatagagagagctgtttttctttctctttccttctgcctattaaacctctgctcctaaactcctcatgtgtgtctgtgtcctaaattttcctggcaccagatgatgaaccctgggtatataccccagaaaacatagccacttcacatccatgccaacatgcatgcatgcatccatgcatccatccatccataatgcatgcccacatgcatccatctagccatccataatcatgcatacatgcatccataataatgcatgtctacatgcatccagcatccatccatccatccataatgcacgcctacatgcatccatctattcatctatccatccatccatctataatgcatacatacatacatgcatccatccatccataatgcatgcatacatgcatccatccatcaatctgtaatgcatgcatacatgcatccacccatccatccatctatccatccatccatctataatacatacatgcattcayccatccataatgcacacatacatgcacccatccatgcacccatcatccatccataatgcatgcatatgtgcatccatccatccatctataatg

SEQ ID NO: 200214 - DNA, 663 bp, Homo sapiens
aaggacataaggaatatttgagttgcagggagttttattagggcctaaagcagtcaacaggggatctctcaactcttggagttattaggtttttctcaatttcattccgtttttgaaaacccaaggaactcttataagtaaacattgtaaaaatatctccttctgcttcttgcaatcacacacctagtacactaataaaattagacctgcacttttctcaacttatgactccctcagctttaatatttcctgctaaatggatcttttaaaagtccttgggaaaaatatttgcattaaatatgcctagaaaataaatacataccttctgtgaaacaagagtaaattcaaattagtgagaaaaacatcaagttcataataaaaaaaataggcaaygcagattcaattcatgcaagaggacagatgatcagcagtgaggtccaacagatccatgttccaggctgggctccatctcccctcactctctgaccattagaaaattattcaatttctctccatatcagttttcccacccataaaatagattcaataacaatatattcataacagagctaaggtaagaattaaaggagaattcatactaaacccatgaccaactgtttcacgtccatgaaaaataaaaaaagctgcaatttatggagcatt

SEQ ID NO: 200215 - DNA, 259 bp, Homo sapiens
ttgtctatcccaaaaattggtgtaaaaatcagaggagatatcatatgcaatgcagaattcctggaactsaaagaaatggtagctaggaataatcacaataagcactagtaataataagagtcatggatcacacctcctcttccccctactaaccttctcatcatctataacaattaatcatatatgatttgataatccctcttaaattattatttggaagtgataattaaaattttatttacattttgtcactgttgtt

SEQ ID NO: 200216 - DNA, 259 bp, Homo sapiens
ttgtctatcccaaaaattggtgtaaaaatcagaggagatatcatatgcaatgcagaattcctggaactgaaagaaatggtagctaggaataatcacaataagcactagtaataataagagtcatggatcacacctcctcttccccctactaaccttctcatcatctataacaattaatcatatatgatttgataatccctcttaaattattatttggaastgataattaaaattttatttacattttgtcactgttgtt

SEQ ID NO: 200217 - DNA, 544 bp, Homo sapiens
cctctgttttcattttgtctgcatcatgtctgtgttgcctggagatttgtagctgttgtttcaagaaagatcaagtgacaatgggagatagacggtcttcttgattaaaaagtggcactcagatacatcagcttcctccaaattcaagaaggagaagcttgtttcacagctagtgcctgcttcaggggcacgcctccctggggtcagctgaagcttgctgtccgctttccaggtctgyccaagcaagacctgtactgtaataacatgtaaaataaaatttaagcctcaagggaggggttagaaattgccactgattgactcaggaccatcctttgagagacaatgaaaaaactggcatagcatggttagactaatctgcattctgaaaagtcctagtcctgaaagtgactaactgtgtgacctgggaaagttccttagcctctctaagcttcaatgtcatcacttggagaacagagctgatgaaaacacacctgatggagttgctgatgccatgggatgagatgatacaaagtgtttggcatca

SEQ ID NO: 200218 - DNA, 614 bp, Homo sapiens
gaagaaagatatataaccagtcaacagcacaacttggttcactgagccagaagactgtacaggtgagaatgaaaaacctgcttcaccccactcaagagggagttcagtgggcactgacttacactgaggttggatggaatcctcagtatgaaatgtttactaagtcggcaaaaaagatgaaagagagccgattatgttcaagcacaagaagaagtggagattagaatcctgcttttaaagtacagtgaaggctgggcacagtggctcatgcctgtaatcccakcactttggggggccgaggtggatggatcaccagaggtcgggagttcgagaccagcctgaccaacatggagaaaccccatctctactaaaattacaaaaattagccaggcttgatggcacatgcctgtaatcacagccgcttgggaggctgaagcaggagaattgcttgaacccgaggaggcagaggttgtggtaagccaagatcatgccattgcactccagcctgggcaacaagagtgaaactctgtctcaaaaaaaaaaaattaaaattaaaaaataaagtgcagcgaactcactcactaataaacatgtcccagaaagtgctaagtctg

SEQ ID NO: 200219 - DNA, 384 bp, Homo sapiens
cctgcctgcaacttcatgaaaataaatgtttattttaataacaataagattatgagattgttacacagcattattatggtgatagctgactgggacactttgcttatactgaagtgagaaggaagtatttgcctccagtaattctccccaggtcattttcccagatatccaatctcctatcaattctcagcatcctttatattgaggtgggtgatgagctgatgctgagacaaccagctctgtgatgtcttccttgcaaatgcttaattgatggcttagcacatcattttagaaaatgagaagatttgggcacttattgtttagtttgggcactggagtcaaatctgagawgatagaataagttatgtttactattctccttca

SEQ ID NO: 200220 - DNA, 619 bp, Homo sapiens
tttgggcactggagtcaaatctgagaagatagaataagttatgtttactattctccttcacacatacaaaatttggatcatactatatatatagatctacaacctgactgctttcacttaaaaatagattgcaacatttttccatgacactcaattttcttctaggccttcaattttctctttctttgaaaamctattagagaataaatgagaatatcaagtggagtaagaatggcagaattatgcacttgggcccttcccacctgcatttgtagggttttccctgggcattctgagtgtttatgtaaactgagagaacctcagtgttacccacttgtaactgaggttctcttggtttacataagcactcagaattcccagggaaatatgaggttctgccacttgtttcttttctttccccatttggttaagactaggtacaaacacatagtcaatgataataaattaattaagctacactgaattaaatggaaataaaatatactgaattgaattgaactgtaaagaaaacaaaaaaagaggtgtaatattagtctgcactaaatccaggacgaagagtctcccaaaacaaaatgtggcaggtgattttaaagaagat

SEQ ID NO: 200221 - DNA, 586 bp, Homo sapiens
tgcaacatcctcttctcgcattcttcctgccacaatggcctcttgctattgcagaaactctcctgcatgcttccatctcaggtctcttaaagtggctgttcctgtgcctggagcatttctccccatgaaatccacatggctggctcccttacctctatagggtctttcttcaaatgccatcttgtcattgaggccatcccctcatccctccctttttatttttccttatagcaattattaccttctatcatacacattccattatatattttattttattttgtcttcctcctttagaatgtaagctccatgagggtgcaacttttgtcagctatatttactgctgaatcccaagagtataagagaatacctggcaataagttcacataacwtttgttgagcaagtaagcatctgcactcattggtcaaataatcatcaacagcaaaagcagggagaagtaaaaaataatagcagatatcaaagtccaaagaaaaatcaggactgcttgactttactgttcttgagttgcctctccagagcatctgtgagttgcaattttcctcctcaatggaattggaacacttc

SEQ ID NO: 200222 - DNA, 497 bp, Homo sapiens
gaattccaggccattcactcaccaagtcctctcttctcacctcctaaataagtgctcatttaatgcacttttaattttctccaattctactgtctctactctggtctaagctccccttgattaatacaaaacatcctcctgataggttcctcttyctctttgtttgcatccttcctatatattccccacccagcagccagatgccctttctaaaaggcaaatctgatcaggtctcacagtgctgaaagcccttcaagtctcaatggtctattgaggaggcctttcagggcttgaacaaatccacccactcctgcttcgtgcccatcctcactgcacacacagttgccttatcttccagtcaaacagagcagtctgcaatgcaccaaatctactctgtctttcttgaagaattgtcttcccctcgctcacccccaccttcatcatgctaattcctgttgatgtcatttcttccaagaagtcttctgcagacaggccca

SEQ ID NO: 200223 - DNA, 539 bp, Homo sapiens
gagaataacttctgttgttttaagccattcagtttgtgtattttgtcacagtagccctgggaaactaatatactctacgaaatcaccataggatgaagtgctcagctcttggatctctcatgcatgctctggaaaaatcattcttattcattcattcattcattcattcatgtgcatggctgttctgggcattttatargaaatacaaacgaattcatgttatcaagttaacttcaatctggggaaacaagaaatttgcagcaagaggtagattaaatactgtggcaaacagaatgagtctctgggccagtccttagcacttggtgggtgttcggtatcacaaggtgttattgtgagtaacaacaggtgaagtggtggacctattacagacagtagaatcatactggttgtgtgagggtgtcatcctctccaacctctactcactgcctctcttagagagtctccctcctctctcactccagtgttctaacacattctcctatttattttcttcatggcttgtaacactccctgaaatg

SEQ ID NO: 200224 - DNA, 527 bp, Homo sapiens
ttaacataggatggtgtgggctgaactatcagaaaccagacttaaaccggcttatataagaatatgcactatctgacataacagtaagcccaggggtagaaggaccaccgagttggttgtttcagtggctcagcaatgtcactcactgaattgtttctgtaaccaaattctttgggtttttccatgatttgttccctacattaccytcagcctaaagcaggtaatcctcctgctcacaatatggctgccagcagcaatggagccaatatgcacccgtgtttccatctccttctaccatggaatataaatataaatgtgttacttcagtataattggaccaacatggttcatgtgcccaacctatcctcagatgcataaattgacagggaagtgtcatggtgtgattggcttagactaatcagaattcaccagtagaggtgtaaaggtattagtgtctcctgagtcatatgataatgtggagaggaaatggacttctaaataaaatctaggtaatattaggaaggaga

SEQ ID NO: 200225 - DNA, 599 bp, Homo sapiens
cagatctgaaacacaaacctgagtccctaagtctaaagctgtttcaacaagacccagtcactttgcagtcataaaagaacttgacaattatacaaaggcatactccactgaccacttcacaagtagacacctactgtgtgcaagaaatcatgttaggtcctggtgattaaagttccacttctgaagagtatagttgttcctaggtgggggtgagcacctgctcaggactttttcatggaaggtgcttataggttcttctaggagaatgggaaagccaggaggtggaggaaggcttcatcaagagaagaatgtttcygcatttcaggcataggcattgaaagcagggagagagagaaaaaaaaaaaaggatgtagaagtttgaacaggctgtgggcaaggtcaaagaaaagcaaactgcttattctacttcaagaataaagtacaagttatgggaggaacaggtaaaagaaaattatgtacaattttagaaataaaaacagaatattgagttcttgagacttccagaaacatccagaaagaagacagaatctaaagaccaataactaaagtctaagaactctaaaattctagaaccctgg

SEQ ID NO: 200226 - DNA, 483 bp, Homo sapiens
gcttaggtatccaacctgcccactttgtgccctgtggattgctctgtagctttcccctcctgcccttcttatgcttatcatgttcatgatggttgagttctgttggaaaaacactcactgagctcctgccatgatccagcatagcactagatgccagtctataaagatgagtaagttcccatgtttatcatcgaacttctgccttgatttctggttggtaatcaggttttcctcatttaaaacttaatgtagaaggatttatgagacatgacatagttcatgccagcctccccctaccttccacttgagttagacccctcttgttctaccccccactgctgatgkgatcctgatacagcccaggtagattatctaccatctcaacattgtagatcctgcctttctgcaggatggggccctgttgccacatccttcccaccagatcgagttcctatgtttccctctcctatgtgactgtctctc

SEQ ID NO: 200227 - DNA, 667 bp, Homo sapiens
attgatcactattagccaatgatttaataaatcatgcctgtgtagtgcatcctccaaaaaacccacaagaaggagacaaaagaaagaggttcacagaatttccttttagtgaccacgtggaggtgcaggagggtggccttgccctgagagggcacagaaactccacacaccttccctatcccttgccctacatgtcccctcatttggctgttcctgagttgtattttttggtaataaactggtaatccaatatgttgtgttttaatgagttctgtgagctgttctagcaaatgattgaacacaaggagggcatcatgggaacctctgttcgggagctmtaggggttaagagaaaccttcccctttgctctttaaagattcactaaaagtcaactgattgtaaattaaaaatagaatcttaagccccccaccaactgaacagacacgcttttgtccaaggggactccaaagaaacgttaaaaaattgagctcctggccataaatggaaaggaggttggacatgtctcattgtacctcttcctttttggagtttagacataacaactgaccagcattgatgttaaaatagagatcataaggctgacaaaaagactatttgtggcaataagataccaaattataaacaagacctaaggccacacaaggta

SEQ ID NO: 200228 - DNA, 535 bp, Homo sapiens
gtgaaagcaaagatttgaagcaagggcaggaaagtaacttaggtatggcaaggacaaaggtgtatgcatgcacactctggtgcctggtgtacatgtgtgagcaaaacaaaatctctagaatgcttgccattgctgcttgcaatatccaccacacctttgatttatcccaaaagtactgtaaatgaagctcaaatgagttctagttttaaatggctattcaaagaaggaaacttttgagaagtgggaaaaaaaatctgaaataaatatcataaaatggaggttcaaaccctccttctgtcacttggccaattgtgtaaccttgacagccaatgaatgttatgcctagcattccacatcttccactatttctgagcttccaaatatgtttctattttttattgctgtgaaacaaaccaccccaatctcccaggcatagaataataatcatttattatcatctccttgttagagggtttactgggctcagctatgtrgttctcactcagggtgtctcaggcagttgaagcccagcagt

SEQ ID NO: 200229 - DNA, 546 bp, Homo sapiens
tcaccaaatttttataaaatggaaatgacgctttccccaactacatcacatgactacatcaaggatcatgttaagtacaggtgagtakatatatatatatatatatatatatatatatatatatacacacatatatagatatacacaaaataatttatacacaaacataaaatcatgaaggctttttaaaaataggaactgttaattatacataaagcatctccattcgtgcaatttttatgtcttcttccaggtaattaattttatggaaatatacaatcctcctcctgcctgcacctctcccacatacacactaccttcctagtactctggggaatattgggcaaacattctcaccacaaaattatattaagaagttaaataaacattaaatattgtatgatacatgcatcacacagggaacgttgtttatggatgctgagattttctaggcaacctcagaatgctaatatgtttaacatcaactattgcctccttgttctgagatggcatctaagatatggagatgtgtctttttctgtcttt

SEQ ID NO: 200230 - DNA, 489 bp, Homo sapiens
atgtgacatcaaatttgttttttaatcctgctgcatttacatgagtcaaagcatgaagttcttgtgcttttatgartgcagatgataccagtaagtcagcttgttcatttgctttagtcaaaggccctggtaaattagtgtgtgctcgaatatgagtaatataaaatgggaaatttctttttcttacagtttgttgtaataaattgaatagctggtttaactgatcatccatgctatatttaattagagctgtctcaacatcccttgtagcctgtactacatatgcagaatctgatataatattgataggttggtcaaaatcttgtaacactgtaatgactgcaaccaactctgctctttgagccgattgatatggagttttgattactcgttctttcggtcctgtgtaagctgcttttccattgctggaaccatcagtaaatactgttagagcattttctaaaggttcacgtctggtaattttaggta

SEQ ID NO: 200231 - DNA, 489 bp, Homo sapiens
atgtgacatcaaatttgttttttaatcctgctgcatttacatgagtcaaagcatgaagttcttgtgcttttatgagtgcagatgataccagtaagtcagcttgttcatttgctttagtcaaaggccctggtaaattagtgtgtgctcgaatatgagtaatataaaatgggaaatttctttttcttacagtttrttgtaataaattgaatagctggtttaactgatcatccatgctatatttaattagagctgtctcaacatcccttgtagcctgtactacatatgcagaatctgatataatattgataggttggtcaaaatcttgtaacactgtaatgactgcaaccaactctgctctttgagccgattgatatggagttttgattactcgttctttcggtcctgtgtaagctgcttttccattgctggaaccatcagtaaatactgttagagcattttctaaaggttcacgtctggtaattttaggta

SEQ ID NO: 200232 - DNA, 489 bp, Homo sapiens
atgtgacatcaaatttgttttttaatcctgctgcatttacatgagtcaaagcatgaagttcttgtgcttttatgagtgcagatgataccagtaagtcagcttgttcatttgctttagtcaaaggccctggtaaattagtgtgtgctcgaatatgagtaatataaaatgggaaatttctttttcttacagtttgttgtaataaattgaatagctggtttaactgatcatccatgctatatttaattagagctgtctcaacatcccttgtagcctgtactacatatgcagaatctgatataatattgataggttggtcaaaatcttgtaacactgtaatgactgcaaccaactctgctctttragccgattgatatggagttttgattactcgttctttcggtcctgtgtaagctgcttttccattgctggaaccatcagtaaatactgttagagcattttctaaaggttcacgtctggtaattttaggta

SEQ ID NO: 200233 - DNA, 541 bp, Homo sapiens
ttagttgccaacactaaaagcaagtcaataaacctgtttcaagttaaatttctgttgtaccgttatgctggataaggtcacctgatgcagtagtgcaggtacacacagctccgaatggcaccattactgtggactgcaacctgcacacacttagatgcagcacttttaattcagccaggtcaccctcggatccattccctctctgcttgtctataatgtccagctgcatcagaccatgactctgtaacagaagaagaaaagcttttggatgaaaggaggaaggttaattataaggaaagttgataagaaaggcytgtcgggaggatgactgagtgctaagtctcctcccaaacaccctaaccaggcatctcagtgtactgagaaatgcaaagaaaagcctcttttctctaccacattccccatctcccaagctttggctctctgaatctagaataggagtgaggagacgagcaaacaatagcctgaactctcagtgaaaacatgcagaaagaaagtcacagaggaaacagtcgcagggtgg

SEQ ID NO: 200234 - DNA, 567 bp, Homo sapiens
gtaataaaacatctctaccctctacatagaaaatgttctcttattcaatttctctctyctgtttcatctattcctctttaatcttaattgacataataatctgccaatcatatcagtggcttgctggtcttggaaaggtgagaatcccactgcgtcccagtggcctgcttttctagggaattaacaaggccttcacagagtcccagcctgcttttccaggagaatatcctcctcttcatcatgccatcgtaataagctttatcagagcccagccagctctgtatctcttgcaacacaactgacacaacattttttggtagaacaaaagaaataaacatccaaatcactgttctcaataaaactgagtaggatgactgtccttgcttagaagttggggtgaggtccttctccagcaatttatttaaaacttagaacaccacatttctcttaagtacagacagaatttttttaatagaagagtgtgttaatttcttcaagccaagtcagtgaagaatatttttgaagtctcctctgtctataaagtatcacttagttatttaagaattt

SEQ ID NO: 200235 - DNA, 567 bp, Homo sapiens
gtaataaaacatctctaccctctacatagaaaatgttctcttattcaatttctctctcctgtttcatctattcctctttaatcttaattgacataataatctgccaatcatatcagtggcttgctggtcttggaaaggtgagaatcccactgcgtcccagtggcctgcttttctagggaattaacaaggccttcacagagtcccagcctgcttttccaggagaatatcctcctcttcatcatgccatcrtaataagctttatcagagcccagccagctctgtatctcttgcaacacaactgacacaacattttttggtagaacaaaagaaataaacatccaaatcactgttctcaataaaactgagtaggatgactgtccttgcttagaagttggggtgaggtccttctccagcaatttatttaaaacttagaacaccacatttctcttaagtacagacagaatttttttaatagaagagtgtgttaatttcttcaagccaagtcagtgaagaatatttttgaagtctcctctgtctataaagtatcacttagttatttaagaattt

SEQ ID NO: 200236 - DNA, 607 bp, Homo sapiens
tggaattaagtaccagttttcccatttaaagccccagctgcttattaatttatagattctgtagaaatttttttaaagatttatctagtctattgtgtagcctctatctcaggagtgagtttttattttcctatgcttatagagaaaaaaacattttcaaggttttaaaattttacaccatttataaaatattagagtgtattttttcagtacaaatgtttaaaatatgaagttttttttgaactaaactacaaagagtactgaatttaaagaaaagacctttattaaggggcaatatgtgatccattccaaattattttgaaatattaaatttcagttattctgtggtgttttctgtcatcatcatgtttttgttgtcactcccaaaataaaggggaggagggaatcacagagtatgttatcttgatagtgaaacctctgcttttcttgaccatttctgtaaggaaaactgctactcctttggtacttgccctaagttttaacaaaattagtagaaaatattaccatgtcatttgwatatatcatgaaaaatgaaaactacatgaaaatctgaaacaaaatataacaagttaaggttgaaaaattt

SEQ ID NO: 200237 - DNA, 599 bp, Homo sapiens
aatttataacatcccctggggtccaacaggatataaaattctaagctaatgggtacaaatgtataggtagctagaagaaataaaacctagtgtttggcaggtcagtaggctgaatatagttaacattaatgtacattttaaaatagctagaaaataataagttgaatgttcctagcataaagacatatttttaaggtaataaatagcccagttaccccgatttgatcttcatgcattacatgaatgaataaatgaatcaaattatcacatatacccccaaaatatatacatctattctgtatcaatttttaaaattctaagctaaccttgagaacccatctgtgaaaaagttttccatggcaaatggaaaattacatttcatattcgctaaatgctttcaatgagtaaagcacacgaaggcacatgaaagaaaatgaggtcctctggcctcaaagagttttccatctactgaggggaatgttaaataaaatcacaaagtcacactggcttaaataccaagstgagtagtaaaaataattagcacatttattgtagttgtgtggtcatcagttagtgtggtcttctctaggccaatgtgc

SEQ ID NO: 200238 - DNA, 586 bp, Homo sapiens
caagtaacagacttaagatgttcaatattggaactctttggcatcaactaaaaaagaaaccttggtaaaagcagaatttacaaacattttgttccttgcagtacacctttcaaaagacatcttcatcaaataggtaagaaaggtaagaattgctgaggtaagtagaggtctcttttattatggtcttcattctatcattattaaaccttaatctcatgtcctgttccaaagcattatgtgagtattcaatcaaagaagtgaggctgttctccagaattggttctctgctacaggtcaaaaccgactgcgccagccttggcgaagctccgcctactgccctttgctccaagtaatttttggcgatttttaaagtaatttttccggcggagtcatagtggcsctatactcttggataggttatcctgtctcttccgctagattgatgagatcaggtatcactcgaaaatggcgccgaaaagtgctgaggctcctcattcaaattcgttagagccaaccctgccttctacctactttcaatacagtaacctaactgctcttgttaaaatataaatcagattatgtcctg

SEQ ID NO: 200239 - DNA, 401 bp, Homo sapiens
aattttaatcatttgattacagtgatgttyaccaggtttatctatattaaaagtaatcattttccctttgtaattaataaatactttgtggggaggtactttgtcatgtttcacccagtagttttaacatacattgatgattcttgcctgagtcagttattactgtaatgattgccatagtcataattttctaactccatcatatctatatttattagttgaccttctgctggttggccatttaaaaattcatctgttcatagtgatacaaggtttttccttgacttccccttttccatatttctatcccatctcaaatctaaatctctgtctcctaagagcagcaataaatttgcacatttgcttaatcctacatcatacacaaaatacttgcagaattc

SEQ ID NO: 200240 - DNA, 588 bp, Homo sapiens
tgcggcctgattcgaagactggaatagaggatttctagaattctgtgactccataatcataactcactttcctaccacatgagcaggctctgggggctttggtaggggatctggaaatttaactgctctgtctgagtctttggaacaccctatgtgtacagtacttaagtattaayttattttcaaccatttctcaattgtacatcagaaggtaaaatatggcagaattgaaatcaacctataatctttccagtactctttttggtcaggttttattctccccattggccaatttttttttttaaacttagagttgcaagtagataatctcattaaacgatttggtattttttatctcttttcttttctcctggcactctttggtagaaacctcagtgaacagtgaaatatgatctgaaagccagcagccgggagagggaagcagcacaaggattatccaccaacctcaaatcaccagaaggagaagggtttggaaagcctgaggcctggctcctctccctctctctgcctcagagactccaatcaactttccccatccctgtccagagtggccccggaagagcacca

SEQ ID NO: 200241 - DNA, 588 bp, Homo sapiens
tgcggcctgattcgaagactggaatagaggatttctagaattctgtgactccataatcataactcactttcctaccacatgagcaggctctgggggctttggtaggggatctggaaatttaactgctctgtctgagtctttggaacaccctatgtgtacagtacttaagtattaatttattttcaaccatttctcaattgtacatcagaaggtaaaatatggcagaattgaaatcaacctataatctttccagtactctttttggtcaggttttattctccccattggccaatttttttttttaaacttagagttgcaagtagataatctcattaaaygatttggtattttttatctcttttcttttctcctggcactctttggtagaaacctcagtgaacagtgaaatatgatctgaaagccagcagccgggagagggaagcagcacaaggattatccaccaacctcaaatcaccagaaggagaagggtttggaaagcctgaggcctggctcctctccctctctctgcctcagagactccaatcaactttccccatccctgtccagagtggccccggaagagcacca

SEQ ID NO: 200242 - DNA, 588 bp, Homo sapiens
tgcggcctgattcgaagactggaatagaggatttctagaattctgtgactccataatcataactcactttcctaccacatgagcaggctctgggggctttggtaggggatctggaaatttaactgctctgtctgagtctttggaacaccctatgtgtacagtacttaagtattaatttattttcaaccatttctcaattgtacatcagaaggtaaaatatggcagaattgaaatcaacctataatctttccagtactctttttggtcaggttttattctccccattggccaatttttttttttaaacttagagttgcaagtagataatctcattaaacgatttggtattttttatctcttttcttttctcctggcactctttggtagaaacctcagtgaacagtgaaatatgatctgaaagccagcagccgggagagggaagcagcacaaggattatccaccaacctcaaatcaccagaaggagaagggtttggaaagcctgaggcctggctcctctccctctctctgcctcagagactccaatcaactttccycatccctgtccagagtggccccggaagagcacca

SEQ ID NO: 200243 - DNA, 427 bp, Homo sapiens
aatggagagcttattaggatgtattatggcaacttggctagtgacaacttttgtagctcaaagtttctctaagatgagatagaatatgttttgttttatctagaaaacctatatcaagcaagtcatccagattttgatatttaagtttgaaaatctatagagggattcctataatttgtgcttttgcttttcctttttccattttcttagttacctaggtgagctctttaaaaaataagcatggccacatctggacaaaattaactggtctgagggcaaagtgcatagcaagggtggagtgagtatcatgcctcaaagatacagtggttatcttaacattttccagttgaaaaacatggtaagatgtaggatgttggataaataaggcatgtgaatrtgtccctgaattgtctgaatgtgacccggc

SEQ ID NO: 200244 - DNA, 619 bp, Homo sapiens
atgaggcttaaggaaagcattacaaaaggggttgaactttaactgagttttgacatatgaagaagaagagttcaaaatgggaggtaatggggattaaatgtgaaaaagagggcttggggacaaattctggatggcatgccaaagagatagaaggcttctgagcagaaaagagacatagtcaaagccacgtttcwgcaagataattctgaaagtactaagaagtccaaattggagtggagagcaggagatgacttaagagtttatagcaatggtccaggtaaaaatgatgaaggcctgggacagaaataatgagatctggaagttgtttggatggggaaagctgaaaagaaataagaattgaagatacacaagtatctggactggattacgaggagcatgattatgctattagctgagattgggaactcatgagtaggagctgattgtggaggaatatagtaagattggttttgggtaaggtgagttgaagatgtccattggactgtctttaaacattcagactttcgcttgtttcttattttctctagctgaatcatagacacatcacaaattgtgtcaactcgtccacaaggaagacagagtccatgccttatttgat

SEQ ID NO: 200245 - DNA, 527 bp, Homo sapiens
gatactacagaattacaaatattmgtaatatgctactattaaaaatactacactaatatattaaattacctggacaaaatggataaattcttagaaacttacaacctagcaacactaaatcataaagaaaccggaaatttaaacaaaccagtaacaaagaaggtgcttaaaggtgtacaaaaaacctgcaacaaaagaaaatttcaggacatggtttcacaggtaaatcctacaaaatttttaagaaaaaacaaatgcctactttcgaacacttccaaaaaaataaaaagagaacacttacaaactcactttacaagtctaccatacaaatccgaataaggttcctacaaaaaatgaaaattacagaccaatgtctctgatgagtagatgcaaaagttttcagcaaaatactagcaaactgaattcaacagcttattgaaagaatcatacaccatgatcaagtgtaatttgtccctgagatgaaagtgtggttctacatacaaaaattgataagtgtgatatacccc

SEQ ID NO: 200246 - DNA, 475 bp, Homo sapiens
taggaagtggaggttgtagtgagccaagagtgtgcccctgcactccagtctggatgacagagtgagactccatctcaaaaaaaaaaaaaccaaaaaagtcaaaaaataacagatgctagtgaggttgtggagaaaagggaatgcttacacacagttggtgggagtgtaaattagttcagtcattgtggaagacagtgtgacgattcctcaaaggcctaaagatagaaaatccattcaacccagtaatcctactactgggtatatacccaaaggaatacaaattaytctattataaggatgcatgcacacatatgttcattgcagtactattcacaatagcaaagacatgaaatcaacttaaacttacatgaatgttagactggataaagaaaatgtggtatatacacaccataaaatagtatgcagccttataaaagaatgggattatgtcctttgcgtggacatggatggagca

SEQ ID NO: 200247 - DNA, 475 bp, Homo sapiens
taggaagtggaggttgtagtgagccaagagtgtgcccctgcactccagtctggatgacagagtgagactccatctcaaaaaaaaaaaaaccaaaaaagtcaaaaaataacagatgctagtgaggttgtggagaaaagggaatgcttacacacagttggtgggagtgtaaattagttcagtcattgtggaagacagtgtgacgattcctcaaaggcctaaagatagaaaatccattcaacccagtaatcctactactgggtatatacccaaaggaatacaaattattctattataaggatgcatgcacacatatgttcattgcagtactattcacaatagcaaagacatgaaatcaacwtaaacttacatgaatgttagactggataaagaaaatgtggtatatacacaccataaaatagtatgcagccttataaaagaatgggattatgtcctttgcgtggacatggatggagca

SEQ ID NO: 200248 - DNA, 519 bp, Homo sapiens
tgaaaactgtaggaaattgataaaagaaattaaagaagacacaaataaaaagataccctgtattcattggccagaagacttagaaatgtttaaatgtctgtattttgcaaaatgatctacaaattcaatgcaatctttatcaaaattgtagtgactttttttcacaggaataaaartagaatcccaaaattcatatgaaatgacaaaacatcctaaatatccatagcaatcttgagaaaaacaaggctggaggaatcacagtttctggagttaaattatatttcaaagctatagtaatcaaggcagtatgatgctaatattaaaaaaaaaccacatagaccaatataatagattggagagccccaaaataaatccacacatatatggtcaactgatatttgacaaggacaccaagaatattcaatagggaaaagttagtctcttcaataaatgatgcaggggaaacggggtgttcacagacaaaataacaaaattagacccttgtcttacattatatac

SEQ ID NO: 200249 - DNA, 305 bp, Homo sapiens
agtttctaagactcttccacattttcaggtatctttagagcaatgccccacctcttagtaccagttttttgtattagtctgtttttcagttgctataaaaaatacctgaggctgcataatgtataaagaaaaaaagatttaattgattcatggttctacaaattgttcaggaagcattgtgccagaatctgcttcttttgagggcactaggaagcttataatcatgatggaaaggcaaatggggagmaggcacatcacatggcaagagtgggaacaagaaagagaaaaggaaggtgtcacacttt

SEQ ID NO: 200250 - DNA, 611 bp, Homo sapiens
atattagtttttaccctcatcctatctcttcactgagattacaaaatcctagcatggggctaattacaggggaagattataatacataccaagatacatgggctttggccagtggctttggggaggcaaaattgaaacctatagaatgttaagcagcaattcagcgtatgattttttctttaaatctggaagtcatcactgcctgttcttgtcactaactcctcacaccaaatacagcaccaagtcttgtctattttgcctgctaaatatctcmaatatgttcctttatttgtaaaccctcactgtctctcacccggatggttgcaacagccttctcattggtctccttttggttttgctctacctgattccactctccacactgttgccctctttctaaagttcaaatctaatcatgtcactcagtggcttaaaacactttagtaattcttcatcatgctaacggtaaaataaaggaaaaactacttaatgtgacttgctggtcagttatgtccaatccctgcctttctctttggtcttatatctgcctacttctcacacgcaaactgtatgatttggtacaattgaaccacctagaattctacagacaa

SEQ ID NO: 200251 - DNA, 450 bp, Homo sapiens
atattggtagtgaggcttaagaagaagaggacagacaggacattcttgcaaactaagcagagtaaatgcatcccattgggcactagtcaatgcagtatacagcccagacaagctggaggacctcgtgaccattgctaagtgtagagaaaaattgtgagagagccagcctgtgataaagtctttagattgtgggtggatgttaaaattttaacctctgctctcagcttyccacaaccactaccatctcttagatcatcattattttttctgcaaatgtatttgtccttttgaagcatttatgcaatttgtagttatttgtttatatgtggatctgtttgtttattttttgtcttccccactggattgagagctctctgaaaataagtgttggtgtttagctctttagccatactacttagcacaattccaataacatagtagacttttcct

SEQ ID NO: 200252 - DNA, 533 bp, Homo sapiens
aagaatgtcttttacaacttgatatggtttgcatgtgtgtccccacccaaatctcatgtttaattttaatccctaatgttgaagatggaccttggtcagcagtgattggatcatggggacagatttttcatgaacggtttgtcaccatcccctttggtactgtcctcatgatactgagtgagttctcgytagaactggtcattgaaaagtgtgtgacacctccacccttgctctctcttgctcctgcccctgccatgtgagatgtttcactctccctttgccttcctccacgactgtaagcttcctgaggactccccagaagccaagcagataccaccatcatgctttctgtacagcctatggaactgtgagaaaattagttattgctctataggtcacccagtctcaggttttttatagcaatattagagcagactaatacacatttactatttggtaatcaaccaatagaattttatatgctgaaagatgcatccaaatgttctgctttgttgccaggttagcttaaagga

SEQ ID NO: 200253 - DNA, 533 bp, Homo sapiens
aagaatgtcttttacaacttgatatggtttgcatgtgtgtccccacccaaatctcatgtttaattttaatccctaatgttgaagatggaccttggtcagcagtgattggatcatggggacagatttttcatgaacggtttgtcaccatcccctttggtactgtcctcatgatactgagtgagttctcgctagaactggtcattkaaaagtgtgtgacacctccacccttgctctctcttgctcctgcccctgccatgtgagatgtttcactctccctttgccttcctccacgactgtaagcttcctgaggactccccagaagccaagcagataccaccatcatgctttctgtacagcctatggaactgtgagaaaattagttattgctctataggtcacccagtctcaggttttttatagcaatattagagcagactaatacacatttactatttggtaatcaaccaatagaattttatatgctgaaagatgcatccaaatgttctgctttgttgccaggttagcttaaagga

SEQ ID NO: 200254 - DNA, 631 bp, Homo sapiens
acacataaatttaaatacgtagaaattaactgtaagagtgaaagatctctacaatgaaaactataaaacactgatggaagaaattgaagaagaggacaccaaaaaaaatccatgttcatgaactggaagaatcaatagtgttaaaatgtcccaaacgatataccgattcaatataatctctttcaaaatgtcagtaatattctttacagaaataaaagatrtcctaggatttatatgagaccacaaaaggccaagaatagccaaagctgtcttaagcaaaaagaacaaaactgaaagaatcacattacctgacttcaaattatactacagatctacagtaaccaaaacagcatggtactggcaatgaaaaaacagactcatagaacaatagaacagaatagagaacacagaaactaatccacacacttacagcaaactcatttttcacaaaggtgccaagaatacacactaggcaagagtctcttacataaatggttctgggaaaactggatatccatatgcagaagaatgaaattagacccctatctcttactgtatacaaaaatgaaatcaaaatgtattaaagacttaagcctaagccctcaatatatgaaactactactaccactac

SEQ ID NO: 200255 - DNA, 485 bp, Homo sapiens
aagtatttgaccttcattcattcttctatactgaatagaggctaaacacttggacagcaccatccttagggtaaatctttggatgcagagcattaagttacctttttgtcagttaggatcctggcaggaaacaaatggyatgctcaaattgggaatttgtgctgagatttaatagaaaaataattacagaagatgcaaatagggtagtgtagtaccttggaactataacagtaggggtatacccaccattctagacctaaagaagtgaaaagagacgcagtgaaaatgtagcccagccatggcaaaaccttccccacaagagggtaagtggtggaaataaataccctaacttcactatctccacctcatcttatctccttccagagcacctcagcagccaaacccaaccagaaactacactctggtcagtctcctcatgcacagaggagggtggaacatggatctggaaggccaaacaaaaggta

SEQ ID NO: 200256 - DNA, 299 bp, Homo sapiens
tgggtgacttagtcattttagtttgtgggctttggagagtctaggycaaatcgggtagaagcagtaccccagcacattaagtggctccacagaaacatggccagactgcttgtttaagtgggaccacaattgcattcctattcactgagcagacacttgcatctcagatctccagccacctcctacaggtgtgtgcaggctggccacaagtccatgcctccctaggatggaactctcataggaagatgcaggttgcagtctttgatgtttcacagccttcactggtgatatatctaggt

SEQ ID NO: 200257 - DNA, 452 bp, Homo sapiens
ggacaaagatggctgactggaagacgtggagaccagagggtcccattgaaaataactaaacaccatgagaatccagcaccggcaaccaaggtatacatgttctgtcatcaggactgactgggtggctggcttgacctatggagaggaaagaaaaacagtgtcgtgcagcagcccaaataagtgctacatggggcaagggagcccccatcacccagccaaaggaggctttctgaggcatctggacagcccagacaagtgggtttccccctaacacgacacacaccgaaagcaacagcaacatcaacaaaraaaaaagtctccaataaaacctcatgcaagggtcagcagcctcaaagattgaaagtagacaggaagataaggaaaaaatcagcagaaaagtgctgaaaactgaaaaggccagagtgcctcttctcttgcaaatgatcacgcca

SEQ ID NO: 200258 - DNA, 579 bp, Homo sapiens
caaactccactgagctaaaggagcatgttctaacccagttcaaagaagctaagaaccttgataaaatgttacaggagctgctaagtagaataactagttyagagagaaacataaactacctgatggggctaaaagatacagcacaaaaactttgcaaaacatacacaagtatcaatagcgaaaatgatcaagcagaagaaagaatatcagaatctgaagaccatcttaccgaaataaggcatgcagacaagattagagataaaaaaataagaaggaacgagcaaaacctccaagaaacatgggaaccaaacctatgattgattgggttacctgaaggaaatggggagaatggaaccaagttggaaaacacatttcaggatattatccaggtgaattttccccaacctagcaaacaggccaaaatgcaaattaaggaaatatagagaacaccactaagatactccatcagaagatcagccccaagacacataatcatcagactctccaaggtcaaaatgaaggaaaaaagttaacaaaaatttaacaaaacagatagaccactagctagactaataaaaa

SEQ ID NO: 200259 - DNA, 566 bp, Homo sapiens
gagatatacctaatgctaagtgaggagttaatgggtgcagcacaccagcatggcacacgtatacatatgtaactaaccggcacattgtgcacatgtaccctaaaacttaaagtataataataataataataataataataatgataataataaaagaaatatattgaattctcaggcaaaaaaataagaaatgtttattagtaaactttttattgctatagaacataatattgaagagagcaaaaatcatgtttcacccaaaggatagtcacaaagtgaacatgtaatcaacactaagatttttagtctccctaggtgacttcaaacattatgatgtttaatttcacctagttttgaacttcccacaaacataaacatgcaatatgtatccttttacatcttgcttcttttagtcagcattatatctcagccatattgttgcatatgwtttttggagtataattctcattttttgtaaagtaatccattgtatggacataccataatttatttattcactgttccattctactgctgttagactttttagctcctaattaattcca

SEQ ID NO: 200260 - DNA, 568 bp, Homo sapiens
taattatggaaatgatgtcagtgagcagaaacaacactcagtaagttttataatctgaaagagaaggaataggaataggactggctggagggggaagtgagaacaacaagatttttctgaaagttggagataatagattacatttgcatttccatatgactgccacactagagaagaaaaaatttatgattcagcaggcagaaggaataactttagcaataaaatattgaaacaattgacatcataaaatggtccaytgggtattgattatctctccaaaatgaattttgctcctgtccattgtagagtatcaatggcatttggttagaattgagtttacttcccaattcaagatgaacatttaatggccaaggcccaccattattttctcagtaatgtttattgcaaacacaggcctaaacacatggttgttttctgaacacactgactcagaagtcccctaatcgtcccaaaactgaggggtcagatttggatgattatggaaggagacatgcttcttaagagtaacgaggaagtgggtaatccatgttgctgaggaccaccatct

SEQ ID NO: 200261 - DNA, 601 bp, Homo sapiens
caataataaaaattaaatatttgataataaatgaaaagctcttgaatgtcactagtatcacagaatacgaaaactaaactacagttaaagttttcacccattcagttgtcaaagtttatagttttataatatcttagttggcaagcctgaggaaatgtatatmcttacacactcatggctgactctcacttcatatattcttgaaaataaataaaccctgcccacctaggattctatattcaattttttcattaagtaggccaagcatacttacatgtgtcacagaaaaaaaaaaaacaaagacaagaggagaataatattagagtgtcaacacggattatattttggaatttatttaaattacctaaatacaagttgaaagtatccaactcaaattaaagttaatattttgttaaaaaacagaaaccgttttctaaagaaatcctttaaaagaacacctgtgtcaataagcgtatgtctaaaacatgtaagcacttacaactcaatgtacttttattttttacgttaattcctgtattatacctaagaagtaaagattaataatttgtctcataactgcatcactttaggctgcaatgtc

SEQ ID NO: 200262 - DNA, 549 bp, Homo sapiens
ttgagtcagtattctgatgtctgctttcgctttgctgttctttaccatacacacccaccttgccattggacagtgcctccacttggccactgtccctccagaatacaattacttccaatgtgtttaggtttccccattcagtggctgcacttcctactgtgaggtctgtccgatagagaaaagcaaccacagatctctttgagaatgttggggcttccctcacacatttatttctcacactcgtrgtgaaaggtatgtcttctggaccttcccagagtgcatgtgtccagtctccctaagcctttgaagtccttcttcattaaaccaaagcagggctgacatttttaacttgcttactgtgggctgctttttggcccatattttagctaatcaaccaaaccaactatgaaagccctttctaactccctgagctgcaaccttaaatccagaatattcttattgggcccatatcaacacatttgtcttgatccaattttatgttccttccaccattatcccacacctttagtatcctttcccacacatgtt

SEQ ID NO: 200263 - DNA, 616 bp, Homo sapiens
ctagaaacaattagacctatgagccattgatagaatatttcacctcaaaataaaagactacatattctctttgacttgaacatttaatgttgaacattctacaacatagaccataaattaagccataaaacaagtctcaaccaattaaaaaggactaaaatcattaaaatttgctctttggccacagtggaataaaactggagatcaaaaaaatttttggaaattcacaatatgtaaaagttaacataatgctaaatcacaaatggatcaaagaataaatcacaaaagaaatttaaaaatatttttatgttaatgaagacgaaaacacaagatacacttacaggatgcaaagtaatgcttagatggaaatatatagctgtaaatatctatattaaaaaagaataaatatcttaaatgaataacctaattttgtatctgaataaactagaaaaagggaagaagctaaacccaaggcaarcaaaaagaaggaaatagtaaataattggttgtaaataaatgaaatcaaaaacaatagagaaaaatcaatgataccaaaagttagtattttgaaaagatcaacaaaattgacaaacctttatctagaaaacccagaaaa

SEQ ID NO: 200264 - DNA, 616 bp, Homo sapiens
ctagaaacaattagacctatgagccattgatagaatatttcacctcaaaataaaagactacatattctctttgacttgaacatttaatgttgaacattctacaacatagaccataaattaagccataaaacaagtctcaaccaattaaaaaggactaaaatcattaaaatttgctctttggccacagtggaataaaactggagatcaaaaaaatttttggaaattcacaatatgtaaaagttaacataatgctaaatcacaaatggatcaaagaataaatcacaaaagaaatttaaaaatatttttatgttaatgaagacgaaaacacaagatacacttacaggatgcaaagtaatgcttagatggaaatatatagctgtaaatatctatattaaaaaagaataaatatcttaaatgaataacctaattttgtatctgaataaactagaaaaagggaagaagctaaacccaaggcaaacaaaaagaaggaaatagtaaataattggttgtaaataaatgaaatcraaaacaatagagaaaaatcaatgataccaaaagttagtattttgaaaagatcaacaaaattgacaaacctttatctagaaaacccagaaaa

SEQ ID NO: 200265 - DNA, 430 bp, Homo sapiens
ctggctaacacagtgaaaccccgtctctactaaaaatacaaaaaattagccggccgtggtggcgggcgtctgtagtcccagatattcaggaggctgaggcaggggaatggccgtgaacctgggcggcggagcttgcaataagcggagatcctgccactgcactccagcctgggtgacagagagagactctgcctaaaaaaaaaaaaaaaaaaaaaaaaaaaaaaggtatatatatatatatatatatatatatatayacacacacacacacacacacacacacacaatttctataaaattgggattaaattgtatatatgtatatatagccatctataatatttataacaaatttaagaaattaatactagctccaaatctatgcccctgcacttaccacttggctccaaaggcacctatacaatgtgat

SEQ ID NO: 200266 - DNA, 599 bp, Homo sapiens
  misc_feature (1)...(599): n = A,T,C or G
acttggattatttttaatattgtgtttttatgacaaatatcaggccacacatgcataaggataattactggaaaacatctatgattatttttacagtatgaatttctggaagttacattgtgggaactaaaattttaagaacagttatctgcattagagtagcartgtaattcagagggtagagcacagaccctggaggagacagccacgatttcaaattctatttatgctacccacctgctgtaaacacaggcaagttacatgagctcctaacattttattttttcttatatgtgattagacataaaaaatagtttagttttataagattttttaggcaaaataaacaagatgcacattatttcttggtaaaaagtgaatgcatggaataagcattcaataaatataagattgtttccatttttaaataaaatggtgtccagtatgaaatgtgctgtgatccttaaatttgtcccagattcccatgctttttaaattttatctgagattccatttgagagtttaaaatgcctctgatgtctaaggatgaactgatttaggtgattcactttggtgnnnnnnnnnnnnnnnnnnnnnnn

SEQ ID NO: 200267 - DNA, 599 bp, Homo sapiens
  misc_feature (1)...(599): n = A,T,C or G
acttggattatttttaatattgtgtttttatgacaaatatcaggccacacatgcataaggataattactggaaaacatctatgattatttttacagtatgaatttctggaagttacattgtgggaactaaaattttaagaacagttatctgcattagagtagcaatgtaattcagagggtagagcacagaccctggaggagacagccacgatttcaaattctatttatgctacccacctgctgtaaacacaggcaagttacatgagctcctaacattttattttttcttatatgtgattagacataaaaaatagtttagttttataagattttttaggcaaaataaacaagatgcacattatttcttggtaaaaagtgaatgcatggaataagcattcaataaatataagattgtttccatttttaaatawaatggtgtccagtatgaaatgtgctgtgatccttaaatttgtcccagattcccatgctttttaaattttatctgagattccatttgagagtttaaaatgcctctgatgtctaaggatgaactgatttaggtgattcactttggtgnnnnnnnnnnnnnnnnnnnnnnn

SEQ ID NO: 200268 - DNA, 573 bp, Homo sapiens
tcatttaaaatcttgtaggcaaaggaaaaataattgcctaagtgagaatgatattaagattccaaaatgaatgttaaatgaaagttatatataaccaagttatagtccaagtactatgagaaaattatgaaaataatatatgaatctgcagtcatgtatcttcaaatataaaagaaagggacaggatgcttgaaatrtatttcttggataaacaaatatggttccaataatgcttgaaaacaaggatgaaacctgggagtgaaagggaaaatgcccaaattttaagcagacctgccagaattgaatttacctaaaatctccaacctgtctttggattccattgcttctgattttaacttagaggcagaactagaaatgggcttttaatgacttttgatacaagttaagggaggaactcccagtggctggggacaagttctagacctggacactcttcccaaggtaaaaagccttgagaaatttctttggttggttcagagattaatatatacttatgacacttcacaagattgtgagggaaaaacttcttgcaaactaccgtaaattgacaca

SEQ ID NO: 200269 - DNA, 525 bp, Homo sapiens
cttggggcttcctaatgtacttaacttattaagattaattttctggaagactccatcttttaactgctgttcctgagtctgctctttgctgggtatgagtatgcttcgatgaaactgacactccatttccacatttgtaggaaagcctcttggccataggataatgacccacatccatccaccacagccacacacggagctggcaagaatgcagctcctcactcacagctgcctctgcaggcagggctgcggatggcgctgaagcagaagaaaaatggaaaaatgaagcaaaagaagaaaacctttcccttaatacctccccgcaaacctggttcatcgggcatttaaaggaagacaacactcagttggcacatgcagcatctcacaggaacaattaggcttgagaacaagaacaggggagtgagaatygttagtgcagcaccctaatcctgacgtattcatatttagagaggatttaggaggcatcagcgctggctatgctgcttcgtgggtcgcctcttgctc

SEQ ID NO: 200270 - DNA, 567 bp, Homo sapiens
atgatataatcagatgagttaagcaattcaaatgttatgattggcagtcttacagaatattaccctgaatcatagtgcagtaaattttaatatattttaaagtggaaaacactgtaataaggaataaaacaatatttcatttgagttttctctggaaatctaacaaagccccttaagaagatattttaatgaagtaaacttggaaaaagttacagtaaagtgagaccaccaaagcccatgtctaatttctttatttctttttctgaagtgcttacttgcatataatttayatgttaatcagttattaataaataaaccataggaaatggaattcctttgtgtaagagctataccaaatgaattctgctttaaaaaccagtgggacgatggtgattctttccagcaaaattaaattctagcattataaacttccagttattctgtcataaaatgttaattcaaacacagagtagctccttaatgggaggttaaggtaaaattcctgatggcttcaaaattttctgtaaattagtatctttttggacagttggtcaattctacacgtat

SEQ ID NO: 200271 - DNA, 567 bp, Homo sapiens
atgatataatcagatgagttaagcaattcaaatgttatgattggcagtcttacagaatattaccctgaatcatagtgcagtaaattttaatatattttaaagtggaaaacactgtaataaggaataaaacaatatttcatttgagttttctctggaaatctaacaaagccccttaagaagatattttaatgaagtaaacttggaaaaagttacagtaaagtgagaccaccaaagcccatgtctaatttctttatttctttttctgaagtgcttacttgcatataatttatatgttaatcagttattaataaataaaccataggaaatggaattsctttgtgtaagagctataccaaatgaattctgctttaaaaaccagtgggacgatggtgattctttccagcaaaattaaattctagcattataaacttccagttattctgtcataaaatgttaattcaaacacagagtagctccttaatgggaggttaaggtaaaattcctgatggcttcaaaattttctgtaaattagtatctttttggacagttggtcaattctacacgtat

SEQ ID NO: 200272 - DNA, 635 bp, Homo sapiens
ttcagattctttataaaagatatccaaattcactactaagaatatggcagcttggaaaagttagcaacagccagacaggtgtggcattttcatgttcttgcactgtggattgctagaataagaaactgaactcagaatgtaataagcttaaaaayaaattctttttctcctcctctcatctaagctggtcttttcacaatctcctgttttcacaagtgtctggaagtaggaggaagagggagtaggcagaaagagggaaggtaggaggttgattggtgaggtggagaaaggaagacatcaaagagcagtcatcacctgtcactctgagcaaaaccaattagcttcattcattgggaaccccaggaatatcgcagccagaaaccagccttagtgtcaatgtctttgaagcatcgaagccatctttggtaaattagcagccactctagctgcatcatgaccctcaaccaggccagcagagaacacttttctgaaaattgccatgctcttcctggaataagagtcattaagttgttttcttgagtttctggatcttagcacatagttcacagcagaagaagcttctctgtacagtattcttcaattgcatcaaatcagctccaatagcccacaaggga

SEQ ID NO: 200273 - DNA, 617 bp, Homo sapiens
atcacaacccaaagataccatggtcagtatgctgtagaagaccttaaataaccaatccttttaaagccttttgcctttactaaagaaatgatgaaattttttgttgttctcacccaaatccatgtaccacattaatcatattctttgaagtgggaggccctgttgaaaagaagagaatgaacaattacgaggccaaaaggcagtagagacaccataggtatgtacagctggcatggttctcatgaagtaacccacaggttatgcctgttttaaatatttttttaaaaagaatcttcatctataagatttttctctttctttactactgaagctaaatctcttgttcagaacattgttatcttgcttgagaactctgtagccttatcctaatcggctttcttctcaagcaaatttatttttaatcctctcaggtcaacgctaaatttagccactcaggtaatcttttctgttgttgttgatcgatgtggcatgctggtcattttctttaatttttttccrttaatttctcggttcatatcttgagtactcatgtctttcagtcatcttcatttggctttttggtcctgtgtggtcctctcttttattcgctcactatc

SEQ ID NO: 200274 - DNA, 359 bp, Homo sapiens
cctgtgtggtcctctcttttattcgctcactatcttccacccatgccattattttattagttttattcaacctgccttttgagtgtcctatctttgactttttctgccatctacttaatgtcagacagtattgcctggtaaataggtaagctgaggagctgtccatagtggcagggtgaagtaaggacagtgcctacatagaatctctctgtggaggagaatcaaggtccctgagtkcaagagaccacagatagaagtcaggttggccagcatggagtcatgtctttaccatcactcgtttcttctgggcataccgagccatctcgccatctccagttccatgttaatcttctgttttg

SEQ ID NO: 200275 - DNA, 611 bp, Homo sapiens
gtaagtaacacaaaaagtgtacttctttttttggaaaatgattcacaaataacccctttaaaccaacaattggtgatttatattctggtcaggattttggagtctgggcaatgccattacttagctgttttgactatgagaacttttacaaatttattctgacttctatgatctttaatctcttttctacacctgaaaaataataaagattgtaaactagatgtcctcaaagattcttccctccccrgtgatacatgactatacttgggactctctaaatgccctgctgtcaacagagctatcctgaagcttactgaacacaaggtggtgctttcatatgagcttctttctagttcttttgttaattaagaacaagtttttgttttttgtccccagtttagccaaatgctcctgaaatagaaatgcattagtaaataagagcttcatttttaataggttttcccctttctttaggagtgatagaagtttcataatgtgtatttcgttttcctaataatttcaaaaaggcaaatttcactagggccatgaaagtattcttggatttatccagactatgtagaaaccaccatcacagctggctaaaaagcaaa

SEQ ID NO: 200276 - DNA, 570 bp, Homo sapiens
taagatttgccaggctgaagacctttaattgtttctgtggtcactgctttctgcaggttttgactgtggaaatatttacagaggaccttttctgacttcttccttatatctggtcctagacattggttttgctctcttttcttctggtcttcattgtagttatcatccacttcttttttgtagatgcaaaacttgttcctttcctgagtgcctagccaagccacggtggcygaggaacaggtacggagcttgtcaaaggctttgattcttgtgtcttcaggaagagagggaaatgactgcttagtaggccttgtggtagctagaattttcaacatagatgctcctttcttgtttcctttcagtcgaacgaggtatttagctttaggttttcctctaagctgaaactgctgaatgccttccacattctgagacagaagaagtttcccatctcttctcacttggatttggacagcatccagacaagagtgaataaagaaggtgactttttggtgagaagagactggagcaaaccgtagaaactttgctcccttccttttaacaaatacatct

SEQ ID NO: 200277 - DNA, 573 bp, Homo sapiens
tctttttgttacttctaggtaggcagagcttatctagatttaaactttacattaaataacatcaatcagagtttcactttaagcactttcttttttcatggccatctggtggatgatgtaggaaatgtgtttgcacagcaacaaatcttgctatctttctacaattgaggctttagttcaaacataagctgaaagttgctaggataattccaaatatttttattttgcttggcagatcaacttggttgcacagtatccacaacccaraagaacttggtagtgttactctgatactgaaaaaattgactttgtttcaattgaaaagttctaatgaataaaagatatagatgcaatctataattctgctatttttgtgttgtcaaaggccttcttcacatttggcacaagtcctcagatcctgctaaaactgaggtgagaaaataaaaatgacctaatgatttgatacaactcaatctttagaaaatagattattggtgatatgagatttttctttggaatgccaatatcctacaggggaaataaaattgtccaaaggttaaccatatagtctat

SEQ ID NO: 200278 - DNA, 599 bp, Homo sapiens
ttcaaccaacgtactagcatggaaaaatttgaattagttgatggktggggttatattgaattttatgcatatgcttttataaccttttatgtaataaataagcttttataaaaggtttatacaaataagtcttttttagtaaaatgaatacttttacagtaaactaaaaggtgaacatgcaaatatttaagtaactgttgccttgcccttcttgagtaagttatttattgagtattttaatttctataacttgttaagtatatatataatttatctttgaacaccagaatttagaacaccactcagcatgtgatatgtgctcagcaacatggagtaaatgaataaataaatagaagaaaagtgtgaataaatgaaaactggtaacaataagctaggtgcaaatcagtatctctggaaagtgaatccaaaattcaaatttacattgtaaatagaagaaatgaaaatagactcctaccatcaacaattaaagagcttgagagttgtcacacacatccttttaaccaccagaaaacagaacaaaatgaaattcaattacttttttcaacttaggagagagctgaggttgcagggcaaacttc

SEQ ID NO: 200279 - DNA, 536 bp, Homo sapiens
caacttaggagagagctgaggttgcagggcaaacttccagcctgaaatctggagagacaatttaaccragtcacagctaaaaatctgcctacctggagcagaagccataggagtaataaactggtagaaacttttacataattttagtgaatgataggagactgagtatggaataacatgagaatgagaaaccgctggcatcagtcttaaatagattaccatacttctgtgggttttaactccacaaattccatcagattgttaaagtggtgatccaacaaaaaaatcccttgtggctccgtctggaagagaggaagaacaatcattgtgaaatatgtctagagtatttttcataaaaggacttctttccagggaaaaaggtcttcaaagttttatcacactttgcagaaaggcacttcttccttcttagccccctctagcctttctgtctcatggaaggaagagagagaaaaagatacaggttgaatatcccttatctgaaatgctttgactagaagtgttttggattgtgtatt

SEQ ID NO: 200280 - DNA, 628 bp, Homo sapiens
gagacaatttaaccgagtcacagctaaaaatctgcctacctggagcagaagccatrggagtaataaactggtagaaacttttacataattttagtgaatgataggagactgagtatggaataacatgagaatgagaaaccgctggcatcagtcttaaatagattaccatacttctgtgggttttaactccacaaattccatcagattgttaaagtggtgatccaacaaaaaaatcccttgtggctccgtctggaagagaggaagaacaatcattgtgaaatatgtctagagtatttttcataaaaggacttctttccagggaaaaaggtcttcaaagttttatcacactttgcagaaaggcacttcttccttcttagccccctctagcctttctgtctcatggaaggaagagagagaaaaagatacaggttgaatatcccttatctgaaatgctttgactagaagtgttttggattgtgtattggtcagggttcacactccctctagagggacagaactaatggaatagacatatatataaaggggagttatattaacttccgtgatcacaaggtctcgcagtaggccatctgcaggctgaggagcaaggagagccagtctgagttcc

SEQ ID NO: 200281 - DNA, 628 bp, Homo sapiens
gagacaatttaaccgagtcacagctaaaaatctgcctacctggagcagaagccataggagtaataaactggtagaaacttttacataattttagtgaatgataggagactgagtatggaataacatgagaatgagaaaccgctggcatcagtcttaaatagattaccatacttytgtgggttttaactccacaaattccatcagattgttaaagtggtgatccaacaaaaaaatcccttgtggctccgtctggaagagaggaagaacaatcattgtgaaatatgtctagagtatttttcataaaaggacttctttccagggaaaaaggtcttcaaagttttatcacactttgcagaaaggcacttcttccttcttagccccctctagcctttctgtctcatggaaggaagagagagaaaaagatacaggttgaatatcccttatctgaaatgctttgactagaagtgttttggattgtgtattggtcagggttcacactccctctagagggacagaactaatggaatagacatatatataaaggggagttatattaacttccgtgatcacaaggtctcgcagtaggccatctgcaggctgaggagcaaggagagccagtctgagttcc

SEQ ID NO: 200282 - DNA, 536 bp, Homo sapiens
caacttaggagagagctgaggttgcagggcaaacttccagcctgaaatctggagagacaatttaaccgagtcacagctaaaaatctgcctacctggagcagaagccataggagtaataaactggtagaaacttttacataattttagtgaatgataggagactgagtatggaataacatgagaatgagaaaccgctggcatcagtcttaaatagattaccatacttctgtgggttttaactccacaaattccatcagattgttaaagtggtgatccaacaaaaaaatcccttgtggctccgtctggaagagaggaagaacaatcattgtgaaatatgtctagagtatttttcataaaaggacttctttccagggaaaaargtcttcaaagttttatcacactttgcagaaaggcacttcttccttcttagccccctctagcctttctgtctcatggaaggaagagagagaaaaagatacaggttgaatatcccttatctgaaatgctttgactagaagtgttttggattgtgtatt

SEQ ID NO: 200283 - DNA, 570 bp, Homo sapiens
aacttaggagagagctgaggttgcagggcaaacttccagcctgaaatctggagagacaatttaaccgagtcacagctaaaaatctgcctacctggagcagaagccataggagtaataaactggtagaaacttttacataattttagtgaatgataggagactgagtatggaataacatgagaatgagaaaccgctggcatcagtcttaaatagattaccatacttctgtgggttttaactccacaaattccatcagattgttaaagtggtgatccaacaaaaaaatcccttgtggctccgtctggaagagaggaagaacaatcattgtgaaatatgtctagagtatttttcataaaaggacttctttccagggaaaaaggtcttcraagttttatcacactttgcagaaaggcacttcttccttcttagccccctctagcctttctgtctcatggaaggaagagagagaaaaagatacaggttgaatatcccttatctgaaatgctttgactagaagtgttttggattgtgtattggtcagggttcacactccctctagagggacagaac

SEQ ID NO: 200284 - DNA, 560 bp, Homo sapiens
gatttcttatcacatagctataaaagagatttctagatttacatatctaatatttgcattataaaaataaagcaccacaattatttgcttatcaagggtatccataacaaatatgcaataacataaacatacccaaatgattgacagactttttcagkttgcatcctgatattgttttacttctgtcatagacatgatatatggttgaactctgaaggcatggtaagggaaaatggaagaaaaaaaagcaaatataacaaagacctcgtattatcacttatttgggcttactaatcatcaatttcctgcattaagactatttaaaaaaagtctgtgagaataagtacatttccatgaaaatgtggtaaacgacaaaaatataccatgatcaattatcaaacaataaggcgttattgaagaattataatgtctgcttctatatggcagatacattaccattaaaactttttgtatagtaattaccaaaaaataaacttccacgtgggaaaattatgcttgcataaaacaaagttaatgcattttatccatctagtagcatt

SEQ ID NO: 200285 - DNA, 560 bp, Homo sapiens
gatttcttatcacatagctataaaagagatttctagatttacatatctaatatttgcattataaaaataaagcaccacaattatttgcttatcaagggtatccataacaaatatgcaataacataaacatacccaaatgattgacagactttttcaggttgcatcctgatattgttttacttctgtcatagacatgatatatggttgaastctgaaggcatggtaagggaaaatggaagaaaaaaaagcaaatataacaaagacctcgtattatcacttatttgggcttactaatcatcaatttcctgcattaagactatttaaaaaaagtctgtgagaataagtacatttccatgaaaatgtggtaaacgacaaaaatataccatgatcaattatcaaacaataaggcgttattgaagaattataatgtctgcttctatatggcagatacattaccattaaaactttttgtatagtaattaccaaaaaataaacttccacgtgggaaaattatgcttgcataaaacaaagttaatgcattttatccatctagtagcatt

SEQ ID NO: 200286 - DNA, 560 bp, Homo sapiens
gatttcttatcacatagctataaaagagatttctagatttacatatctaatatttgcattataaaaataaagcaccacaattatttgcttatcaagggtatccataacaaatatgcaataacataaacatacccaaatgattgacagactttttcaggttgcatcctgatattgttttacttctgtcatagacatgatatatggttgaactctgaaggcatggtaagggaaaatggaagaaaaaaaagcaaatataacaaagacctcgtattatcacttatttgggcttactaatcatcaatttcctgcattaagactatttaaaaaaartctgtgagaataagtacatttccatgaaaatgtggtaaacgacaaaaatataccatgatcaattatcaaacaataaggcgttattgaagaattataatgtctgcttctatatggcagatacattaccattaaaactttttgtatagtaattaccaaaaaataaacttccacgtgggaaaattatgcttgcataaaacaaagttaatgcattttatccatctagtagcatt

SEQ ID NO: 200287 - DNA, 462 bp, Homo sapiens
ctaactttatattaaagaaatgaagaacaagaactagaactagaaaattaagaacaaactaagcctaaaagtagcagaaggaagaaaataataaaaattagaatagaaataagtgaaataactaacagaaaaacaatagaaaaaatcagcaaaacagartttattttctgaaaagatgaacacaattgataagcctttaactagactaaaaaaaataaaaaagactcaaataagaacagaaatttaaaaggagatactataattgatacacaacctaggtatggtcatctgacagccaactcaagcaaattttgaggatatttgtgctttctagtgagtagaaaaatagtattactttgcatttacatattttttctctccctctctattttatgattatttaaataacttatttacattttattagttattagttgatataaaattattaaagtagggtca

SEQ ID NO: 200288 - DNA, 462 bp, Homo sapiens
ctaactttatattaaagaaatgaagaacaagaactagaactagaaaattaagaacaaactaagcctaaaagtagcagaaggaagaaaataataaaaattagaatagaaataagtgaaataactaacagaaaaacaatagaaaaaatcagcaaaacagaatttattttctgaaaagatgaacacaattgataagcctttaactagactaaaaaaaataaaaaagactcaaataagaacagaaatttaaaaggagrtactataattgatacacaacctaggtatggtcatctgacagccaactcaagcaaattttgaggatatttgtgctttctagtgagtagaaaaatagtattactttgcatttacatattttttctctccctctctattttatgattatttaaataacttatttacattttattagttattagttgatataaaattattaaagtagggtca

SEQ ID NO: 200289 - DNA, 462 bp, Homo sapiens
ctaactttatattaaagaaatgaagaacaagaactagaactagaaaattaagaacaaactaagcctaaaagtagcagaaggaagaaaataataaaaattagaatagaaataagtgaaataactaacagaaaaacaatagaaaaaatcagcaaaacagaatttattttctgaaaagatgaacacaattgataagcctttaactagactaaaaaaaataaaaaagactcaaataagaacagaaatttaaaaggagatactataattgatacacaacctaggtatggtcatctgacagccaactcaagcaaattttgaggatatttgtgctttctagtgagtagaaaaatagtattactttgcatttacatattttttctctccctctctattttatgattatttaaataacttatttacrttttattagttattagttgatataaaattattaaagtagggtca

SEQ ID NO: 200290 - DNA, 576 bp, Homo sapiens
ctgtgggactggggcatggctgtcttccagtcctacctgcctgtcatcccctcccagggctactgacttgctatcccactggagtgtgtacacagtgcggcttctgctgcacagcctgtgtgctttgcttcacttgagtgtgttttggctgactgggcaccctttggatctcacagtgcaacaggaacccaacctcagtggtcctgaggagggtgccctgagcaggtcctggtgccccaaggcagtggtccatggctagggagtgctgagctggtatctgcctggcactcaagcgggagaggaggccacactctcaaaaaactcagagggtgagtaacaggggttcgtgggctggtgttggacctaggcatgcttctccattgggctggtccttaacaggcctctgcccaggagagttccacggcctgaaacacctaacaacaacaacaacaagaaataatgagcccaatgccagtgatcaaagttggctcctacaaagcccatgaatagactggtgacagggtcacttctctcycccttgcactgcaaagcatagctgtaaacataacgatatac

SEQ ID NO: 200291 - DNA, 451 bp, Homo sapiens
ggagctatgaaaaaaggacaaaccaaaaccatagctagcagaagaaaakaaataactaaaattggcgtatataataagattgagatgcaaaaatccatataaaagatcaataaaacaagagttggctcttcaaaaaataaataagattgatagatcattggctagattaacacagaaaatgaaaaagaagatccaaataagcacaatcagtaataacaaaggcaatattacaactgatcccacagaaatacaatagatcctcagggtctactgttaacaactctatgcacacaaattagaaaacctagaggaaatggataaattcctggaagcacaatatctcccaagattgaatcaggaagagattaaaaccctgaataaaccgatatcaacttctgaaattaaatccataataacctacccacaaaataaagcccttgactatatggat

SEQ ID NO: 200292 - DNA, 451 bp, Homo sapiens
ggagctatgaaaaaaggacaaaccaaaaccatagctagcagaagaaaagaaataactaaaattggmgtatataataagattgagatgcaaaaatccatataaaagatcaataaaacaagagttggctcttcaaaaaataaataagattgatagatcattggctagattaacacagaaaatgaaaaagaagatccaaataagcacaatcagtaataacaaaggcaatattacaactgatcccacagaaatacaatagatcctcagggtctactgttaacaactctatgcacacaaattagaaaacctagaggaaatggataaattcctggaagcacaatatctcccaagattgaatcaggaagagattaaaaccctgaataaaccgatatcaacttctgaaattaaatccataataacctacccacaaaataaagcccttgactatatggat

SEQ ID NO: 200293 - DNA, 565 bp, Homo sapiens
acaaaactcagtagcaatcctatacaccagtgacatacaggttgacagtaaaataaacaccacaattttacttacaatacccaggcagattacctgaggtcaggagtttgagaccagcctggtcaacatagtgaaacccccatctctactgaaaataaaaacattagctgggcaaggtggcacatgcctgtaatcccagctactcaggaggctgaggcagaagaattgcttgaacctggaaggcggaggttgtagtgagcaggagattgcaccattacagtccagyctgggcaacagagcaagactttatgtcaaaaaaaaaaaaaatttctaggaatacatctcacccagaggtgaaagatctctacaaggagaatgacaaaacaatgatgaaggaaatcagagataacaaaaataaacggaaaaaatattccaaggtcatagattgaaagaatcaatacataaaagtggccatactgtccaaagcaacttacagatttaatactattccaagcaaactgccaatgtcattcttcacaaaattataaaaataaaaataaactat

SEQ ID NO: 200294 - DNA, 565 bp, Homo sapiens
acaaaactcagtagcaatcctatacaccagtgacatacaggttgacagtaaaataaacaccacaattttacttacaatacccaggcagattacctgaggtcaggagtttgagaccagcctggtcaacatagtgaaacccccatctctactgaaaataaaaacattagctgggcaaggtggcacatgcctgtaatcccagctactcaggaggctgaggcagaagaattgcttgaacctggaaggcggaggttgtagtgagcaggagattgcaccattacagtccagtctggscaacagagcaagactttatgtcaaaaaaaaaaaaaatttctaggaatacatctcacccagaggtgaaagatctctacaaggagaatgacaaaacaatgatgaaggaaatcagagataacaaaaataaacggaaaaaatattccaaggtcatagattgaaagaatcaatacataaaagtggccatactgtccaaagcaacttacagatttaatactattccaagcaaactgccaatgtcattcttcacaaaattataaaaataaaaataaactat

SEQ ID NO: 200295 - DNA, 633 bp, Homo sapiens
tctgattttatttatttggatcttctcccttttttatagtgagtcttgctaaagggttgtcaatttattttaacttttttaaaaactgttttttgtttcattgatctgttatatttttgtttatttcaatttcatttatctctgctctgatccttattattccttttcttctactawttttgggtttggtttgctttattttctagttcattaaaatgcactgttagattgtttatttaaagcttttcatcttttttgatgcaggcacatttagctataaactaccctcttagtactacttttgtatcccatagattttggtatgttgtatttctattatcttttgtttcaagaaatttttcaattttcttcttaatttcttcattggcccactggtcatttaggagcatattgtttaattttcatgtgtttgcatagtttccaaaattattcctgttattcatttctagttttatttcattggggtcatagaagatgtttgatattatttcaactttattgaatgttttaagacttttttctgaccgagcatatagtctatccttaagaataatccatgaactgaggaaaagaatgtctattctgcagccactgaatgaaatattttgtaaa

SEQ ID NO: 200296 - DNA, 602 bp, Homo sapiens
atttggatctttaaaggttaagtgagtcttagtttctactgagaagtctgttatttcttattggaactccattatttgtgatttgcttcttttttcttactatgttcaagattcgctccttgactgtagtttttgaagtttgaagttgtatttgtatagtcttgtttgtatttaacctgattgaaggcatttggctttcttgtaggtggatatttatatcttttcccgagcatattgttggattttagttttttgtttgtttgtgtttacctatttagcaagtctgtcttttagtaagagaatgtatttatttgcattcaagatagtgactaatagataaggacataatcctgccatttcgttaactgttttctgtttcttttttttgtagacactttgcacctttatttctgtcttgttatcttcctttrtgattggatagttttctttagagaatgctttgatttcttacttttcatattttgtgtgcctactgtagggtttgctttgtggtaccatgaggcttacataagacatcttatagtgatagacagtaatttacactgatagcaatgagcttttattgcataaaatcacattgc

SEQ ID NO: 200297 - DNA, 622 bp, Homo sapiens
gtgaggcagacatatcagaacacaataagtaaattcttggcaggtcattttagacaaggggctatgcagataaagcctgagatggcaccagagaagggtatttagctaccagtgtagtgtataatagacaaatagccagtcaaaccactcatctgctatttttaccaataaggaatccagattaatctttcctattgctataatgagttatcaaaatgtaacaaaagcacaccttagagagatatactgaagaacaaacagaactgcatttaattttctttgacaaatccaattttgtaattattttctcaggtttttaatttcaatgtgactttaacatttattcatttatgtatatgcattactttgttttaaaataatattccctggccggacgcggtggttcacgcctgtaatcccagtactttsggaggctgaggcaggaggatcaccgaggtccggagttcgagaccagcctgaccaacatggagaaaccctgtctctactaaaatacaaaattagctgggcgtggtggtacatccctgtaatcccagctactctggaggctgaggcaggagaatggcttgaacccaggaggcagagattgctgtgatccaagatc

SEQ ID NO: 200298 - DNA, 622 bp, Homo sapiens
gtgaggcagacatatcagaacacaataagtaaattcttggcaggtcattttagacaaggggctatgcagataaagcctgagatggcaccagagaagggtatttagctaccagtgtagtgtataatagacaaatagccagtcaaaccactcatctgctatttttaccaataaggaatccagattaatctttcctattgctataatgagttatcaaaatgtaacaaaagcacaccttagagagatatactgaagaacaaacagaactgcatttaattttctttgacaaatccaattttgtaattattttctcaggtttttaatttcaatgtgactttaacatttattcatttatgtatatgcattactttgttttaaaataatattccctggccggacgcggtggttcacgcctgtaatcccagtactttcggaggcygaggcaggaggatcaccgaggtccggagttcgagaccagcctgaccaacatggagaaaccctgtctctactaaaatacaaaattagctgggcgtggtggtacatccctgtaatcccagctactctggaggctgaggcaggagaatggcttgaacccaggaggcagagattgctgtgatccaagatc

SEQ ID NO: 200299 - DNA, 622 bp, Homo sapiens
gtgaggcagacatatcagaacacaataagtaaattcttggcaggtcattttagacaaggggctatgcagataaagcctgagatggcaccagagaagggtatttagctaccagtgtagtgtataatagacaaatagccagtcaaaccactcatctgctatttttaccaataaggaatccagattaatctttcctattgctataatgagttatcaaaatgtaacaaaagcacaccttagagagatatactgaagaacaaacagaactgcatttaattttctttgacaaatccaattttgtaattattttctcaggtttttaatttcaatgtgactttaacatttattcatttatgtatatgcattactttgttttaaaataatattccctggccggacgcggtggttcacgcctgtaatcccagtactttcggaggctgaggcaggaggatcaccgaggtccggagttcgagaccagcctgaccaacatggagaaaccctgtctctactaaaatacaaaattagctgggcgtggtggyacatccctgtaatcccagctactctggaggctgaggcaggagaatggcttgaacccaggaggcagagattgctgtgatccaagatc

SEQ ID NO: 200300 - DNA, 546 bp, Homo sapiens
aaacatgtacatacacaaactcaagaaacactggaaaaatagatgcagacagtaagaagaaagatgggtaagtgcaaactgcaaaatgaaatattaggggaaattatgatctacatatgttacattattagtyatataaactaacctcccattctgtcaaaaccattaagtccccaagtaagaattcaaacttcagaagccattttatgacaagttaaaatagaagttaaagagaagaaaattaggagtggcagaactatgattcttggtattttgcattcaggtcggtgatcctgggtaagttaaagagattctagtaggccgtggttttttcatctgtaaaacaaggattggagtagagcaatagcaacgctttttagttccaaagttttaggatgtaattaaacatgaaaaagaagaagaagaagcaattcagtaaactcatcaaagaatatatcaggaagacagcagagaattagccagtaatataataacttaagttctgattcctgaaagtctgcactgtaaattgttgaaccatactaa

SEQ ID NO: 200301 - DNA, 546 bp, Homo sapiens
aaacatgtacatacacaaactcaagaaacactggaaaaatagatgcagacagtaagaagaaagatgggtaagtgcaaactgcaaaatgaaatattaggggaaattatgatctacatatgttacattattagttatataaactaacctcccattctgtcaaaaccattaagtccccaagtaagaattcaaacttcagaagccattttatgacaagttaaaatagaagttaaagagaagaaaattaggagtggcagaactatgattcttggtattttgcattcaggtcggtgatcctgggtaagttaaagagattctagtaggccgtggttttttcatctgtaaaacaaggattggagtagagcaatagcaacgctttttagttccaaagttttaggatgtaattaaacatgaaaaagaagaagaagmagcaattcagtaaactcatcaaagaatatatcaggaagacagcagagaattagccagtaatataataacttaagttctgattcctgaaagtctgcactgtaaattgttgaaccatactaa

SEQ ID NO: 200302 - DNA, 605 bp, Homo sapiens
gtgtttccacactgtatttggattgcaaatgtagttaatgggggaagtaaaaacactttagtatcaatgaggagtttagttaaaggttacggaggtttgtgttacaagtggggaactggtacaataggcatattctttgtgcatgtgtgagaaaaaaatattaggttgaagggcttctacatttagctrttctctgaggaattaaggtagtatttatttaattttcaagtatttggcattctcattcattttagaaatttgtgatgttacttcttatttctagaaaggtttatagtctcaaaaattcgattctaaccttttttcttattagacttcttcctttttagtagttcaaatgttctttctattctttcaaagacagcgttttctttcctgagaccttttagacctttttatctttattggctgataaagcttgacaaaatatatcatcatctcccgcaaattggcttattcttcaaaagtcattaccaagagccatgtttgacccctccctctcaatggtcaccctaattagttaacaaattagttaacaaaacattctgtccaaacaatgccccataaggctaatctgtataaaacca

SEQ ID NO: 200303 - DNA, 587 bp, Homo sapiens
ccttgtaagtctacctggttttctattgttctctggctgagttggcacataaactatgagaatcagtccttcccactcttccctcccctaaccacaggcagaggaacctcaccccatggccaggatctccacagcctcacagggagtactgccagcctaccctttatgttcccttaaagcccataggctctacagtcagcctaagaggcacccttcaatgtagtgcactcctctttggcccaacaaagkttcagaaatgtcatccaagacccaaggcctggaatcagggacaccaagattctgcttggtgttatactctgctgtggcctaattagtacctgagttacaaaaaaaagacctctataattttctctccacttttctcaagcagaaggagattctccttgtagccactgctgctgggaatttggtgagtctcactggaacccagaaagtctcagagtctcagccaaagcctacagcataccacctaattatcactgttggttattcaaggcctaagggctttttagtctgcaggtgatggatccttccataactgtgcccttcactcaaggcagcaggtt

SEQ ID NO: 200304 - DNA, 652 bp, Homo sapiens
gatctacatgttatataagacagagaaaggatgtaaaattactatctgtttgggaacaaaaggaacacagttttcgcatgactgagttcccaagtttaactctccctttggcatagtgagtttggggtcctgagattttagtttcctttcaataggcccgatagtctgcaaacaccaaataagggtcagtaggctgacaattcaatgggagtaagaagcaagagactccaaaagaatattagtaaaaacagggttgataagttctaacacagtgacagagattatttccttcctgatctgctttatcttttttwtttatttatttttttttttttttgaggagttttactcttgttggccaggctggagtggaatggcacaatcttggctcacggcaacctccgccttctgggtccagccaattctcctgcctcaggctcccgagtagctgggatgacaggcgtgtgccactatgctgggctaattttttgtatttagtagagatggggtttcaccatgttggtcaggctggtctcaaaaccctgacctcaggtgatccacctgcctcggcctcattttatcatttttaacaagagagtgacatagtcattaagataccaaaacacgaaggcaaaacctgtgtcagatttgg

SEQ ID NO: 200305 - DNA, 597 bp, Homo sapiens
acttccttttaattttacatgctaacctggggtaatctcaatcatacccatkattccagtaaacattaatatgcacattgattatgtatttcatcttcagcccagacatctcccataagttttggatccctggatacaaatgtgtacctggcatttacacatgaatcttccaaagatacccaatgcacaacaggtctaaaaacaaatccatgatgtttctaaaccatcactttttttctgtctttgtttttaagtcttaccaaagggtaatagtatttgtaaaaaaggaagatacataggagcttggattaattgtcagatctaaaactttcattgcaaagtactgtattccttgatgtagttcagacttttcatttggggtaaattcccttatgccttcatatctatcctttagaattttattcccttaatttttgttagtttttaaatgttgtttgtttacaactttatattgtcttaatagttgaaaggtattttgtcttcatataacatctgaggttgacattcattttctcttagtgcattgaagatgtcattccactgtattctggcttctatgatttatattaagaaatt

SEQ ID NO: 200306 - DNA, 610 bp, Homo sapiens
cttataatcgtggctgaaggggaagtaaacacatccttcttcacatggtggcaggagagagaagaatgggaaccatcaaaggggtaaaaggcccttataaaatcattagatgtgctgaaaactcacccactatcaccagtatcacgagaatagcagcatggggttaactgcccctatgattcagttacctcccactgggtccctcccaggacacrtggggattaagggaactacaattcaaaatgagatttggatggggacacagccaaaccatatcaacatatatatgcataagaaataggcacaaacatatatctcacaaaacctatcatatagagtatctataatttgtattatagatacagagtatctacaatttgtattatagatatagatatctatatctgtatctataatttttattttatatattgtatataatactccaatttgtattatggagtatctataatctgtattatagatacagagtatctatagtctgtgttgtagatacagagtatctgtagtctgtgttgtagatacagagtatctgtagtctgtgttgtagatacagagtatctataatttgtatcttgcttttttaaaa

SEQ ID NO: 200307 - DNA, 627 bp, Homo sapiens
actgtaggagcatatgataaaacaaacaaaaagacccactgaaacaaacagtggtaaatgaaatggtaaatatttcagttaccatttaaattaggctacatgccattgattaagaccatgtagtttgactaaaacttaattgtcaaaacatgtttaaatcagcttaattactttttgagatagtctcaaaaaaaatgaaataagaaaattcctgaatttttgccacattagtgtttaaagcatcagttcatgactgttatcctaatgagagtaaatgaagtctaatttaatgagttaaagtctatttttctatcatatttctttttgcataaatactactgtgagcataaaactcttccaagaatgtaatgacaaagtagactattttatcatttttacctctgctgacagaggataaagaattatgtccctctacccccaagaaatttgaagaacttcatctatgaccaaatacttcggrctaaggcctaacttgaaggacaatatctctgattactatgaaagcacattcatgttccaacaatacgtatacccggcccttcacacacacaggcacacatacacatatacatacaacatactaaaagcttatacaatagtaagagg

SEQ ID NO: 200308 - DNA, 507 bp, Homo sapiens
gaattcagtttcacatggctgtaggactgagttcctrtctccttgctggctataaactgagagtcagtttcagcttctggaggtaacatatattctatagcatatattctatggctcatgactcccatcctccagcaaaattgggtcagattctcagtcttgaatctctctgacctccccttagggcagcatcttggttgcaggttgtacatatgagttgaagactctcagccagtgacagggtttcagggacagggtaattttaggcagagttttggagcctcatttaggtataaagatgctaactaaattttcagaaggtaagtttatggagatgtctttgaaaatattttttgtcatattttgggggttcaaggcagggcttgcattttatcagggtaaagtcaagtaaagtcggctgtggaaggatggtacacataatggtgattggacgaagaggtgactagatggttatgagggtttggggactgagaggtggctccagga

SEQ ID NO: 200309 - DNA, 492 bp, Homo sapiens
gagttcctatctccttgctggctataaactgagagtcagtttcagcttctggaggtaacatatattctatagcatatattctatggctcatgactcccatcctccagcaaaattgggtcagattctcagtcttgaatctctctgacctccccttagggcagcatcttggttgcaggttgtacatatgagttgaagactctcagccagtgacagggtttcagggacagggtaattttaggcagagttttggagcctcatttaggtataaagatgctaactaaattttcagaaggtaagtttrtggagatgtctttgaaaatattttttgtcatattttgggggttcaaggcagggcttgcattttatcagggtaaagtcaagtaaagtcggctgtggaaggatggtacacataatggtgattggacgaagaggtgactagatggttatgagggtttggggactgagaggtggctccaggagcccatcttctag

SEQ ID NO: 200310 - DNA, 425 bp, Homo sapiens
gaattcatcttcccctctccacaaactagtccccatctcaactaacatgtctagccattataatacccttcttccatgatgtggcgttcaaaacatctgttctttccttctctttcatcccacatatccagattaagtcaggaaggtctattttattttgactccacaataactcttctctgtttcctgtttacactggtatgagttactgaacagctycctgggcggcctctgccttctatttctcccattcaggtgcagttatgctgtcaaattaatcttccttaaaccactctgaaaactcctccatggctgcccattttcctccccttcaaatatgaatgccttccccaaatgcaacataacatctcttcactccactctggtcaggtctcctttccatactgacaagcagcaagttattg

SEQ ID NO: 200311 - DNA, 507 bp, Homo sapiens
ggcaagccatgtggacctgaggatggtactagagataaaatgcctcagagaacagagctagatttcaggaaactatgttagttttctcagctaattcctctatctttagcctcaaagttgctcacaattattatcagaaaaagagctatgacagaacgttaaatttaaaaagcagaacacaaaactatatacacaccgactcattgaaaaagtactgatgctagaatttaaatttctacttcttattttttctgaactttccaaatttcctataatatgcatatgttacattgctaaccagggagatacacacacacacacacacwcacacacacatgcacacacacacacatatgtatgtatatatattgtttcaacatataaaacttatttcaatttttatatatgtgaattgaaatacttttaaccaatacttgggaagggggaacaagaaataaattttacatagagtggtttagtaatttccaaatactcgatagactacat

SEQ ID NO: 200312 - DNA, 588 bp, Homo sapiens
acgtggtgaagagagaattacaagcagtccgatactgttggagtaaaaagtctagggcatggacttgtcaaagatagagctggagatgtggtcagggatagacactggaaagctcagacttttgagaaatcataatttctattattattcatgggtagtaattagcatgaatttggttgggttttatttgataccacaggtgaaggacaagacagaaggaatccgttgctatggtagaagtgacagatgatgaagggctttagggagttgcaggagataaaacacagaataggctatagaatatgggctgtgggatatcacygcttgatgtgaaatccaggcctttctaatctctaagcatgtgacatggattactgttattactgtaccttaatttcatcattagtaaaattgaaatggtgatttaaaaagtctctttatagagttataaattatacatgggatgataagtaaactaagcttagctatatcaggaagcataggaaaacaggtagattcaaaaaacatatatgcaggcaatagattcttggttggctaatatttatgtaattaatgaggaccactcga

SEQ ID NO: 200313 - DNA, 400 bp, Homo sapiens
atgttggaggatcctatattttcctcaccaaggccctggtctttgcataaaacacccaccttggctgagcattcaaaattttttggatcctgactgctacaattattcgttcagcctgtctctcagctatttctcccgctgcactacaggtgataaaggtctctctgttgcytgactttccaactcagtcattaactacttgttagtagtccctggtctgtcatctctctgtaggttatcactataattgagcgatttagctataaccagctaactgatgtgtttttgaaggcattgtttgcccctcaaacactgtatctttacaatgtctgaatcattgcatcagccacttcatttcccatcaccaggacatattttcaggtcaccaccagtgagatct

SEQ ID NO: 200314 - DNA, 481 bp, Homo sapiens
gcattttacttaaacaacactatcccactacaatcagagagaaatagaagttgagaaagaaggggacaagttttaggaatgtggtaaaggatgacctggagcacaggatggaatgagacagcacagcagtccgaaatgggtaatggctcaaagatagagtgaggattccttttcatccttttagaataaataaaattgaatttgaaaatgtaacagtaaggtttgttaaaaatctcccaaatcaataataatattacattcttttctccttgtctagactgaggcttttcttagctctgaatctgggcaaacaccattctctcttctaagaacttaattcttttttgcctttaccttcttagaccccatacctacactgtaaggtataagaagatatcaattgtattcagagggttgcrttttctaaatagagtaggcaatcaatagatatttgttgaattgcctctagtgggatgccctt

SEQ ID NO: 200315 - DNA, 582 bp, Homo sapiens
agttatctccttctgcagcattacctgacctgctgttgtgaactgaatgatggtccccagaacagatatgtctatgtttaactcccagaatctgtcaatgtgaccttatttgaaatttttagaggtaattaagctgcgtatcttgagatgtgatcataccggattacccttgatgggtccaaaagcccataacaagtggccttataagtgacagaagagaagacagatatagagaagtttatatgaaagaagaagcagagactaaagtcacaaacaagtgaatgcctagaggcatgagaagctgaaagaggaagggacagattctcctctagaacctccagaggcagtgtggctctggcagcacctttgtttcagacttytggcttgtgcaactgtgtgacagaataaatttccattgttttatgccaccaagtctgtggtaatttgttacagtaacttcagcaaactaatttacctgcttatatcaccaaagtagttgagaccatcacagggcacaatgcatatgaaagccattatttttggatattaatatgaaatatgaatatagctaatatttattaa

SEQ ID NO: 200316 - DNA, 573 bp, Homo sapiens
ttgcacagatcacaatgtatcctcacaatgaattgtgagtttagcactattatttttcccatattctacattagaatactgagggttagaatgattaggtactgtatccagatttacaaagctattaatttttagtgtctgaatttgaacccaagcagtctaactttacaacttttgctttcaactctcttctatttctagatgaacgcagactctattataacaatatcaagtatttttcaaaatatctgactgtgtagcagtagaaatgctctaagacaattttgtctcattttggttttggccacaaattaaagaatccagagatatagaatttagcagctggctaataaaaactctgtaaaataaccaaatcaatttttaatttatgtttattttattttttaaaataatatgaaaatttwaaaaataataattgaaagtaaatagttctagctcttaattcagtggagaggaaataaagaataaagattattttaaaacctacattattctaaagtccatgagagctaaatgaagaaaaacttaaaaaaaaaaaaaagccaaaagcac

SEQ ID NO: 200317 - DNA, 588 bp, Homo sapiens
acacagcatcataggtggagactgaaagcctgccattgtttcttactgctgctgttaaacagatgatgcagagactctggtgatgctactgtattgcttagttatcctgaatacattattgtttcactgcatttatgctatatcatatattttagttttaagtacttacatttgaataagtagaagaaaatgatttcttataggtagcatatacattcagagtcagaaatgatggtgatgccagataaccacagattgtccacatggatgactgagatagtcatacctttgctttctgatggttcaatgtatataaaaattttttaatatayaaaattattaaaaatattgtataaaatttccttctgactatatgtataaggtatatatgccttaggtataggtatatgtgtaataacttaaagtatgttgtgtttagacttgtgtcccatccccaaaatatctcattatgtatatgcaaatatttcaaaatctgatgaaattaaaatccaaagcacttctgctccagatcattttggataagatatactcaactccaatatcaaaactctgcaaatgtgcaattta

SEQ ID NO: 200318 - DNA, 349 bp, Homo sapiens
acctaatcttggacttccagttccagaactgtaagagatcactttctatataaattacataatctatggtattctgttatagcaatataaaatagactaggataacttcgtactcccttctctgacttcatcatatctaatctatgtttttgaagtcctaacccctattgtttatgttccttatgttttcttttttatgtttcccttaggtaaaacaggaagtgtagaggtggctagagtgagaaatgcccttcctttatctgggaaaaggctccaggacagtccttttctttagaaagtgggtttttgctrtgatgaagtcagtggacattcacattgattattcctg

SEQ ID NO: 200319 - DNA, 608 bp, Homo sapiens
atactctaagactgaccacmagctgagtcataaagcaagtcttaaaaagttcaaaaatatttaaatcatatcacacatcttcttagcccacagtagaataaaaatagaaatcagtaccaagaggaattctcaaaactacacagttacctggaaactaaatatcttgctcagaataacttgggtcaacaaccaaattaaacaagaaatttaaaattatttgggatctggcaaaagtaatgttaagaggaaagcttacagtgctaagcacctgcattaagaagaagaaagagctaaaattaaaaacataatgtattacctaaagaaattagaaaaacaagaacaaattaacctaaaggtagcaattgaaaagaaataacaaaagacagagcagaactaaacaaaatggagacaaaaaagtcataccaaggatcaacaaaatgaagttgactttttgaaaggataaaagattggtagacccactaactagattaacaaagaaaacaaagagagaaaatccaaacaaatgcaatcagaaatgacaaaggtgacattacaaacaatcccacagaatacaaaagatcctctgacactactgtgaatctttatat

SEQ ID NO: 200320 - DNA, 446 bp, Homo sapiens
gaattcttgattctgtgacttggaatgggaaaaaattaattgttgttagaatgtgttgattttcttttggaagcatctgatgatgcagatataaaagagtttgaaaaattttctgttaatataattcatggctattgcatccattttcatacatctgtgcgtatacatacacactttgaacaaaagataagcaacattaatttagaaaagtatytaatacacaccaaaaaccatgcagacagaatgctttatatatgctttctgcagtaggccatgttaaatcattgctacaatcttctaagaataattactaaactttaaattactggttgatgctttgtcagcattgtcttggtttttatttcatcagtgcagcctttatattggttgattcatgtcaacaaatattttgtcttaagtttttcattaaacatacaattttgaaa

SEQ ID NO: 200321 - DNA, 431 bp, Homo sapiens
tgttagaatgtgttgattttcttttggaagcatctgatgatgcagatataaaagagtttgaaaaattttctgttaatataattcatggctattgcatccattttcatacatctgtgcgtatacatacacactttgaacaaaagataagcaacattaatttagaaaagtatttaatacacaccaaaaaycatgcagacagaatgctttatatatgctttctgcagtaggccatgttaaatcattgctacaatcttctaagaataattactaaactttaaattactggttgatgctttgtcagcattgtcttggtttttatttcatcagtgcagcctttatattggttgattcatgtcaacaaatattttgtcttaagtttttcattaaacatacaattttgaaaaaatttgggcatgttaatgaaagaattc

SEQ ID NO: 200322 - DNA, 594 bp, Homo sapiens
atttttctattacttaatgaacagatgtcagcctttgaacaagaaacttgtaagttcaattgaatttcagatttaatggaattaagtagagatttttcttataagaccaacattcyttgttaagtgaaataatgatttcataatctgtatttttggagttccacttgaataccagtttgctttaactgaatatcagtttcttctacaaggctaacttggcaaaactactaagttcatgttaattccaaataacacataaaattctaaaaaatgctttagtaaacatatattattgtgaatacaaatgtgtttatagattgtactttattaatctgtgaaaaattaatattttcacattcatttactaatgtttcaaaatattagaattagtttgcattttcagaatgtcagaatttatgtaaaatgaaaagggttttgaattttgagtattttttttacatatatgtatacgaaggacatgaatttgatttaaagcaaagaatatgtacatacatattttgaaagtgtattagcaatttgtctcaacttataattgcatcatttcagtgattttgaaatgatacttcccagcag

SEQ ID NO: 200323 - DNA, 594 bp, Homo sapiens
atttttctattacttaatgaacagatgtcagcctttgaacaagaaacttgtaagttcaattgaatttcagatttaatggaattaagtagagatttttcttataagaccaacattccttgttaagtgaaataatgatttcataatctgtatttttggagttccacttgaataccagtttgctttaactgaatatcagtttcttctacaaggctaacttggcaaaactactaagttcatgttaattccaaataacacataaaattctaaaaaatgctttagtaaacatayattattgtgaatacaaatgtgtttatagattgtactttattaatctgtgaaaaattaatattttcacattcatttactaatgtttcaaaatattagaattagtttgcattttcagaatgtcagaatttatgtaaaatgaaaagggttttgaattttgagtattttttttacatatatgtatacgaaggacatgaatttgatttaaagcaaagaatatgtacatacatattttgaaagtgtattagcaatttgtctcaacttataattgcatcatttcagtgattttgaaatgatacttcccagcag

SEQ ID NO: 200324 - DNA, 516 bp, Homo sapiens
ctgccaatctgaatatcatgacgaaatcccccaccatcstgctccatcctgccttgcggtggatcatccctttgtctcgtggaaccacgctgtttgtagtacctaccaattagtattgagttgccatctcagttatcaaacctactgcagtatccagcgcttatggacaagtaacccttattgtacttaataatggccccaaaacataagagtagtgatgctgccatattgttgtaactgttttattttattattagttattgttgttattatctcaatgaacctgatttatatattaaacttcatcataggtatgtatgtataggaagaatcatagtctatatagggttcagtagtatctgcagtttcaggcatagactaagaggcttgaattcccctgcagataaggggggactattgtaatagaatttttttttccacaagaatccaggcactgtaactatcaaagaaaagagtgacatattttcaaatttttcaagtaaaatattcaagcag

SEQ ID NO: 200325 - DNA, 540 bp, Homo sapiens
gatctgaaattactgccaatctgaatatcatgacgaaatcccccaccatcctgctccatcctgccttgcggtggatcatccctttgtctcgtggaaccacgctgtttgtagtacctaccaattagtattgagttgccatctcagttatcaaacctactgcagtatccagcgcttatggacaagtaacccttattgtacttaataatggccccaaaacataagagtagtgatgctgccatattgttgtaactgttttattttattattagttattgttgttattatctcaatgaacctgatttatatattaaacttcatcataggtatgtatgtataggaagaatcatagtctatatagggttcagtagtatctgcagtttcaggcatagamtaagaggcttgaattcccctgcagataaggggggactattgtaatagaatttttttttccacaagaatccaggcactgtaactatcaaagaaaagagtgacatattttcaaatttttcaagtaaaatattcaagcagcattgaggacaa

SEQ ID NO: 200326 - DNA, 597 bp, Homo sapiens
gttagacttattttttgttccagtcttaaagcattcgttattgactatasagcctatttttctaatatcagtaattgctcagaaacatacagtttgatgaaaacaaaaacatttatttcaataataaagaacatatatgtttgtatctgtatgtgtttctatacacagaagcacgttactaaataccccattgtgaaaatcttaatatgtattactaaatacatattttaaacctgaacttcccaagtgtagatttaacagtcaaataggaaaatttgagaagacaaaattaaaatatttaaagataagaataaagaaaacttgcatagtagaaagtaaaattaagcaatataactgttttctaggatatttctagaattcttgattattaaaaaaatacatatatattattctacataaagaacaagactgagtttatactcactagatataaaagtccttatatttcttagtgtgaattatattattaggaatattttgtcatttgagaaatataaaggttatgctaataaattatgcacactcttcaattaagtttgacactgtataagacacatgtataattgatgttcattc

SEQ ID NO: 200327 - DNA, 466 bp, Homo sapiens
  misc_feature (1)...(466): n = A,T,C or G
tgcatcagtttatataaatactacaccattttttcccttatatctagtgattgcttttgcanaactacaccattttatatatgggacttgagcatccgcagatctgggtatccaagagggtcctggaaccaatcccctacagatcctgagggatattggtgtacaagtatctgtttcagtccctgctttcaatkcttttgagtatatattgaggaatggaattgctggattatatagtaattttatgttttgaattttagaggaactgccaaactgttttccatagtagctgaaccatcttacattccaccagcaatgcatgagggttccaatttctccacatcatcactaatgcttgttattttcatgaaaaataaacagccattctaatttgtgtgaagtggtacctcactgtggttttgatttgtattttccaaatgactaaggcatgtatttattggccatt

SEQ ID NO: 200328 - DNA, 264 bp, Homo sapiens
ttcatgccatcacataccaggatgtgttayttgcttttagagccctttgagttttcctctggagcacttcagacactttaaagtttatttttatagttatttgatttctgtctgccgtcctcgttatgcggagtccaccagggccgggatctgggctattttatgcctggcaccaagtaagtgctcagacgccatcttgttgacctgaaattttcgaaggtgagggcctcagagacccttgatgagagagtaattttagaaagg

SEQ ID NO: 200329 - DNA, 365 bp, Homo sapiens
attcatttgcaccctgtatgatatgtgaactaatatccctttctcctcytcaccactaggttctaagagtcttgagggcagggaccacacctgatccatatttgtgtcctctgcacttcctagaacatgacttgcacaaagttgatcacagtaaatagtaggtaaatagagatatgttttgagccaagtcttaaaggaagtactgctcattaattagtggaaaagagaaaataaagggattactaaacagaaaaattcgcataagcaaagaaagagaggagggattccactaagaagaaggcttcttattcactggcccttctgtgaaagcggtttataaactatacagtgacagttaaaattat

SEQ ID NO: 200330 - DNA, 580 bp, Homo sapiens
ccctgttataggcacttgtgtattatagtcactagtggtaacagtttatctgcccgagtagattaaacactttacaaggtagggtctgggagggaggctagtgcttacttttatgtccctcatggattcttagaagatgatagtaaggactccaatattttgaaatgagctaattcaagtgaacacaagtttcaagcaattgcaaaaagaacagtggccacgagggcagtttatttcacatacaatcaaaaggctctgcagacctgcataccaacgaggcactccaggttcccctgaaggattcttagcctatctaccaaaagggaaaatctatactccacttacattttgaacaaacrttatttcagggcctgctttatgccagcactgtgtaaggccccaagaaacccaaagatgactaagacatggaacccaccttcaaagcagccctcaaataaaagaatgccatcaactaaaaatttatgcaaatggtgaaggaacctagacaaggtcctgtcctgccaacctctaggctcagttttctcagctggaaacgaggaagctgtatagattatcttca

SEQ ID NO: 200331 - DNA, 562 bp, Homo sapiens
ttggggacttgaacattcaggtttatatattgctttaaagaaatggatgaaaggagccctaggcataggagataatctcttgcctatggatcattgcctttctcagctggggaagctatggaagcagggggagagggcttcttggagggagatgggccttaaaccagatcctaaacagccagcagggtttgggttagaggacaaatagctgggagagaaagcatgtccatgaccttkcatggagtcagccagttctgatttttagagcaatttgtcttttataacttatttttcatctgtttataaattgagtttctagaggttgggacagttgatcaatcctatctacattgaagtggcaggttgcataatatggatcagaatgtggaatggagtggggatgaatagaaacaaatgtcggtcctttatacctgtcacttatgaaacttaagccttcttatttggggtcagtaatagaaagtcttatgccttaaagtacttggagacatacagtgaggcttgtgaaagcacccagcacattgcttcatacatagggagtgct

SEQ ID NO: 200332 - DNA, 395 bp, Homo sapiens
gaattcaatcttacggctagacttcactagccttacataacagaagtcaacagttatgcaaccctctcccttcctgcagaacttgcattcctcacttaccaaattatgtacggagcacctaccagggccaggtcttgtgctaggctctagaaagttggtggccagacaaaaataaataaaacacacacacacacacacacagagasacacacacacacacacacacacacacacacaaactgtccctatcctcagagctgacagtttactagtaaagctgatcaaatccccttatggtgggagtctaatgattagtatgacttcagaatcttacagaatagtctagagccacttaataaccagctccaacatttaaatccccattaccggatatc

SEQ ID NO: 200333 - DNA, 388 bp, Homo sapiens
gccctaccctaaaagcccatgggtaccagaccacgctataacagcagcaaggccacagggacacagggtgctcctccttcctgcaaatgatacaaaagtgtatgtgcaaatgaaagcaaaggacaaatccaaaaaaggcaagcatccttatatataagaaatctatatttttatacattacatatgtaaatatgtaygtttttgcttagaaaaaaaagtttttgcttgttttctaatagcaaatgagtagagtattctatctgggtccaggctctggaaggtggtttcataacagagagctgcttcctcttcgggcagaaatctgtccacggcccccaacccacaggccctgccccagcacgctttccagctggaaggctgatggtga

SEQ ID NO: 200334 - DNA, 497 bp, Homo sapiens
tacatgtaaataacgttgaacctgcaacatgacactatctattgtaacatacattttgcaaaggagcacaacagtgaaaagaagttagccttaaaatctattttgtacaagtgttctgttgtacaactcaagtgctaagcttatctcagcatttctgtttatctttatactgtatcactgaggcaatttaaaagtacttttacaaaacagagtacctgactttttttttttccacacacggcacatataatgcatatcgaccccccttccccattaaggtatagcacacacacacactgcaagaaaaaaaaaaaaactagtaagtaataatctgatcatgttgcccatccttcaraaagtcgcatgcgcttgactgagggactttccctttcgtccggcgaaggtctggtgagtccaatgggggagtggaattcgttccggtgatcctctcggtcgctcccgtcgtacgaactgctacagctgctcaagctgtcaac

SEQ ID NO: 200335 - DNA, 562 bp, Homo sapiens
actcacaaattttacattattgaacgcttaaaatttaggggtactagtctaaatagacaccctcagaaaaactgagcagtcartgaaatcttttaatgccagaaagtcataagcatataatctcagtgatcaaaagtgtagctgaaagagggcacagaattttcagcatggaaagagaaaaaagggagtgatattttaggcagaaggtaaaggttagcaaaggaaaaacaaaacctttgtaggaaagagcacagggaaatttgtgaatgtgagtcagatactataaatctgaattaagcatgctttcaaattcttgggcaaagttcatcattttcccccattcttggatgctagtctactgctccactattctcctgggcttttacattggtcttattctgggccaacatttgcctgagggaattcatggaaaatcagggtgattctggggccaatcagatgattcaggcttcctcaggacagatcaaggatttggtgtttgtaaggattcttccgccaaacctctattggaacccagacagggcatgcatcatgagttggc

SEQ ID NO: 200336 - DNA, 562 bp, Homo sapiens
actcacaaattttacattattgaacgcttaaaatttaggggtactagtctaaatagacaccctcagaaaaactgagcagtcaatgaaatcttttaatgccagaaagtcataagcatataatctcagtgatcaaaagtgtagctgaaagagggcacagaattttcagcatggaaagagaaaaaagggagtgatattttaggcagaaggtaaaggttagcaaaggaaaaacaaaacctttgtaggaaagagcacagggaaatttgtgaatgtgagtcagatactataaatctgaattaagcatgctttcaaattcttgggcaaagttcatcattttcccccattcttggatgctagtctactgctccactattctcctgggcttttacattggtcttattctgggccaacatttgcctgagggaattcatggaaaatcagggtgattctggggccaatcagatgattcaggcttcctcaggacagatcaaggatttggtgtttgtaaggattcttccgccaaacctctattggaacccrgacagggcatgcatcatgagttggc

SEQ ID NO: 200337 - DNA, 590 bp, Homo sapiens
tgaggcatttgctggaggactcagtcacttcctgggagatttgggtgatttgagatgttcttcatctgaggaagatgtacatttgaagagacccaggaagaagggcaccacttacctctgaggaataaaccaaaaccagtgacatttcagcctccagagatgagccaaagagaaattactttcagattggagctgccatatcttaaatcaaaccacagagacagatcctccttctctacacataagcctgtactggttsatctgcaaagtggacttgaaaaactgggaatgaagcccaggctctttatgctctgaggctgaagctggattgcagtggctggtggaaggcttggagggcaggtgtcctggtggacctttgccccctcttttttcccagacattctcctccactggttccctctaagaggagtgtaggagtatgtttgccttctgccatggccactgcaaacctggctccttgctcatgctgggctgcagtggggagagggagtgacacaggctgctgtggggatgctgcacaggaggctgtggcaggagaaagaaaggtgatggaaacagtgatcaataaa

SEQ ID NO: 200338 - DNA, 590 bp, Homo sapiens
tgaggcatttgctggaggactcagtcacttcctgggagatttgggtgatttgagatgttcttcatctgaggaagatgtacatttgaagagacccaggaagaagggcaccacttacctctgaggaataaaccaaaaccagtgacatttcagcctccagagatgagccaaagagaaattactttcagattggagctgccatatcttaaatcaaaccacagagacagatcctccttctctacacataagcctgtactggttcatctgcaaagtggacttgaaaaactgggaatgaagcccaggctctttatgctctgaggctgaagctggattgcagtggctggtggaaggcttggmgggcaggtgtcctggtggacctttgccccctcttttttcccagacattctcctccactggttccctctaagaggagtgtaggagtatgtttgccttctgccatggccactgcaaacctggctccttgctcatgctgggctgcagtggggagagggagtgacacaggctgctgtggggatgctgcacaggaggctgtggcaggagaaagaaaggtgatggaaacagtgatcaataaa

SEQ ID NO: 200339 - DNA, 606 bp, Homo sapiens
tgcaggtttgtatcggttaactcatgtcatagggttttgttgtacagattgtttcatcacccaggtactaagcctaatacccattagttatttttgtctgatcctctccctcctcccaccctccaccctgtgaaaagctccagtgtctgttgctcccctctttgtgtccatgtattctcatcatttagctcccacttgtaagtgagaacatgcagtgtttggttttctgttcctgcgttagtttgctaaggataatggcctccwgttccatccacgttcctgtaaagcacataatctcattcctttttttatggctgtacagagtacactattttttttaaaggaccttgaattttccataatccacatatttctgaagaaacatttcctgctgaaggagatccctgtgactctgaaaaggaataacaagggcacgatgtttttcagtggtaaggctgggagggttacctgtctatctgtagaggtggctgttacagaggtatgtctcaacacatttatttggattaataaatgaagccagatatgtgtgacaaaaaataagcctgatttggccaactgctttgacaatgaggaccttttatgtgg

SEQ ID NO: 200340 - DNA, 404 bp, Homo sapiens
ccaccaggaattaaggaccctattttttttgaaaggatcaaatctacaattaacataaataaaaataaaaatactttttttactgatagtcctgttgctatttgccaaagtagctttgtaaataattaacctttatgttatttcctaatgactgtctaggaataacactgtgagggaagatgaggattatcttggggcagaacagcatgaagagtaccccaagttagtccttgagcaatattactctactggttcataaagtcttctttttggstgactccagaacaattgctccttaatcagccctcctttattgcctctaaaaaagaaaaactgaatgtggttacgtcataggggagccatgcctacatctagtgatgagctttgtaacacagctgattatg

SEQ ID NO: 200341 - DNA, 418 bp, Homo sapiens
ctgatgtatttttgctatttcaactgtattctcaactatagatgtgatttatttgatatgctactttgtgctgggcccagtatcaagtcttcacrtgatatctcatttaatcctcacactaatcctatttcacagaagaggaagcagaaacccagagaaattatgaaattttccccaggacttgcaagtgctatgagttagagccagagtgcaagtcccggtgcctgcaacctcaaaaccaagcatattcatgagctgcaagagaatcaatagatgtttcaacaaaagcaaggccagacaagacttcctcttccttttacctgcatttcaggcctccaacatctctcagagtcaatggcattaacttcaaaagtgtttcctattctactccctcggaagctgatgtcacacggagact

SEQ ID NO: 200342 - DNA, 418 bp, Homo sapiens
ctgatgtatttttgctatttcaactgtattctcaactatagatgtgatttatttgatatgctactttgtgctgggcccagtatcaagtcttcacatgatatctcatttaatcctcacactaatcctatttcacagaagaggaagcagaaacccagagaaattatgaaattttccccaggacttgcaagtgctatgagttagagccagagtgcaagtcccggtgcctgcaacctcaaaaccaagcatattcatgagctgcaagagaatcaatagatgtttcaacaaaagcaaggccagacmagacttcctcttccttttacctgcatttcaggcctccaacatctctcagagtcaatggcattaacttcaaaagtgtttcctattctactccctcggaagctgatgtcacacggagact

SEQ ID NO: 200343 - DNA, 629 bp, Homo sapiens
gatttctgtttacaggacacttggctgccacttatagcctatttcatatatagactgctgaacagcttccagacagtgtgtgtaaaattttacaaatgtttttcttgtttcaatcaggcatgacctttaaatatataaaactgtacataagaaargtgcccacaagacttctggaagaaacgagcaaattcaattcacaaatatttttgagcacctactaaatgtgaagcagctttctaggtactgaggatacaattgtgaaaaacatagacttaaaactcttcaagaagcttctattctagtgtattgggggacatggagaggaagcaaaataagtaaatgatgtatttttcaagtgagaactgctaggtgctccagagaaaaatcaagtggagaagagccggagaaggtgaagcaggggtgcaattctaaagagaattaggggagaccttgctagaaatgagacatttaagcaaagacttgatgggtgccaatatctagatgagaaactgcaaatgcaaagatcctgaggtggaaatgagcctggatgtgactgagtggagagcagtggatgaggtcagagaggttggggggccatatcctacaatgacgcagggtacaggtgactt

SEQ ID NO: 200344 - DNA, 560 bp, Homo sapiens
tcttcgttaatcaaagcatcagcaccattgaaatgccagtgctgcaatcctattctcttgtttataagcaccaaagccaacctgatttgcatattagttggcataaatttgaatattaatttcaataggcattgtctctaaatccagaaaataaacacagcctgctgcaattatacagataattggtatttagggctcatgagtgcctaaaagttttaaatcttctacatttatactcagattattcttacagatactcacacaaactcactcacacagtggtcaaattacaggttgtgaactttataatgaatttattctcttcatttatttctaggtttccagatgtcgaagtttctggtttggaagatctgatgatccaatttcaggaatatattagtcagaaccacttttttttttaagctacaaatgacaaaaaactaacctaaaactgctttcagctaaactgaatttactggctcgctcaactcggaagtcccagggttgtctgcctttgggcamaactggtctcaggtgctcaaatgatttctctctctcta

SEQ ID NO: 200345 - DNA, 643 bp, Homo sapiens
tgaattgaaggatgcaaactattgttcctgagtgtgtctgctgcccgctgccaagggagattaacatttgaataagtggactgagaaaggcagacccaccctcaatctattcaagccagcatggctagaataaagccaactggctgagtcttccagccttcatctttctccggtgctggacgcttcctgccctygaacatcagactccaagttcttcagctgttggactctaggacttacacaagtggtttgccagggacccttgagcctttggccacagactgaaggctgcactgtggtcttccctacttttgaggttttgggacttggactgatccaccactggcttccttactcctcaacttgcagatggcctacggtgggactttaccttatgatggtgtgagtcaattcttcttaataaactccctttcacatatacatatgtcctattagtcctgtccctctagagaaccctgactaatacaattaagattaaagtgattgtaaaaataaaagttataagagaaaataaatgctcaaatattcttagatttttatatactatttagttactgttgactgattaaccttaaaataccatacacagtatgtgtttctattgcacatgatcagttcacaa

SEQ ID NO: 200346 - DNA, 526 bp, Homo sapiens
tgccatgtgaagaaggaggcatttgcttyccctttcaccatgattgagggtttcctgaggcttcctcaaccatgcagaactgtgagtcaattaaacctatttcctttataaattacccagtcttgggtatgtctttatcagcagtgtgaaaacagactaatacagaagggaaggcacagagctgtgcagccggttggtggcaggaagggctgtagctcatgttgttttgaactgctggtaggagtatgtgatggataattttaggtgccatcttgactgggttaggtggtgcccagattgctggaaaatcactatttctgggtaggtctgtgaggacgtttccagaagatattagcatttgaatttaaacactgaataaagaagatccttcttcaccaacatggcaggcatcacctgactcactgaagtctccaatagaatgaaaaggtggaggaagggtgaatttgagtgaattatctttgtatgatctgagacattcatcttctccggccctggaacaccaggt

SEQ ID NO: 200347 - DNA, 526 bp, Homo sapiens
tgccatgtgaagaaggaggcatttgctttccctttcaccatgattgagggtttcctgaggcttcctcaaccatgcagaactgtgagtcaattaaacctatttcctttataaattacccagtcttgggtatgtctttatcagcagtgtgaraacagactaatacagaagggaaggcacagagctgtgcagccggttggtggcaggaagggctgtagctcatgttgttttgaactgctggtaggagtatgtgatggataattttaggtgccatcttgactgggttaggtggtgcccagattgctggaaaatcactatttctgggtaggtctgtgaggacgtttccagaagatattagcatttgaatttaaacactgaataaagaagatccttcttcaccaacatggcaggcatcacctgactcactgaagtctccaatagaatgaaaaggtggaggaagggtgaatttgagtgaattatctttgtatgatctgagacattcatcttctccggccctggaacaccaggt

SEQ ID NO: 200348 - DNA, 538 bp, Homo sapiens
tctttgggactgctcttaaagaaaggtgaaatggcaggagatgggggatggctctgcaggtgaaaggtggtgcattaggccactcttccattgttataaagaaacacttgagactgggaaatttataaagaaaagaggtttaattgacccacagctctgcatgctgtacaagaagcatggtgctggcatctgttcagtttttagggaggcctcaggaagcttacaatcatggcagaaggcaaagggagagcaggcacakcacatggcaaaagcaggagcaagggagagtgggggagggagttgctacacacttttaagtgaccaaatctcgtgagaactctatcaggaagacagcaccaagccgtgagggatccacctccatgatcccgacatcccccaccgggatgttgcagattaaaattcaacatgagatttgggtggggacaaatatccaaatgatgtcaggtgggctctgtgggaaggccaagaggcaaggagtgttttcaaatgactggagtctgtctggtttagacagaga

SEQ ID NO: 200349 - DNA, 538 bp, Homo sapiens
tctttgggactgctcttaaagaaaggtgaaatggcaggagatgggggatggctctgcaggtgaaaggtggtgcattaggccactcttccattgttataaagaaacacttgagactgggaaatttataaagaaaagaggtttaattgacccacagctctgcatgctgtacaagaagcatggtgctggcatctgttcagtttttagggaggcctcaggaagcttacaatcatggcagaaggcaaagggagagcaggcacagcacatggcaaaagcaggagcaagggagagtgggggagggagttgctacacacttttaagtgaccaaatctcrtgagaactctatcaggaagacagcaccaagccgtgagggatccacctccatgatcccgacatcccccaccgggatgttgcagattaaaattcaacatgagatttgggtggggacaaatatccaaatgatgtcaggtgggctctgtgggaaggccaagaggcaaggagtgttttcaaatgactggagtctgtctggtttagacagaga

SEQ ID NO: 200350 - DNA, 621 bp, Homo sapiens
caaacatatccactctcctccattcctgctatccttgccttaattttagtccagaatcatttcttgcctgggattttgcccacgatttccctcttccttagaaatcgatcctcctctctactttcaaaatgtttttgaattcagatttgatcctgtctttcccctggttaaatcctttagtggcttaccacttgctataagacaaagtcaaggtcctcagtgccctttgtcatctagtgccatctcctgtgcacagacttccagttctttgattatctctgtgcctttgcacacacattttcttccttggaatcactttgtcctacttctatttttctttcctacgctatttagagtcttctcattcttcaaagaacccaaagatggcctcctttataaggttttccacagctctctcttgctgatagagtctgttgtgccttttcctaygcaacctcctatgtatgtggtgggctctttccatactgtattacacttgctggtttacaaatctatacccagcactagactgtgaacttcttgggggaaggaactacgtctgataactacattctttgtaacttcatggaagcagtgcctaacacttaggaatctttttga

SEQ ID NO: 200351 - DNA, 527 bp, Homo sapiens
aaggtcagtaaattgtgtgcatggatgtatgtgcatgtatacatatgtatgtttgtaggtatacatgtatgcatgtggacatgtatgcatgcatgcaaccactctggagtcctctcacggaagcaggtgtcccttaacctttccagttaagtccaaaatacatatttgtaaatctgagtgcagtatgttttctgcaacatgactgccaacctctgattctgaaactgacagaggcatttctcatagatatttataactgaatttattcaaattcattaatgttgtcatttcttatgctgccacctaagctaaaaacttcaaaaggtatcctctatattcctacctctctgcaaacacttccaagtccacacaggatcctctctggaatgtctctgcaacatctgcctgcactccaattccattgccattatttctgagtttaggctttccaccaygtgagtctgagctcccatcaacctcattctgtgatcagttatttttctaaaatatagaactgagcaggttct

SEQ ID NO: 200352 - DNA, 545 bp, Homo sapiens
ctcaagcttaagataaatttccttctcttcagctggtttgtgtgtggcttgaatctccacagcagcagtcacagcaacaaagctctgattggaaagtcaggctactggtcccacagacatgtttaaccgcagctggagcccaagcaggtctcacatacacgagtcggccaacctgcataaatcaagttgtgagttaattccaagggagcattttcattatgtgtacttacatgctctaggttactcacagaagatgctctcagctcctcagaaagaaacatatagaaattgtaccaatgtgacasagctctttagcaaactccatgtgggtttggctcaaataactaaaagggttagagattaagctaatacttttatctcctaggctccataattaggaaatgtattttctgtggaatataagaacagccatctgtcctgaattaaagaatatataatatcattacaaaaatatgatgccattgtttcattgtttttgaaatatgattaacaagccagtgaacaataagtttgaagtttagaac

SEQ ID NO: 200353 - DNA, 367 bp, Homo sapiens
ggatgtagtgaaaaaatggagccaggataatgaacaattaagagcacacttattgcacctgtggctgtgcrcaactgagtaggggtaccttagaatgatgcatttccaaaatttttggaccagtctacacttcaatatatgtaaccaaaataaaagttcatgaaatatcatttatacatattccatgcaatactttatgatattttctattctatcttctgccctgttcttttcttgtataatttattctacatagctattaaaataacatctgacctcaaatcattaaattccttatgcaacccactaatagatcatgacctatagtgtgaaaaactgtagtttattcttaacatatttagctaaa

SEQ ID NO: 200354 - DNA, 360 bp, Homo sapiens
ttttagaatttatttttgattcagagcaaggaatgctatgcacttctttgtcaactatttgagcttaactctgtatattttataaaacttagtatttaagtttcatttctgtgttttttttttaacattggaaaataatttcacatttgaatagaggatgtcagggaaataacagattataagcctcaaatcatatctagtgattctgttgacatcgtaataggctrcttgagtgttagatgttagtgaggactttttggaaagactctctgtttttctgctgtgtcagttagttactgttctaaattctttcatgtccccacataaagaactaaaagtaattttaatagaaagtagaga

SEQ ID NO: 200355 - DNA, 495 bp, Homo sapiens
actggggttacaggcgtgagccaccgcgccagcccattatttctttaaagtggygctagcattgaacatgaacatcttgagtggctaatactgagtccactcaatccctttattatctgagaacagcagaccatcctcctgttgttcatgaaggttcctagagaaaccaccaactaaagcaaaaattaaatgaacacatctcctggaatgcacagagcatcaaaccctaacacgcattttggggtcttcttgtagggaacttcttgcagtttctttgttttgttttgtattgtttttttcccaaaggtgtcacttgtcacaatatgaacaagcatactagaccaaacccagagccaaaagaagaaaatggaaaaaaacctgaaggaaaccaactggagaaggaagttaaggccaccagaagctattaggcactatgatgctccacatttggctggtgaaaccagcttctcaagtgtcaacatcagtaacatccaa

SEQ ID NO: 200356 - DNA, 585 bp, Homo sapiens
tcttgcagtttctttgttttgttttgtattgtttttttcccaaaggtgtcacttgtcacaatatgaacaagcatactagaccaaacccagagccaaaagaagaaaatggaaaaaaacctgaaggaaaccaactggagaaggaagttaaggccaccagaagctattaggcactatgatgctccacatttggctggtgaaaccagcttctcaagtgtcaacatcagtaacatccaacgaggcagtccagaactgagatggtggttgaggaattccagactgctgatactgtagacaaaacagttggtgctgaagtcatgatragtcagagcaatatgtgcatcagacgcaagaccaaggcagtagctgagggatctagaggcaggattcaagttttctcatccaggcaggaaaagacacaggcaggaatgcaactggccttcaggcctcattcccttaggaattagtatagagacaaacttcagcactaatagaaaagatgcagggaaaatgaatcaaaagatcagttctaaaaatcgaaccattagagcggggggtggggagaaatgctagaactcacatatattc

SEQ ID NO: 200357 - DNA, 553 bp, Homo sapiens
aaaagtagcatttctatataccaatggtgtccatgctgaaagtcaaatcaagaacacactgctatttacaaagtcacaaagaaaatgaaatacctgaaaatacaactaaccaagaaggtgaaggttccctacaaaaagaactacaaaactgctgacagaattcagagaaaacacgaataaatgaaaagcgttccatgtttatagattggaagaattaattttgttaaaatgaccatagtgcctaaagcaattagaggttcaatgatatttctagcaaagtactaatatcatacttcacagaattagaaaaaaaaatttttaagtaatrtggaaccaaaaaagagtctgaattgcctaagcaatcctaagcaaaaagaacaaagccagaggcattacactacctgacttcaaactatactataaggctatagtaaccaaaccagcacggtactggtacaaaaacagacacattgaccaatggaacagaatagaaaactccaaaataaaatggcacacttacaatcatctgatcttcctcaaggtcaacaaaagc

SEQ ID NO: 200358 - DNA, 621 bp, Homo sapiens
ctggccctgtacacccaattttgttcttaattagttcactacgtcatctaggtggagcatatccctgtggcttcctaacarggggaagatattgtctgaaaatgccttttttttttcaatccttatagtcgattaactggctgtatataaaattcaatgatgaaatttatttttggtccaaattttgaaatcgtgattgcactttgtcagcattgatacgttggatgtaattcttactctagagcttttttaggtaacctggtctctatctcaggatcttctacttatgcttgatattagacgtatctatcctagtatatattgatgtgggtcactcacttttctgggcattcagtgggttagcaatgggtcctgacggtccaatggctccatatttatacatatatttctttttaccaagtttcatatttagtcccctccctccaagcatttcctctaattgatgaatttaattcctaagcctttctcaggttttgtgggagagatgtagcttctcatcagtgttcccacactgtgaagtcatttgctgtttctgcatccattgcttacccttatatgtatactgtggtttgagactatagatgtcccctgatttcatca

SEQ ID NO: 200359 - DNA, 549 bp, Homo sapiens
aacagaaagatctgtccttcatgcatattcctagacagttcaaaataggtgtaagcactttcttataaaggtttgagccactaattcagtgtaagcatattagaaatatagtatttttaaatatgaaatatgtgagattgaatcattagttgtaacgtggataaaagcaatagcaacattacggaaggatgtacttttcatcttcatatgataaggcaactgtgaagtctcatccatttttttttttaataatggtttagaagaaatgtaactactcagaattaatcaggcagaagctgacaggctcaaagatacagtgcctaacgtcttcccaccaattctgcaggatgattcagaaaacatcatttcgggtttcagaattcaagagggacaagtatcgggatttttcctcaccaagctctactctggggaaaaatgaccagtccagtgttagcagccaatcagtgccattcttgaccttactatgtccaaatcagarctcattccactttctcctctcccctgaatgcccactcctgaccagtgttt

SEQ ID NO: 200360 - DNA, 485 bp, Homo sapiens
tgtaaaggtatgtacaattttatgaaagtttactgattaaagcatttcgtagttttttaaatttttgaaccattttgaatgtttatttatgaaagcatagacaaaagatttaagacatttaaagtggctgaacagggtgtgaaaactgagaaaccagaacacagatctcatgaaacactgagagatcaagtaaagtaaaaacaaaaataaagctctactcaccatcacagaaagagaagaaggaatataaatagggtgaaaaggaaaacaatcacatacaagttcccgcctacttactgggggtgttaactaacatgctgtaatcaaagagataaaagccaacataggaatatttattacagctttcagaagggcaasttgaactactggggcaagagtgaaacactgaaataagcatagtacactgtataagcacgccgtgagaaatcaaatggcataatgtaacttcctctacaatcacttga

SEQ ID NO: 200361 - DNA, 615 bp, Homo sapiens
cactatgtttgtttccacctttgcatgaggcctctcagtgggtgccttaagacccccattctccataagatactgtgaaagaaaaacatcttgagcccccaaaatcactaagctaaaaggaaaatttatgctggaaactgctcagggcaaacctgcttcccattctattcaaagtcatcccctctgcttactgagatagatgcatattctgactgccacctttggaaaggcttatcagaaactcaaaagaatgtaaccatttttctgtcacctacctgtgacctagaagccccctccctgcttcgagctgtccccatatttctgaacgggagacatatattgattgatgtctcaggtctccctaaaatgtctgaaactaagctgagccctaaccaccttgggcacatgtcatcaggacctcctgaggcagtgtcatgggagtgcatccttaactttggcaaataaacttcctaaaatsattgagacttacctcgtcatttttcttgattgacaataccatcctctcttgcttaattcagattgggttcctgccacttgtacctaaaaaagtcatcttaactcacacttccagtttatgtccagtttatgggttat

SEQ ID NO: 200362 - DNA, 472 bp, Homo sapiens
aactaacacaatataataacattcaaactgaacattcacacagaagaatatttaatgtcattggtaaatattgacaatataaactattttttttaacctcaatcatgttgaaaatgttgcacagaggccgygccctgtggctcacacctgtaatcccagcactttgggaggccgaggcaggcagatcacctgaggtcagaagttcgagatcagcctggcctacatggaaaccttgtctctactaaaaatacaaaaattagctgggcatggtggcaggcgcctgtaatctcagctactcaggaggctgaggcaggcaaatcacttgaacctgggaggcagaggttgcagtgagctgaggattgtgccactgcattccagcctgggcagtaagagcaaaactccgtctcaaaaaaaaaaaaaaaaagaaaaaagaaaatgttgcatcggaaaatattaggaaaaaatctatgtt

SEQ ID NO: 200363 - DNA, 472 bp, Homo sapiens
aactaacacaatataataacattcaaactgaacattcacacagaagaatatttaatgtcattggtaaatattgacaatataaactattttttttaacctcaatcatgttgaaaatgttgcacagaggccgtgccctgtggctcacacctgtaatcccagcactttgggaggccgaggcaggcagatcacctgaggtcagragttcgagatcagcctggcctacatggaaaccttgtctctactaaaaatacaaaaattagctgggcatggtggcaggcgcctgtaatctcagctactcaggaggctgaggcaggcaaatcacttgaacctgggaggcagaggttgcagtgagctgaggattgtgccactgcattccagcctgggcagtaagagcaaaactccgtctcaaaaaaaaaaaaaaaaagaaaaaagaaaatgttgcatcggaaaatattaggaaaaaatctatgtt

SEQ ID NO: 200364 - DNA, 472 bp, Homo sapiens
aactaacacaatataataacattcaaactgaacattcacacagaagaatatttaatgtcattggtaaatattgacaatataaactattttttttaacctcaatcatgttgaaaatgttgcacagaggccgtgccctgtggctcacacctgtaatcccagcactttgggaggccgaggcaggcagatcacctgaggtcagaagttcgagatcagcctggcctacatggaaaccttgtctctactaaaaatacaaaaattagctgggcatggtggyaggcgcctgtaatctcagctactcaggaggctgaggcaggcaaatcacttgaacctgggaggcagaggttgcagtgagctgaggattgtgccactgcattccagcctgggcagtaagagcaaaactccgtctcaaaaaaaaaaaaaaaaagaaaaaagaaaatgttgcatcggaaaatattaggaaaaaatctatgtt

SEQ ID NO: 200365 - DNA, 472 bp, Homo sapiens
aactaacacaatataataacattcaaactgaacattcacacagaagaatatttaatgtcattggtaaatattgacaatataaactattttttttaacctcaatcatgttgaaaatgttgcacagaggccgtgccctgtggctcacacctgtaatcccagcactttgggaggccgaggcaggcagatcacctgaggtcagaagttcgagatcagcctggcctacatggaaaccttgtctctactaaaaatacaaaaattagctgggcatggtggcaggcgcctgtaatctcagctactcaggaggctgaggcaggcraatcacttgaacctgggaggcagaggttgcagtgagctgaggattgtgccactgcattccagcctgggcagtaagagcaaaactccgtctcaaaaaaaaaaaaaaaaagaaaaaagaaaatgttgcatcggaaaatattaggaaaaaatctatgtt

SEQ ID NO: 200366 - DNA, 497 bp, Homo sapiens
tgccctcttgattggacattgtggtctcgtgttgctctgttagcaggttgagggcatatttgatcttgaaaaatggagggtcacttaatcaatgcattttccttgggccagctgactctgatgttcaaggagactgaagtgttaaagctggatgactctgcaggccacttctggttttgttgaagtgaaaccctccataaagtcagytgatattttcatcttgttttaacaacaggttcttcacgtagattacatctccagaaacttctggattatatatacctgttaaaaattcctttcataatccttcctaatttagcccttagtaaagattaatccctagctctgtcattgtgcctatccaataattacaactgggccttgttttgaagctgtccttaagcattagttacgttttgaactactggcctcatagcagaagtctcttaaattctttcttaaaggatgagttgaggaagcgtttacagaaagaattc

SEQ ID NO: 200367 - DNA, 498 bp, Homo sapiens
atgccctcttgattggacattgtggtctcgtgttgctctgttagcaggttgagggcatatttgatcttgaaaaatggagggtcacttaatcaatgcattttccttgggccagctgactctgatgttcaaggagactgaagtgttaaagctggatgactctgcaggccacttctggttttgttgaagtgaaaccctccataaagtcagttgatattttcatcttgttttaacaacaggttcttcacgtagattacatctccagaaacttctggattatatatacctgttaaaaattcctttcataatccttcctaatttagcccttagtaaagattaatccctagctctgtcattgtgcctatccaataattacaactgggccttgttttgaagctgtccttaagcattagttacrttttgaactactggcctcatagcagaagtctcttaaattctttcttaaaggatgagttgaggaagcgtttacagaaagaattc

SEQ ID NO: 200368 - DNA, 527 bp, Homo sapiens
ataatatagagaaatcattaaaatattataatattcaacacttagacataaaattattaacatttaagaatgataggctggcaggggcggttccaagatggccaattaggaacagctccagtctacagctcccagtgtgagtgatgcagaagatgggtgatttctgtatttccaactgaggtactgggttcatctcactggggcttgtcggacagtgggtgcaggacagtggatatagcccactgagcgtgagccaaagcagggcgaggcatygccttacctgggaagtgcaaggggtcagggaatttcctttcctagccaagggaagctgtgacagatggcacctggaaaatcaggtcactcccagcctaataccgtgcttttccgatggtcttagcaaatggcacaccaggagattatatcccatgcatggcttggacagtcccacagtcatgaagcctcactcattgctcgcacagcaatctgagattgaactgcaaggcggcagtgaggctgggggaggggtg

SEQ ID NO: 200369 - DNA, 522 bp, Homo sapiens
cccctttaagaagacaaacagaaatacataactggaatacaaaagtaggcacaaagtgaatacttacaatgagaaaatattcaacaaagcatacattttcaaaagatgtcaaataccacaaatattataaaatccaaataataacctaattattttaagtgcccaccagacttgtctaatacttccccttccacattttaaaaatgtacacactttgatcatgtcttttttgtataataattttgttatatcttctattagattctgaaaagataattcaatattttctctgccaagcttcattaatgtgtgtgtgtgtgtgtgtgtgtgtgtgtgtgtgwgagagagagagagagagagagagagtgtacatgtgggtaagatatatgtatattaaaaatttataatagattttgtttaagacatgtaccacatattactgccccattccccccagtacatacaacttacctaactatcaatatcccacaccagggtgatacagttgctgcaatcaatgaa

SEQ ID NO: 200370 - DNA, 602 bp, Homo sapiens
tctcgagctatcctactgcctcagcctcccaagtagctggtactacaggtctgcaccactgcacctggtcagactttcttatatccattgtattctttactatttccattatttgaataagatatgggaaggaaattttaattttttgagggctagactatcaaagacattatgattgtatcaaaagtgcacagtaatgtcccaatgtccaaatttgaaacmattggaatatagatcctgaaaataactgtaaatgattgaaacataaaatgtttacctctgggtaaacaaggagtggatgcaggaataggtcctttataaccaacttttcaaacctaatgaattcatggatctggacatccatggccacaaacataacaaaagaaacatgttttttttcttggaagaatccataccacttctaaagccatgttgatcataaaacaaaaaaaaaaacaaaaaaaccccaaaacaaaaaccaatcaaacttgaccaaattaaccctagctctaactaccaatttaaaagacattcagagatcagagaaacgtagtgatgcaattagaaaaagtaacaattaaggaaactctacaggaaaattg

SEQ ID NO: 200371 - DNA, 532 bp, Homo sapiens
gctatttctacaatgtacatacactagcaatttcttagaacccaacamtaaatagtgcttttgctaaaataaagaggtcaggccaggcgtggctgctcacacgtgtaatcccagcactttgggaggccgaggtggggggatcacgaggtcaagaaattgagaccaccctggccaacatggtgaaacctgatctctactaaaaatacaaaaattagctgggcgaggtggtgcgcacctgtagtcccagcttctagggaggctgaggcaggataatcacttgaacccgggaggcggaggttgcagtgagctgagatggagactcggtcaaaaaaaaaaagaagtcaaagcccacatttttctcatttttactttttattgtataatatttataggattaaaaatgtgtaaatgtagtacacaattcctgtaaacccttaaactagtttcccctaatgacatcatcatttacataaccatagtacagttactgaaatgaggaaattaacactgacataatactattaactcacct

SEQ ID NO: 200372 - DNA, 466 bp, Homo sapiens
acctttccttccctgttgcattgaccctctgggtagaagctacctcacgaactgcacatctacactcaggccacaggccactgccctctgtaatgtgctgagatttgttgttgtttgacctgtttgtcctactgtagaaaatgttacataataatcaatgatagcccatttcttttaaaattatgaagtgtttcagccataaaatataaaatatgcatcttttttgcagcagtgcctcaaaggtacaacaatgagcatatwgtgactctccagtattgaggtcctttatgtacgaactacttatgaagttaaaagattttttttttggctagcaaaatggcttgtgctaatgtccagattcttcttttgcataatatttgacccacataacataagaggtaataaactcagcagactcagaattcagaacaaataatatatactgctgcatacacatacatatata

SEQ ID NO: 200373 - DNA, 466 bp, Homo sapiens
acctttccttccctgttgcattgaccctctgggtagaagctacctcacgaactgcacatctacactcaggccacaggccactgccctctgtaatgtgctgagatttgttgttgtttgacctgtttgtcctactgtagaaaatgttacataataatcaatgatagcccatttcttttaaaattatgaagtgtttcagccataaaatataaaatatgcatcttttttgcagcagtgcctcaaaggtacaacaatgagcatattgtgactctccagtattgaggtcctttatgtacgarctacttatgaagttaaaagattttttttttggctagcaaaatggcttgtgctaatgtccagattcttcttttgcataatatttgacccacataacataagaggtaataaactcagcagactcagaattcagaacaaataatatatactgctgcatacacatacatatata

SEQ ID NO: 200374 - DNA, 521 bp, Homo sapiens
aaacaggttgaagactagaattgaatgagaagaggtttcttaagtacttctgcctcctagaaccatattttataggatggcaaataacagaacataccttttcctccaaactgtctctcagcacttagttctatgacatgttgagtctcatagccctctttcaccttaattgtgatttatgttgccaagtttaagagtaatgggagaataagaacgctgttaaatttaaatgaaccatttaaattcagaaattattaagggttccatagaactaccatttaaatgttaatttctttaacgcaaaagcaagaaaagagtttgtattttgtctcttaaccagaaaatgaatcctytttattattaagaattgctacagttttcagagggtaagcttttttctcctctttcttacccctgaataccttgtggtaggcctgccctaccaacatgtgtttttctctgtgttaaaagtatttcaggctatgcattcacaaataataggtagtagctatatttatcaa

SEQ ID NO: 200375 - DNA, 548 bp, Homo sapiens
ttaaatagtcaactctcagttattcctgggaatgggaggcaaaggtgagcatggctcattgagctgagaatatacttttaaaacactcatgctcaacattaatttgaaatgctttcctatataatattatttttctggggctattttcaagtaggaaaaytagctagtattttagtttttctctgtgttccagtttactggtatagattttcattctagggcttacaattaacaattaaagaaatagacaaagtcaaaataccagggaaagacaatgggaacggaagagtaaaatgagcaccaccttaggttcatcaggccaacttccaacttaaatgatggtaattgtttcctattgctgctgtaacaaaataaatcaaacctagtggcttaaacaatacaaatttattatcttacgcttcctggaggtccaaagtcctacatgaatctcactgaaataaaatcaaagtgttggcaagtctgcatttttttctggaggctctaagactgttaaaattctctaagggagattctttttcttcatgttt

SEQ ID NO: 200376 - DNA, 513 bp, Homo sapiens
ctagtgtgtattcaacaccccaataactgttaaatccactcccagctctatctctggctaaaacatcatttcaatcactcaaatattgatactatacctcagcctcctagatgcgagtgcttggaagacgaaaggygggtattttaagacacaaagccatagactgaacagtcaggaaaatttggccttaataatattgccaattggtaagtttgaattagtcacttattataaaaaatctcaataaaacagtagatcaaagaagatctgaatacctgtttggaaaactgatcagcatatgttgagaatttaaacaacatatgctgttaatgtctgtgtctcatatgtggacgacagaaaagaccacattaacatgggaatggttgagacgctgtcacagctggtaggagtgacctcatgaggttatttaatgaaagaattgttttggagccaaccacacatagttggaaagggaaagctgagaggcagaaaaactggcaagttgaggaggaa

SEQ ID NO: 200377 - DNA, 590 bp, Homo sapiens
tggtttaaataattacttgtttatttttcttcatataaaaaaagtccagggttgctagttgtcaggtcccatagtcttcatttcagttaatcatcttaaccacgtagctttgattctcatacatcctctcatggtttcaagatggctggtccttgagagactagtattaggcaggaagaaggggaaaggcaaagggcagaataaacacccaaagattctgtccctttaaaaagtgcttycctggaagatcctcccattggctttcatttatatctcaatgagggaaatgtgtcacaagaccaaccctagcttcacagcagtctagcaaatgtttaattttgaatcagtttgaagttatgttaagataagaaaggttagaatggatattgaataactaaccatacatactgcattaattactttgaaattttgctttattatatcataagcattttatataatgttacaccctctttaaaaccattgtcctggaatactgtataatgttatatcaaaggtagttgttattgatagaattcattttcattttgtttccatgttgtgcctcatttgttgttgatttttctctt

SEQ ID NO: 200378 - DNA, 513 bp, Homo sapiens
atgtgacagtaattgactttagcactatgaaatactttatgataataccakaaaacaaattaatattatattttgctaaggtattccatgcagaaagaattgtaagaaagaggaactgggaagaagctgaacgattctgccaagcccttggagcacacctttctagcttcagccatgtggatgaaataaaggaatttcttcactttttaacggaccagttcaggtaatactttaagaatgagaatttctatgctgaatttgatgtcctctagatattcaaaattgacatgttcttaccctcactctctgttggaaaaaaaatggacatgttttattatctaaaaggtcatttggtgcttagcagtcatggaacattaagcactcttaatgtgcagacactatgaggaatctaaaaatgaatgagatgtattccctaccctttgtttaataaagtccaacagcaatgtatggcagaaaatctagaatataggcaaggaagggccttgggaattc

SEQ ID NO: 200379 - DNA, 513 bp, Homo sapiens
atgtgacagtaattgactttagcactatgaaatactttatgataataccataaaacaaattaatattatattttgctaaggtattccatgcagaaagaattgtaagaaagaggaactgggaagaagctgaacgattctgccaagcccttggagcacacctttctagcttcagccatgtgratgaaataaaggaatttcttcactttttaacggaccagttcaggtaatactttaagaatgagaatttctatgctgaatttgatgtcctctagatattcaaaattgacatgttcttaccctcactctctgttggaaaaaaaatggacatgttttattatctaaaaggtcatttggtgcttagcagtcatggaacattaagcactcttaatgtgcagacactatgaggaatctaaaaatgaatgagatgtattccctaccctttgtttaataaagtccaacagcaatgtatggcagaaaatctagaatataggcaaggaagggccttgggaattc

SEQ ID NO: 200380 - DNA, 514 bp, Homo sapiens
cgtggggaatccttggcgctgtgggtggaggctcctcttggccctgtggccaaggtgaccaagggccgaaggaaaagcgagaacgggagggacgggacgcaagagggcagatggggaaccccatactccagcaacattatataagagaggcgacgatggagcagcgcacccggccaaaaaagcctccgtgcgcctactctacggtgcaccgcgtcccctctgcaccagaagggccctgtcctcccacatccaccgcgccctcctccgggcccccgagggcactggggcgcttcctctgccagacctcccctgcgactcactcttccggctccagagcycccccgccccaacagcaaagcagccgtgacctgccccaggggcgcagccctgccccaggctggaaggcagcagagctgtggcgtcgaggcacccagcggactgcggggctggcgtgcccgcggttacctgcgcggccagagggctccgcgagatcgaagaaccagaagagcagcat

SEQ ID NO: 200381 - DNA, 535 bp, Homo sapiens
ttgtctttttgctttaaattctgtctgtgacattcatctgtgttggtgtgtgtagttgtagttcattcatttttatrtaacatttcattataagaataaaggacactatgcattctcttgttgggggatgtttgagtagtttcccgctgggtagtttccatttgggtagcttgtatttgctgctcttaatgctcctgtgaagtttttgtacctgtctcttggtgcacattgctagagtttcctgaggatatggtcctagaaatggaattcctggagcacagggtatgtgtagcattacaattattggacaatgccaatgaactttctgatttacactcccattggtgtgcataagcattcccactgctgaacatcttcatcaacattggcattgtaaaatttttggtggggtgtaaaatggtatctgttagtggtttaaaattgtattaccctgattgctaatgaggttggacatatttttctctgtgtattggttatttgtatttccttttcacattcttgtacaggttatttg

SEQ ID NO: 200382 - DNA, 509 bp, Homo sapiens
catcagaagaaaccagggttccttgatgcaatggatgcttctaggtctgcagcagaaatttatatcttgtcataccagatagcaaggacactatcaaagactactaggatcacatcagaaggattcagaagatattccttgaagagattcccatcacaaggatggggcaatttgagcattaaaaaggataattgcaatggactaaaacatatcaaatatgtttaaaacccttactcmatagtaatgctaaaaaaagaaaaacacctctaatgggtcacagatgaaggatgctaatgcaaaaataatcattttgaaagctagtaaagggaaagaactaagcatttgttctgtgtttcctataaaaattgtaccacggggtaacaaaaattgattaaaaggaattagctttttataggactatcccagatataagtgaagaaacccctaatgagtcaatggatctaagaattgaccatcaaaggctgctaatgtcacaaaaagagaaaaaa

SEQ ID NO: 200383 - DNA, 452 bp, Homo sapiens
cactgccctccaatctccttcactatagacatcctacaccacagtggtacatttattaccactgatgaacctacaaggacacatcacagtcacccaaagtccctcttatcccttgcatcatccctgtcactcatttcacttgtataaaagcaaatctatcatctatctgtcatctatctatctatctcacctatgtctgaatatattgctgctattattttaaacatactgttatttgttggatcaattaagactaagaaaaatagaagtttttattttaccttcatttattctctgatgctccttctttctttatatagatctgagcttctatatcattttccttctctctgaagaacttctttgaatatttcktgcaaggtaggtctactagcaacaaatttcctgaatttttgtttgataaaaatcagataaaatctgataaaaattct

SEQ ID NO: 200384 - DNA, 457 bp, Homo sapiens
tggcaaaaatgtaaaaggttgttacattcagtattgacaaaaatgtgggaaagctgccactctcaaattttgttagatgaacttgtaaactgataatgcctcagtaagatgtacacttttaggccaacatgctcatagttatgcacagcgacatcaacatagagatatttgttgtaacacttttgtagcagaaatgaaaatgaatttcacccaatgtccttcaacagggtcatggcaaagcaaattatgagtcctacatactatgaaattctatgtagctgtttcaaatgtcgactaataaatattgatgtggaaagttctctaagacagattgctaagtgaaaaaaatcaaataacagaaacatgmaatccttatatccatttaaaaagtacatatgcataaatgtatttaaatgcaatgcatagacaaacaccagcaggatcataccaaacagtt

SEQ ID NO: 200385 - DNA, 508 bp, Homo sapiens
ggagctttgccaaccactgtctagagttgggattagcaaaccaccttggactggacttttgtaattatgagaaacaaggcttgtgtggccacttttatattttagtgtgaggccacactaaaggggagatatacctccccctgtggcttagcaaacactttccttaccttggtatatagagctctgaggatggaatagaccaatttgtataaagagctccgggccttcarggagggaagagcctggggcccctaagccatttcctctagatacaaacttagtaactctttgctgttgtctctggcacagccctgatggagatacaggcaagcaagaactcaccctgaagtagaggggctgttgggtctaggctgtcaacctcagcttaatacaagggcctgaagcttgttccacagagactggttctagtgtaggctgtggcggaagacatcagcttctctggtactgaccaacctggcacagtttcatgccttgggattcagagctg

SEQ ID NO: 200386 - DNA, 544 bp, Homo sapiens
atatgtgtatatacatacaatggaatatgaattagccttaaaacagaatttccagaaacgaaattctgacactacaacatgctaaatgaaataaaccagacacagaaaaacataattccacttatatgagacatgtagagtagttaaactcacagagacagaaaatagaatagtagttgccagggtctgggaggaggggagaataggcagctattgtttaatgggtacagagtttcagtttgggaagatgaaaaaagttctggagatggatgatggtagtgggtgaacaacaatctgaatgcagttaatgacactgaamtgcacactgaaaaatgactaacatggtgaattttatgtttatgtgtgttttattttaccacaataaaaaaatattaactgcaaaagtgttttggggagatatgacagttgcaggaaaacggtagagctgtaaaaatgctttaaaataatgcacatttaagcttaggaggggtatagtggctcacacctataatcccagcactttgagaggccgaggcaggaggat

SEQ ID NO: 200387 - DNA, 544 bp, Homo sapiens
atatgtgtatatacatacaatggaatatgaattagccttaaaacagaatttccagaaacgaaattctgacactacaacatgctaaatgaaataaaccagacacagaaaaacataattccacttatatgagacatgtagagtagttaaactcacagagacagaaaatagaatagtagttgccagggtctgggaggaggggagaataggcagctattgtttaatgggtacagagtttcagtttgggaagatgaaaaaagttctggagatggatgatggtagtgggtgaacaacaatctgaatgcagttaatgacactgaaatgcacactgaaaaatgactaacatggtgaattttaygtttatgtgtgttttattttaccacaataaaaaaatattaactgcaaaagtgttttggggagatatgacagttgcaggaaaacggtagagctgtaaaaatgctttaaaataatgcacatttaagcttaggaggggtatagtggctcacacctataatcccagcactttgagaggccgaggcaggaggat

SEQ ID NO: 200388 - DNA, 580 bp, Homo sapiens
ctactctttgaaaccaggcttctgcaatggaatgggctttctcccaaataagaagcattctgaaactggaaggaattatgcagacagcagatgaccacggtatgtggtgggaggtagcacaagacggtttagagttcttacaatttaagcttgagtttctaactccactgaattcaaggttctgtaaacttgcaagatggatacagataagggaaagcttgtttcctcaaatgaaaacttaggaggttgggttggaattaaaaaaaaaattactgggactctttttttttttttccaaacaaaatcttacataggctccaattatatacaaaataattagcggtggagctggtcagagccgctctggtgaggcgtggaaggaactaggagctctgcctacgtggccctctcatactcctggggttccaggattcttgggatccttccacaacactttgaaaaccaytggggtagataattcctgagtttggcaggaaagctctacagttctgacttgaggcacaaagaaaagatttcaaatatctaaacaattgtcactttgttctttgttttatgaaat

SEQ ID NO: 200389 - DNA, 409 bp, Homo sapiens
tcaaattatatgtcaaaacttgcctcctctgggaacctcttcccgaatcactataagctcataaatcctaccaccatgcctatcacacacaccatgcatttgttgacatatcagggtgatatatagtagaaaaggcaccagaccagaagtcctaaaccaggcatttattccaactctgtcaataaataatcgtgatcttgggcaaatcactacatttcacaggccccagtttactcatctctaargtttaacttattaatgggcgaggccacttttgggcctattattctatgaatgtaatgtaggattatacatgtgtacaatttaaatcgagcacattcacagctgcttcatgccatctacaagctacaacagttccagagatagagtctgtcttcattctgctctg

SEQ ID NO: 200390 - DNA, 538 bp, Homo sapiens
acaaaggccagcaggcactgagccctccctgctgtgttccccagctgaagtccagagccataattaccactagcacagtgctctgtagcatggcttctgagctctcttttgctcttgctctctgctcctcactccctccccacacacccacagctcccagaggtgaactttacagtgtgttagcactgtgctagcactctgcatacattagctcatttaatgcaaccacacaatgaagcaaacattattatctccattttacacagaaggaaactgaggctggggcaaactaagtggtgtgctggtaagtggcagagctgcctcatttaaccatgaccctacactgcctcatgaacctgaaacacacgtgagcccaggatatgggtgstggtcattttcttgaaggttaaaaagccctttaccacagatttccatttcaaagctgcagtgtttcaggaagagattttttttaaaaaaagaaaaagtagctcttttctgagtgttctaatggttgaatagaaaatacggggttggtagg

SEQ ID NO: 200391 - DNA, 469 bp, Homo sapiens
ttttgtgcaaacatcatagaacatacttaaacaaatctagatggtacagcytacttcacacataggctacacatctaggctttatattgctcctaggctacaaacctgttgaacatgttactgtactgactactatagggatttgtaacacaatgataacatagaaaaggtacagtaaagatataatctcgtgggaacacatcttcaagggatggctaacatttctttctagccatgatctgaatgccagtattcacactggccaagaggaggaaggataggccttccaaggaagactatctacacaagcatatggaggcaggaacatacatgtaggccatctgtggttgactgaaaggccattatgcaatgcatgactgtagataaggaactcaaacaactcaatagcaagaaaacaatctgattttaaaatggccaaatgactgaatagacatttctcaaaagaaga

SEQ ID NO: 200392 - DNA, 469 bp, Homo sapiens
ttttgtgcaaacatcatagaacatacttaaacaaatctagatggtacagcctacttcacacataggctacacatctaggctttatattgctcctaggctacaaacctgttgaacatgttactgtactgamtactatagggatttgtaacacaatgataacatagaaaaggtacagtaaagatataatctcgtgggaacacatcttcaagggatggctaacatttctttctagccatgatctgaatgccagtattcacactggccaagaggaggaaggataggccttccaaggaagactatctacacaagcatatggaggcaggaacatacatgtaggccatctgtggttgactgaaaggccattatgcaatgcatgactgtagataaggaactcaaacaactcaatagcaagaaaacaatctgattttaaaatggccaaatgactgaatagacatttctcaaaagaaga

SEQ ID NO: 200393 - DNA, 469 bp, Homo sapiens
ttttgtgcaaacatcatagaacatacttaaacaaatctagatggtacagcctacttcacacataggctacacatctaggctttatattgctcctaggctacaaacctgttgaacatgttactgtactgactactatagggatttgtaacacaatgataacatagaaaaggtacagtaaagatataatctygtgggaacacatcttcaagggatggctaacatttctttctagccatgatctgaatgccagtattcacactggccaagaggaggaaggataggccttccaaggaagactatctacacaagcatatggaggcaggaacatacatgtaggccatctgtggttgactgaaaggccattatgcaatgcatgactgtagataaggaactcaaacaactcaatagcaagaaaacaatctgattttaaaatggccaaatgactgaatagacatttctcaaaagaaga

SEQ ID NO: 200394 - DNA, 565 bp, Homo sapiens
gggtaggactttgttttgttttgtttgggggatggtagtggtaattttttaatttttaattatgaaaacttaatagataagaataaataaaaactttaaaagaccatttatcctatcataagaatttaagtatcaccttgttaatttcaataacaaaccctattggaactttgattggaattgtattgaatcatagattcattaaagaggaattggccrggtgcggtggctcacacctgcaatgccagcactttaaaaggtaaaggcaggaggattacttgaagccaggggtttgaaaccagcctgggcaaagtgagaccacgtctctacaaaaaaaaaaatttttttttaattggctgttggcatgtgcctgtagtcccagctgctctggagactgaggtagaaggattgcttgagcctgggagattgaagctgcagagagctatgatggcatcactgcactccagcctgagtgatagaggaagaccttgtcttaaaaaataaataaataaaaggtattgcagtttcaatattgtcttctcaaccatgaaaatgatatgctttt

SEQ ID NO: 200395 - DNA, 603 bp, Homo sapiens
gattctttatgcatcagttttctttaataactcatgaaagtaatgtaatatggtaaaggaccttattgtaccctactcctggccggacatgccccgtatttaatacatatcattaattttagaagtatatctgtttctaatgtttcaagttcctcttccagtgtgaaagcttcttaggcatatcaatacgcctaattatgactattggtttcccaagacccaagaaaactgtgttttaacctctaaaactctgctttctatctttctttcttttttcttttttttttttttttttgttgktgttgagacagagtcctgctctgccacctaggatggagtgcagtggcacaatatcggctcactgcaacctctgtctcctgggttcaagcaattcttctgcctcagcctcctgagtagctgggattacaggcacacgccaccacacctggctaatttttgtatttttagtagagacagggtttcaccgtgttggccaggctggtctcaaactcttgacttcaggtgatccacccgccttctatctttcttaattgctgatagcatctggtcatcaaataacaaatttgaatgatctatctccac

SEQ ID NO: 200396 - DNA, 526 bp, Homo sapiens
cctctcctcctgcaatcaactcaagaggctgactttcagtttcccaaatgatttttatcccctaccagatttgcccaaattgcttttctctctacctagaatgccttaaaactaaaactcactccctcccatctacccatcctccttaacttggctaactagtatttattcttctgctctcaggttagatatcctttcttttgggaaactatccctgacagtataaggctgggctgaatmatcctcctgagtactccagagcaccctctgcttccattcccctcgcatttaccgtatttcttcgtaatgagtttgcgtatcttcccctgtctactgtaaattcctggcacatgaggacttcctctcgcacaacaatgtatccccatttcttgacacagttcttggtacagagccgcactcgatcaaaacttatcaagtaaatgaataaatcaatcataaaacacaattgataccatccaagaagtcataaaattcttggggcacaaggtcttaggagagtagatct

SEQ ID NO: 200397 - DNA, 420 bp, Homo sapiens
tacattatcactgtaaattgtatgggataataaagtgagctaagttaaatatgaagataaatatgtgtcccaaggtgatgaataataatagtaagaataaaagcagctaccttttgtgatgttctatgactcaagcatatgatatgcttggctcattcactcttcacagcagaacctattcagcatttatttattttccttatttgagggaactgaagatcagaaacattaaggaacttgcccaagttccacttgccaagccatggtaaagcagctgctcaaatgtaaaactgtctactcccaaatccaggttcttttcatgattccagcraatatgggagaaataaaggaaccaatgtccacagaagggaaaagtccctcattacactctctgaaccatggaggtgtggatgggtcagg

SEQ ID NO: 200398 - DNA, 482 bp, Homo sapiens
tggggttcctgggtgagcagaagcccttgacagaccctcctggtcctggtctgggctctgagaagagagcggggtacacaggggtctgagaggcagcggcctgtctccacggccagcaatcccaaaagttcaggacccgtgatgccctcccagggaactgactgcaatgcagattctcgggctccacttcagagattctgtagggctgggtggcgtccaggaatctgcatgctcagccatgccatggacatgagtggrcaccagctctagaggcacacaccactcccaggaggatgggtgtacagcaagctccccagaaactcttgggaacacaacatatatgggagcacatctgaggcacgtgcacacacacaagctgggaccaccacaggtacagcccaagtcacatgtgttcccggcatggaggctgggaggaaggccctctacctggtccacaccccgctcaccacctccagctcctc

SEQ ID NO: 200399 - DNA, 482 bp, Homo sapiens
tggggttcctgggtgagcagaagcccttgacagaccctcctggtcctggtctgggctctgagaagagagcggggtacacaggggtctgagaggcagcggcctgtctccacggccagcaatcccaaaagttcaggacccgtgatgccctcccagggaactgactgcaatgcagattctcgggctccacttcagagattctgtagggctgggtggcgtccaggaatctgcatgctcagccatgccatggacatgagtggacaccagctctagaggcacacaccactcccaggaggatgggtgtacagcaagctccccagaaactcttgggaacacaacatatatgggagcayatctgaggcacgtgcacacacacaagctgggaccaccacaggtacagcccaagtcacatgtgttcccggcatggaggctgggaggaaggccctctacctggtccacaccccgctcaccacctccagctcctc

SEQ ID NO: 200400 - DNA, 522 bp, Homo sapiens
tggctcatcagagtccacaraccatatcggtgaagaagatgaataggattcctgtttaacccagagacacctatgttaaatgtttacatacagactaacccaaatatgcaattaaaccacaccactaaatggcaagatgaccatggatttaaacaaaatgtatcagggggaaaaggcaacacgtttaaacccatgtgaggagctggacttctgagacagccattctccttgcatagcactgtctgctgctacagctcatagaagtcaacaattttcttcaacactggtaggcagcctctaaatggccctgatcaccctcacctcctgccattcacacccttgtaaaattccacccctggacctagtgactcacttctaacaaagagaatacagcaaaagtaacatcgcttctgaggtgaggctacaaggagactacgatgcctgccttggtcacccttctcctgctctttccattgctccctctgatggaagccagttgccatgtgatgaggtgccctatgg

SEQ ID NO: 200401 - DNA, 560 bp, Homo sapiens
atgtcagatttggctcatcagagtccacagaccatatcggtgaagaagatgaataggattcctgtttaaccsagagacacctatgttaaatgtttacatacagactaacccaaatatgcaattaaaccacaccactaaatggcaagatgaccatggatttaaacaaaatgtatcagggggaaaaggcaacacgtttaaacccatgtgaggagctggacttctgagacagccattctccttgcatagcactgtctgctgctacagctcatagaagtcaacaattttcttcaacactggtaggcagcctctaaatggccctgatcaccctcacctcctgccattcacacccttgtaaaattccacccctggacctagtgactcacttctaacaaagagaatacagcaaaagtaacatcgcttctgaggtgaggctacaaggagactacgatgcctgccttggtcacccttctcctgctctttccattgctccctctgatggaagccagttgccatgtgatgaggtgccctatggagaggcccacgtgacaaggtattgtaaa

SEQ ID NO: 200402 - DNA, 560 bp, Homo sapiens
atgtcagatttggctcatcagagtccacagaccatatcggtgaagaagatgaataggattcctgtttaacccagagacacctatgttaaatgtttacatacagactaacccaaatatgcaattaaaccacaccactaaatggcaagatgaccatggatttaaacaaaatgtatcagggggaaaaggcaacacgtttaaacccatgtgaggagctggacttctgagacagccattctccttgcatagcactgtctgctgctacagctcatagaagtcaacaaytttcttcaacactggtaggcagcctctaaatggccctgatcaccctcacctcctgccattcacacccttgtaaaattccacccctggacctagtgactcacttctaacaaagagaatacagcaaaagtaacatcgcttctgaggtgaggctacaaggagactacgatgcctgccttggtcacccttctcctgctctttccattgctccctctgatggaagccagttgccatgtgatgaggtgccctatggagaggcccacgtgacaaggtattgtaaa

SEQ ID NO: 200403 - DNA, 562 bp, Homo sapiens
tgatgtcagatttggctcatcagagtccacagaccatatcggtgaagaagatgaataggattcctgtttaacccagagacacctatgttaaatgtttacatacagactaacccaaatatgcaattaaaccacaccactaaatggcaagatgaccatggatttaaacaaaatgtatcagggggaaaaggcaacacgtttaaacccatgtgaggagctggacttctgagacagccattctccttgcatagcactgtctgctgctacagctcatagaagtcaacaattttcttcaacactggtaggcagcctytaaatggccctgatcaccctcacctcctgccattcacacccttgtaaaattccacccctggacctagtgactcacttctaacaaagagaatacagcaaaagtaacatcgcttctgaggtgaggctacaaggagactacgatgcctgccttggtcacccttctcctgctctttccattgctccctctgatggaagccagttgccatgtgatgaggtgccctatggagaggcccacgtgacaaggtattgtaaa

SEQ ID NO: 200404 - DNA, 417 bp, Homo sapiens
taacaaggcaagcatcaaaggtaatagtttggggtgagctcgacctagttacattaataacgagaggactagcaatagaaggggaaaagaaatatagcataagaggatcaaacccgttttagctttaacttggttggaattggccctgaaatagctgtccatgattctggagtgggtggtgctcttttgactcaggtatggtgagtccattctttttcagtggtgtggacggctgtctcagtcattagaaacactagataatgtccctcccaggtgggcttgagcttcctttctttctgacctctgatgagaatgtgrtcactgtccgggctggtggtggtgaactggaaattcaaggggtggtgtatgtgccaagaggcctttagtcctaaggaaagagaaagtggaggatagacc

SEQ ID NO: 200405 - DNA, 410 bp, Homo sapiens
cccccggcggcggcagcagcggctgcggctaaagcggcggcaaccgaggcgagcartgggcacggcggtctcggccgagccgagggccttcaccgctgctgctccggctccgcgacagctctgcacgtagccccagccaccccgcgcaccggctacaagccgcccgggggtggccggggcacgcaagagggcagtaacgtctgcgagtcctcccgtgagtacacgcggagcaagggctgcgagctgggattgcacggcagagctgcccatcccgctccacgagaccaatagtaaggcacctgggcggggcgctcaggttgctaagggaggctgaggttgaccgccggggctgctctgtggcaaagtgatcacagcagggtggctggcagagactgctctgggaaatgccc

SEQ ID NO: 200406 - DNA, 410 bp, Homo sapiens
cccccggcggcggcagcagcggctgcggctaaagcggcggcaaccgaggcgagcagtgggcacggcggtctcggccgagccgagggscttcaccgctgctgctccggctccgcgacagctctgcacgtagccccagccaccccgcgcaccggctacaagccgcccgggggtggccggggcacgcaagagggcagtaacgtctgcgagtcctcccgtgagtacacgcggagcaagggctgcgagctgggattgcacggcagagctgcccatcccgctccacgagaccaatagtaaggcacctgggcggggcgctcaggttgctaagggaggctgaggttgaccgccggggctgctctgtggcaaagtgatcacagcagggtggctggcagagactgctctgggaaatgccc

SEQ ID NO: 200407 - DNA, 410 bp, Homo sapiens
cccccggcggcggcagcagcggctgcggctaaagcggcggcaaccgaggcgagcagtgggcacggcggtctcggccgagccgagggccttcaccgctgctgytccggctccgcgacagctctgcacgtagccccagccaccccgcgcaccggctacaagccgcccgggggtggccggggcacgcaagagggcagtaacgtctgcgagtcctcccgtgagtacacgcggagcaagggctgcgagctgggattgcacggcagagctgcccatcccgctccacgagaccaatagtaaggcacctgggcggggcgctcaggttgctaagggaggctgaggttgaccgccggggctgctctgtggcaaagtgatcacagcagggtggctggcagagactgctctgggaaatgccc

SEQ ID NO: 200408 - DNA, 468 bp, Homo sapiens
tttatagtaattttagggcctgtgaggatgaagctgtctgtgacagctaccacaaaggttactataggtggacaaatttcaaacaagtttatcaccactaccatccccaccataaaactgtctcaatcaagggcaacacaattcaatattagccaagacaacctctttacctgtcactgcttaagraaaggatttttggtcttatttagaaataactttctgtacctatttttctccataaatccactgagaccaatgtgtggctctatctcaagcaccagcaagcaaaactgcctgctagaaggttcagtttttgtatctttccaaatgtagaacacagctatcttcaaggatttcataattttttgaaaattgatgcacaaacttcttgaaagttcagagacacagcagctgtaattcttctgaaggctggttatgggacgcattaccttcatactttgctgttta

SEQ ID NO: 200409 - DNA, 571 bp, Homo sapiens
ctagtcctttctcagatacacagcgtgcaaatattttctcctaatctatgggttatctgtttactctgctgattattttttgtgctgtgcagaggcttttaaatttaatcaggtctcatttatttatttttgtcgcagttgcagttgcttttggggttttagttataaattctttgcctaagccaatgtccagaagagttttcttaaggttaccttctaggatttttatggttttgagttttagattkaagtctttgattcaccttgagttaatttttgtataatgtgagcaatagggatccagtttcattcttctaaatgtggctagccagttttcccagcaccttttattaagtagggtaatctttctccaatttatgtttttgtatgctttgttgaagatcagttggctgtaaatatttgccttcatttctaggtcctctattctgttgcatttgcctaagtgcctgcttttataccagtaccacgctgttttggtatctatagccttgtagtataacttgaagtctggtaatgggatgcctccagatttgttctttttgtttaggat

SEQ ID NO: 200410 - DNA, 575 bp, Homo sapiens
accccaggttgagacgatatgaggaagattcaagctgtcaagttcagtttcccaagatctattccacagaagatgagcaaatctcacttcagaggccactgactgaagggcagtctggtcccagaaccgtggagaactcagaaaaaaatgttaaagtctctctggaaagtagaagcctgggaaaaaaccaaaccaaacccattctcccattgccacccagagatactgtgaacattttgagctcacaggggaagtgtaggctttttcccactgtcaatgtctatgttragggagtaaggcagcctgaaacctcttgctcctaggtcccatagtctccactccccttccagctggaaatttgtgctgcaaccagaggaaccagaaatggggtgagaaaacttaggggactgggttgtaagatcaaaggctggtcttgcagcagtaatgacagttcctaggggcactgtgacatcattgcattccactcctcccaggggaggggaccacatcagcgcgatgcccgagtcgctgctccacgatgggggagggaaacacacggtttcgacccaggtcct

SEQ ID NO: 200411 - DNA, 521 bp, Homo sapiens
atatcacttcaactacaaaagcatatcccagtgacaatgatggagctaaatgcctctgtttggtattttaatagactgtcagakttttagccgtgtgaattaccaattctctcgagactttatttaagggtaactttatggatgagcaggctataaataagaccttcttgttatatactgagcgatcatcttaaagtgaagaggggaatttcttaaatttaacccacaactacaatgcaaaatgtgttgtagaaatatcaacccatcatgtctcagaatgtactaaaaactgtctctgaatgatctcttcctgccctgcccacaatgccctaagcctgtgatacagcagaccaaatgtgcattattacagactggtcatattacagagctccatgtgactgtccatgtctgatgcctagcaattatcatgcaacctgtgacaatgtagtgagatgatgctggtagcattggccttagaacccagatgtcaggtccagatgatatttaagaggattatgcta

SEQ ID NO: 200412 - DNA, 477 bp, Homo sapiens
gccttcccgcccatcattccttctctcatatccactttttcccattgccatgaactccttacctttctctatccatggcaggctttccttctatgccttggtgctcttgctttgtttgaaagacccattcctgcacatccatctggcaaactcctactcattcttcaagacccatctgaaatgtgcctccttaggaaatcgtccctgcactccctcccctggtgtggtaggctgaaaaatgagcctccccaccaacaaaaaaaaatacttatgtcctaatccccagagtctataagtatgttaccttacatggwaaaagggactgtgcagaggtgattgagtatcttgagatggggaggttatccaggtgggcccagtgtaattacaagggttcttataagaggacagtgagagactcggagttagtgtaggatctgtgaagcaggaggttggagtgaggctggggagagaccacac

SEQ ID NO: 200413 - DNA, 547 bp, Homo sapiens
aagaggacagtgagagactcggagttagtgtaggatctgtgaagcaggaggttggagtgaggctggggagagaccacacaccacagaacgcaggcacctctagaagttgacagaagtgagaaaatggattctccctttggagcctccagaaggaaccagccctgccaacgcctttaccccagcgagactgaggttgaatttccgatctcaggaactataagagaataaacctgtgtagttaggaggcactcagtttgtgggaatgtgtcatagcagcgatgggaaactgagatctgtcagcagggttccctctgcctcctctgggatcccttgcaactccatgcccatgctgcagctcctcatgaccagcacttatccagtgccctccacgtgccatgcctatcctgagtgccacacaggyattatcacactcaatcttactgcaatgcagctgggcaggtactagatccccagtttacagaggaggaaagtgaagagcacagaagtgaagcaacttgacccaagaaagtcatacaggtcatgaaca

SEQ ID NO: 200414 - DNA, 411 bp, Homo sapiens
gaggtaacattgactaagcacctaccatgtgccaggcaccctgccagatcctttacctatattatctcctgaagccctcacaatatatcccaaatcagttgcaacccccacccccgccattgtacagatgaagaaacygaggcccagggaagtgaagacacttcctacggcaaagttccactaaagagtcagggctaaaactgagttggtctgactcgtagcctgtgctttctcccccataccatccacaagagcagagcatgtggtttgaaagggtcttcatgaaatattcaactgcatttgtagctcctgtctcgttcaagccagctctgaatgcttacaagtgcatttttttttttttttttttttttgcaaggaaactgcatgggtacaaatttccaattcatactt

SEQ ID NO: 200415 - DNA, 237 bp, Homo sapiens
gttccaaacgtgctagaaaaaacagattaggagcagctaggagtctctgaggcattctatagcagaaagagcacagggacgcaccgttgccaattttcttaggttagttcaattaataaattaaataaataaataaaacacaaaacttaataaagaaaaaagtcraaacaatcttccccaaaccatcaaaaattctattaattcataagctactactcagtactttatttctctagt

SEQ ID NO: 200416 - DNA, 620 bp, Homo sapiens
gttctgtgctgtttaatagagacacaacaggtactcaaagtctcaaatggcaagtggggtttggagggtgcaggtgtgtggtaacttggagggaggaggggcacagggatcctgtgtccacagactaagagagatggtgttaggaaaagtgctgccaacaggctgaaactgtgaaccaggacctttgaaaagctctrgggattcccaaaggataggggaaaaatatgtttttcatggaataacatggataaatctcacaaatctttctatattttctatagctgtaaagtaaagcaaatttactttagaaaaggggttattttttgaataagaatttgtaacagttagattttaatgagggtacataatttgtaattaggcattattcgctcttcaaaatcttgttctaactgggtaattaattgcatttttgattatagaagttaatccatatatactctcatcttaacaggggattacttttttgtagatgaggcacaaatagagggtttaataacctagcttctttcagtcttctatgattgaaaaatctcccgatctaaaatatgtgatctgaatgaacattattgaccatctggtggaaattacccaaaatgttg

SEQ ID NO: 200417 - DNA, 620 bp, Homo sapiens
gttctgtgctgtttaatagagacacaacaggtactcaaagtctcaaatggcaagtggggtttggagggtgcaggtgtgtggtaacttggagggaggaggggcacagggatcctgtgtccacagactaagagagatggtgttaggaaaagtgctgccaacaggctgaaactgtgaaccaggacctttgaaaagctctggggattcccaaaggataggggaaaaatatgtttttcatggaataacatggataaatctcacaaatctttctatattttctatagctgtaaagtaaagcaaatttactttagaaaaggggttattttttgaataagaatttgtaacagttagattttaatgagggtacataatttgtamttaggcattattcgctcttcaaaatcttgttctaactgggtaattaattgcatttttgattatagaagttaatccatatatactctcatcttaacaggggattacttttttgtagatgaggcacaaatagagggtttaataacctagcttctttcagtcttctatgattgaaaaatctcccgatctaaaatatgtgatctgaatgaacattattgaccatctggtggaaattacccaaaatgttg

SEQ ID NO: 200418 - DNA, 620 bp, Homo sapiens
gttctgtgctgtttaatagagacacaacaggtactcaaagtctcaaatggcaagtggggtttggagggtgcaggtgtgtggtaacttggagggaggaggggcacagggatcctgtgtccacagactaagagagatggtgttaggaaaagtgctgccaacaggctgaaactgtgaaccaggacctttgaaaagctctggggattcccaaaggataggggaaaaatatgtttttcatggaataacatggataaatctcacaaatctttctatattttctatagctgtaaagtaaagcaaatttactttagaaaaggggttattttttgaataagaatttgtaacagttagattttaatgagggtacataatttgtaattaggcattattmgctcttcaaaatcttgttctaactgggtaattaattgcatttttgattatagaagttaatccatatatactctcatcttaacaggggattacttttttgtagatgaggcacaaatagagggtttaataacctagcttctttcagtcttctatgattgaaaaatctcccgatctaaaatatgtgatctgaatgaacattattgaccatctggtggaaattacccaaaatgttg

SEQ ID NO: 200419 - DNA, 620 bp, Homo sapiens
gttctgtgctgtttaatagagacacaacaggtactcaaagtctcaaatggcaagtggggtttggagggtgcaggtgtgtggtaacttggagggaggaggggcacagggatcctgtgtccacagactaagagagatggtgttaggaaaagtgctgccaacaggctgaaactgtgaaccaggacctttgaaaagctctggggattcccaaaggataggggaaaaatatgtttttcatggaataacatggataaatctcacaaatctttctatattttctatagctgtaaagtaaagcaaatttactttagaaaaggggttattttttgaataagaatttgtaacagttagattttaatgagggtacataatttgtaattaggcattattcgctcttcaaaatcttgttytaactgggtaattaattgcatttttgattatagaagttaatccatatatactctcatcttaacaggggattacttttttgtagatgaggcacaaatagagggtttaataacctagcttctttcagtcttctatgattgaaaaatctcccgatctaaaatatgtgatctgaatgaacattattgaccatctggtggaaattacccaaaatgttg

SEQ ID NO: 200420 - DNA, 541 bp, Homo sapiens
cagtggctgtgactgagtattgtcctaaaagcctgctgagatgtgtagcaatataaacccttgtgctaaatggctctccccttgcttttgtttgatgataactaatacaatgccctaggcactatcccacacaaactcttccagggggtattattagcccattttacagttgagaaaactgagactcagaacatgatagaagcgatttgctctccakcgtgaagcaagtaagcagtagaagcaagaatcaggactaggtctgtaaagcctatgctgcacttaggctacaccaccctcctggccttgcgctgcagccttcctctcttcccccttgtcatttattgcatcttcttggtgctcttctgctacagcccttctccctacagtctttctttccaccaaaagctggaaagagggacatccaacagattgcaagctccttgaggttttggggtttttgggtattggtttcctctatctcatctccaggcacagttgtaagctcaggaagaatttgttcaatggaagtgatcaaagcctt

SEQ ID NO: 200421 - DNA, 397 bp, Homo sapiens
taagccatctttgagtcctgctggttctaactcctcaatctctcccaattctgtccacttctcaccatctctgtttctactaccctattcaagccatagtcatctctcamctgagcttccacaatggcctcccaaccagtctccctgcactcgtcctcatagaagatgtgaccccagccctggtgacaggccccagcatggctcagccactctcagcagccccatttccttttgctcgccattctttcctttcctcaaacactccattctgcgtgaccctgggctttttgctctctctgtgtctcagctgccttctctgcaaaagaacaagaattgcccaggccccccagatccaagattccccaccaaggatcttccaggtggggaggatgaaaac

SEQ ID NO: 200422 - DNA, 406 bp, Homo sapiens
tgctggttctaactcctcaatctctcccaattctgtccacttctcaccatctctgtttctactaccctattcaagccatagtcatctctcaactgagcttccacaatggcctcccaaccagtctccctgcactcgtcctcatagaagatgtgaccccagccctggtgacaggccccagcatggctcagccactctcagcagccccatttccttttgctcgccattctttcctttcctcaaacactccattctgcgtgaccctgggctttttgctctctctgtgtctcagctgccttctctgcaaaagaacaagaattgcccaggccccccagatccaagattccccamcaaggatcttccaggtggggaggatgaaaactgagaggatatggagacctagagatct

SEQ ID NO: 200423 - DNA, 758 bp, Homo sapiens
ggcgcatcccttttggagagcatcacatggcattaagcatgcaggagaatgctttaggagagctctttttgaggagaccagccctcagaaagaaacattatgcaagcaatgtcagctgatacacttcctctctgttgtgagagtggaggctgacctaatcagggggatgcttccaccacggagttttgccagctcgttacctttgaccacaacagatgctgctattttctgatcagtgttttccctgctatctgggagcaaatgtcagtggaggagtacaatctgacatcagaaccattacaggctcatctgaatttgagccccactgcccaaatcatatgccttcaaaggcagaaagtataccgttggcatggagatggagtaartttgtgtaaaataccccctatcaacagtgcataggtatatatatgttcacaggcattccactgcttaggaaggaggggagcccacattcattcattcattttagaaatatttattgaacacttactttgtggcaagcactgtgctaggtgctggggatcacaacagtgaacaagatactcctggtcactccacttatgaaactcatattgattgcagttgggcagatttaaaaagtaaaatgaatgcagaaacaagtaactgcagcttctaaaatataccatgaaggaaataaacagggtgcaaccatatagagtaatggacaagattagccataccataaaatgtattgccgttcatgcagagctcacttc

SEQ ID NO: 200424 - DNA, 600 bp, Homo sapiens
cctctgagattaactaaaatgtcaagtctctgcctttgaatagcatttatcaactttgtgtcctcactgcagacatcaaatgctgggcatcagctgtgattggcagttagatttagtccttcaacaaatatttcttgaccacctactttgtggcaggtgctgtgataggtctcggcattcagtggtgagacaaacaggccctgttttctgagcttacagttcagtaggcatgtttcatgaatgtacactgagaaaatgagacacatgtacctgaaggagtaacattggtttggtggacaaattctttcattacagaagatccaagacagggagtataagaaagggatctttgagagtgataattttgcwaatcactttcagtctatgcatttcatttgaccagtgagaaaaatgagacccagatgctaaaagtagtgggtgaaagtatgttgagaaacaaaaaatatatataggttcaaagtatctgcccacatgatactgattaatttcaaaggggaaaatagtaacttttcaatagaaaacctgaaagactccaccttgagtgattaaaatcagtattagcaggaatgtgacaaatag

SEQ ID NO: 200425 - DNA, 586 bp, Homo sapiens
agagttttgaattgtggccattcatttattcagcagtcacttcattaattcattcagcaacgatttatgaagctcctttcctgtgccaggccctggagtatcgggtcacacagaaagaaatccatctgggtctctgctcctaagggccacccaatctgatgagggatattggactctatacaaacaattgctaccaaacatgatcaagactataatgtaggcataaagggggccacagaaatgtagagaaaggagagatcattttacatccttttcartactttttaatgtcttttttgtttccttgcgggtttgaagtggtatctcattgtggctttgatttggatttccctaatgatgaatgatattcagcatctttacatgttcagaggaatgtcagaggaaatgtgatccacatggaatcatgaaagatgcataggaatctgcctagtgggcctgtgggacagggccttccaggcccaagcagaaccagcagttcagtgagaagagtctaactgcacattcagagacattcacaagggctcaaaggtacagcgctgaattggagagaccccagaaggcggac

SEQ ID NO: 200426 - DNA, 592 bp, Homo sapiens
ggaatgtcagaggaaatgtgatccacatggaatcatgaaagatgcataggaatctgcctagtgggcctgtgggacagggccttccaggcccaagcagaaccagcagttcagtgagaagagtctaactgcacattcagagacattcacaagggctcaaaggtacagcgctgaattggagagaccccagaaggcggaccttaaaggacctgctttgtgaaggagtctgaactttatcctgggacattaaaggttttaatggtttgggacctttttctagaacccagttatgccagagaggcagaattgatatgagatttggtgacaaaggccattgtagcccttgcagaattgtccttagatgggatgcaggcctcctggggacttgtcatcaagcatacccccgctaggrgccttattttccctccatggccctacagagagccatcccacatcaccaagaggtcaaactaaaagtttttaattctgatcttgactatgatttccaagctggggcagataactctgaatttcactttctcagtgataaaataaggaccttgatgcctacttcctagggttgtcgtgataaatt

SEQ ID NO: 200427 - DNA, 484 bp, Homo sapiens
tataataatagctgaacacctttcatttgctttgccctttgtggtttgcaaagcacatttctacatattgttgagtccccagaatcaatcaatcaatcattccttcgttcataaatacatatttagcactttctatgtagcacacaccattccaggtgccagaggttttgcagtgaataagacagaaaaaaacctctgcttttatggggtttatgctctagcaggcaataaatgcaacacacacatgtacacctacagacaatgttttcagatattggcaggtattgtggaaaaaataaggcagggaaaggggagagagagttaggggacttgttttgagtggccaggaaagctctctctggaatgcaatccaggcagagattattaatattgctgaataaatatctgaaacctcaatttatagatacagaaacacagtccagactcacamagcagttagatagtagggcctagaggagaattc

SEQ ID NO: 200428 - DNA, 647 bp, Homo sapiens
tgtctcccaggtagggggacaggcagggggaaaggatgtagggctctttgggccctaaatacttttaccttatggggcaggaaaacaaagcttaaccagcacgaggcaccaatgagaaatacttgctgagggctggaggaagatggccatctgcctcctggaccagatcgtcattgacattccatgaccttatgtcttagttgaattgagattgttttctttggggggttttccttccctttaaatctatctgataaaacagatcttacagggaaagcccagcttctggttgataatttgtagagagggagagactacatcctgatggtcaagtccaggaaggctttctgacctaagcaatctcatttctggactgtctcttaacgtggtttttggggaaaaaaatagttttcgccttgaacctgacaagccagactctgaactgcttagacttcctaagcctcatctgtcaccccacaaacatgccatcctagaagtgtgacgatctctaatgtatcatggtttayaaatgagtctgaagtgacgcttggtacctgaaaaacacttataatcaatcaagcaaatcagaaaagctgtaaaaatagcttatagcttatatatccactgccaagaaaggctacaaagga

SEQ ID NO: 200429 - DNA, 301 bp, Homo sapiens
cgttattttaagttgacgttgtttccaggacaggacacggagatcttcggggaaggcagagctggctgatgaaccctacccagtgycctgattaatgcattacagggaatcttgaaggaagtcaagggaaatgaacatttggtgagtggcactctattgcaagtgcattttatttcatttctttgattctcataaggacttggtgccatttaacaagggagaatggatgtcaaggctcaaagaggtcacacaaagatacaaaaagcctaggaatgcaagcacaggtctgtctgcttcaaag

SEQ ID NO: 200430 - DNA, 678 bp, Homo sapiens
ctttttttgatgtctaccatattctagtaagagaatctacttctcagacctcagtatgctgctggagggaattgggtgggaaggtgttatcttaattttaccaacaagaaaaatctgtcccaggccagagaccctcttctcttctttcactctgcccccaacaaaaggctaggagacagagcaaatgaggtgctggtgccacattccacatggtgcgagatgcttcattgagtgactgtgggcagcgtccttttaaatggtccactaaacagggcagtaactggcacatgccttgtctgaggactggagacttacctggaagttcccaaagcaatggcatgatctccaatgctacacattcttttaggttgtccccaaagatgcctgtgttgcagatttggttcagaatatttctccttctgtcctgaggccactttcatagccaactcttacatcagcctgacttgctgtgagagcattctgtttgtraaacctaacctggggacaatccctatccagttttctagggaatcgcttgaaccattctgaattcacctgggggtgttgtccactcccacctagcattctgccttaatccaactatgatgatgtggggttttgcaaatgtgactttgtcaaaattcctgctcttgaacatggtggtaccccaacctgatc

SEQ ID NO: 200431 - DNA, 678 bp, Homo sapiens
ctttttttgatgtctaccatattctagtaagagaatctacttctcagacctcagtatgctgctggagggaattgggtgggaaggtgttatcttaattttaccaacaagaaaaatctgtcccaggccagagaccctcttctcttctttcactctgcccccaacaaaaggctaggagacagagcaaatgaggtgctggtgccacattccacatggtgcgagatgcttcattgagtgactgtgggcagcgtccttttaaatggtccactaaacagggcagtaactggcacatgccttgtctgaggactggagacttacctggaagttcccaaagcaatggcatgatctccaatgctacacattcttttaggttgtccccaaagatgcctgtgttgcagatttggttcagaatatttctccttctgtcctgaggccactttcatagccaactcttacatcagcctgacttgctgtgagagcattctgtttgtaaaacctaacctggggacaatccctatccagttttctagggaatcgcttgaaccattctgaattcacctgggggtgttgtccactcccacctagcattctgcctyaatccaactatgatgatgtggggttttgcaaatgtgactttgtcaaaattcctgctcttgaacatggtggtaccccaacctgatc

SEQ ID NO: 200432 - DNA, 551 bp, Homo sapiens
  misc_feature (1)...(551): n = A,T,C or G
tanagcatcctctttcacacacatacatgcagacatacacatgaaacagctttggtaaactgaaattgaaatgataaaatgaaaaatttggtatgatagtgtcttastcctttttgtgttgctgttgctataaagaaatacctgaggctgggtaatctatagagaaaaaagacgtatttggctcatgattctgatgccttgaaagttcaagattgggcatctgcatctagtggaggactcaagctgcttccactcatggtagaagttgaaggggaactggctgtgtagagataacatggcaagagaggaggcaagagagaagggaggggagcagatgccagactcttttaacagtcagctctcttgggaactgatggagtgagaactcactcacccttgaagaagggcattaatcttttcatgagggatctgtccccatgacccaaacacctcacatttagccccttcttcaacactggggatcaaatttcaacatgtttggaggagagaaaatccaaacgatagcagatagtctttggtgcttttctgca

SEQ ID NO: 200433 - DNA, 407 bp, Homo sapiens
  misc_feature (1)...(407): n = A,T,C or G
aatgcagttaaaaagtatacgtataatatgtatattatatatatatatacacacacacacgtaatagcctgtagtgagattattttaaagacacttcctagtgttaaagaacccttgaagtgtttcgagttcttattgttttggtaatgctaaaagcttggggttgtgtgaatgggggtggggggtgtggtgtgatgtattctaatgacttgagttattctgggtgctagraataagagttattatatttaccaggattactatgctgaaggtattcttcaagagtttgttttttttctactggttgatctctacttttagaaggtatgttacccataaaatcatttggagtgtcatttcatttacaaactgaagttctacaatagtgaagtgttgttnnnnnnnnn

SEQ ID NO: 200434 - DNA, 589 bp, Homo sapiens
aacagtgtgtcagtgtaatcttctaaatttgccatyaggtagttcatttgtttctttaaagcctctactctatcaaatatttaatacttatatgactcaagctctaatggctttatttatcctatcccactttcatcttattaaatcttcatctgtcatccgttgattcaaaaagaagaatttcctgaacaccctctatgagccaggggctgttactaagcactggagagacaggtcaaggcccttaggggacttgcattcaagtattcgagtatagagacacagataatgaaagagtaaacaagtcagacattttaaataatgataaaggttatgccagaaaattaaacaggagtgatcagtgctagagagggagggaggcggacttctattcaggtcagccgccctctgaatagtaaattccttttgcttagtagtacattccaccttcttaagctgctttaagtctgcatttcatgaaggaaggtttcaaacaatacaacaacatttacaattttaagtttgctgtttaggctctagcactatgtagatacgaaggtctttcaggagtatagacttggatatttct

SEQ ID NO: 200435 - DNA, 530 bp, Homo sapiens
gttcatttgtttctttaaagcctctactctatcaaatatttaatacttatatgactcaagctctaatggctttatttatcctatcccactttcatcttattaaatcttcatctgtcatccgttgattcaaaaagaagaatttcctgaacaccctctatgagccaggggctgttactaagcactggagagacaggtcaaggcccttaggggacttgcattcaagtattcgagtatagagacacagataatgaaagagtaaacaagtcagacattttaaataatgataaaggttatgccagaaaattaaacaggagtgatcagtgctagagagggagggaggcggacttctattcaggtcagccgccctctgaatagtaaattccttttgcttagtagtacattccaccttcttaagctgctttaagtctgcatttcatgaaggaaggtttcaaacaatacaacaacatttacaattttaagtttgcygtttaggctctagcactatgtagatacgaaggtctttcaggagt

SEQ ID NO: 200436 - DNA, 569 bp, Homo sapiens
aatgctattgatttttgtacrttgattttttatctttcaactttattttgtttattagttccaagagtgtttttgtggagtctgtagggttttctttatataagaccaaagataattatgtctgagtaaaaaataattcatgacccacatccgttacagaagtagacccaccagagaggttaagataatactcttattcacaatcatctaaagaaggcataaaccaatataaagagatgtttgtggaattataggaactgtacagtggagtaggtggttaagataaataaggatgattttaatatctcattttacaattatggggcaaagatcactgtggaccctcgacagacttgtaaaatacaataacaggaggaataaacccagcattttttccatgtaaatgctcagacttactaacgtgttcaaaggcaaaataacctgataattactgttattaataggatacacagaatagataaataaggggtatggactcccaatccacactggcttacaacactatacttctacagcacactactctacccagggaaattctgaagtga

SEQ ID NO: 200437 - DNA, 569 bp, Homo sapiens
aatgctattgatttttgtacgttgattttttatctttcaactttattttgtttattagttccaagagtgtttttgtggagtctgtagggttttctttatataagaccaaagataattatgtctgagtaaaaaataattcatgacccacatccgttacagaagtagacccaccagagaggttaagataatactcttattcacaatcatctaaagaaggcataaaccaatataaagagatgtttgtggaattataggaactgtacagtggagtaggtggttaagataaataaggatgattytaatatctcattttacaattatggggcaaagatcactgtggaccctcgacagacttgtaaaatacaataacaggaggaataaacccagcattttttccatgtaaatgctcagacttactaacgtgttcaaaggcaaaataacctgataattactgttattaataggatacacagaatagataaataaggggtatggactcccaatccacactggcttacaacactatacttctacagcacactactctacccagggaaattctgaagtga

SEQ ID NO: 200438 - DNA, 341 bp, Homo sapiens
tcagtttagttcttttagctttagcctttgctctttatatgtgattcagggacggcagagatgtgggaagaatttgatcatagaatttagggctcaccttcttttgttctgtgcactcaaggattctctacccctctcagttgtggattacagtgctgttgctcctggctcctcccctttgtccttaagctggagaaactagggattatctgtcagagttttaacttcctcatgctgtgtcacaaccttgatcagctattaggccaaagcaacaaaaacrggaaactcacttcatgctgattcttttctccaagttttagtgccctgctctcccaaaactg

SEQ ID NO: 200439 - DNA, 559 bp, Homo sapiens
ttgagtatttttttctattttgtgctgaaaagctgaagttggcatcaatcaaggcatattgttatatatggatcaaactaaaaaattttaagatctttaagaccattaattcagagatgctgtataaatagaatcagtactagattttttgtttcaattctatcagccaagtataacatgcttttcttgcttgtgatagaaaaaaagagagaaaaaacacaraagcaaaattgaagaatttgtaaatcatttctaaataatttcaataaaatgagctttgaaagggaaaaattttagataacattatctcatcaaaatgccttaaagtatattttaatattcagtaagaacagtgtatattaacatggctaatttagaggatttatattttacccacatgataatgtattatgcctgtaactgctaaaggaattatgtagcaaaatctgtcaaggaatacacgagtgggatttatatcagaaaaatcaaagccatttgtaaagccccattacttaggcagaatatcataggtaggaggtagatgttactgaaagaagaa

SEQ ID NO: 200440 - DNA, 559 bp, Homo sapiens
ttgagtatttttttctattttgtgctgaaaagctgaagttggcatcaatcaaggcatattgttatatatggatcaaactaaaaaattttaagatctttaagaccattaattcagagatgctgtataaatagaatcagtactagattttttgtttcaattctatcagccaagtataacatgcttttcttgcttgtgatagaaaaaaagagagaaaaaacacaaaagcaaaattgaagaatttgtaaatcatttctaaataatttcaataaaatgagctttgaaagggaaaawttttagataacattatctcatcaaaatgccttaaagtatattttaatattcagtaagaacagtgtatattaacatggctaatttagaggatttatattttacccacatgataatgtattatgcctgtaactgctaaaggaattatgtagcaaaatctgtcaaggaatacacgagtgggatttatatcagaaaaatcaaagccatttgtaaagccccattacttaggcagaatatcataggtaggaggtagatgttactgaaagaagaa

SEQ ID NO: 200441 - DNA, 629 bp, Homo sapiens
cttattagaaaagtttcttgctctagtttaaagtgaacaacacaatagaactattatctatggtacctgctcagaactataatgcaaggaataatattttaagtttgatcagatgaattccactgatacatattgtgctgaattttycctgactgcactactgtttctagaagtaaccacaatcctccctatatttttgaaaaacttgttttttaaaatgcatcctttcctcaataaaaatgctgtctttattgtatactaaatttcctaatgcacaatgagacactacctcactcctgcaagaattactataatttaaaaatcaaaaagtaatagatgttggcatgaatgtggtgaaaaggacactcttttatactattggtgggaatgtaaaccagcacaaccactatggaaaacagtttggagatttcttaaagatttagaagtagagctattatttgatccagcaatgccactatcaggtatctacccaaaggaaaagaagtcattacatgaaaaagacacatgtgcaagccatgttgatagcagcacaattcacaattgcaaaaatatggaaccaacctaaatgcccatcagccaacaagtggataaagaaaatgtggtatata

SEQ ID NO: 200442 - DNA, 396 bp, Homo sapiens
tatagagtacattgttatctccccaacctcttcccccaaaaygccagtaaattccggtaactaccattctgttctctgtttctacaagttcacctctttcagacatgaacatataagtgagattacacagtatttgtcttttgagtctggcttatttcacttagcatcctgttctccaggttcatctgtgttatcacaaatgacaggatttccttcttttttgaggctgaagagaataaagactccaccagaaaacaaccgttggaactaataaattaattcagtaaagttgtaagagacagaattaacagcaaaaatcagtagagtttaagaaaacaatctcatttataagcataaagaaacaggaataaatttaacaaaagtggtaaaagatct

SEQ ID NO: 200443 - DNA, 443 bp, Homo sapiens
agctatggatttattcatttatttaacaaacaaatttatttgcacatttgcaccttctatgtgcaaagcattattttaggtcttgggggcatagctgtaagtaagatagacataaacctcactcatttggagcttacattctaacaggtcatgtttcttatasaatatgacactttcatagaaaggtatcccttaactatatattaacatatgaagaaggacatgcaactagctgtagcaaatacaatgtcaggccttaccactgcataagagccacattaacatagtgtatttttgggggaagaccagatattgtttgaagtccaccacggcattactcatttgtgccgctgagttgttttgatatctccacctcctattcaacattttacttccctctttggtggctttggtttgaaattcttattacccttggtacattt

SEQ ID NO: 200444 - DNA, 644 bp, Homo sapiens
cttttttccccaatgctcaggatttaatttactcttattttctagctaatttctagcttcagaaactaatataattaatttcaatctttattctttactaatatgagctatgaatttccctctgacaactgcattagctgtataacacaatggtgatgggttgcattttaatcttcatttacttcaaaatgctttataatttcccttgtgatttattgttttatccatgagttatttggaatcaaaatttcaaaatagttttgtattttccacatttctttctgttattgatttctaagtataagtccgttgtagtcagaaaccatatattctgtactagttcagtccttttaaatatattaagacttgatgtaaggcctggaatatatcctatcttcactgagaagaatgcrctttctgctgttgactggaatgctccataaacataatttggttcaagtcttctaaattaaaattgattttctctttacttattatatcaactactggagagaagtattagaatctttatctgtgatttttattttaatttgtccattttgccattcagttcctggagtttttgtttcatatattctgttgttctaagtgtttattcaatattaccattatatctttacaaa

SEQ ID NO: 200445 - DNA, 598 bp, Homo sapiens
tggtggtgagatgtgaggggaggggaagcattctgctgtcccgtaattaagtctcaatctgttagtgaccttgttcctctggagcataaaattcacacacagtctccctacctacaccatttaggtaggagaggatggctagagtgggctgaaattggatatttcctttccccaggtaggttagccttcataaaaccgcaataatttagactctgattaaatagtttatcctgaggacaggcctttggagaagagcagcatgctctggtgaatttcaaaatggttccttttcctttctctcttctggaaggacaaggggatttttctctgttgtttactttgagaaccagcttgcacttctgagggytggctcacaaaagtgggggtgtccctctatgactaagtcccccttggagtttttaactctcagacttgtctgctctaagcctccagcaagtcactgatgacagttcaggttttcctatcccagcacgggttccctcagaggtttttgctggattgttagtgctctggtatattatgtatttgcctgtttgtctctccgatgttgagggcagcagtttgacctgtaacctca

SEQ ID NO: 200446 - DNA, 571 bp, Homo sapiens
ttcttgttaacaagaagttaaattcagatatttatttccaaaagggatgatgagtctcaatattttcagtatccatcttactttgcagtgtcagaccagagaacttatcctaatgatgatttcaggagctcacctataggagcattccagaaagaaaaaagtatgctttgtttgaaagattatcagagaatcagtgatttcacgaaaaaattaagataagtcaacatrgattgcaaagactatagaaatgacagagaaggagagaggctattggatagggatgaaatttggttcaaacaattgaaaaagcttcacgatcaaatttaactagattgttgtttgtttctgttgtttgtacacagcagaaatataactgttgaaaagctcagtgtaccacaattatcgtcttaaccatctctctaatattcataagtacatgtgacactttttagtcacagaaattgacagtggaaattttaatattaacttcttttccctggtgagataatggtagaatttactttgaagtacaaggtgtatacaaagtaattattctcatttggctgacaat

SEQ ID NO: 200447 - DNA, 601 bp, Homo sapiens
ctctttcacttccagtttactttctggacccttgtcagatcattcagtctcaatgaaaaatgaattcatctatacaaaaaatatttaacatcaactacataccatacattgcaccatgcaataaatgaaatgttggaaaaattaatctaacctatatttcatcatatcaactcactgaacttcaatgcttctctcctccctgaaaggacgatgtcttatagtctccctagtttagcatctaagtttccacaaaggcttccaaaacctcttgtgggaatgtagttacactctcctcccttagcagcagtatttcaatgcctttgggacttttaacattctatccactcttgacttgaatgtcttactttycttgatagcttgattaattctgattcatctttaaagcctggctcatctcctctatgatacttcccccacggattcatctcccttctgtgaattgctttgttttatgcactattcctgttccttccacacctttaattattgcatgagccgaactgtaatgtaatgtttgttgacttgtcttcctcactggattacaccttctttcaggataggaagccgattccacgcttct

SEQ ID NO: 200448 - DNA, 456 bp, Homo sapiens
atgcctttgggacttttaacattctatccactcttgacttgaatgtcttacttttcttgatagcttgattaattctgattcatctttaaagcctggctcatctcctctatgatacttcccccacggattcatctcccttctgtgaattgctttgttttatgcactattcctgttccttccacacctttaattattgcatgagccraactgtaatgtaatgtttgttgacttgtcttcctcactggattacaccttctttcaggataggaagccgattccacgcttcttgttaccctgtattcctcttatgtcccatagcttggcagagcagtgcttggtataaactcagtgttcagtatctatactgagttgaacttggagaacagggatacagaccccaaaaatctagaggagtttccatagaatctgaaatatattcttctaatgttttcagac

SEQ ID NO: 200449 - DNA, 602 bp, Homo sapiens
ctatattattcatttatttacttatttaaagatggagtttygctcttttcacccaggctggagtgcaatggcatgatctcagctcactgcaacctccgcctccggggttcaagcgattctcttgcctcagcctcccaagtagctgggattacacgtgtgtgccaccacatccagctaatttttgtatctttagtagagatggggtttcaccatgttggccaggctgatctccaattcctgacctcaggtgatctatccaccttggctcccaaagtgctgggattacaggaaatccttgaaatgtcttttaaaaatagaaaaccctactgctggctttccagttaatatttttccatatttaagtagtttgttttcaaaaatacaaataaaaattattgcttataagagtatttacagaatgataaattacttaaggtttcttagaactcagactaccatttgatatgctgaatgaggcttcatagctattcaaggaggcctctgtcatcccagcctatcttaaatctaatagggtaatgaaaataaccacaaatcctaccattttcaaatgatattgaacaactcaaaggttgtatttaatc

SEQ ID NO: 200450 - DNA, 599 bp, Homo sapiens
ggagcatcatctcgccttcacacgttaggaaactgaggccttgagattaattaatgggtccaccactgcacagataattagtgttagaataaggaattaactccaggtcttcctggatttaaaaatctgtgtttgtggcataagttaaatgtatttgtttcaattagattcatttccattgtattattttattaagttaaaatgtatgtttcacatccttctatgtctaggcacttagttaataattttgggagttgaaagaagtggttgacttgggaaggtgtggataaagctgatggctgctctgtactatggcctccacactcacagggtctcaagttgctatgactggaaaacaaacactatcaacaaaagaaaktatgggaaagaaatagacttcaaaatcatcatttttctgtcaatagaatactatgacaatcttgtcaggcatgaatataagaagaagatcgacgaaaattagcacatacattttgttcaggaagttgaagtcctttgtaggccattctttgattttcccagaaagatcagttctcttttggggtttatagtggatggcttattaaaagctacttgctcta

SEQ ID NO: 200451 - DNA, 599 bp, Homo sapiens
ggagcatcatctcgccttcacacgttaggaaactgaggccttgagattaattaatgggtccaccactgcacagataattagtgttagaataaggaattaactccaggtcttcctggatttaaaaatctgtgtttgtggcataagttaaatgtatttgtttcaattagattcatttccattgtattattttattaagttaaaatgtatgtttcacatccttctatgtctaggcacttagttaataattttgggagttgaaagaagtggttgacttgggaaggtgtggataaagctgatggctgctctgtactatggcctccacactcacagggtctcaagttgctatgactggaaaacaaacactatcaacaaaagaaagtatgggaaagaaatagacttcaaaatcatcatttttctgtcaatagaatactatgacaatcttgtcaggcatgaatatargaagaagatcgacgaaaattagcacatacattttgttcaggaagttgaagtcctttgtaggccattctttgattttcccagaaagatcagttctcttttggggtttatagtggatggcttattaaaagctacttgctcta

SEQ ID NO: 200452 - DNA, 576 bp, Homo sapiens
tgttaggtaacaaggctaaaacataatttaagtcctgcttactctgctgccacctcagatcagctcttccctttctttctatcacaggaaatgacactcacccactttcagacatctgtattaaacacctcagtcctccttgatgcttttgtattctctatactccatagccatccatcagcaagtcagaccattcagcaagatctccactactgcctgtcatctaccgtcacttgttctcctactgtcagaagctgttttcctgtcttttaccatgcttgcccctctattaagtttcactaactcctaatatatccatttagacacatagcaaagcaaccaatgcacaatgctagtggcatagtaaaaatacttcccgaagagcttccatggaatcaaaattcagctgtatcctagctatgcacagggagccaagcttgtcaaaaaagcagtggtgcttatccaactgcaggaaagtggaaatcttttcawctgctcatcaccaagagattgaagctcttgaatctcaaggaggaagtttatctacagcctctttctgtacaatctcttgttttt

SEQ ID NO: 200453 - DNA, 584 bp, Homo sapiens
tgtgctaggcttttaagtaacctggatacaaaagtaaaggagataaatttcctattttcatgaaacttatattctagtcaaaaaggcagaccgtaagcaaacaaatatacattttattttaggtaataagccctgaggaaaaatatgagtgcaaagggcttgaaagcagcgagcggtgaggactttttttcaataaattgatctgggaaagccttttttgagggggtgagcaaaagaaggagcattttcaacacttcaccctgcaactttttttattggtaataaaaaaatgtgtaaaccaatattctacaaaacaaactttgagaagggccaaactactctgctcccctacctttccaratctgggctctagtcataactattgcataataagaaaaagtgttatttatagcaacttaaagttttattataagctaaggaacaagtttgacaagatgacctggaatgccaattgaattttaggaacaatatttgttgagcatatacgatgctttagacctttgttaaaactaaaatcaactacaatcgaagacagtgagtgatgagagcaccagaagtaagtg

SEQ ID NO: 200454 - DNA, 557 bp, Homo sapiens
gtgctaattgctaacctctaccagaaagcaagaatgttacaataagaaccccgattcaggtattccttgatttcttgggctgatttttatcggtgacatagactccagtgaccattctctaatccacttcaggcctaagctatttgcacttgaatatatcattcttgctcacaaaatataatttagtgttttagaataaaataggacagctaaaggaacgagttcattttcttaaaagcccaaatggttttaggcaattcttaggacactggggagatctgctctgttttttattttataattctaatcgaccctcaccttcatgtattgtctttggataacattgctgttttatacattcactcggaaacttctgaaggaaatatttttatacaggtcatttaaaaaattctctgatcatactgtatgctgctctgtcaacctctgttaagtataaagtaaaataaaacaaaacctggctggctgccccacgctcaatgcaacaatatgcccaaccacaacaccctwttttttttttttaacctgtttctgaagaa

SEQ ID NO: 200455 - DNA, 589 bp, Homo sapiens
tcataggcaataccaaaatatattgttctatagtataacatgtccagtaaatatattgcctttatttacctgtttgaattattttatgtctaatttaagggtcccctcttctwtcttaaataaacaggcacaccaatttcatcttccagaagatttgttacctaaatcagtttagtcccatggtgtacctgacctataatatcatgcattcctgcatttctcaccaagcacctttgttccatctatagtgacatttctgttctttttctgcagatttgaagatttcatacttgaatttggtattttaccattagtgctgagatattattttttgaaagaagtttttatatcaaccaaacatgttgtatatggctgagatgttcatgtcaggcctctaagacatcctcacacatttatcaaaaaattatgatagagctccacggaagaatgaaaatgccaagagacatgaaatgggatgaaatacagaacttcagaaacctctcgttagtgagaaaacacagaggcatagaacaaacacaagcaaacatcaatgtcaccaatgaaagactgcagcagttaaaagaaaact

SEQ ID NO: 200456 - DNA, 584 bp, Homo sapiens
ggtgtaagaatctaacaaaagccaagctgagtttttctgaataattccaacaaaaaaggcaaaagatagaccaaaattttaacatacagtatgaacagttaataatagagtgagataaaaatgcatttccttttttctcagactaaaagtatgcaattctatgaaggaaaaaaaacaaggaatagataaaataaattcaaactaaaataaataatgtttttaaaggcctgaatgtggacagtgttcacgtatctctcatagctcagaaatctattagcgttcaaacacccatcactttctccattccattgagattgatagaccttgtttaataagtcattattatcctgctcatcaaaaagcactattgagcacttaattatgtgtggtatcgtacttgatgctatatgacaaatactacatagatatggcccttaatttttacaacctaagaatttaaaagaatggggtgttttataatattgcatttgttaaatagttaaataatggcttttattgtaaatgttagaggctatactcacagcrtatttgagaaattctcatagcttataattcctactgtt

SEQ ID NO: 200457 - DNA, 628 bp, Homo sapiens
tttaaatggtaattatttaattggtgaaataagagatagtatacaataaacaaaatttgttattagaaaattgtacaataagaaaaataaagataagaatgtaagataacattgacaatgagactatatataaaatttatggaatcagaacttctgctgtttatgatggattaacatggaccctcccaccttaaacaacaagaaagtggacaaaatgtagacataatggtttttaagcactggaaaataggtaacaaattatgtgatccttataactatctagatttcttcctagggcagttcctaggctgtagcaaaaaggaacctaaacattatcttctcaaggtgaagagacagagattagagtttgggaggccaagattgctagaattcacagagcagagtaccagagaggaaggagcttcacacagaaggaaccctggagatctgtaaatgagtgcctttaactctttatgagtaccaatctgtgtatgcatgcgaataagctacccatgtccacagaaataartattaggaataagcttaaaaacaattcctggtggtcacacaggcccgggaatagtttatctttccaccagtaaagtggtaagactttttaatacaacgg

SEQ ID NO: 200458 - DNA, 484 bp, Homo sapiens
ctggccatctttccacctttgtggcaggtgaagtgggcaattaaatggtagctccaccatgtcatatagcactgggaaggagcaattcccaaaaggagatgacatgccaaacagatacccacttcatctggggagcaagtmtagtgagaaaaaagcctgagatcaagctcccaggggccccaacattaaaaggttgggttatggaaaaaatggcctgctttttaagattttactgtgaatttgcatttcacttagagtctaaagtttctagtaagataaaaataaaaagcaatttcactgagaaataaatgtaactaaggaaacagttataatcctacaataagaggcaagaggtctaagggtgtcttattttgccatgaaccctgaatgatctgctcactgttattttccattttccaacatgtaaaccgaatatagcatttcctgtgcccgccccttgatagctccatgaacaagtactgaa

SEQ ID NO: 200459 - DNA, 464 bp, Homo sapiens
agggtccctataaaccaaacccgctaaaattaaataaagaatgagctagatgaagagtctatttgcttgactaactggtcttttcattaaccccctacaactgaatttttataatctacatttgatgtgtttctccayaggccacaagtgtcagcagctgcacaggtacttttctgttgagcctattatttaacataacagtcataagaaaatttaaagtctgttgtgtaatgatagcctttaaagtagaagttgctgtagagcctattatgagggaggcatttctaattattgcctcttttactctaaactatggaaaaaggacctaacaaatgatatccttttagaagagtgaaggccccctggcaatgttctctttaatccataatgtaggttaagaggagttttgactgattatgaggcaacgtatgcatcactaaagtttctctcctacattgggcctc

SEQ ID NO: 200460 - DNA, 600 bp, Homo sapiens
ctcaatagccacgttgactagtagctaccatattgggtagcctggatagagaacatttttatcaccacagaaaattcagttggataatgccatgatggagagtgaaactggccactattaataataatgctaggataacaggtattcactggtactgtcacaagtaatgaggacatatgcttaccctacttatattcaacttttctctctaatgcctccttttttttctgcagatrtgaaaattgttcctatataaaaacataatgaacataagggtgaccaccagctgtcacacactgatattgattctgtttgtgacactaaatgcttagctaattaaataaacataaaacagccaacctatttttttaagctgttggtcaacaaagaaattatttgcatcagtttgcttttactttacaactggttgctggttgctgtaggacactgtatctagtagcagttgccattaattgagtgtctttgatgttccttacatagtgaaaaatgcttcatatttgttataattatatcagctaattcccataataaccactcagtggaggccttagggtcagtaattgagttctgaggagtcag

SEQ ID NO: 200461 - DNA, 600 bp, Homo sapiens
ctcaatagccacgttgactagtagctaccatattgggtagcctggatagagaacatttttatcaccacagaaaattcagttggataatgccatgatggagagtgaaactggccactattaataataatgctaggataacaggtattcactggtactgtcacaagtaatgaggacatatgcttaccctacttatattcaacttttctctctaatgcctccttttttttctgcagatatgaaaattgttcctatataaaaacataatgaacataagggtgaccaccagctgtcacacactgatattgattctgtttgtgacactaaatgcttagctaattaaataaamataaaacagccaacctatttttttaagctgttggtcaacaaagaaattatttgcatcagtttgcttttactttacaactggttgctggttgctgtaggacactgtatctagtagcagttgccattaattgagtgtctttgatgttccttacatagtgaaaaatgcttcatatttgttataattatatcagctaattcccataataaccactcagtggaggccttagggtcagtaattgagttctgaggagtcag

SEQ ID NO: 200462 - DNA, 600 bp, Homo sapiens
ctcaatagccacgttgactagtagctaccatattgggtagcctggatagagaacatttttatcaccacagaaaattcagttggataatgccatgatggagagtgaaactggccactattaataataatgctaggataacaggtattcactggtactgtcacaagtaatgaggacatatgcttaccctacttatattcaacttttctctctaatgcctccttttttttctgcagatatgaaaattgttcctatataaaaacataatgaacataagggtgaccaccagctgtcacacactgatattgattctgtttgtgacactaaatgcttagctaattaaataaacataaaacagccaacctatttttttaagctgttggtcaacaaagmaattatttgcatcagtttgcttttactttacaactggttgctggttgctgtaggacactgtatctagtagcagttgccattaattgagtgtctttgatgttccttacatagtgaaaaatgcttcatatttgttataattatatcagctaattcccataataaccactcagtggaggccttagggtcagtaattgagttctgaggagtcag

SEQ ID NO: 200463 - DNA, 565 bp, Homo sapiens
ctttacgatgactgttgctctgcttgaaatgctctccctccagatcttcccaagatgaccttattctcatcatccaggtttcaaaacacgtgttttctcttcatgagatattcagttgccattcaagttaaagcagtttctcctccctrctttatcacattgtctgttttttcatagtacttgctacttcttgtaactacctcatttctttttgtctttctctccccaagagaatgtcatctccttgagagtaggattactgtcagcctattttacctagaatagtgtgtaaaactgatgcatgtgaaaataatgatgcttagctaaatatgctgcagtgcctctgtacaaaggaatgtacagtcatatagaaagatatttagtagtaaggaaggcatattgttgggtcaagaaagcacgattcctatttgtaaagaagaaaatgagcatatatatgcttacaaaaactctgaaatatacacaccaatgagttaaaatggtaatcttagcatgatggaaaagctggtgacttttttcctctttttcaatttagttaaattcttct

SEQ ID NO: 200464 - DNA, 574 bp, Homo sapiens
tgtggataagttacttaatcttttatgcctcaatttcatcattgtgaaaacagtaatagcattataatcaattcctctgtggctggtgaaaagatgataataggcacacatgtttagatggccatcaaatcatggttaccttcccattctgagtgcagatccaattgagataggcataatgaggcataaggaagtgaagatgttggctgcattatgagaaaggtaattggaaagcatgactttagacctacagccaagagtgtttaccagtactttaccctcaatcagacttactaacccagtcactagtgcaaccgagttactacaggcttcccctgaagcggcactgcrtagcacagggcagtccagagtgcacccatctgcctggcagactggctcctaaacaagcctggatggacttcagccttaccttttaaaaactcatgtattagagatgtctttcctcctctttggcatgaacaagcaatacaaagaggaattagaaataatgatctactctgattgaattttctccagaagaaagaaagtttttcataaaatggagcccagtacc

SEQ ID NO: 200465 - DNA, 576 bp, Homo sapiens
actggctcctaaacaagcctggatggacttcagccttaccttttaaaaactcatgtattagagatgtctttcctcctctttggcatgaacaagcaatacaaagaggaattagaaataatgatctactctgattgaattttctccagaagaaagaaagtttttcataaaatggagcccagtaccatgcataatagaagtttctgctgaatattccatcttattatcactatgaatgtttcatgaaaggctaagaacctggaagtcaagattatgtcttatttacctcttatcctcatgataccttgccatccggcactaataaatgttctggaagagtgggtgaatatgtgaaggaatactrtacagaacactgctattccatgccttgattctggtggtttgaataaatacagtggtaagaacactgaaacatgttctgagaattctgaattctaattttgactctatcttaagctggttggttgaccttggacaagtcacttaatattttcactaaaatataatgttaataatacccctgctacatgttttacagaaataagacaaaggagtgga

SEQ ID NO: 200466 - DNA, 385 bp, Homo sapiens
tgaaggtctacaaccaaggcacagggattaatgtttgtcatcccttttcaggtacagaaatgtcacagttggtagtatttttatattcaactgtttcatcaagtcccctaaccttgctgttctcatttggttatctgtaaagtaataaggaaaatgtctatagttctcgaagaagtcaaagcaaagaaataaaattctcagagtcatgaaataacatttactcataatcataattagacataatttttgmggtaaaatcctcagttccaacggcactctgctgggaaactaaaaaatatatattttaaggtacttagaaaattattgctattagcatatttgtttcaggaaaaggaaaaacaaatgaaagaaaatctccttaagt

SEQ ID NO: 200467 - DNA, 462 bp, Homo sapiens
gcaatagcactatgactaaaaaataatgcacattacttaattaaaatactttattgctaaaaaaatgctaacaatcactgagacttcagtgattggtaatcattttgctggtggagggccttgcctcagtgttgctggctgctgactgatcagggtggtggttgctgaagactgaagtggctgtrgcaatttcttaaaaggaaacaacaatgaggtttgccacatcaactgactcttcctttcataaagcatttctctgtagagtgcaatgcagtttgatagcatttttcacacagtagtactttcaaaattagagtcagtcctcttagaccctgccactgctttatcaactaaatttatgtgatatcctaaatattctgttgtcatttcaacaatgtttacagcatgttcattaggaatatttttcatctcaagaaaggattttcataagaaacaagtcgt

SEQ ID NO: 200468 - DNA, 462 bp, Homo sapiens
gcaatagcactatgactaaaaaataatgcacattacttaattaaaatactttattgctaaaaaaatgctaacaatcactgagacttcagtgattggtaatcattttgctggtggagggccttgcctcagtgttgctggctgctgactgatcagggtggtggttgctgaagactgaagtggctgtagcaatwtcttaaaaggaaacaacaatgaggtttgccacatcaactgactcttcctttcataaagcatttctctgtagagtgcaatgcagtttgatagcatttttcacacagtagtactttcaaaattagagtcagtcctcttagaccctgccactgctttatcaactaaatttatgtgatatcctaaatattctgttgtcatttcaacaatgtttacagcatgttcattaggaatatttttcatctcaagaaaggattttcataagaaacaagtcgt

SEQ ID NO: 200469 - DNA, 441 bp, Homo sapiens
tcatagcttattttcacctgtaatttcactcttctctctatccatgtagccatggaaaccatcacaaaatgcctgcattttacaaatcatgktataaattacagaccattacaattgttatgttactgttctcttaagagtgctgcattttcacctatgacaagggttatgactgttattaattccaaaaggatttgtggtagtttggtgtaggattaggtcggttatgccatggtcttcccctcaattagtgtcatgatgagataagtcattattggataattttaatagctgcttttacatttactgtgaaagactatgtctctaattaaggttcttgattatgttctaattttccattaaatattaaacttcacaaaattctcttcagaaatgcaattctacatatctgtgaaatattttctgctaggcactgtgaca

SEQ ID NO: 200470 - DNA, 584 bp, Homo sapiens
taggtatttcatttccgttctgttgtgataaagaggaatgcgatgaagatgatcagaattacctcccattatgagcttgttaatttgtctgctgttattttctaagcattttcttggaacatatccagaattttataaaagagatcatcttccatttcatgctgctacagactgtgaaacaatacctaatttgagataataagtattgcagcttatgtaaacatacatagatacaraacatgctgaaaaatgcacagtcttttaaattcattggcaagtataccaccaaccaagactagacgagatacatttaatgtaggtattcttgcagaaggagagttaaaagtatggaagtacgctaagcatatgttagtatactcattctatcaatcatttcttgaataaagatgtattaagcatccagtatgtatccactgttctaagcagtgaactagaggaacaaaacctctcttttagaggaacttacattgtaagatcagcacacatttgctgaacatctctaagtcttttccccgtacattaattatttttcttcaaaggttatttattgacttaaacatact

SEQ ID NO: 200471 - DNA, 623 bp, Homo sapiens
tgagacaaatgatactttaaaatttatacatgtatgcctggggcttcaggtcctgaaatctaataaaaattttaatgttaaataatttaaaaacaaaaatcatcctcagattaattagagactcaagctaattactctgcacactttattactgcttgcagacaaattgctagcaagtcagcctgttatagctgaagaacgattgcagacactcacagtttggctctttgtaatggagactgtcccattcactagtaataatatttctgctttgttggttagtgaagccagcaacttgtctttgataaaaataactatgctttttcttcaaagcccagcaactcattttttggtaaaaatagcyatgcttttgacttccctctatatgggaacattaaatgttttcaaagaataaaaagaaataatatgcagatttaggtgcttaaaacatttgatttggtgcactctgtggttggtatatttgaatatttggtgtaattgtattaatgaaaatagtagtacattgacataattgtaatttttttaaaaagagtagttttaggaagccatttagtaaaatagtctatgataggcaatatttaatcaaggagagctctttaaaa

SEQ ID NO: 200472 - DNA, 587 bp, Homo sapiens
cagatattctcatttaattataatcagcaaaccttctagccttctctttacccatatatctctccctatcttccttgcaccctataccctcatcacagtcacttatattctctgcaatatttccttattgtatttctgatttcaacagtctagaaaaatccccaaactgggtaaatccaatcatccacttttttggcacttaatttcaagttctgagtacaggtgtaatgattttgctactataaattctgctcttcaacttttttccccccaacttttattttaakttcaggagtacatgtgcaagatgtgcaggtgtgtatggtcttcaatttcatctagactctcctcaataccaagcaagcctagtcagcaatcttcctttcattactatgaccattaaaatcttattgttttatagtttaatagacatatctagtggtcatcttgtttctcttctgtaacttcaacatcttccctgctacagaatcattcccattaaaatttaaataactatactctaactaggagtgtgagctattgctgtagtccctatggatcaagggtcctcaagtgcatctacccaa

SEQ ID NO: 200473 - DNA, 582 bp, Homo sapiens
tagatcttccaaacctagagaaaaatctctaggtttatactttcagattatttcttcttgcttattaacatccttttctgtcagattgaagaactccctttagcatttcttgtaggacaggtctagtgttgatgaaatctctcagcttttgttcatctgggaaggtctttatttcttcttcatgcttaaaagatattctctctaattatmctactctagggtaaaatattttttctttcagccctttaaatatgtgatgacactctctcctggcctgtaagttctccactggaaggtctgctgccagacgtattggagctccattgtatgttatttgtttcttttctcttgttgcttttaggatcttttctttatccttgacctttgggactttgagtattaaatgcctgaggtagtcttctgtgggttaaatttgcttggtgtttcataatcttcatgtactagaatgttgatatctttctctaggtttggaagttctctgatattatccctttgaataaactttctacccctatctttttgtctacctcctttttaagtccaataaattttacatttgcc

SEQ ID NO: 200474 - DNA, 569 bp, Homo sapiens
ctgaaaaacaaagaggtacaacatacttgccaaggacacacagcagctagatattagagccatgattgaaacccaggcattttggttctggagaccacatgcttaagcattatgctttatcactttaagaaatttttcatgagagtcagagctctcagtctaatgggaccacagttgtgaaagaattaacaataataacacacatgagctatatagtagatgctgtagcctgaaggatatatgcttcaaaatgctgggattcctcagctgtcaattcttttcaaaattgctccaaatgaaaagaatcaccttgcccaaagtcagacccctctttaaaatagcccacagaccatgaatgattgatagggaggactaatctgagggcccttcatgttcacaacattccatggagytcactgaggtcttctttgaaactgcatcacagcccagtatttccctctgctcaatcctgcttccttcccttgtcttccataggtgttaatccccagaacgatccctaataaacagcctgcattttaatcgccatctctgataggacagcctgattc

SEQ ID NO: 200475 - DNA, 582 bp, Homo sapiens
tagatcttccaaacctagagaaaaatctctaggtttatactttcagattatttcttcttgcttattaacatccttttctgtcagattgaagaactccctttagcatttcttgtaggacaggtctagtgttgatgaaatctctcagcttttgttcatctgggaaggtctttatttcttcttcatgcttaaaagatattctctctaattatactactctagggtaaaatattttttctttcagccctttaaatatgtgatgacactctctccyggcctgtaagttctccactggaaggtctgctgccagacgtattggagctccattgtatgttatttgtttcttttctcttgttgcttttaggatcttttctttatccttgacctttgggactttgagtattaaatgcctgaggtagtcttctgtgggttaaatttgcttggtgtttcataatcttcatgtactagaatgttgatatctttctctaggtttggaagttctctgatattatccctttgaataaactttctacccctatctttttgtctacctcctttttaagtccaataaattttacatttgcc

SEQ ID NO: 200476 - DNA, 524 bp, Homo sapiens
aggtgtcctttatgtgtgggctgaaaaaaaaaaagttattatcctgaaaagaataacacggtatgagggagttcaccttacatggataaagaaggctgtgttgatgacctcaaaggaaaaggcaacacaagaaactaaatgtttataaggtaatgtcacttcttagtaaagcttgtgtttaagactggaagacggaagacactctttacgtggtgttccagcaatcttgcttgataaaaatgtcttggtataagatcatgaagaaaaagtaagtgtaattattaggatgaaggggagagaactttgctttctaaccagggacctcagccagctggagaacacttgctacacttkactagcaatcactgaactgtgtataatcaatgcccttttgtaatcctgtgatggtgaccaaagcaatactgaaaataactatagttatcactaattatgagtagttatccctccctctgatatttgaaaacatcactgaatattttggattgaataaaccatgcttgata

SEQ ID NO: 200477 - DNA, 606 bp, Homo sapiens
tgatgtgagctttatattagtatgagaaatagtactaactgggccttgcctgtagcttacaggtgataaaggaagaatccagtgtgcatcacaattgraaggctgttcagggttctgaatttctttagctccctttatttttgttaaagtaattatatttaattattttaagaatatactatatatattttcttaattcatgaatttatgtaatgtttattgactacctgttgtctgtgctgtgattctctttgtaactacctgaataggagtaatatgagtgcccagtggaaaaagtagtattgattagtttatatagaacacagactgataattagatggttaatttgggaattatttaattacatgatttttattatatctttagtgttgtaaataagagccaagcaatcacataggatcctatgtgattttccacttacaatagaaaatttaacaaatacttatttggcagccatgagtacattttatgattacctattatgaatgcccaattaaatcctagtagttcttaagatctcacttcatatatcattttagagttatatttcctaccctccaggactgaatacagatatttccatt

SEQ ID NO: 200478 - DNA, 475 bp, Homo sapiens
tgaatattatatagccactaactattgatagactgatttctggattacagagggtcagatattattgttcaaacatgcaaacaagaaaactcatcaaacattcagtccctgatgtctagggtctgtcaaataattagaggagttattttctagaaccaatgtgaaaataaatcaaaatattagaaaataaatgtactatattgaatcatttataaaagtttaaataacataaatataaataggtaaacatcaatatatagatatgtagatataaagagatgcatacattccgaggtaagatatatgctctccttatataaatatatacctaatgcttttcagcattttcagctgataagattctataaaagaayctcattattactcccactgtgttatagaacacattgcccatttctaatacataatagtatagaggacagctaacaaatctgatagtgtgataataagttga

SEQ ID NO: 200479 - DNA, 515 bp, Homo sapiens
actcacggccaggaattctggtttgcaagttctctcacctcgtttggaaacatttaattcattctaacaatctgtctggtgtacagaaagaaaacaatgttctagtgcatcctgccatttctttgaacagccacattccatattttacttctttttttctcattttctatagagttgatgaagcaaagctscccagtggataggagcttgtgatttatatgaaaacaagcactaaaattcaatgtaaatagatacacctttgggaaaactttgggaagctttgagaaagatatcaatcaattatttttttaagtaccaaggttcatctcatgaaaccacacattaaataaaagcctgtgtttttggtttagcgctaatttcaccggaacatcctgtggtgaagagtctatgattattgtgcccatacttcttcagagaaataaaatgaaaaaacagcatccctttaattttttattttataatttctatttgggtctatttggatataatttata

SEQ ID NO: 200480 - DNA, 515 bp, Homo sapiens
actcacggccaggaattctggtttgcaagttctctcacctcgtttggaaacatttaattcattctaacaatctgtctggtgtacagaaagaaaacaatgttctagtgcatcctgccatttctttgaacagccacattccatattttacttctttttttctcattttctatagagttgatgaagcaaagctccccagtggataggagcttgtgatttatatgaaaacaagcactaaaattcaatgtaaatagatacacctttgggaaaactttgggaagctttgagaaagatatcaatcaattatttttttaagtaccaaggttcatctcatgaaaycacacattaaataaaagcctgtgtttttggtttagcgctaatttcaccggaacatcctgtggtgaagagtctatgattattgtgcccatacttcttcagagaaataaaatgaaaaaacagcatccctttaattttttattttataatttctatttgggtctatttggatataatttata

SEQ ID NO: 200481 - DNA, 515 bp, Homo sapiens
actcacggccaggaattctggtttgcaagttctctcacctcgtttggaaacatttaattcattctaacaatctgtctggtgtacagaaagaaaacaatgttctagtgcatcctgccatttctttgaacagccacattccatattttacttctttttttctcattttctatagagttgatgaagcaaagctccccagtggataggagcttgtgatttatatgaaaacaagcactaaaattcaatgtaaatagatacacctttgggaaaactttgggaagctttgagaaagatatcaatcaattatttttttaagtaccaaggttcatctcatgaaaccacacattaaataaaagcctgtgtttttggtttagygctaatttcaccggaacatcctgtggtgaagagtctatgattattgtgcccatacttcttcagagaaataaaatgaaaaaacagcatccctttaattttttattttataatttctatttgggtctatttggatataatttata

SEQ ID NO: 200482 - DNA, 558 bp, Homo sapiens
gatctggtctgtaaatggcaatcagtaactattattcaaatctgaatttaaagacagatggcaatgcatgtttgacttatagggactgcactggcatattacgtggatgaataaaatttcacatataactgccaggcataatttctgcatttatttgctctaaagrcataatcaacaacttgagataggcattccttaagacagtgggaaaagcacagaataagttttattcgattataccaaggccacactaaataaacattcactctaaatgaaaaatgtgttttcattgcagagattttcaaaatcagaccacagtcctcctttcaacaatattgcctactatgatttcctctattatcaaaattatgaatgcatatttgctgaggagtgtgtatgagataatataattgtcatcagatgttagtaaatgcagtaaaatgaacagaattgttagtagtgagttggcaaaatttatctgttgtaactcttatgtcctgagaaacccttgctttttaatcttatttaatagtgtttattttatttaattagttttcc

SEQ ID NO: 200483 - DNA, 558 bp, Homo sapiens
gatctggtctgtaaatggcaatcagtaactattattcaaatctgaatttaaagacagatggcaatgcatgtttgacttatagggactgcactggcatattacgtggatgaataaaatttcacatataactgccaggcataatttctgcatttatttgctctaaagacataatmaacaacttgagataggcattccttaagacagtgggaaaagcacagaataagttttattcgattataccaaggccacactaaataaacattcactctaaatgaaaaatgtgttttcattgcagagattttcaaaatcagaccacagtcctcctttcaacaatattgcctactatgatttcctctattatcaaaattatgaatgcatatttgctgaggagtgtgtatgagataatataattgtcatcagatgttagtaaatgcagtaaaatgaacagaattgttagtagtgagttggcaaaatttatctgttgtaactcttatgtcctgagaaacccttgctttttaatcttatttaatagtgtttattttatttaattagttttcc

SEQ ID NO: 200484 - DNA, 558 bp, Homo sapiens
gatctggtctgtaaatggcaatcagtaactattattcaaatctgaatttaaagacagatggcaatgcatgtttgacttatagggactgcactggcatattacgtggatgaataaaatttcacatataactgccaggcataatttctgcatttatttgctctaaagacataatcaacaacttgagataggcattccttaagacagtgggaaaagcacagaataagttttattcrattataccaaggccacactaaataaacattcactctaaatgaaaaatgtgttttcattgcagagattttcaaaatcagaccacagtcctcctttcaacaatattgcctactatgatttcctctattatcaaaattatgaatgcatatttgctgaggagtgtgtatgagataatataattgtcatcagatgttagtaaatgcagtaaaatgaacagaattgttagtagtgagttggcaaaatttatctgttgtaactcttatgtcctgagaaacccttgctttttaatcttatttaatagtgtttattttatttaattagttttcc

SEQ ID NO: 200485 - DNA, 558 bp, Homo sapiens
gatctggtctgtaaatggcaatcagtaactattattcaaatctgaatttaaagacagatggcaatgcatgtttgacttatagggactgcactggcatattacgtggatgaataaaatttcacatataactgccaggcataatttctgcatttatttgctctaaagacataatcaacaacttgagataggcattccttaagacagtgggaaaagcacagaataagttttattcgattataccaaggccacactaaataaacattcactctaaatgaaaaatgtgttttcattgcagagattttcaaaatcagaccacagtcctcctttcaacaatattgcctactatgatttcctctattatcaaaattatgaatgcatatttgctgaggagtgtrtatgagataatataattgtcatcagatgttagtaaatgcagtaaaatgaacagaattgttagtagtgagttggcaaaatttatctgttgtaactcttatgtcctgagaaacccttgctttttaatcttatttaatagtgtttattttatttaattagttttcc

SEQ ID NO: 200486 - DNA, 476 bp, Homo sapiens
tcctcacagtaagggaaaaatatttcataaagttcaacatattcataacacaaacatttatcttagcaaatcaaaattataggaaaacaacctcatttacaaaagaaaaaaattcactaaaacttcaacagtcattattcatggtcaagtgctgaaagctttaccacagagatgggaatcagaaaagaacacccagtataatcatttctgttcaatgtattttgaagtggctagctaatgtaaattggcaagaataatgtacaaaagtcataaaaactaaaaagtgaaaattttaaaatattgttagttgrtaaatttttaaaaatatgataagaatacaaatcaaaacataactggggaaaaatcaaaaaagtaaaaagcacttaagtgagtcaaatcaaaacgttatctggggaaaaatcaaaaagtaagaggcacataaataggtgaatggataggccatggacctggattgg

SEQ ID NO: 200487 - DNA, 476 bp, Homo sapiens
tcctcacagtaagggaaaaatatttcataaagttcaacatattcataacacaaacatttatcttagcaaatcaaaattataggaaaacaacctcatttacaaaagaaaaaaattcactaaaacttcaacagtcattattcatggtcaagtgctgaaagctttaccacagagatgggaatcagaaaagaacacccagtataatcatttctgttcaatgtattttgaagtggctagctaatgtaaattggcaagaataatgtacaaaagtcataaaaactaaaaagtgaaaattttaaaatattgttagttggtaaatttttwaaaatatgataagaatacaaatcaaaacataactggggaaaaatcaaaaaagtaaaaagcacttaagtgagtcaaatcaaaacgttatctggggaaaaatcaaaaagtaagaggcacataaataggtgaatggataggccatggacctggattgg

SEQ ID NO: 200488 - DNA, 602 bp, Homo sapiens
ttcaactgtgaatttatttgttattgattctatttcatataacagagataattcaggaatctaaacatccagtgaggtgttacagagcagcattaaataaattggcatcagaaagaatacctagatgaggccctccaacagaggttgtcagacaccctatacatgaacggtcctactggcatcaggttggtcccccttgaagtcagaggtcccagaataaggagcagacatgcatctttgctcctctccagcctccttgagtgacacctccaggcatgggagtgaatcagatgaataggacctgaagtgaacccccagaaaactgctgcagccctacagaagagggacctgactattgaaagaaaaacaaacaagcagataggaacaatarcaccatcaacaacaacaacaaaaaggtgtccacaaaaaccccatccaagtgttagcaacctcaaagactgaaactagacaaacacacaaaatgagaaagaatcaatgaaaaaatgctgaaaacccaaaaggccagagtgtctcttctcctccaaatgattgcaacagctctccatcaagggcacaaaactagatggaggatcagatggatg

SEQ ID NO: 200489 - DNA, 639 bp, Homo sapiens
attaactctggttctatgctttttagcagtgtaacttcagggaagttacttaacctccctgagtttcattttcctcacctctaaagtggaaatggtatcattatacaccacacaccactaagtatcactatgggaactgaatgagttagtatatcttagagcagtgactgatacatagtgaacactcagtaaatgttagccattgyttttagatttgaattttcaagtcaacggaatccagaaagactgtgtgtaagctagtgtatttagcaagggcagatgggatacagctaaacaggagcttaaagaaccataaggaaaaatgaactgttaacagttgtagataaaattttgaatcactattgatacaacaaatgactaccagctacctgcttcatgcaaacccgtgtttggtgctgtaattcaagaaaataatgaattccatgaaaattccttcttgcatcccaagctttagttctgaattttaggtttttaactgttcttacaatgttcctatctcacatctcttgcatatcttcttttagtagcattttcagaaagagatcaaacttgttttccaacctggggatgcctttagagctacacataagttatgactgggagagataaagtaaaaac

SEQ ID NO: 200490 - DNA, 488 bp, Homo sapiens
acgatgatgtcaggggtctgtcttcttccatctttaggccttctgtatggtggcataatggcttgcattggcctcataatacttgtctcagaaggagagagagaacttttgtgttttaaagagatggagtctggctatgttgcccaggctggtctcaaacccctgacttcaagggatctgcctgacttggcctcccatagtgctaggattacaggtgtgagccactgcacctggcccctttttagtatttatgtttcaaaatctayggagaagtttgagttgaccttgcttaaactccgtggagatggaagtgggatacggtaagtggccaggctttgagtcatgagcccactttgagcctctaagattaattgtcttactagaactacatgagatgtaggattgatcactttgcaaaaggaagaggtgaggagctggcaacatatttattgtatctggggtgaaattgctatcaaatagtatctagt

SEQ ID NO: 200491 - DNA, 538 bp, Homo sapiens
cagtagaaattagttacattgtacctgtacttacattttcaagtaaaatattgaatcttcctgacaagcactacacctaargcaaaaactttctgctatcacttgcatggttaggtgccaatttcttaaaaacattgcatagtaaatatttcatatttcctgtttgcctgctgctcttcctctttccactttttttctttctctctctctctcttttttttttaagagagagagggttttgttctttcatgcaggctggagttgatgtgcagtggtgtgatcacagctcactgtagcctcaatctcctgggctcaggtgatccctcccacttcagcctcccaagcagccaggaccacaggtgtgcaccaccatgcctggctaatttttgtattttttatagagacagggttttgctatgttgcccaggctgaactcctaggctcaagtgatcctcctgcctccctccaaagtgctgggattacgagtgtgagctactacgcttagctcgactctttcaatatgcacatttttctgagt

SEQ ID NO: 200492 - DNA, 538 bp, Homo sapiens
cagtagaaattagttacattgtacctgtacttacattttcaagtaaaatattgaatcttcctgacaagcactacacctaaagcaaaaactttctgctatcacttgcatggttaggtgccaatttcttaaaaacattgcatagtaaatatttcatatttcctgtttgcctgctgctcttcctctttccactttttttctttctctctctctctyttttttttttaagagagagagggttttgttctttcatgcaggctggagttgatgtgcagtggtgtgatcacagctcactgtagcctcaatctcctgggctcaggtgatccctcccacttcagcctcccaagcagccaggaccacaggtgtgcaccaccatgcctggctaatttttgtattttttatagagacagggttttgctatgttgcccaggctgaactcctaggctcaagtgatcctcctgcctccctccaaagtgctgggattacgagtgtgagctactacgcttagctcgactctttcaatatgcacatttttctgagt

SEQ ID NO: 200493 - DNA, 505 bp, Homo sapiens
agaaattagttacattgtacctgtacttacattttcaagtaaaatattgaatcttcctgacaagcactacacctaaagcaaaaactttctgctatcacttgcatggttaggtgccaatttcttaaaaacattgcatagtaaatatttcatatttcctgtttgcctgctgctcttcctctttccactttttttctttctctctctctctcttttttttttaagagagagagggttttgttctttcatgcaggctggagttgatgtgcagtggtgtgatcacagctcactgtagcctcaatctcctgggctcaggtgatccctcccacttcagcctcccaagcagccaggaccacaggtgtgcaccaccatgcctggctaatttttgtattttttatagagacagggttttgctatgttgcccaggctgaactcytaggctcaagtgatcctcctgcctccctccaaagtgctgggattacgagtgtgagctactacgcttagctcg

SEQ ID NO: 200494 - DNA, 588 bp, Homo sapiens
  misc_feature (1)...(588): n = A,T,C or G
atgactagcaaaccagatttattgcagttttgtttgaaacttcatttttcttatatgacntgattaatgcactctgaacatgaatcagtgtatcctgccctgttctttgttttgaatacatctgtcattttctgcctcacattattttccttgatttcaagtcacttgcttcttattttcaaataaaataatttttaagaatattattctgcttcagtcaatttttgctcagaagaccgctccaacgaacaaccctaaactcttagtggtttatagcaacagaggtttatttcttgctgacaaagtataggctgccagaggctatgactctgtccacagcttggctycacatggcatctgaagatacaacccttatcagggacatgtgttttcctggcagaggggaaagagagcggcggccaaaatgtgatgatttttaaagctttcacttggacgtggttcactttgcttctgttcacatttcatcggttagtgcaagtcacccggccaaactcataaggtatacccactccccaaaggtaactttctgagtcacatagcaagttgggaaagtcctcttactgggaa

SEQ ID NO: 200495 - DNA, 378 bp, Homo sapiens
tgttaagaattccttgctgttattagaaataaaatttcatcattcccaagcaaaatttcccaagcatcaagtcaaatttagccatatttcaatagtatgaatgaggtttacttgtccaaatctctattctaacattcattcatctcataacagttatttttctaaatcaaactggtaatgaactataatagaaattcctgcaattgcacaacaaattttatttttaaacacataattctttttaataagaaaamtggtaagttgtgctaataacttctttagacctgtaagctgaatgcagaatgacctgagagcataacactgcctttttttacaggaagcagattgcatttcatcagaatcattaccactcaatac

SEQ ID NO: 200496 - DNA, 433 bp, Homo sapiens
gttaattctacttcatgacacataatgaaaatatttgcatttagttttttgaagtagactctgtgaaaaatgtcatggatttaattgttaaattcattcgtttatttgccagcgattttacttattgccaatttgtggaactattaaaaggaatagaagacaaggaatttaatggatttgtgccgtttgccaatactctatgattgagttgcagaagagttttacaaggatttatcatactgctgactctgaagattttcttgagaaataaatacttgacaaataatcaaagacaaaaaaatcttkgtgtgatttgtgttttctcaccaatatcacattgcacataaatgagctaaattgaagctccagggaagggaaaaacattttataacctagctggttgttgaaactttcaatacaaatcaataattat

SEQ ID NO: 200497 - DNA, 561 bp, Homo sapiens
tgtttttgtcactttgtaattttagatgacttattttaaagggtagtttgttgcaaaattaaaaacactcccttggggaaagccccagatttgtaagcatactttaaaaaactcaaactaaagttacataataccttttgagcatcagttttcccaactgcttccctttattgtgttctacatctgtatttttaatggtttattatgtctttatgaggtgaaaagagcaatagaaaaaatatttatggtcaatagtttccttatgtgttaaattcttgatacaagtttgatgtctctatatacactggtraaagtgtactcagaccattcagtaataaatgaaaaaaatatataatttaagccttaagatttggagaaaactgatgaaatgggaaatgtagaaacatatgttttggttttttaaaattttattttataagaggaactgattttctctatttgtaatatgagttagtattaaaatttatgaagatcatttaatattccctatacaacatttttttttcttatctcacagttgtgtgggtgagaagtccaggt

SEQ ID NO: 200498 - DNA, 430 bp, Homo sapiens
tgtggtatttctcacctacaatcccaacactttgggaggctgagaccaaaagatcwcctaagcctaggagctcaagatcaggctgggcaagatagcaagatcctgtctccacaaaaatttaaaaacagccaggcattgtggtgcatgcctgtagtctcagctactcaggaggctgagactacaggaccactgaacccaggagttcaaggttgcagtacactatgattgcaccactacactccagtctgggcagcagagcaagaccctctctctcaaaaaaaaaaaaaattccccaaaagaggacctgctccctccaaatagctctctcctccaccacacaagcaaagaacaaagaccatgaatgggacaggaaaaggtagatctagaaagggatgagaaatggctccaaatgccagtgccctgagggtga

SEQ ID NO: 200499 - DNA, 430 bp, Homo sapiens
tgtggtatttctcacctacaatcccaacactttgggaggctgagaccaaaagatcacctaagcctaggagctcaagatcaggctgggcaagatagcaagatccygtctccacaaaaatttaaaaacagccaggcattgtggtgcatgcctgtagtctcagctactcaggaggctgagactacaggaccactgaacccaggagttcaaggttgcagtacactatgattgcaccactacactccagtctgggcagcagagcaagaccctctctctcaaaaaaaaaaaaaattccccaaaagaggacctgctccctccaaatagctctctcctccaccacacaagcaaagaacaaagaccatgaatgggacaggaaaaggtagatctagaaagggatgagaaatggctccaaatgccagtgccctgagggtga

SEQ ID NO: 200500 - DNA, 405 bp, Homo sapiens
agagaaagtgatatatccacaaggaattcaaagcaaaattaaaattaaccaaatgtgtttgtaaaagaaaaaactaaatttattaattcataaagggattgtgttaattcttttacatttcaacagaatattttatttaatcagctgggttttttaagatagaatttatagattattctttccagcactagagttttataaaatctttaagtatatgcttatcaagttaacrttaagaaataaagtacaataaaacaatatattggcaattcatactattactcaaagccagattctgtcttcttatgtagtgattatgtttacagtagctcatttcatatttcaaatttcacagttgttatagaaatgaagaggcaatcaaacattattaaatgtgatataata

SEQ ID NO: 200501 - DNA, 405 bp, Homo sapiens
agagaaagtgatatatccacaaggaattcaaagcaaaattaaaattaaccaaatgtgtttgtaaaagaaaaaactaaatttattaattcataaagggattgtgttaattcttttacatttcaacagaatattttatttaatcagctgggttttttaagatagaatttatagattattctttccagcactagagttttataaaatctttaagtatatgcttatcaagttaacattaagaaataaagtacaataaaacaatatattggcaattcatactattactcaaagccagattctgtcttcttatgtagtgattatgtytacagtagctcatttcatatttcaaatttcacagttgttatagaaatgaagaggcaatcaaacattattaaatgtgatataata

SEQ ID NO: 200502 - DNA, 386 bp, Homo sapiens
ttgttcagtaaatgtttactgacaaaggatgttactttttagaatttttcagcacagaactatgattgctggatgattatgagaattaccttagtaactgggaagtatttggttgccttaggtgcatttttatgctaagatcattaattggtttctctgtcaagttatgtacattttgaggagaatactgttagatttaaatgggttgggtggattcaattttaatagctttagaaaactatgcagttaggagaggaatttggattaggagatcaagatcaaaggaaaagtagattaaaaaaatttttttctccctgtggattacaygatgttcttttgttatttagtgtttctataacctttgcacagaagttttcagatacaaa

SEQ ID NO: 200503 - DNA, 587 bp, Homo sapiens
gccatatccatttttgaggactccagtatataaaaaaaagaagaaatgataaaaatatgaactacgtaaatgacagtatattttaaatgatctatcttattagtctctgtgatgatattattaattcatttggttattgttcatagcattatattccaggacaaatgtcactctctcacttttcactctgtgccccttaatccaacctatgacaaactttgacatagcactataatttttacattagaaaattagggcytctgatatttttgaagaaagaaaaaatagataatcatattactaatgaaagccaaaatgaatgtctgtctcttaagttgttagatatacttgtcattaacccaaaatcaactgagtaggagctgagtatagaaaaaaaaaacagtggaagaaagggtacattccattgatgtggttgtggatctgaaattatttaaagtgtcaacataacactgagacatctaaaaacatgcagttcaagactttgcttataagaaaattccattcaaacatttcttggggaaaacctgaagcttttgaagtgtgatgctaaggaaatcatttatttc

SEQ ID NO: 200504 - DNA, 567 bp, Homo sapiens
atctagaaaatgagaatggtcctagaaatggctgaatcctttcaatggccgtgaaaggattaatttagatactatatttgagagaacgttcctctttcaacaaatttaaagattaaagaggtgagtctgatctgccctgtccttcagcttagaatctagtcatgggaaactgataagcaaagtacagtgtaatatagctgaaaataggtatttatatataataaacaatgagagcccccagatctctactagatgagatttgctacacaactgcaaaagactataatgtactacataattgtttgtaattattccagctccaatagcacagactcacccttgtcaaacaaaacagatagagcatttgtcaggaccaatttcctctacgttctttctaatgagaaactttaamaactaggaaactccaagctgaaatcaaacagtaagtttggtgctggttgaccacatgttgttctttattccctcatttaagcactgtaagtttataggcactagtgagttagatcttgaaccatgttattaatgatcatttgttatacagtttgt

SEQ ID NO: 200505 - DNA, 514 bp, Homo sapiens
aaggatacagtgaatattggagtataaaatggtttattagcttggtttattaactttgcagagttatttgtttattcatagaaaagttgaagattcagtcccacatctaggtacacatgccttagagaattgctttcacctatattcaagtgtacaagattttttcagaggaacattatttataagagtgaacaactgggaataacttagctatccatcactggagaatgtatataaataaattgtggtatacagctatttaatgtcatatgcccaacattgaaaattagtaaatatgagctacatatgttcacaaaaatgaaagcgaggactagaaacttgtgaggataatgttgaacaatgataaagtacatctcaacagaacacacacaaaaagtggatacggaatgatagtatttacatactttcaaatggcaaaataatactctatcttaaggttccattcrtacataggtagtaacaatgtagagaagggcaagggaatggtacttaa

SEQ ID NO: 200506 - DNA, 514 bp, Homo sapiens
aaggatacagtgaatattggagtataaaatggtttattagcttggtttattaactttgcagagttatttgtttattcatagaaaagttgaagattcagtcccacatctaggtacacatgccttagagaattgctttcacctatattcaagtgtacaagattttttcagaggaacattatttataagagtgaacaactgggaataacttagctatccatcactggagaatgtatataaataaattgtggtatacagctatttaatgtcatatgcccaacattgaaaattagtaaatatgagctacatatgttcacaaaaatgaaagcgaggactagaaacttgtgaggataatgttgaacaatgataaagtacatctcaacagaacacacacaaaaagtggatacggaatgatagtatttacatactttcaaatggcaaaataatactctatcttaaggttccattcatacataggtagtaacaatgtagagaarggcaagggaatggtacttaa

SEQ ID NO: 200507 - DNA, 397 bp, Homo sapiens
agttctattggaagaagataccatctagaattttcatggcgagagaggagaagtgacayctggattcaaagcttcaaaggacaggctgactatcttgttagagtctaatgctgcaggtgactttacattgaagccaatgctcatttaccattcagaaaatcctagggcccttaataattgtgctaaatctactctgcctatgttttatcgatggaataaccaagcctggatgatggcactgtcatctgtttactgcatagtctactgaatattttaagcccacttctgaaaactactgctcatttgagaaattcctttcaaaataacactgccattgacaaggcacctggtcacccaagagctctgatggagtgttcaagaagatgaatgttttaat

SEQ ID NO: 200508 - DNA, 266 bp, Homo sapiens
ttcatggcgagagaggagaagtgacacctggattcaaagcttcaaaggacaggctgactatcttgttagagtctaatgctgcaggtgactttacattgaagccaatgctcatttaccattcagaaaatcctagggcccttaataattgtgctaaatctactctgcctaygttttatcgatggaataaccaagcctggatgatggcactgtcatctgtttactgcatagtctactgaatattttaagcccacttctgaaaactactg

SEQ ID NO: 200509 - DNA, 547 bp, Homo sapiens
ttcatggcgagagaggagaagtgacacctggattcaaagcttcaaaggacaggctgactatcttgttagagtctaatgctgcaggtgactttacattgaagccaatgctcatttaccattcagaaaatcctagggcccttaataattgtgctaaatctactctgcctatgttttatcgatggaataaccaagcctggatgatggcactgtcatctgtttacygcatagtctactgaatattttaagcccacttctgaaaactactgctcatttgagaaattcctttcaaaataacactgccattgacaaggcacctggtcacccaagagctctgatggagtgttcaagaagatgaatgttttaattcctgctaagacaacatccattctgcagcccatggatcaaggataaatttcgactttcaaatattatttctgaaacacacttcataaggctattgctgtcacagtgattcctctggtagacctgagcaaagtaaattgaaaaccttctggaaaggattgacattctaaatgccattaagaac

SEQ ID NO: 200510 - DNA, 533 bp, Homo sapiens
tacatttttaaaaagtaatctcaactttaaggyattacaacacaggggttaaaagagtggacaatgaagacatataatctggattcaaatcaaacccagtcactcacttgctgtgtggtctcaagcaagttacttagatgctcttgagagtcagtatccttatctgacaaaggaagatgaaaattatataataatatctttctcatacagtcacagtaaatagttaataaatacattaataagtgaataactgctaactggcatgcagtaagcattcagtaagtgttagctgccatcatcatcattttaaggattaacacagatttcaactttaccactataaataacttaagaatattcctataaatgcaaatttgccctgtcaataagctacaaaattaatgaaaataatattgataagtaataaaattccccacataagaccaaagtagagcaggtatttaaaaactcacgggaccaattgcatttttactttagtttaaaatgttaccctaataaaatacaaatgcaga

SEQ ID NO: 200511 - DNA, 564 bp, Homo sapiens
ctttattgctcatttatttgaatatttttacatttttcaatatagagtggtagttcaagtaaatattcgcatggtaatattaggttagaatgttcagtttaacctgtctacactgtaatttgattgaaacacaggaaacactgtctttggactgatcttgccactgacccaaaacacaacattttgagaaaaaaagtattattagcgacatggagaaactatttttctgcagaactcaacaaataaatttaccactttcttccaaaataaagtctcatgagagtaatggtrttatttattatgaactaaaaatcaattgattataatatttattactacataaatgtatgataatttagtttcacttatattcttaaagtgattgatgaattatagtactatgctaagaaatgccttgaagaaagttggataagagtggtaagttacaagttccatgaacacccatattaaccctaatgaaatagaaacagtgccagtctaaacaggattgataaggcatggatgtgaagtaagcaaagattgccaatattattttggtcttaa

SEQ ID NO: 200512 - DNA, 561 bp, Homo sapiens
ttcacagagtattatgacagctctgagacatatgtagtgtcactgtttgttcagaggtactatgggtccatccctctagatgtcaaaagtaattgcaggtcaggatgaaaaaggagatatttcttgctatgaggattcacctttcaccacctcctagcttactatagctttgttatttcctgattggcagcattgtccaaagcttgtttctaaacttttaagaaatcatagctaaaaagaatatctagaaaaaaaaaatgcctgagttaccagatttaaagcaggccaccatggagaatgtgacccagcaagttcacacagaggccagcaaaacttttgtccctagactcgtttcaattcccraaaaagaaagatgagaattgagaccttggcctttcagtgttttgtgtgtgtgtgtgtgtaaaatcactactgcacatgagcttctataagaatgcacatgtgtgggtcaacttcacaggaacatgcccaggagcccaggggtcataaaagtctggcgctggactgaactcattcactccacctcttgtgtcagtccca

SEQ ID NO: 200513 - DNA, 597 bp, Homo sapiens
ttctatttggttagaaaattgtatggcttatttcctttgtttctatgatatatgagatttaaaaaattttctttatgtctacaatgaaataacacgtaggtggattttgccatcttggcctatggaccctagatgtagatagtcagatagtgggcaaccattctgcacattgtcccccaaaagcaaagaactaaatacacactaagttcaagggaaacagtctgcacaagatcaataaagatttccactttcagacagagtctagaaaccataaccataactcttaattttcattttaaaatataaaagagcaagaaagcattttgggctgatgtatttctcttggttgccttgggaatttcttttccttattaaaacaaaaactaaagacccggcacacacacacacacaaagagtcatgcaggcaatttctgaaactcagtatcattaatatcattaaaatctatatcaaattaaagtctgtgaaatttactgaagaagaagggtcaattcgagcctgctcaaagactgtayattttcctgataatggatttatcatgaattcagatcaaagaatttttgtaaatgataaaaaga

SEQ ID NO: 200514 - DNA, 605 bp, Homo sapiens
tgttgatgtaggaaggtaatattcacttagtggatggatcatttgagtcaagccgggcaataaatggggtgacagatgtcacaacctgcctgtctgcgatttgtgtctgagatttgaatttaggaagtggtcaaaaaccattaggaataagcctgtggaataaggtgagcaatctatttgaagaacattgacaggtatataacaaggrctcagaaaaaatgtgccaaaatgattaactgacttgagtaacctaatggtaaattttgtttcaaacatgtaatctgactatggattacgaggaagaatattacttttagaaaataagttctataagtcatttgctcatttattatactaatgtactttctttggaaaagacttagataagaaaaatttcaaaacatggttaaagcaatgagcactttttagaataagtagacatactgcattatttgatgggtgcctattatgcaccagtgacatgcttttttatttattcctctctgtcacattgcaggtatgcattattatgattacttgacaatacactgaggtttagcaagtgaaatggcttgttgaaagttatagtcaatgacagccctagt

SEQ ID NO: 200515 - DNA, 605 bp, Homo sapiens
tgtctaacataatacacacatgctaagccaatttttggaagtataaatggactcctattaaagacattatggagtagcaaaaatcataaaaaaaaagtcactaatatttaggctatccctttagaaacatgctacttttggctgggcgtgatggctcatgcttgtaattccagcattttgggaggctgagggtaggaggatcacttgagcccagaagtttgagaccagactgggcaacatggtgagaccctgcctctacaaaaagtacaaaaattagttggacatggtgctgcgttcctgtagctccagctattcaagaagctgaaggattaccttagcttgggaggtggaggctgcagtgagcrtgggacgccactgcactccaacctgaaagaccatgtgagaccccttctcaaaaaaaaaaaaaattaaaaagagaaaaagaaacatactattttttccctgacaaaaatttattattaaagtaatataatgctctttgaataaaagaagggagcacatacagataaagtaataacaacattaataataaaagaatagagaggacaggcttcaagatgtctgaatagaagcattttatgctc

SEQ ID NO: 200516 - DNA, 567 bp, Homo sapiens
gccaacataatattgagcaaagaaaaaaaaaaaacaagagttggaggcatcacattccctaacttcaaattatattacaaggttgtagtaaccaaaacaatatggtgttggtataaaaagacacatacaccaatggaacaggatagagagcctagaaataaacctacatatttacagtcaattgatttttgataaagccagcaatatcttacactggggaaaggacatccttttcaataaatggtrttgggaaaattggatacccacatatacagaacatagctagagctctatctctcaccatataaaaaaatcaaacaaatgaactaaagacttaaacataagactcaaaactataaaagtactagcaaaagcctggagaaaactgtcccagacaatgatcaaggcaaaaaaaaattatgactaagacctcagaattataggcaatagaaacaaaaatagaccaaacgggactatattaaattgaaaatctttggcactgcaaagggaacaagcaacatagtgaatacaacctgttaaatggggagaaaatatttgcaaactatt

SEQ ID NO: 200517 - DNA, 567 bp, Homo sapiens
gccaacataatattgagcaaagaaaaaaaaaaaacaagagttggaggcatcacattccctaacttcaaattatattacaaggttgtagtaaccaaaacaatatggtgttggtataaaaagacacatacaccaatggaacaggatagagagcctagaaataaacctacatatttacagtcaattgatttttgataaagccagcaatatcttacactggggaaaggacatccttttcaataaatggtattgggaaaattggatacccacatatacagaacatagctagagctctatctctcaccatataaaaaaatcaaacaaatgaactaaagacttaaacataagactcaaaactmtaaaagtactagcaaaagcctggagaaaactgtcccagacaatgatcaaggcaaaaaaaaattatgactaagacctcagaattataggcaatagaaacaaaaatagaccaaacgggactatattaaattgaaaatctttggcactgcaaagggaacaagcaacatagtgaatacaacctgttaaatggggagaaaatatttgcaaactatt

SEQ ID NO: 200518 - DNA, 572 bp, Homo sapiens
acatcaaagtatttcatgtgaaattaagacatacatcaaatacttagaagtatgtagacattccctggcttccctgagcatttgcataattttctcctcctgtgatctgcaagcactttgagtcytacgacccccatcactgagaatagcggttggctcataagaggtccttagtaaatgaacgattggatgattcctgttcattagatctgcactgaacatgcaagttatgacacgtttacccaattatcttacccctggaattaggttaggcagtaatatcatagcctcatcctcagacaaaaacctaaaagtgattatatattaatgcatgtcgtttctaaggccacaggttgtcagcaacaccagggctggcacttgtcccttgcacgtgcacgaagggcgaccccctgacatttcactgcttggcacaggcagcctgcaccgaaggcccatggcatttagttcccttaaggatgtgcgagctcttaccaccccctcaacccacaaattcagctgagtaattttaccaagttgaccttaaactcactgaggtatgaagagatgtaagg

SEQ ID NO: 200519 - DNA, 379 bp, Homo sapiens
tccctctctctcttcatctttctctggctatgtgaagtgctggctcacccttcaccttccctgcattagtcaagattctctagagggacaggactaataggatatatacatatatatatatatatatatatatatatatatatatatatatatatatatatgcttattaagacatattaaactcacacagtcacaaggtcccacaaaaggctgtctgcaggctgaagagcaaggaagccagtccaagtcccaaagctgaagaactgatgttcaagggtgggaagcatcaagcacaggagaaasatgtgggctgggaggctaggccagtctagcctcttcatgttttcctgcctgctttatatcctggccgtgctggcag

SEQ ID NO: 200520 - DNA, 632 bp, Homo sapiens
gtagtaaatatatatataaatgtaacataagcatataaaataaaatgtggcaattactattcaattaaaaatacagggacatttgggagagcataacaagtaagggagtgaatacgtgctgagataaatacatttttgttacatgagtcaggagttaaaaaaataaatgaaagatgagagattaggatataaagtatatggggtgccagttcatataacactttatattaaaggaatttgagcttttgggtgaaacaatggaagctattgggagttttaaggggattkatatgaaggaggtacaataggagtctatagcactaatctaaagtggtaagtgaatggaagtcaaagctatttagtggagtaggttgaaccaaaattgatgactaaatacatggtgtgtaaaggaaaggaaaagtttaagactgagtcttgggtatctggcatgcatagtatactaacaatgatatacacagttactttcacgcttactgaatgagtagtggtcaatgaaatacagaacaaagtcatgcaattcactttcaagttgtgttcttaaaacttcccatggcacccatgaagatttcaagagtcatttgttattatatcccatcttgactaataccaag

SEQ ID NO: 200521 - DNA, 394 bp, Homo sapiens
aggtttatttgaggggctaagcgtgctggtatttacacacacattacttcttgtgtctcttcaatttattggttcatttcaaaaaaccaaagctaaaaatcataaaatattcattatgtaaaaagaaacaatgttcaatgaatccatacatacatacygaagacctttgtcggatagttgacaagtatatttgcatatatgttttccaaggtaaaagaaaatttgtggctgggcacggcaactcactcctgcaatcccagcatttcgggaggccaaggcaggtggatcagctgaagtcaggcatccaagaccagtctggccaacacggtgaaaccccatctctactaaaaatacaaaaaaaatagctgggcgtggtggctggcacctgtaatcc

SEQ ID NO: 200522 - DNA, 505 bp, Homo sapiens
cttattcaaacttctcttctcttcttcagaggcaaacctgtataatttckttggtttgtttgtttgttttaagacgtagtcttactctgttacccaggctagagtgcagtggtacaatgtgagctcactgcaacctccgcctcccgggttcaagcgattctccggcttcagcatcccaaataactcggattaaacccttataatttctatcatgattgattttgttcatcttcaaattccaataattagaattcctacaggatgtgtgtgtgagtgtgtatctggtttattttctttagcataaataaatatttgagatttagccaaatatttgtgtgtatcatttatttttcctcatatttctgagttgcctatgtatttgtcagagtttgcttattcattagtctgttagtgaatattcagattgctttcagaattagcttttacaaataaaggacttaggtgcattctcaaacaggtttttgtgtaaatatatgctttcatt

SEQ ID NO: 200523 - DNA, 481 bp, Homo sapiens
gtgcttattcaaacttctcttctcttcttcagaggcaaacctgtataatttctttggtttgtttgtttgttttaagacgtagtcttactctgttacccaggctagagtgcagtggtacaatgtgagstcactgcaacctccgcctcccgggttcaagcgattctccggcttcagcatcccaaataactcggattaaacccttataatttctatcatgattgattttgttcatcttcaaattccaataattagaattcctacaggatgtgtgtgtgagtgtgtatctggtttattttctttagcataaataaatatttgagatttagccaaatatttgtgtgtatcatttatttttcctcatatttctgagttgcctatgtatttgtcagagtttgcttattcattagtctgttagtgaatattcagattgctttcagaattagcttttacaaataaaggacttaggtgcattctcaaacag

SEQ ID NO: 200524 - DNA, 489 bp, Homo sapiens
atactattgtgcttattcaaacttctcttctcttcttcagaggcaaacctgtataatttctttggtttgtttgtttgttttaagacgtagtcttactctgttacccaggctagagtgcagtggtacaatgtgagctcactgcaacctccgcctcccgggttcaagcgattctccggcttcagcatcccaaataactcggattaaacccttataatttctatcatgattgattttgttcatcttcaaattccaataattagaattcctacaggatgtgtgtgtgagtgtgtatctggtttattttctttagcataaataaatatttgagatttagccaaatatttgtgtgtatcatttatttttcctcatatttctgagttgcctaygtatttgtcagagtttgcttattcattagtctgttagtgaatattcagattgctttcagaattagcttttacaaataaaggacttaggtgcattctcaaacag

SEQ ID NO: 200525 - DNA, 528 bp, Homo sapiens
ttagagacgaaaaaggggaagctscattaaaattggtaaaggaagaaacataatatgaaaggagggaaataatgaggtaaaagatgcagagactgctttccagacaaagtaagaatgaacttcactttggaataacaaagcagtgcttgcttggcaaggtgagtcttagaatctgactaacatcaacagggcagagtctcaggtaattaacaaaaccaagaaggaacagggagcagcaatgctaaaacacaagaacccaggttactttgtcctacttcatagttgttattttcctaatcattggagataagctatgattaacagaaaaactacccatgtaaaatattgtcacccaacttttaagaaaaacaagaaagaagatacaaaatacaaaacttagcaaacagaataagtaatttcagagaatcagaattaagacaagaaacaaatgtaattacagtaagtgtaattcatatcttcagagacatgcaagaagaggttgcattttagaaaatactgataatagct

SEQ ID NO: 200526 - DNA, 528 bp, Homo sapiens
ttagagacgaaaaaggggaagctgcattaaaattggtaaaggaagaaacataatatgaaaggagggaaataatgaggtaaaagatgcagagactgctttccagacaaagtaagaatgaacttcactttggaataacaaagcagtgcttgcttggcaaggtgagtcttagaatctgactaacatcaacagggcagagtctcaggtaattaacaaaaccargaaggaacagggagcagcaatgctaaaacacaagaacccaggttactttgtcctacttcatagttgttattttcctaatcattggagataagctatgattaacagaaaaactacccatgtaaaatattgtcacccaacttttaagaaaaacaagaaagaagatacaaaatacaaaacttagcaaacagaataagtaatttcagagaatcagaattaagacaagaaacaaatgtaattacagtaagtgtaattcatatcttcagagacatgcaagaagaggttgcattttagaaaatactgataatagct

SEQ ID NO: 200527 - DNA, 597 bp, Homo sapiens
tctgttgtatttgttaatgctgataatgtttttttgttttgtttttgagatagagaaggagatcttagagacgaaaaaggggaagctgcattaaaattggtaaaggaagaaacataatatgaaaggagggaaataatgaggtaaaagatgcagagactgctttccagacaaagtaagaatgaacttcactttggaataacaaagcagtgcttgcttggcaaggtgagtcttagaatctgactaacatcaacagggcagagtctcaggtaattaacaaaaccaagaaggaacagggagcagcaatgctaaaacacaagaamccaggttactttgtcctacttcatagttgttattttcctaatcattggagataagctatgattaacagaaaaactacccatgtaaaatattgtcacccaacttttaagaaaaacaagaaagaagatacaaaatacaaaacttagcaaacagaataagtaatttcagagaatcagaattaagacaagaaacaaatgtaattacagtaagtgtaattcatatcttcagagacatgcaagaagaggttgcattttagaaaatactgataatagctcttgg

SEQ ID NO: 200528 - DNA, 597 bp, Homo sapiens
tctgttgtatttgttaatgctgataatgtttttttgttttgtttttgagatagagaaggagatcttagagacgaaaaaggggaagctgcattaaaattggtaaaggaagaaacataatatgaaaggagggaaataatgaggtaaaagatgcagagactgctttccagacaaagtaagaatgaacttcactttggaataacaaagcagtgcttgcttggcaaggtgagtcttagaatctgactaacatcaacagggcagagtctcaggtaattaacaaaaccaagaaggaacagggagcagcaatgctaaaacacaagaacccaggttactttgtcctacttcatagttgttattttcctaatcattggagataagctatgattaacagaaaaactacccatgtaaaatattgtcacccaacttttaagaaaaacaagaaagaagatacaaaatacaaaacttagcaaacagaataagtaattwcagagaatcagaattaagacaagaaacaaatgtaattacagtaagtgtaattcatatcttcagagacatgcaagaagaggttgcattttagaaaatactgataatagctcttgg

SEQ ID NO: 200529 - DNA, 516 bp, Homo sapiens
tatgaaaggagggaaataatgaggtaaaagatgcagagactgctttccagacaaagtaagaatgaacttcactttggaataacaaagcagtgcttgcttggcaaggtgagtcttagaatctgactaacatcaacagggcagagtctcaggtaattaacaaaaccaagaaggaacagggagcagcaatgctaaaacacaagaacccaggttactttgtcctacttcatagttgttattttcctaatcattggagataagctatgattaacagaaaaactacccatgtaaaatattgtcacccaacttttaagaaaaacaagaaagaagatacaaaatacaaaacttagcaaacagaataagtaatttcagagaatcagaattaagacaagaaacaaatgtaattacagtaagtgtaattcatatcttcagagacatgcaagaagaggttgcattttagaaaatactgataatagctcttggattaaaaactcaacagatgytctgaagagaacaata

SEQ ID NO: 200530 - DNA, 414 bp, Homo sapiens
taaaatcaaatagaagtggtacaaactatagtmagagatacagagtataaaaataagagtaaaaaacagaaattgagagattaaaaacatctaaaaattttctaaacatagaacttaggcaaagaatagtaatacccatgtaatggttatttctaagaacaaaaattaaaataataatattaattatttgagcatgaaggtaaaaggataagaagtttatattgataatagacttcttgatagcaacattttatacaggatgataatcaagaaatggtttaatgattatgaaacagataacacagtagtgagatgagattttattcatccaaactatgaatcatgtctaaggaatgtagaacatcatgaatatttatgattttaaaaaacattgttcctgcgatggctttttta

SEQ ID NO: 200531 - DNA, 414 bp, Homo sapiens
taaaatcaaatagaagtggtacaaactatagtcagagatacagagtataaaaataagagtaaaaaacagaaattgagagattaaaaacatctaaaaattttctaaacataraacttaggcaaagaatagtaatacccatgtaatggttatttctaagaacaaaaattaaaataataatattaattatttgagcatgaaggtaaaaggataagaagtttatattgataatagacttcttgatagcaacattttatacaggatgataatcaagaaatggtttaatgattatgaaacagataacacagtagtgagatgagattttattcatccaaactatgaatcatgtctaaggaatgtagaacatcatgaatatttatgattttaaaaaacattgttcctgcgatggctttttta

SEQ ID NO: 200532 - DNA, 414 bp, Homo sapiens
taaaatcaaatagaagtggtacaaactatagtcagagatacagagtataaaaataagagtaaaaaacagaaattgagagattaaaaacatctaaaaattttctaaacatagaacttaggcaaagaatagtaatacccatgtaatggttatttctaagaacaaaaattaaaataataatattaattatttgagcatgaaggtaaaaggataagaagtttatattgataatagacttcttgatagcaacattttatacaggatgataatcaagaaatggtttaatgattatgaaacagataacacagtagygagatgagattttattcatccaaactatgaatcatgtctaaggaatgtagaacatcatgaatatttatgattttaaaaaacattgttcctgcgatggctttttta

SEQ ID NO: 200533 - DNA, 555 bp, Homo sapiens
ggttcatttaattaagccatagttgttacttcgagtataattaattagtgaaggtatattgcttttatgggatataattaataggaaaataggttactgctctgtagcatagttataatttaaatgctgtggctttatagaatttaaaggtagggtctgtttattattaattatgcctcccatcatctagctcatgtgaggtagctctggaacagcacattatttatgtttgctaataatttattttagatataatggttggttaggaaggagttcayggtgaagaaggtagatgtcacaaaaacatgcctgaaatggtgatggagaagacgaatccatgtatttattcatttaataaattatgttgtcattcaagcaaataaaaatagtctttaccctgaacattcatataaaaatatctgttgtataattaatcgtgtgcttctgaataaaatggatgaaagcatagtttacattataagcattaattcattaaaatttaccctgaacattgttatttggttttattagcaagaaatatagcacttggaatgg

SEQ ID NO: 200534 - DNA, 555 bp, Homo sapiens
ggttcatttaattaagccatagttgttacttcgagtataattaattagtgaaggtatattgcttttatgggatataattaataggaaaataggttactgctctgtagcatagttataatttaaatgctgtggctttatagaatttaaaggtagggtctgtttattattaattatgcctcccatcatctagctcatgtgaggtagctctggaacagcacattatttatgtttgctaataatttattttagatataatggttggttaggaaggagttcacggtgaagaaggtagatgtcacaaaaacatgcctgaaatggtgatggagaagacgaatccrtgtatttattcatttaataaattatgttgtcattcaagcaaataaaaatagtctttaccctgaacattcatataaaaatatctgttgtataattaatcgtgtgcttctgaataaaatggatgaaagcatagtttacattataagcattaattcattaaaatttaccctgaacattgttatttggttttattagcaagaaatatagcacttggaatgg

SEQ ID NO: 200535 - DNA, 570 bp, Homo sapiens
aaactgtcataaaaataaaactgtactttcaaatagctgtagtccacagcacagctctaacccaaattgtcatttcagctgcttcacattattagaaaatacttaccttctagctttgaacatgaaagaaaagtactcttagtctatcagtttccctaactaggagattcatgtatttgttggggtcatataaagaaactgatagtgcaatttaataaggataatgcagagagggtttggagactctttgcaaagctgttgaagggatgagaaagaacacaagagactgcagtaacctttggttagagtgatttttatcacccctagtttgaaagggccagtggcaragcaagtttactaactttaggataaagtagactcatcaggaaaagagcaaccacctaagcttaagggacaaagccaatcacccgtgggaagccagtgttaaaattacttgatcttgctctctgctttcctgagaatacaaatcattcactttaactcattgaattcactcagcagtcagaagaaaaggaagcctcttgttggaattcatactaagaagatcag

SEQ ID NO: 200536 - DNA, 570 bp, Homo sapiens
aaactgtcataaaaataaaactgtactttcaaatagctgtagtccacagcacagctctaacccaaattgtcatttcagctgcttcacattattagaaaatacttaccttctagctttgaacatgaaagaaaagtactcttagtctatcagtttccctaactaggagattcatgtatttgttggggtcatataaagaaactgatagtgcaatttaataaggataatgcagagagggtttggagactctttgcaaagctgttgaagggatgagaaagaacacaagagactgcagtaacctttggttagagtgatttttatcacccctagtttgaaagggccagtggcagagcaagtttactaactttaggataaagtagactcatcaggaaaagagcaaccacctaagcttaagggacaaagccaatcacccgtgggaagccagtgttaaaawtacttgatcttgctctctgctttcctgagaatacaaatcattcactttaactcattgaattcactcagcagtcagaagaaaaggaagcctcttgttggaattcatactaagaagatcag

SEQ ID NO: 200537 - DNA, 595 bp, Homo sapiens
tcatttgacctcatttattttactatgcaagagtatgcttaaaaatatttcagccttctttttactatatatgcaattagtcattatttattgagatattatatatccatcattacttcartgatctcatttttagctttcctctttattaatggatgcagtaacttctggcattcccctgagaatattaattctacttatttggaagtactctttttattgctctctgctgtctttcttttgtattttatgcatctttcatttgctttatgttattttaaatcttaccctatgcacttacaatgatggcacttctctgaatgactgttgattttcttcctttctttctttttttcatgttgtctacattttttttttcaaggtgagtttctgctagactgttattactgagcaatcctttggtggagaaggaggttcatgctgctaccggccacaatttgcctcatttgcagtcagatcaggctttttgtcagagagaggacatgcccattaggcaatatgtattcagatatttccaactgatcactgccctttctttctgattcaaattccccttctcaatatatttatctaa

SEQ ID NO: 200538 - DNA, 595 bp, Homo sapiens
tcatttgacctcatttattttactatgcaagagtatgcttaaaaatatttcagccttctttttactatatatgcaattagtcattatttattgagatattatatatccatcattacttcaatgatctcatttttagctttcctctttattaatggatrcagtaacttctggcattcccctgagaatattaattctacttatttggaagtactctttttattgctctctgctgtctttcttttgtattttatgcatctttcatttgctttatgttattttaaatcttaccctatgcacttacaatgatggcacttctctgaatgactgttgattttcttcctttctttctttttttcatgttgtctacattttttttttcaaggtgagtttctgctagactgttattactgagcaatcctttggtggagaaggaggttcatgctgctaccggccacaatttgcctcatttgcagtcagatcaggctttttgtcagagagaggacatgcccattaggcaatatgtattcagatatttccaactgatcactgccctttctttctgattcaaattccccttctcaatatatttatctaa

SEQ ID NO: 200539 - DNA, 595 bp, Homo sapiens
tcatttgacctcatttattttactatgcaagagtatgcttaaaaatatttcagccttctttttactatatatgcaattagtcattatttattgagatattatatatccatcattacttcaatgatctcatttttagctttcctctttattaatggatgcagtaacttctggcattcccctgagaatattaattctacttatttggaagtactctttttattgctctctgctgtctttcttttgtattttatgcatctttcatttgctttatgttattttaaatcttaccctatgcacttacaatgatggcacttctctgaatgactgttgattttcttcctttctttctttttttcatgttgtctacattttttttttcaaggtgagtttctgctagactgttattactgagcaatcctttggtggagaaggaggttcatgctgctaccggccacaatttgcctcatttgcagtcagatcaggctttttgtcagagagasgacatgcccattaggcaatatgtattcagatatttccaactgatcactgccctttctttctgattcaaattccccttctcaatatatttatctaa

SEQ ID NO: 200540 - DNA, 290 bp, Homo sapiens
gaggacttcccatattgaatcaataatattaacagtatcaatctgccactaataattatttaagaaaagtatttttctgctttcagttttatttattaaatagtttctrctagcctaatgttaaagtctgccaactagttccttcaagttaatcacattcacttttgattccctcttaacacattaagatattttatcactctgggagtttaaaatctgatgcaaattcattgtggtcaggcaagatgcaagaccagtcaggcaaatacacttcccttattttttatggg

SEQ ID NO: 200541 - DNA, 290 bp, Homo sapiens
gaggacttcccatattgaatcaataatattaacagtatcaatctgccactaataattatttaagaaaagtatttttctgctttcagttttatttattaaatagtttctactagcctaatgttaaagtctgccaactagttccttcaagttaatcacattcacttttgattccctcttaacacattaagatattttatmactctgggagtttaaaatctgatgcaaattcattgtggtcaggcaagatgcaagaccagtcaggcaaatacacttcccttattttttatggg

SEQ ID NO: 200542 - DNA, 290 bp, Homo sapiens
gaggacttcccatattgaatcaataatattaacagtatcaatctgccactaataattatttaagaaaagtatttttctgctttcagttttatttattaaatagtttctactagcctaatgttaaagtctgccaactagttccttcaagttaatcacattcacttttgattccctcttaacacattaagatattttatcactctgkgagtttaaaatctgatgcaaattcattgtggtcaggcaagatgcaagaccagtcaggcaaatacacttcccttattttttatggg

SEQ ID NO: 200543 - DNA, 290 bp, Homo sapiens
gaggacttcccatattgaatcaataatattaacagtatcaatctgccactaataattatttaagaaaagtatttttctgctttcagttttatttattaaatagtttctactagcctaatgttaaagtctgccaactagttccttcaagttaatcacattcacttttgattccctcttaacacattaagatattttatcactctgggagtttaaaatctgatgcaaattcattgtggtcaggcaagatgcaagaccagtcrggcaaatacacttcccttattttttatggg

SEQ ID NO: 200544 - DNA, 505 bp, Homo sapiens
actttggcatattgatttttttgagttaaagacacttgaaaaacagcagatgcaagaaaagcactctgattttcctttttcttaaaagyaggaggtaaaatttctacatgaaagttgccctctttatacaagaaggaaagtaacagtctcatcacccaggatgagaagttgaggcaagggaaacctgtacaaacagaccttgttaaaccaacccttatcctgttaatcaactcttcacccaattaactacactagttccagctcctttgtcttgtcatatttcacaatttactactctgtgtctacttcagaacataagtgattatgtcattgagccttccttaaagaatctctcatgccacataatacatgtattaaataaatttgtatgcattttcctgttgatctgtcttatatcaatttaattctcaggcttagcagagggggaaaaaaaaactaagaagatggtaataaaattttgcttcccctaccatcccatctgtgt

SEQ ID NO: 200545 - DNA, 505 bp, Homo sapiens
actttggcatattgatttttttgagttaaagacacttgaaaaacagcagatgcaagaaaagcactctgattttcctttttcttaaaagcaggaggtaaaatttctacatgaaagttgccctctttatacaagaaggaaagtaacagtctcatcacccaggatgagaagttgaggcaagggaaacctgtacaaacakaccttgttaaaccaacccttatcctgttaatcaactcttcacccaattaactacactagttccagctcctttgtcttgtcatatttcacaatttactactctgtgtctacttcagaacataagtgattatgtcattgagccttccttaaagaatctctcatgccacataatacatgtattaaataaatttgtatgcattttcctgttgatctgtcttatatcaatttaattctcaggcttagcagagggggaaaaaaaaactaagaagatggtaataaaattttgcttcccctaccatcccatctgtgt

SEQ ID NO: 200546 - DNA, 505 bp, Homo sapiens
actttggcatattgatttttttgagttaaagacacttgaaaaacagcagatgcaagaaaagcactctgattttcctttttcttaaaagcaggaggtaaaatttctacatgaaagttgccctctttatacaagaaggaaagtaacagtctcatcacccaggatgagaagttgaggcaagggaaacctgtacaaacagaccttgttaaaccaacccttatcctgttaatcamctcttcacccaattaactacactagttccagctcctttgtcttgtcatatttcacaatttactactctgtgtctacttcagaacataagtgattatgtcattgagccttccttaaagaatctctcatgccacataatacatgtattaaataaatttgtatgcattttcctgttgatctgtcttatatcaatttaattctcaggcttagcagagggggaaaaaaaaactaagaagatggtaataaaattttgcttcccctaccatcccatctgtgt

SEQ ID NO: 200547 - DNA, 505 bp, Homo sapiens
actttggcatattgatttttttgagttaaagacacttgaaaaacagcagatgcaagaaaagcactctgattttcctttttcttaaaagcaggaggtaaaatttctacatgaaagttgccctctttatacaagaaggaaagtaacagtctcatcacccaggatgagaagttgaggcaagggaaacctgtacaaacagaccttgttaaaccaacccttatcctgttaatcaactcttcacccaattaactacactagttccagctcctttgtsttgtcatatttcacaatttactactctgtgtctacttcagaacataagtgattatgtcattgagccttccttaaagaatctctcatgccacataatacatgtattaaataaatttgtatgcattttcctgttgatctgtcttatatcaatttaattctcaggcttagcagagggggaaaaaaaaactaagaagatggtaataaaattttgcttcccctaccatcccatctgtgt

SEQ ID NO: 200548 - DNA, 371 bp, Homo sapiens
acacacaaaaatataactttagtgaagtagatccatatgttatcaaatagcttaaaactaactttaaaaaaaaaaaagtcaatgtgactacttaaaaattytgttcagataattgcagggataccagtttgaaataatctgacttaaaatcatacatttatgtacataaaaataaatttggtatcaatgaaaacactaaaaactagaaaacaatctaacttctgaaattattctaaaatagtataagaatatattttatatatgcttgtaggaagggctctttaaaagtgtgacgcaattcataaaggaaaaaatgtttaaagataaatactgattaattgattattaagccagattcaggtaaccctact

SEQ ID NO: 200549 - DNA, 371 bp, Homo sapiens
acacacaaaaatataactttagtgaagtagatccatatgttatcaaatagcttaaaactaactttaaaaaaaaaaaagtcaatgtgactacttaaaaattctgttcagataattgcagggataccagtttgaaataatctgacttaaaatcatacatttatgtacataaaaataaatttggtatcaatgaaaacactaaaaactagaaaacaatctaacttctgaaattattctaaaatagtataagaatatattttatatatgcttgtaggaagggctctttaaaagtgtgacrcaattcataaaggaaaaaatgtttaaagataaatactgattaattgattattaagccagattcaggtaaccctact

SEQ ID NO: 200550 - DNA, 363 bp, Homo sapiens
actgtcacgtgttcttatacacataaagccctggaaacaggagccacagcacatcatgcactggggccatatggggaagtaccagagtcagtgaaggcaaaaggagcaagactaaagcatgagccagagcctttaatatggttttccttggaaggaatgagtgagacagtgtaagcagctgagcaggtttaagactgggtagtgtgagtrctttttgtgtaatttagtccctagtgttccagcacctgattctgaggtgatgaaagcagagggataatgtcccagaccacaggagccatataataagagtcaagtgagggtgtggattctggattggttggtttgcatataaataacatgctc

SEQ ID NO: 200551 - DNA, 363 bp, Homo sapiens
actgtcacgtgttcttatacacataaagccctggaaacaggagccacagcacatcatgcactggggccatatggggaagtaccagagtcagtgaaggcaaaaggagcaagactaaagcatgagccagagcctttaatatggttttccttggaaggaatgagtgagacagtgtaagcagctgagcaggtttaagactgggtagtgtgagtgctttttgtgtaatttagtccctagtgttccagcacctgattctgrggtgatgaaagcagagggataatgtcccagaccacaggagccatataataagagtcaagtgagggtgtggattctggattggttggtttgcatataaataacatgctc

SEQ ID NO: 200552 - DNA, 363 bp, Homo sapiens
actgtcacgtgttcttatacacataaagccctggaaacaggagccacagcacatcatgcactggggccatatggggaagtaccagagtcagtgaaggcaaaaggagcaagactaaagcatgagccagagcctttaatatggttttccttggaaggaatgagtgagacagtgtaagcagctgagcaggtttaagactgggtagtgtgagtgctttttgtgtaatttagtccctagtgttccagcacctgattctgaggtgaygaaagcagagggataatgtcccagaccacaggagccatataataagagtcaagtgagggtgtggattctggattggttggtttgcatataaataacatgctc

SEQ ID NO: 200553 - DNA, 336 bp, Homo sapiens
attctgaggtgatgaaagcagagggataatgtcccagaccacaggagccatataataagagtcaagtgagggtgtggattctggattggttggtttgcatataaataacatgctcataggcaagttgtttagtatttctagaaattagctaaccctaggaggagcactctgtcttgaaacccatatggtctcaagatgtcaaagcaaaacaaaaacaataaccatgattaatacagcaagatggaataagctatatattgccttaaggaagaagttacttggctctctatggctgatcstcataacctgtaagatttgttctcttgacttgagttg

SEQ ID NO: 200554 - DNA, 475 bp, Homo sapiens
gaatttcatattggaataactggaactaatttgcttaytcattaaattgtgtccaagtgtagtctctgaattatatcaattagggaacaagaaggcatacttaaaaagagctgaattaacagtgcaaataaagtaaccactgtggatatttttgaaaattctagtgttaattttgttagtcaatgcaatggaaatacatcagtagcatagtaataaaaaagtatttctttttatagcatctttgataattataaaattaataaatatttattatttaaaaaacggaataattcctacatcattaaaatcacaagtaactccactgtctaattacaacaactattgcggtcttgatgtattttcttatcattttatttatttatcattgatatcttaggtgagtattaaaatatagcctgacattattttatgattaatagtttatttaaaatatattatatgattaagtgtctat

SEQ ID NO: 200555 - DNA, 475 bp, Homo sapiens
gaatttcatattggaataactggaactaatttgcttactcattaaattgtgtccaagtgtagtctctgaattatatcaattagggaacaagaaggcatacttaaaaagagctgaattaacagtgcaaataaagtaaccactgtggatayttttgaaaattctagtgttaattttgttagtcaatgcaatggaaatacatcagtagcatagtaataaaaaagtatttctttttatagcatctttgataattataaaattaataaatatttattatttaaaaaacggaataattcctacatcattaaaatcacaagtaactccactgtctaattacaacaactattgcggtcttgatgtattttcttatcattttatttatttatcattgatatcttaggtgagtattaaaatatagcctgacattattttatgattaatagtttatttaaaatatattatatgattaagtgtctat

SEQ ID NO: 200556 - DNA, 403 bp, Homo sapiens
tagtggaacctcatgggagcrttcatacaccaaggcctcatttgctatttctgctccctgaaaatatgttctctcaattatgctcttggctcattctctcataaccattcattgtattcagatgataccacccagtgagacttgcagcaaccatcttgttcagtatccagcacctcttgtgcccagaactctctattcccctcctttgccacattttttagaatagaacttaaaccatctggcatacaacacatgatactttgtggtattaattactgtttttctcccaacactggaacaacagctttatgaagccaagacattctgaatgttattttcactattttttccccagtccctagaaatgggcctagaatatacatagtagatgctcaataatttg

SEQ ID NO: 200557 - DNA, 403 bp, Homo sapiens
tagtggaacctcatgggagcattcatacaccaaggcctcatttgctatttctgctccctgaaaatatgttctctcaattatgctcttggctcattctctcataaccattcattgtattcagatgataccacccagtgagacttgcagcaaccatcttgttcagtatccagcacctcttgtgcccagaactctctattcccctyctttgccacattttttagaatagaacttaaaccatctggcatacaacacatgatactttgtggtattaattactgtttttctcccaacactggaacaacagctttatgaagccaagacattctgaatgttattttcactattttttccccagtccctagaaatgggcctagaatatacatagtagatgctcaataatttg

SEQ ID NO: 200558 - DNA, 403 bp, Homo sapiens
tagtggaacctcatgggagcattcatacaccaaggcctcatttgctatttctgctccctgaaaatatgttctctcaattatgctcttggctcattctctcataaccattcattgtattcagatgataccacccagtgagacttgcagcaaccatcttgttcagtatccagcacctcttgtgcccagaactctctattcccctcctttgccacattttttagaatagaacttaaaccatctggcatacaacacatgatactttgtggtattaattactgtttttctcccaacactggaacaacagctytatgaagccaagacattctgaatgttattttcactattttttccccagtccctagaaatgggcctagaatatacatagtagatgctcaataatttg

SEQ ID NO: 200559 - DNA, 504 bp, Homo sapiens
tgtcatttctaccaggaacgggaagcctgtggcctttagcctctgaaaatcttatctgttataattgctactctagagattgactgaacaaaaacaatagatgtcttaaacaccacttgtgctaaacccagggcttaaataatttccagcaaactatatgtatattttttctgaattcaaatttaacacacactctatgtagaaaacttgaaaaatayggaaaagccaaagaagaaattgaaaatcactgtaattacactattaacaacatgttatatgtatgtatgtgtatatttgtgtgtgaagatttgtgaatatgtttacattataaacataacatgtaaaggtatgttatatatttctataaatgtatagtttttgtattcatattatatatttatatgtaaatatatatgtacatatttagaattttattatacatatttttattagtgataaactttggattgtattataaaagctatctcactttaattgttaata

SEQ ID NO: 200560 - DNA, 554 bp, Homo sapiens
acctcccattacaactagttcaagtatatgagattccatttctggtccatattactcattttgctttcttgggctctgatcctctctcgtattttcatgtttcctatttgtatttgttaggggcttttctctcctttacaaaattgggtagtcatgcttctccagtaaccttggtgagtcagttcaacctctaattacttcagtctccttgcctgcaagaaaagcagtcaaactacacgaacactctattgttttgcatyatttcacacgtacacagggataaggagggaaataattctcccaatgaagcagaaccaccggtaacagctggcacaacttctaaagacccagtctgtcttgaaaaacagccgcaaattgtccctaaataataattaccccacctgtatcaggactatctcactgactagctgcacttcatgacacaatacctgctattaactctcagcatggatataaacattgccataatattttttaaaaccaacaatgtatcatttgcacattaggacaacagaatgttagttaaggcacag

SEQ ID NO: 200561 - DNA, 521 bp, Homo sapiens
actgtttttatcatcatgaattttttgtatgttttactgtctgggaggctagtaagtgccctccttctgactcttgtcatttaacattttattggctgatctttctattcttcccaaaaagaagtgttgaacttaggagaaaaaaaattaaaactgttccttccagaaggaatttttcttctaatttttgaaaaaaatctatataaatgtgttggggatagctgtttatggcattttcccatctgagaatatyacacacatatataattaagatgttattttatgtccctgaaaagaatgtaataatactctgaatattttgataatatatggatatacaatgactatgcatttttggatatttaatattttaaaatttgaataatcaatgagatatggcctttctcatgtaccctaccagagagttactgataaatagcaagagtactagttgtcacacatttatttttcatctggatatatgagcaaattaccttggtttaaatagtactttattctct

SEQ ID NO: 200562 - DNA, 311 bp, Homo sapiens
cgaatgtcttaaaattcagtatttttttgaatgcagaaaggtattgagtggaattactatacattaaatagctcagtttccgttccttatctgttgatgggtttttttttataactagctgggattggacaataaaagtagtatatgttatagtttcataaatacattaaactggggattggaaacttctagttccagccctggcattaagtcgtatgttgcctagaataaattayttcaattttctgagatttctttttctatctgtacacagccagccttccatatccatgggttccatatccatgcat

SEQ ID NO: 200563 - DNA, 448 bp, Homo sapiens
aaatctcacacattaaatgaccacacacattattagttaactttgcctcaaatagcatctctagccttctcaacccttgtatttttcatttgttttaaattctaactacccttaaactgtatataccctctacttatttcctggttgactcttccctctcagccttcaatcttgtctccaagtcattggcagtcrgtaaactgttctcgtgtctttagccagcttcttcccctctaagcacagtttattcttatgagaagtccttctttccaggacagaaagaccagttcaagcctcacaaaatgaaaatgttgcctctcacctgctatcgtttcccatatgtgtgctatttgttttattttccaatattttgcttgccagttctttactgcaaaattcagaggagaatgttctgcacttgagtagggtttatgagataactgaattc

SEQ ID NO: 200564 - DNA, 643 bp, Homo sapiens
aaatgtacaaatccagcaagcagaaaatcagaacatagctgaattcaatgactccatcaaccaactggatatatttgacatctgctgaatataattgacattaactgtatataattcacaaacgacttttttcaacaacaacaacaaaaacagaatcagtcttctaaagctcacataaaacttttaccaagataaacatttgggaccataaaacacatgttaacaaatttaaaagagtagaaattatacagtgtatgctaagaccacaatagaattatacaagaaataactaacrgaaagatagctaaaataaatccccaaatactaagagattaaacacatatctaaacaacacatggatcagaaaagaaatctcaagagagttttgaaaagattttgagctaaatgaaaatgaaaatataacttatcaaaggggatatagcaaaagtagtttgtacagaaaaatttgtagaatggaatgcatatattagaaaataagaaatagctaaaatcaataagcttccattttagaaaacttgaaaaagaagagcagcttaaatccaaagtaagcagaagaaaataaataataacaatcagagcagaaataaatgaaatggaacacaggaaatcagtagagaaatta

SEQ ID NO: 200565 - DNA, 643 bp, Homo sapiens
aaatgtacaaatccagcaagcagaaaatcagaacatagctgaattcaatgactccatcaaccaactggatatatttgacatctgctgaatataattgacattaactgtatataattcacaaacgacttttttcaacaacaacaacaaaaacagaatcagtcttctaaagctcacataaaacttttaccaagataaacatttgggaccataaaacacatgttaacaaatttaaaagagtagaaattatacagtgtatgctaagaccacaatagaattatacaagaaataactaacggaaagatagctaaaataaatccccaaatactaagagattaaacacatatctaaacaacacatggatcagaaaagaaatctcaagagagttttgaaaagattttgagctaaatgaaaatgaaaatataacktatcaaaggggatatagcaaaagtagtttgtacagaaaaatttgtagaatggaatgcatatattagaaaataagaaatagctaaaatcaataagcttccattttagaaaacttgaaaaagaagagcagcttaaatccaaagtaagcagaagaaaataaataataacaatcagagcagaaataaatgaaatggaacacaggaaatcagtagagaaatta

SEQ ID NO: 200566 - DNA, 606 bp, Homo sapiens
ttatgttcatataaaaacttgcgcacagatgtgtatagcagctatattcataatcagcccaatttggatgcgatcaagatatacttcagtggataggtggataaactgtcgtacatcccaatatggaatgttattcaatgctaaaaagatacgagctatcaagccattagatggcatggtgaaaagttaagtatatattactaagcaaaagragccaaattgaaaagtctatatactgtatgattccaccaacatgacattctggaaaagtcaaaagacatcatctatggagatgataaaaaaggatcagtggtttccaggggtcacagggagggatggctgaagaggcagaacatggagaacttttagggcagtgaaactaggctgtaagatactgcaatggtggattcatgtcatcccacagttatgaaaattcatagaatatacaacaagagtgaatcctaatgtaaactatggactttggatgataataatgtgtcagtgtaagttcatctattatgacaaatgtacccctctggtgggggatgtcaatagtgagtgagtgagattgtgcgtgaatgggtacaggggccatgtataggagaa

SEQ ID NO: 200567 - DNA, 606 bp, Homo sapiens
ttatgttcatataaaaacttgcgcacagatgtgtatagcagctatattcataatcagcccaatttggatgcgatcaagatatacttcagtggataggtggataaactgtcgtacatcccaatatggaatgttattcaatgctaaaaagatacgagctatcaagccattagatggcatggtgaaaagttaagtatatattactaagcaaaaggagccaaattgaaaagtctatatactgtatgattccaccaacatgacattctggaaaagtcaaaagrcatcatctatggagatgataaaaaaggatcagtggtttccaggggtcacagggagggatggctgaagaggcagaacatggagaacttttagggcagtgaaactaggctgtaagatactgcaatggtggattcatgtcatcccacagttatgaaaattcatagaatatacaacaagagtgaatcctaatgtaaactatggactttggatgataataatgtgtcagtgtaagttcatctattatgacaaatgtacccctctggtgggggatgtcaatagtgagtgagtgagattgtgcgtgaatgggtacaggggccatgtataggagaa

SEQ ID NO: 200568 - DNA, 416 bp, Homo sapiens
ctgggaggaaacacacacacatacaccctcacacacacacacacatccctgacccctatccccacaaaaaaaaaagaacctcaagaaattggtagctaatgaaaaattagccattaataggttttacaaatctgtacccaaagttataattttttaaaagcaactgaatgtcttgagattaaaacaggacagatttgaaactggaagaaggttctgacaaaataaaatcaacttcttgctttcttctgtaagaagttttgcctattgaaaactatttctaatattgtatttaaaagccatrttaatgaaagactttacaaaatttactgaataattaacatttagtaataattattcttcctcttattaatctgaatgaactcacctatttatgaattactcgtgaaaatacttaa

SEQ ID NO: 200569 - DNA, 434 bp, Homo sapiens
attttttgttgttgtacaacataatgctgtaatatacttcttttgatatgcatatacatagtgaagtgattaccacagtcaatatatatgaaataaaaaartaatacatttcctttttatgctgatgggaattatttgtggagggctaaacattgataatgcaggaaagacagaagaattattggaataatcttgattgggggagaaataagagatttagtgcatgagtggagaaactggccttagactcagagattgttcatttatatagcagatggggaggcgcaaggtgtttggacaagactaggtgaggcgataagccaatggtgggagcttgtggacgttctcttcagattgctcttatagtctcagcgaatgtggaagcaaggacagttgtgaaagtcggattcaaaggaaatgttagaattactaag

SEQ ID NO: 200570 - DNA, 635 bp, Homo sapiens
gacaatccaaatggcagaactggcaggcaagcccaggcaatctggcctgagtcctgtctctttcctggccgtgctgatgggcaaggatggccgccgtgtggaggagagaacctggagccatctctgagtacccttcctgactacaatgcagagggcgccgcctcccacccagccccaccctggcccagctccaaccacttcctgcaggacctgagatagtggtgcgcggcttctctgatcacgtagacagcacagagccaagtgccacagacccccagactcacctgagccgagcccaacagccccctaccatggcccgtgtgcttcctctccaaatgctctcctgaatctccagccccaaaagcatcagggctgtgagcgtgggtggggggtggggagatggaaggtccaccaggaactgcyggagggtgggcctggcaatcccaagacaggcaggtttgccttgcctcccacatgcaaaatatggttccctgaatgggattctgtttccagcttcctgtccctgcccctgattgtggccagaatagtctcagagccactcaacagtggacttccctagactccagccagggggaaaagactattgttttcttttctctgcaggcagccaagga

SEQ ID NO: 200571 - DNA, 561 bp, Homo sapiens
cacatgggtgtttcttaggcatttgcatttgctatattatcctctgtgtttttctgtttaaaaagatttcagagtttaaaaaatggcccaaggaatttccctggaaagacagatatattttatatggtttttcaatctatgacctcatttgtattgaagtgactctgttttctatgtttcttattaaaacaatacrtcagacactattcactctattcattaatccaatgatttattcactcagcaaacatttatttagtgtccattataaaaaaaggtaccattctacatgataggggatacctaccagctaaaaagacaagactccctacttcaatgagtatattatctgttataaaaaagaacatatacattcaaatagctcctgagcacttaagtatttagaaattatatgccataaaactacatcaccataatgcacctatttttattagtatgtggccagtatcactgtaaaataaaattggagccataaatacaatatcagctctttcatatctcagcagttgtcaaggtctaaaaaagtaactgcagaaaaga

SEQ ID NO: 200572 - DNA, 554 bp, Homo sapiens
agttgcattctatatgtttcaatattgtgttttctttttatatggtctcaaagtatttgctgatatccctgaagactttgcatttaacccactcatttagaagtataatgttcaatttccacacatttgtaagttttgcaaattgccttttttattaatttttattttgattgtattttggcctgacaacatactttgtatcattttaatctgtttacatgcattaaaatttactctatggcctaatacatgatttatcctgaataatgtttcttgtgaaagttaaagaacatgcatcctrtatttgcaaggtgaagttacttttattagatttgcatgatttagccttttttactattctatttctttgtacctcttctgtctagttgttgcatctttattcgagtggggtaatgacatctctaactactgttgaattatatatttctcctttcaattctgtcagactttatttgatttattttattgttgtggttagtttcatacactattataattgatgtgcttcctaatagattaatcagtttctcatt

SEQ ID NO: 200573 - DNA, 554 bp, Homo sapiens
agttgcattctatatgtttcaatattgtgttttctttttatatggtctcaaagtatttgctgatatccctgaagactttgcatttaacccactcatttagaagtataatgttcaatttccacacatttgtaagttttgcaaattgccttttttattaatttttattttgattgtattttggcctgacaacatactttgtatcattttaatctgtttacatgcattaaaatttactctatggcctaatacatgatttatcctgaataatgtttcttgtgaaagttaaagaacatgcatcctgtatttgcaaggtgaagttacttttattagatttgcrtgatttagccttttttactattctatttctttgtacctcttctgtctagttgttgcatctttattcgagtggggtaatgacatctctaactactgttgaattatatatttctcctttcaattctgtcagactttatttgatttattttattgttgtggttagtttcatacactattataattgatgtgcttcctaatagattaatcagtttctcatt

SEQ ID NO: 200574 - DNA, 554 bp, Homo sapiens
agttgcattctatatgtttcaatattgtgttttctttttatatggtctcaaagtatttgctgatatccctgaagactttgcatttaacccactcatttagaagtataatgttcaatttccacacatttgtaagttttgcaaattgccttttttattaatttttattttgattgtattttggcctgacaacatactttgtatcattttaatctgtttacatgcattaaaatttactctatggcctaatacatgatttatcctgaataatgtttcttgtgaaagttaaagaacatgcatcctgtatttgcaaggtgaagttacttttattagatttgcatgatttagccttttttactattctatttctttgtacctcttctgtctagttgttgcatctttattcgagtrgggtaatgacatctctaactactgttgaattatatatttctcctttcaattctgtcagactttatttgatttattttattgttgtggttagtttcatacactattataattgatgtgcttcctaatagattaatcagtttctcatt

SEQ ID NO: 200575 - DNA, 620 bp, Homo sapiens
gttgaggctggacagtggtattataaaccatttgggcctctagattcgaggaagagggatgagaggcagtgactaaagaagaagaggacatagaataacccaaaaaagaagttaggctgcttcataattaaaggaaaaaaaacttaactttcttagcttccaccggatctttgtaaaattaaatattccaaccaggcaaagatggtttaaatagttggcaaagcaaagttacaagtcatgtttcttatacacgcaaatggtttaggcccttggccgggaacaaaagagmgtagcaaaagctatactgacttacatttatttttcatattttgaggtggaatatcagcagattatccattcaagaaaaatgttttcctttaatatgtgtgtaaactggcctgtgcctgagaattagcaatgagacttagaatggtatgtgaatagatgcatttcctccaagagttacctgctagaaaccaggtaacttgtcactctccctgagtgtagagagaccccgaggtgaccttgcttgggatgtcaactgccttgttccaaagaattttgaaaatctgcctgtgcagaggatctaatcttgtgaagttctctgtgcaagcagaggg

SEQ ID NO: 200576 - DNA, 597 bp, Homo sapiens
tgggcaccgaatcccaacttggcgcctgtttctctcagttgctgaattgataatgtatctggaaatataatgcatgggaagctgtggcattacaacaataacttacttttgtggtactttataattttcaaactgagtttattcagaagtgggctatcatatctcaggccatttcttgttaatttgaacagtaacatttcaatcattgctgattcacagaactttaatagtgtagggtgtctaaggaccatttattttaaatctccctgtgttacagatgacgaaattcggaagcttaaaagtgatttgctcaagggcaaataacaaattagagacaaaattgaaccacatgagagcccaggagccctttcagatatgatgttgcctatacaaaaatcttaacytcagtttaagtaaagcaattattaaaacaattatgcagtaaagatctaaatgttatatttgttgagtcatgcattgagcactataaaaaagatactttgattctcttcaacttcagtgatgcagtccttatcctatataccataataattttgaaagtaatgaattaatttacattaacttagagaactttta

SEQ ID NO: 200577 - DNA, 427 bp, Homo sapiens
ccatccccataattcaatcacctcctactgggttcctcccacaacatgtgggaattgtaggagttaaaattcaagatgagatttgggtggggacacagccaaaccatatcagagaccaatggccagatttattaaaattctgagaarcattattctccagtgccttcttctgacttaaggtcagttcctctttgattaagatactttactaatagagcaaaatggcaaagtatgcaacttcaaattcacatccatcatagaaacttttttttaaaagcagaaattgccaaaacaactttgtcagagccctggataatagtcaaactttaatggccactaaaaaaaagtgtaataaaaaaggaactcaagaataaaaatttctgtcaaaacactagctaaaagcaagctaagaaacagagactttatg

SEQ ID NO: 200578 - DNA, 480 bp, Homo sapiens
tatctgcaggttcaatgttatttctgttaaaccaccaccatcattttcacagaatcaaaaaaactaaactttatatggaaccaaaaaagggcctgaatagccaaagaatcctaagcaaaaagaataaagctgaaggtatcgtattatccgatttcaaactatactaaaaggctatactaacaaaaacaacatggtactgttaacaaaagcagaaacatagaaccattgaacagaatagagaactcagaaataaatccatacacctgcaaccaactgatctttaacacagttgacaaaaataaacaatgggraaacaactcccaattcaataaatggtgctgagaaaactggctaaccatacacagaaaaatgaaactggacccttatctctcacccagataaaaaatttactcaagatgtattaacagtgtaaatgcaagacctcaaactataaaaatcctggaagaaaatccaagaaat

SEQ ID NO: 200579 - DNA, 503 bp, Homo sapiens
gcttgattttatatgttttagggagacataaggcatcaatcaatatatgtaakgtacacatttgtttggtcctgaaaggtgggaaaattcaaaatgggtgagggagtgattttcttattggcaattgcttgaaagaattaagtttttatctaaagacctggaatcaatagaaagaagtatccaggctagaataagggcttgtagagaccaaggttcttattatgtagatgaagtctcacaggtggccactcttagaggcaatagatggcaaatgttttctattcagacctttaaaaatgtgctagactctcagctaatttctttaggatcagaaaaagacctggaaagggaaagagattctctacagaatataaatttctcccttggcagggcaatttaagagtatctcaaagaaatatattttggggtaaaatatttttatttctttcagggcctgctatctgttatgtgatgctatactagagtcggattggaatttggta

SEQ ID NO: 200580 - DNA, 541 bp, Homo sapiens
ttcccaaacttggctggccctcagggccatccccagacctcctgaacaggccaacaaattcagcagggtaaagcaaccaggggcccaggccacaaatcttaggaggctattgcttcagggtcttgcaagtgcagggtctgctcctgagaacgggggctccttgaacttttcaccctaggctcctctcttattccacctttgtctcagcccagctcctgagaaaaatctgtgtgtgtgtgctttgaatctgtatttcaaccagtgcccaagtccagtgcccaggccagggttttgtacccactgccctataggagtactagtggggcctgtctaagctctcctggatattcggaataaggagagagaacagggtttccaagaagtagttccccacttttgggacgtggtagaggggacacattctttgcctcctccagcctcracatgaagccctggaggtggtgatggtttgatggatgccagagcagctgacacctgcaaggctcagcattccatctccctggagaagcccgccttcccc

SEQ ID NO: 200581 - DNA, 509 bp, Homo sapiens
  misc_feature (1)...(509): n = A,T,C or G
nnnnnnnnnnnnnnnnnnnnnnnnnnnnnnnnnnacttcttgctaccaaatgatcagacacactgaagtcctttctcagtgtatcccggtacatagtctagaatgttttctttttaagtgattaaagaaatggacatttttatgtctagtaggctttatttataatgtaactacactagaagccaaaatattttaccattcagtttaatactaaatacctagaattgccatttaaatattcattgtgaattctaccctttagcaccgtaacagaaccctctttggaatgtttyatgcttttgactatgaattctaatttttctgccataaatacagctatccctattttagttattgcaacttacctgacatatctctgcttattcttagaactttttggatcactttgttttatgtttgtacccagaactgatagaggatgggagtaactgcttctaggatttctctttactccttgcagcacacagcattttttgctctcccctgaa

SEQ ID NO: 200582 - DNA, 592 bp, Homo sapiens
atgaataacataaagagtggggagatatgtaaaacattagacttttttatgtgatcaaatttaatttgctatcagcttagagtgttataagatattttgtgtaaattcatgataaccataaagaaaatacctataaaggacacacacacacagagaaagagagaaatgaatcagtatggcactactaaaaagattaaaagaagcagaaaaagaggaacaaaggaaaaaaagacctacaaaaaaggcagaaaatgacactagtaagtctaaccctatcaataattactttaaatcgaaataaactaaattccccaatcagaagacacagaatagctcaattaataaaaaataaataaaataaaactaagaaaaaaaaggcctaaatgctgtctacaaaaaactcactttagatttaagaacacataattaagctgaagtgatagagaaaatatcccgtttaactgataacaaaaasaaagcaagggtggctacatgtatatcagaaaaaaagtagactttaaatgagaaattttcacaaaataaggaagtgtattatataaatattaaagcatcaattcagcaggaaaatata

SEQ ID NO: 200583 - DNA, 477 bp, Homo sapiens
ttctttaaatggaaatttgtattatcttctaaatttaaaaagtctcaagtaacaatagattttgacaaatattcatgtgttaaattataattgaaccctcacagatattctctcagtggaacatccactagaaccaggcattttgagtgcatgaaataaaataaacatataatacacatttcactgttgcataaagtgtcaaaacagtagttcatatttatatgtcatctcggagcaccttaaactgctaactttcaggatcttaattagagattcaaaagagacagttcatttattttattattttgtagaaaccactagtatatttagcatcaggaaaaatctcagaaaagcttaaaattaaataaaagacaaatatgtttataaaaagaaaaayggctgccaaataatgcatttctatagcatgtttacaattcaaaacccatcacataaatatagttctacaaatgtaacccc

SEQ ID NO: 200584 - DNA, 365 bp, Homo sapiens
taaatcaaacttgtattattatttgaatctggacttttgtcaacaattgcaattttagtgcattttgtgttgctgtaataggatacctaaagctaggtaacttataaagaaaagaggtttatttggttcatggttctgcaggctgggatgtggttgtaaaagcatgatgtgggcatctgcttggcttcttgtgagggccatgtgctgggtaaaaatatattaaagaaggtcaaaggggaagmagatatgtgcaaaagtcaaaacctgaagggcatcctggcttcctaacaaccctctatgggaaccaatccatttccctgagaaatgaacccatgtcaccagaatgagaactcctggcttattac

SEQ ID NO: 200585 - DNA, 680 bp, Homo sapiens
actttcctgtgatgagtcttcataatagttatacacttgacccagtattttcatttctaggagtttctctcctaaaagggaggaaaaaatatattttatcagtatatgcaatgatgtttgttgcatagtaattaacaaaatacaaggaaaaatgaagtaaatatttcaaaggaagaaatggttaaatatagtagtatatatctatatgatgaactataaaaaaaggattgggaaatgaagatttaaaataattttatgaaataaaatatagtgtcacgtgaaaaagcaagacaaaacatatacatattatacatacgacactatatttatgtgtttatattattttaaaagttccatacacctttacacacacacacacttagatattagaataacatgcatgcacacacagatgctcattgaatttgagtactaatctattaaactcctaatgattttttagctgtgcaaattaagccaaaactgttctcagtctgtattactagtgtttccacattataatgtagaatgcagtatctagaaagttatcataggcttttcaagctttacactgcattgatattttttcaaaagtgtaaaatatatttaattgtaccttccatgcttaataggtcaatatttcytaaaactttaccattttccatattctctcttttctg

SEQ ID NO: 200586 - DNA, 616 bp, Homo sapiens
tgatttgagcatttctgaaaatggctaatgactacatcttcaataaaagaacagttacctattcacataaaataaaaggccagaactgaaattaattgagaaatgccaaatgtatctttaaaatgtatccagatggttttcgttaaggatttaattatcatgtggatcaatgatggataacaacgtgtataatcactaatgtactcaacctcataaatatrttaaaacatgtaatactacttcattaatgattactaattattaaatctgtaaaaagaattattagaaacttaaatgccactaataagcaatctaatatacacataggagcaagaaaaacaaaccaggaaatatatctttattaatttgctgatagcttggtgaaggactagtaaaggtagttattatctatttgatctttgcttaggacagagaaagagtatacaagaagactataggtgacactggtttagcaatattgctggagaatcaatcagggcaaccttttttcatgtgtgtgtttgtgtgtgtgtgtgtgtgtagacaccacaaatttctgtggagaattaaattcctaacacatgaggtttaaattgcagtaaaatatctgattaaa

SEQ ID NO: 200587 - DNA, 616 bp, Homo sapiens
tgatttgagcatttctgaaaatggctaatgactacatcttcaataaaagaacagttacctattcacataaaataaaaggccagaactgaaattaattgagaaatgccaaatgtatctttaaaatgtatccagatggttttcgttaaggatttaattatcatgtggatcaatgatggataacaacgtgtataatcactaatgtactcaacctcataaatatgttaaaacatgtaatactacttcattaatgattactaattattaaatctgtaaaaagwattattagaaacttaaatgccactaataagcaatctaatatacacataggagcaagaaaaacaaaccaggaaatatatctttattaatttgctgatagcttggtgaaggactagtaaaggtagttattatctatttgatctttgcttaggacagagaaagagtatacaagaagactataggtgacactggtttagcaatattgctggagaatcaatcagggcaaccttttttcatgtgtgtgtttgtgtgtgtgtgtgtgtgtagacaccacaaatttctgtggagaattaaattcctaacacatgaggtttaaattgcagtaaaatatctgattaaa

SEQ ID NO: 200588 - DNA, 599 bp, Homo sapiens
ttgtatacctataaatttacccatgccagctgatctgaagagcccagaagaaaagtgactcatggaagaatgtagcatccacatcctgatgatttcatcccctctaccatgaccaatcgacaaccccaattttccagccccttgccctgaatggtccccttaaacactcttgctcagaaagcataagaatgatataatggactttggagatagggggtatggtgggargaaagtgagtaataaaagactatatactatgtacagtgtacactgctcaggtgacaggtgcaccaaaatctcaggaatcatgactaaataacatctatgtaaccaaaaaccacctgtatgccaaaatctgttgaaattttaaattaaaaaaattcttgtccagaacctgttagcaaaatggatttgaggcttgagaattgttcccatttccttgtttggcaccttgtgatcattaaactctttctctacagcaaactccactatcagtgtattaatctgttgctacacagcaagcatatgaacttggcatccctgatacagttctgacctcatgaactaattaatccatcaattggttaatggaaaaattg

SEQ ID NO: 200589 - DNA, 599 bp, Homo sapiens
ttgtatacctataaatttacccatgccagctgatctgaagagcccagaagaaaagtgactcatggaagaatgtagcatccacatcctgatgatttcatcccctctaccatgaccaatcgacaaccccaattttccagccccttgccctgaatggtccccttaaacactcttgctcagaaagcataagaatgatataatggactttggagatagggggtatggtgggaagaawgtgagtaataaaagactatatactatgtacagtgtacactgctcaggtgacaggtgcaccaaaatctcaggaatcatgactaaataacatctatgtaaccaaaaaccacctgtatgccaaaatctgttgaaattttaaattaaaaaaattcttgtccagaacctgttagcaaaatggatttgaggcttgagaattgttcccatttccttgtttggcaccttgtgatcattaaactctttctctacagcaaactccactatcagtgtattaatctgttgctacacagcaagcatatgaacttggcatccctgatacagttctgacctcatgaactaattaatccatcaattggttaatggaaaaattg

SEQ ID NO: 200590 - DNA, 482 bp, Homo sapiens
tagtggaaaggatatggagattggagtgtatggggttgagttatatccctgaaaatcttggacaaactgtagcttctctgtttatattttcccatgtctctaactcctctcagttccaggctttgctagagctgaaacaacaacaaaatcaaaaatcagctggacatttaataaaatgctatcagcatatacaaaaatttgattatagtgaaagaacttcagtcaggtctttagcctttgcttaatcatgaattaatatgttgctcgttgtacacatcatgacatttcacctttgggcatcttaaattttgtatttctgaaaattgggatttggagtaagttgattatacttaactaggaataagaaccaaatcactaataaaatttttcaacatgcccaccccacctcccttctttctcaaaaagtcatagaggttatgttawttaatttggactgggtgggattaggatatacatacact

SEQ ID NO: 200591 - DNA, 527 bp, Homo sapiens
aaaaagttagaagctttttcaatcattaaacatttacctattatgtgatccaacgattttactctgacttattttccaaagaagaatgaaggcacattttcatacaaaggaatacacatgatgttcacagatgtttcatttttagtagcaaaaaactagaaacacagaggtccaatgacatggggataaataaacgcattttgacccatttatatgatgaaatactgttaagagaattgagtgaattcatgatagatacaacaagatgaataaatttcaaaaaaattatattgagagaaataagtcagacaaaaacgtatatgtactatattattaaatttatgtaaaattctaggaattgcaacaattgtattgtgatggaaaataggtcagtggttgcctgggtaggaaggatgaaaaggaaagatwaaaaaattacaaaaaggcatgagaaaacgttagggtatattctctatgttgaacatgctctctgtcttgattgtggtgatggcttcatgagcaaatac

SEQ ID NO: 200592 - DNA, 496 bp, Homo sapiens
atctattagttctataaactttctcttgagagtgaagtagtaaatatttttgttttttcaggccatatgttaatagttacagtatattataactattaaactctgctgttatagtgaaaacagccagagacaatatataaataaatggacaatactaccttccagtaaactttctttaaacaaacaggctggatttcatcaatgagcagcactgtgcccatccttgccatagagtcaaataatattcagaagtaaagttttaatcattggcttcataaacattctatttatgtatattcatgttattgagaaagtgagctctgttttttaaaaaacgtattacatgcaattttagtgttggcaagattttccagtatcaagtgttttaactatgaaaataaggtaaatgggtatagaagcggcaagttccaacytggactttaaaattgactctattccctgaaatatgaatgttttcatcttctgtactcttctg

SEQ ID NO: 200593 - DNA, 610 bp, Homo sapiens
ctagcttatgactcgttgagaaggagctgacccaaatcggactcgttaaatatgtgagtattctgcttagtgttggcaggtgcaaggaacacatggttttcttactgcattttttttttcctctagatacagttgtatccagacaagttctctgtcagccatcgtggaaggcttgagaagagtaaggctcatggcaaaaatgagtaacttaggacaatagacaggggaaatgcaaggaactttgtgtttaaaaccatcaaaccactaaatcaagcattcccgatacctaacctggctttggaggttctattatgtgagaaatataaaactggaagtatgtgtgtgagagagtatttctgtctatatgaattaaaattatcttcgttctctctctctctctttcttttgacagggtctcactctattgcccaggcaggggtgctgtggtgcaatcacggctcactgcagcctctacctcccagcctaaagcaatccacccacctcagcctcctgaggagctgggatcacagggatatgccaccacattgctgatttttaaactttttgtagagtcagggtctcaycatgttgcccaggctggtctcgaatt

SEQ ID NO: 200594 - DNA, 502 bp, Homo sapiens
tagaatatacagtcttctcattgtcaatgcacttagtgtaaaatcactcacataatcagaaataaaacactcctcagaaaatgcaaaagaactgaaattataacaaagtctcccagaccacagcacaatcacattagaactcaagactaagaaattctctcaaaaccttacaattacatggaaattgaaaagcctactcctgaatgacttttgagtaaataatgaaattaagacagaaatcaagaagtttgttgaaatgattgagaacaaagatacaacacactagaatctctgggacacaactaaggtagtgttaagagtgaaatttatagcactaaatgcccacatcaaaaaagtagaaagaactctattaacaaaccaacattacaactaaaagaactagagaaccaagataaactgaacttcaaaggtagcagaagacaataaataacsaatatctgagctgaactgaaggagactgagacacaaaataatttaaaag

SEQ ID NO: 200595 - DNA, 439 bp, Homo sapiens
cctgtctgactccaaagtctgtagaattccgttttaaacatagtatatttgagaagattcctaactaagaacattataaatacaagcaagtttatgaagaaaaccttaaaacttcattaaatagatgacatgtataaagtttatgcaggcaagatacaactataactcaggggcagtattaatgttgataatgaaagcgttttcagcatggcatagggakgcatttagtagtgtccaaggaggagctgaatggagatatccacaaactcctagctgctatctgaggagacaggatgtggattgtgctgccagcttacgagggactttcactattgttttgacttactgctgaggtcaaagtgactcgggtgctgaaggctataggacagaaaccacaccatgggtttccagtgacgttattggtgatgccttcaggaat

SEQ ID NO: 200596 - DNA, 439 bp, Homo sapiens
cctgtctgactccaaagtctgtagaattccgttttaaacatagtatatttgagaagattcctaactaagaacattataaatacaagcaagtttatgaagaaaaccttaaaacttcattaaatagatgacatgtataaagtttatgcaggcaagatacaactataactcaggggcagtattaatgttgataatgaaagcgttttcagcatggcatagggaggcatttagtagtgtccaaggaggagctgaatggagatatccacaaactcctagctgctatctgaggagayaggatgtggattgtgctgccagcttacgagggactttcactattgttttgacttactgctgaggtcaaagtgactcgggtgctgaaggctataggacagaaaccacaccatgggtttccagtgacgttattggtgatgccttcaggaat

SEQ ID NO: 200597 - DNA, 439 bp, Homo sapiens
cctgtctgactccaaagtctgtagaattccgttttaaacatagtatatttgagaagattcctaactaagaacattataaatacaagcaagtttatgaagaaaaccttaaaacttcattaaatagatgacatgtataaagtttatgcaggcaagatacaactataactcaggggcagtattaatgttgataatgaaagcgttttcagcatggcatagggaggcatttagtagtgtccaaggaggagctgaatggagatatccacaaactcctagctgctatctgaggagacaggatgtggattgtgytgccagcttacgagggactttcactattgttttgacttactgctgaggtcaaagtgactcgggtgctgaaggctataggacagaaaccacaccatgggtttccagtgacgttattggtgatgccttcaggaat

SEQ ID NO: 200598 - DNA, 439 bp, Homo sapiens
cctgtctgactccaaagtctgtagaattccgttttaaacatagtatatttgagaagattcctaactaagaacattataaatacaagcaagtttatgaagaaaaccttaaaacttcattaaatagatgacatgtataaagtttatgcaggcaagatacaactataactcaggggcagtattaatgttgataatgaaagcgttttcagcatggcatagggaggcatttagtagtgtccaaggaggagctgaatggagatatccacaaactcctagctgctatctgaggagacaggatgtggattgtgctgccagcttacgagggactttcactattgttttgacttactgctgaggtcaaagtgactcgggtgctgaaggctataggacagaaaccacaccatgggtttccagtgamgttattggtgatgccttcaggaat

SEQ ID NO: 200599 - DNA, 447 bp, Homo sapiens
ttatctgctactacctgaagaattaccaaagccactgtaaactytacaaagaaaagtgggccgggtgcagtggctcatgcatgtaatcccagcactttgagaggccgaagtggatggatcacgaggtcaggagttcaaggccagcctggccaagatggtgaaaccctgtctctactaaaaatacaaaaaaaaaaaaaactagccagacgtggtggcgggagcttgtaattacagctactcgggagggtgaggcagagagttgcttgaacttgggaggaacttgggaggaacttgcagtgagctgatatcatgccactgcactccagcctggcaacagagtcagactccatttcccacccatccaaaaaaaaaaaaaaaaaaaaaagaagagtgtaaaaaggcatgtcacaaaaaaatatggatgtattacaaagctagcattctaga

SEQ ID NO: 200600 - DNA, 441 bp, Homo sapiens
gtagtagcctgttatctgctactacctgaagaattaccaaagccactgtaaactctacaaagaaaagtgggccgggtgcagtggctcatgcatgtaatcccagcactttgagaggccgaagtggatggatcacgaggtcaggagttcaaggccagcctggccaagatggtgaaaccctgtctctactaaaaatacaaaaaaaaaaaaaactagccagacgtggtggckggagcttgtaattacagctactcgggagggtgaggcagagagttgcttgaacttgggaggaacttgggaggaacttgcagtgagctgatatcatgccactgcactccagcctggcaacagagtcagactccatttcccacccatccaaaaaaaaaaaaaaaaaaaaaagaagagtgtaaaaaggcatgtcacaaaaaaatatggatgtattac

SEQ ID NO: 200601 - DNA, 402 bp, Homo sapiens
ccaaagccactgtaaactctacaaagaaaagtgggccgggtgcagtggctcatgcatgtaatcccagcactttgagaggccgaagtggatggatcacgaggtcaggagttcaaggccagcctggccaagatggtgaaaccctgtctctactaaaaatacaaaaaaaaaaaaaactagccagacgtggtggcgggagcttgtaattacagctactcgggagggtgaggcagagagttgcttgaacttgggaggaamttgggaggaacttgcagtgagctgatatcatgccactgcactccagcctggcaacagagtcagactccatttcccacccatccaaaaaaaaaaaaaaaaaaaaaagaagagtgtaaaaaggcatgtcacaaaaaaatatggatgtat

SEQ ID NO: 200602 - DNA, 594 bp, Homo sapiens
tttcttggagcacggtgacaaatttggaatcataaagctattaaagttttctgttccatggcatataaggggttactctgggcttgacaggaaaaggcacctgaggtccctagttagagacttatccaaagctgactccaggatagaccaagtggcatttccaaatgtatttgttcagaatcctggcgcctgggtctagcgggtgaaatgctaacctggcagtcagtagctggtgctcttgcatgttgtcttgtgggttttttaagatctggaaattgaaagcatgtgatatcaaaaagaagccgctaatctctataagcgaagagatgtgtttatttttcctttgactcccagaacgctgcctgccccagaagctctggttacacaattcctacctgacaggtaaagcttcggaaacttctgagactcacagaagcagcagaaaaatcaagtagacttgccttcccccaagagtcagaaagttgtataaacatcttgggctgggcygatcccatagccgatggaactggtttaaccaggtgcttctgcctgaacgccagtctgggagaacaacactgcctttgatctcagtgt

SEQ ID NO: 200603 - DNA, 406 bp, Homo sapiens
agatctagtagaaggaacctcaagatattcttgaatgtaggtgttattttttggctgtgtccccacccaaaatctcatcttgaattgtaatcccctgtaatccttatgtgtcaagggtgggaccaggtggaggtaatcggatcaygggggcagtttctgccatgctgttctcgtgacagtgagtgagttctcatgagatttgatggttttgcaagcgtctggcatttctcctacactcattctcctgccaccctgtgaagaggtgccttctgccatgattgtaagtttcctgaggcctccccagccatgcagaattgtgagtctcttttctttataaatgacccagccttgggtatttcgtcatagcagtgtgagaatgtactaatacagtaggccgttcctaact

SEQ ID NO: 200604 - DNA, 557 bp, Homo sapiens
aaggaatgtgattatggggtctgagtcacattacaggcacttataacctaggcagctataacttttgtttctctgattgtggattagccttattcctcacctacattgtgttgtaaaatgtaaattactaaagggtgccagggaagaccctgctgataaagacatacctgagcctggataatttagaaaggaaagaggtttaattgactcacagtttcatatggctgaggaggcctcacaatcatggcagaaggcgaggagaagcaaagtcatgtcttacatggatggtggcaggcaaagagagggagaacttgtgcaggagaactcctctttataaaaccatcagatctcatgagacttattcattatcacagaacagcatgggaaagacttgcccccatgattcaattacctcccactgggtccctcccaggacataggggaattgtgggagctacaattcagakgggatttgggtggggacacagccaaatcatatcaactgttaatcttcattataaattaacttcccattttttctctcacataaaaacttc

SEQ ID NO: 200605 - DNA, 417 bp, Homo sapiens
ctcctcagggtgagaggacacaggagtcctgatggcgtgccagcttggtgaggagagcagggagtcaggtgccaggctttgtctgagaatcatatacaggacagtatgggtgagcagcagaaatctacagacattcatttagggagaccccaagctatcagtgaggggactcaaatcaaaggcccagggtataggcaagttgagaattaaggcagtaggattaagctataggcaagttgagaattaaggcattaaagaatagcaccaccacaaggatatggaaccaagactgggagtagatggrgtagctgaatatatccatccaagctgagggattaacatgaagttcagatgaattccactagtctactacagttctagtgtccagcctgattcattagcccagccacagagatg

SEQ ID NO: 200606 - DNA, 567 bp, Homo sapiens
ttgatttaaaacaacaaaacaagctggcagttacaggctggacttgaaacattctcaatcagtgatgmagtgcatcgcgcgcccttgggttttcttcccaaggcatctaagaagcagccagatttccagcttgtgtgaaccaaatggcagcctaaggaagtgacagcacttaccctcttttgcatcagcagtggtcagtgagtaaaatgaagtgagccccaaacttcctcttaatgagaaaaagtgttactttatcaaccaagttgctctaccaggatacacttaatttcctatatttcctttaataaaggtgaaaaaaaacaaagtcgatatattgctagatacatgagctttgctttaaattaaaacccacttccttcccagaaccatcagagatgaaatctgagtttatgctcccccaacaaattggaggacacatttatttcagaattcaacagaagatagggaaagactaataggaagaaaaaaaaacaagaaagaatattataaataattttacagcagaacaggagatttatgtctttttccattgtacacaaggttgtt

SEQ ID NO: 200607 - DNA, 567 bp, Homo sapiens
ttgatttaaaacaacaaaacaagctggcagttacaggctggacttgaaacattctcaatcagtgatgaagtgcatcgcgcgcccttgggttttcttcccaaggcatctaagaagcagccagatttccagcttgtgtgaaccaaatggcagcctaaggaagtgacagcacttaccctcttttgcatcagcagtggtcagtgagtaaaatgaagtgagccccaaacttcctcttaatgagaaaaagtgttactttatcaaccaagttgctctaccaggatacacttaatttcctatwtttcctttaataaaggtgaaaaaaaacaaagtcgatatattgctagatacatgagctttgctttaaattaaaacccacttccttcccagaaccatcagagatgaaatctgagtttatgctcccccaacaaattggaggacacatttatttcagaattcaacagaagatagggaaagactaataggaagaaaaaaaaacaagaaagaatattataaataattttacagcagaacaggagatttatgtctttttccattgtacacaaggttgtt

SEQ ID NO: 200608 - DNA, 567 bp, Homo sapiens
ttgatttaaaacaacaaaacaagctggcagttacaggctggacttgaaacattctcaatcagtgatgaagtgcatcgcgcgcccttgggttttcttcccaaggcatctaagaagcagccagatttccagcttgtgtgaaccaaatggcagcctaaggaagtgacagcacttaccctcttttgcatcagcagtggtcagtgagtaaaatgaagtgagccccaaacttcctcttaatgagaaaaagtgttactttatcaaccaagttgctctaccaggatacacttaatttcctatatttcctttaakaaaggtgaaaaaaaacaaagtcgatatattgctagatacatgagctttgctttaaattaaaacccacttccttcccagaaccatcagagatgaaatctgagtttatgctcccccaacaaattggaggacacatttatttcagaattcaacagaagatagggaaagactaataggaagaaaaaaaaacaagaaagaatattataaataattttacagcagaacaggagatttatgtctttttccattgtacacaaggttgtt

SEQ ID NO: 200609 - DNA, 567 bp, Homo sapiens
ttgatttaaaacaacaaaacaagctggcagttacaggctggacttgaaacattctcaatcagtgatgaagtgcatcgcgcgcccttgggttttcttcccaaggcatctaagaagcagccagatttccagcttgtgtgaaccaaatggcagcctaaggaagtgacagcacttaccctcttttgcatcagcagtggtcagtgagtaaaatgaagtgagccccaaacttcctcttaatgagaaaaagtgttactttatcaaccaagttgctctaccaggatacacttaatttcctatatttcctttaataaaggtgaaaaaaaacaaagtcgatatattgctagatacatgagctttgctttaaattaaaacccacttccttcccagaaccatcagagatgaaatctgagtttatgctcccccaacaaattggaggacacatttatttcagaattcaacagaagatagggaaagactaataggaagaaaaaaaaacaagaaagamtattataaataattttacagcagaacaggagatttatgtctttttccattgtacacaaggttgtt

SEQ ID NO: 200610 - DNA, 430 bp, Homo sapiens
atcttgtgagagctcattcactatcacaagaacagcaaggagaaaatccacccccatgctcccatcaccttccaccaggtccctccaccatcatggggaattacaatttgacatgagatttgggtgggagacatagagccaaagcatattaccttcttttatgacttgatttttataagtttttaayccctcattttcttttatgactagactccctatgtgactaatctgagctacttttgtgctgtgatgccaggaggtgaatttctcaaaagaagctggcatctctgattcaaagagcaacacaagtgaggaggattcccaaagggctaataccatagcattttaactaatgggggctactcttcatttgctatggccagattacaatctttagcaatcctctacttgttcagaaagctttttcttt

SEQ ID NO: 200611 - DNA, 430 bp, Homo sapiens
atcttgtgagagctcattcactatcacaagaacagcaaggagaaaatccacccccatgctcccatcaccttccaccaggtccctccaccatcatggggaattacaatttgacatgagatttgggtgggagacatagagccaaagcatattaccttcttttatgacttgatttttataagtttttaatccctcattttcttttatgactagactccctatgtgactaatctgagctacttttgtgctgtgatgccaggaggtgaatttctcaaaagaagctggcatctctgattcaaagagcaacacaagtgaggaggattcccaaagggctaataccatagcattttaactaatgggggcwactcttcatttgctatggccagattacaatctttagcaatcctctacttgttcagaaagctttttcttt

SEQ ID NO: 200612 - DNA, 430 bp, Homo sapiens
atcttgtgagagctcattcactatcacaagaacagcaaggagaaaatccacccccatgctcccatcaccttccaccaggtccctccaccatcatggggaattacaatttgacatgagatttgggtgggagacatagagccaaagcatattaccttcttttatgacttgatttttataagtttttaatccctcattttcttttatgactagactccctatgtgactaatctgagctacttttgtgctgtgatgccaggaggtgaatttctcaaaagaagctggcatctctgattcaaagagcaacacaagtgaggaggattcccaaagggctaataccatagcattttaactaatgggggctactsttcatttgctatggccagattacaatctttagcaatcctctacttgttcagaaagctttttcttt

SEQ ID NO: 200613 - DNA, 430 bp, Homo sapiens
atcttgtgagagctcattcactatcacaagaacagcaaggagaaaatccacccccatgctcccatcaccttccaccaggtccctccaccatcatggggaattacaatttgacatgagatttgggtgggagacatagagccaaagcatattaccttcttttatgacttgatttttataagtttttaatccctcattttcttttatgactagactccctatgtgactaatctgagctacttttgtgctgtgatgccaggaggtgaatttctcaaaagaagctggcatctctgattcaaagagcaacacaagtgaggaggattcccaaagggctaataccatagcattttaactaatgggggctactcttcatttgctatggccagattacaatctttagmaatcctctacttgttcagaaagctttttcttt

SEQ ID NO: 200614 - DNA, 395 bp, Homo sapiens
aatatgggccattgtataaatgttaccctctttactaatagagcttctctgaagttcttgggggaaaaaaagaccccagaaaggattactgtccctagagtactgcttcttgcaagatttatgtaaagttgaaggctcttttgagggaagacgacagggagaagtcaaagagagctttctctcattcatgtcagggagacatccatgttgctactctctcagctttactctgttataattataatagtggaaggaatgaaatttgttatacacttctgacacagaattgacttacsttgccagaaaattctggttgactatggtaatcatgttcaatggatcaactgaaaagaccatacatcattatgtgttttagctctagaggactcctgtga

SEQ ID NO: 200615 - DNA, 395 bp, Homo sapiens
aatatgggccattgtataaatgttaccctctttactaatagagcttctctgaagttcttgggggaaaaaaagaccccagaaaggattactgtccctagagtactgcttcttgcaagatttatgtaaagttgaaggctcttttgagggaagacgacagggagaagtcaaagagagctttctctcattcatgtcagggagacatccatgttgctactctctcagctttactctgttataattataatagtggaaggaatgaaatttgttatacacttctgacacagaattgacttaccttgccaraaaattctggttgactatggtaatcatgttcaatggatcaactgaaaagaccatacatcattatgtgttttagctctagaggactcctgtga

SEQ ID NO: 200616 - DNA, 392 bp, Homo sapiens
gtttaaaatggaatgacttttattctttgtcaaatattaacatacctggtacagtgaaacgatggacaagttgtcccgtttctcctataaagcaaaatttcaatgtaagtccaaataagaaagacatgtgcaaagaaaaaaatcattttggaatcaaactgttctgcgggtttccttttcttaatcatattttgagagttgttggtcaactttcaacatctagctagtaacatttatgaggtaatgtgtcagtcttaccattagtaatttcagtatctacttttaatgacccaacacgtattcatggatgagawataagcaaattgtctcataactgaggggaaaggaatgagaaagtattggaagaatcacttattgacttacacaagaag

SEQ ID NO: 200617 - DNA, 596 bp, Homo sapiens
catcaaacaataactggagcacatttttatttgcatgacattataaattcatagaatgctttattttagtgtatcaaaccaatgaaaaactgatgaatgttaaaatatataagcacacatgttattttctgattttcttatgttaatagaaattctaatcggtgtgaggtgatatctcattgtggttttgcttagcattttcttaatgattaacaatattgagcatcttcttatatacttttggccatatgtatgtcatctttggcgaaatctctattcaagttcytttccattatttaattgctttttttttggctgttgtgagttactggagtttttcatctaatctgggtattaactacttattagatatatgagtgtcaagaagatattgtacacccatgttcataacagcattattcacaaaaaccaagaggcagaaacaacccaagtgcccatcaatagataaatggataaaagctggtatatatgagataccattcaggctacaacatgaatgaaccttgaggatcttgtgctaagtgaagtaagtccatcacaaaagaaatgaatttgtatgattccactgatatgag

SEQ ID NO: 200618 - DNA, 564 bp, Homo sapiens
gtctgactgagacctcagggcttattgccccaagtaaaaagtaggctgaaagaaaagttaagtcattgaaattgatatctacatttactttcccttttctttgtactctttcctcttgactttaaattcttttgattscagaagggagaaaactttgctaatgctctgccaagcctcacttttctgtcatgattggaaggtttgatgttaattagacttactcatggaaaatggaagagctgctgcattacaatgaaagccatcttttaacagcctgagttcctttttcttttacctgagtcaggaacaaaaaatattcatgtatattccccaaaaggacaaaaaagtatccaatgaaagggctaccttgtagaaaggtcagagcattttagtgctaaatgacacctaaaatcactctctctgcacaccttatattgtaaaagagaaagttaagacccagaataagatcaagagtttttcattggtcgttacaatattaaagaagttttgaaatatatgtctagctttctcacatctatgtgctgattagacctcagccaaaga

SEQ ID NO: 200619 - DNA, 576 bp, Homo sapiens
catgactatgttccatctctcctatcagagggcttgagtccgagaaagatatgggaccctagtcagcccaaagagtgtcagcacyggacttctatgaaagttagtgggaaagtgatattgtttccactgaggtttctcagctggtagatttaaggccagagctgctaatggccttttttgcctttgtacgtgcaggacctgtgagagaaagccggggaagcagaaccctttgatggagacaacagagtcaggacaatattgtttaaaactcctaaatccaaacatgcctgaagctataagttacttctgaaatttaaaaatttataagtaaattattttttttctccctaagccacttttagctaaaataggcctatgtggagagtaccagtaggtgtgagggaggggagacagatgaagtgacatctcaggagaactcgctgatttgattggctggatatggagcgtgtgggagaaagaggagataaagataaatgtgaagttatttaaatggtttgtgatgctttttaacccaaagaaagatatgattgatgtagaaacaacttttccttttac

SEQ ID NO: 200620 - DNA, 267 bp, Homo sapiens
gagaggtattatgaatatgggggatattttttctcttttaatttttatsttgtcttctaaataaaaggcataaagatttatgtaaaatggtaggtgtaaacagaatataaagtcagctcaactgtaagtattagaagcttcaggatattatttttctaattttgaagttcagaaatgtagcaacaaaacctcacttgcaagaacagatgatcaagtttcaacagatcatagatcagatcaagtgagaaaaaacataagatgacaacg

SEQ ID NO: 200621 - DNA, 267 bp, Homo sapiens
gagaggtattatgaatatgggggatattttttctcttttaatttttatgttgtcttctaaataaaaggcataaagatttatgtaaaatggtargtgtaaacagaatataaagtcagctcaactgtaagtattagaagcttcaggatattatttttctaattttgaagttcagaaatgtagcaacaaaacctcacttgcaagaacagatgatcaagtttcaacagatcatagatcagatcaagtgagaaaaaacataagatgacaacg

SEQ ID NO: 200622 - DNA, 526 bp, Homo sapiens
atgtatttctcctacttaaaatctccagtaggtttttcactgcaccagaataaaatcaccacttgttagcatgctctctgaagttctgacctgtccacatgctcaggtcacctggcctgcccctctcaacctgctcccactctctcctgtctttaggttgcaaccactgaacttttccccaaaactccaacatactaagcttgctcctttcttaggaactttgttctaattttttctcctttttttgcttcatatctttgcttgactgcctccatattattcctgtctcacaccttcaaagaaaattctgatgacagtatttttcatctgctttgtttactatgcatcctcagagcccagaataatggctagaacacaggaaaactcagtaagatttcattgaatgaaataggtcttccctgcctacccaacgcaaagcagcttgtagtcttcttccytccttcccattaatttctctttcattttcttcctgtatttttttcatagcactcagctcccaagacta

SEQ ID NO: 200623 - DNA, 428 bp, Homo sapiens
caccttcaaagaaaattctgatgacagtatttttcatctgctttgtttactatgcatcctcagagcccagaataatggctagaacacaggaaaactcagtaagatttcattgaatgaaataggtcttccctgcctacccaacgcaaagcagcttgtagtcttcttccttccttcccattaatttctctttcattttcttcctgtatttttttcatagcactcagctcccaagactaccctctttatgtgtataactggttattggcaagtctcaattcagtagggtaaaaaaaattaattctttaaatttgctyatactgcatggaatgtacttttcctatttcttatttctattccctagaaacatcttggggagatacgaaactttctggtcttttttgttattaaaatttcaaaacaccaatctt

SEQ ID NO: 200624 - DNA, 236 bp, Homo sapiens
agaataatgatgaaacactgtagttcatttggcttgctccagcagaggatctstatccaaagttgataggaaataacatgtctgagatttggggcattccctcagtccatattaattattttatgatgatcagcaggccagttataaaataaaaacaatggtttcaagcctttgcatagctgggtttctttcttctggtaaaagtgcttggttctatatctacagaatatagatct

SEQ ID NO: 200625 - DNA, 236 bp, Homo sapiens
agaataatgatgaaacactgtagttcatttggcttgctccagcagaggatctgtatccaaagttgataggaaataacatgtytgagatttggggcattccctcagtccatattaattattttatgatgatcagcaggccagttataaaataaaaacaatggtttcaagcctttgcatagctgggtttctttcttctggtaaaagtgcttggttctatatctacagaatatagatct

SEQ ID NO: 200626 - DNA, 513 bp, Homo sapiens
aacacctgggaaatacattgcaaaaaatcattgcctaggcacgttgtcwtcaggttatctaaagttaagatgagggaaagaatcttaagagctttgaggtaaaaggacgagttaacctataaaggaaaacctatcagattaacagcagatttctcagcagaaactctatagactagaagggatttcggccctgtcttcagcctctttaaacaaaataattatcaggcaagaatttgtatccaccgaaactaagcttcataaatggaggaaagatacagtctttttcagacaaacaaatgctgagagaatttggcactacgaagccagcactacaggaactgctaaaaggagctataaatgttgaaagaaattctggaacaacattaaaacagagcctctttaaagagtaaatattacaggacctatacaacaacaacaacaaacaaacaacaacaactaaaaaacaaggtatacaggcaagaaatagcacaatgaatggaatggtacctcata

SEQ ID NO: 200627 - DNA, 645 bp, Homo sapiens
gggtgagggggctgtgggatgggggagatgccagtatatgtatagagcttaatttcacttggtgggattatagctaatttttgtctttttctttatactttttttctagcttcttaattttctgtaacaaaactatattacatttttgaagagacaataacaaaagccattaactttttcaaaactaaatatatatatacatatatacatattgcaacaagacagttgctagyacacatctccctaacagatagagttacattagtctacatggggttttacttataattgacatagttaccctaatctatgcattctttgactatgttgcatgtctaacatgttccagtgaccattcaattgtggattacagagaactgtcattgtccaaattagaggcaggaatttcagtcctgtgggaagcatccaaaaagttcttcagcacagataggtttaggaataaaactggagatcttttgagtggttctcatttttataagcttggtcatgaacttatctgccccttagttatttttagaattgatttcatgctcaggtcaatcatttcgcagtgaagaatataccatttctcaaactgccttctttccaaattttatgactagagttcagcctgagttccagaat

SEQ ID NO: 200628 - DNA, 645 bp, Homo sapiens
gggtgagggggctgtgggatgggggagatgccagtatatgtatagagcttaatttcacttggtgggattatagctaatttttgtctttttctttatactttttttctagcttcttaattttctgtaacaaaactatattacatttttgaagagacaataacaaaagccattaactttttcaaaactaaatatatatatacatatatacatattgcaacaagacagttgctagcacacatctccctaacagatagagttacattagtctacatggggttttacttataattgacayagttaccctaatctatgcattctttgactatgttgcatgtctaacatgttccagtgaccattcaattgtggattacagagaactgtcattgtccaaattagaggcaggaatttcagtcctgtgggaagcatccaaaaagttcttcagcacagataggtttaggaataaaactggagatcttttgagtggttctcatttttataagcttggtcatgaacttatctgccccttagttatttttagaattgatttcatgctcaggtcaatcatttcgcagtgaagaatataccatttctcaaactgccttctttccaaattttatgactagagttcagcctgagttccagaat

SEQ ID NO: 200629 - DNA, 478 bp, Homo sapiens
tacatggggttttacttataattgacatagttaccctaatctatgcattctttgactatgttgcatgtctaacatgttccagtgaccattcaattgtggattacagagaactgtcattgtccaaattagaggcargaatttcagtcctgtgggaagcatccaaaaagttcttcagcacagataggtttaggaataaaactggagatcttttgagtggttctcatttttataagcttggtcatgaacttatctgccccttagttatttttagaattgatttcatgctcaggtcaatcatttcgcagtgaagaatataccatttctcaaactgccttctttccaaattttatgactagagttcagcctgagttccagaatcagctgatgaacatcactcaatggagcatattaactagaattgttgtctccatctgggtctcttccaaatggtcttgtcaaatgcaatcagagcatcata

SEQ ID NO: 200630 - DNA, 645 bp, Homo sapiens
gggtgagggggctgtgggatgggggagatgccagtatatgtatagagcttaatttcacttggtgggattatagctaatttttgtctttttctttatactttttttctagcttcttaattttctgtaacaaaactatattacatttttgaagagacaataacaaaagccattaactttttcaaaactaaatatatatatacatatatacatattgcaacaagacagttgctagcacacatctccctaacagatagagttacattagtctacatggggttttacttataattgacatagttaccctaatctatgcattctttgactatgttgcatgtctaacatgttccagtgaccattcaattgtggattacagagaactgtcattgtccaaattagaggcaggaatttcagtcctgtgggaagcatccaaaaagttcttcagcacagataggtttaggaataaaactggagatcttttragtggttctcatttttataagcttggtcatgaacttatctgccccttagttatttttagaattgatttcatgctcaggtcaatcatttcgcagtgaagaatataccatttctcaaactgccttctttccaaattttatgactagagttcagcctgagttccagaat

SEQ ID NO: 200631 - DNA, 478 bp, Homo sapiens
tacatggggttttacttataattgacatagttaccctaatctatgcattctttgactatgttgcatgtctaacatgttccagtgaccattcaattgtggattacagagaactgtcattgtccaaattagaggcaggaatttcagtcctgtgggaagcatccaaaaagttcttcagcacagataggtttaggaataaaactggagatcttttgagtggttctcatttttataagcttggtcatgaacttatctgccccttagttatttttagaattgatttcatgctcaggtcaatcatttcrcagtgaagaatataccatttctcaaactgccttctttccaaattttatgactagagttcagcctgagttccagaatcagctgatgaacatcactcaatggagcatattaactagaattgttgtctccatctgggtctcttccaaatggtcttgtcaaatgcaatcagagcatcata

SEQ ID NO: 200632 - DNA, 480 bp, Homo sapiens
agactttagctcggctgtagttgaccgaagaattggaaactcagttatcagtttgctgtaaatctttttttgcctcagaaacacacttttgggggacattagaaagawgactgattagaggcacctggtgctcatcctccccacaagaaagaagcaaggcaacaaataaacagataagatttggatggtgtgtcaaaggaagaacactggagtgcagagagggagtggagatgcacctgtggtgattgaaagtccaggaggacagcatggagacactcagcctctgtggtcccatcttccctacccggatcatatccagccagaatcaggagggacttcctgttgcaggagaaagataaggagaagaaccgcaccagccaccattgcgaccacaaacacttacagtccttgtaagacaatttcacagtccttgcaagcccagagcccagtttggagagatacccagaattctcacagctg

SEQ ID NO: 200633 - DNA, 628 bp, Homo sapiens
tcagtgatggagaattactatattttgtaaatggaaataccactactaaaaccagaatgctataaatagaatgatgtcttttatttccaaagtcaatatactagagtgatacaacaataataataaaagtgagatattttgaggcaaagttatcttggcataaatgttatagctgcaagtgctgccagtgagtattctcggggcaagtaggaaaagggttaaaatcagttactggacttttttttttttttgtctctttgattgggccatgtttccctgtctctttgtrtgctttatttttgttgactttaatgtgaaaaattagtcatatccttatggactgactttgtacagggaacatttttcataaatcagcccaggtagacattctaagagcctctcaaaccttttatgggaatttgtcttctctgggcttgtgcatgtaattcctaactagtgaagttttccagtttctttcaggaacttgtagtatcttgctgctctagtatctgtctgaaatactgcaggttctctgatgctacaagccactgaaatatattttgctctcagtggcacccaggaatccaaagtttgccagatctctatcagatgacacagaaactagtcc

SEQ ID NO: 200634 - DNA, 553 bp, Homo sapiens
atctcctgttccaccatagtaagatgtgcttgcttccccttcaccttccaccatgattgtaagtttcctgaggcctcccagctttgcttccagcacagcctgcagaactgtgagtaaattaaacctcttttcttcataaattacccaatctcagacatgtctttagagtagtttgagaatggactaatacagttttaattgatgcagtaaaaggatttgactgaattcacaagacattcatgataaaaagatttcttagaagaatccaaaagcaagaatataaaagaataaattgataakctacttcaaaattataacctctatatatcctttaaaattgtatctcatatatatcaaaaagtgttcaatgtttgttttttcttagctttgtatactgataggggctagaggcaatgacaacaatagaaatgagcatctattgtgcccagacattgttttctaaataacattctccagtaaaagaagactaagatagctgattccaggggtagactaaagaatatacaagatacatattgaacatcacattgta

SEQ ID NO: 200635 - DNA, 466 bp, Homo sapiens
tgggtggggacacagccaaaccatatcagtaggctattattaacaaactcaattttggagcttgttattggtctgttgagtgaatcaatttcctcctggttcagtcttgggagggtgtctgtgtccagaaatttatccatctcttctaggttttgtaatttctgtgcatagaggtgtttatagtagtccctgctgkttacttgtatttctttggggtcagtggtaacctccctttgttgtttgtaattgcatttatttgaatcttctcttttactctttattaccctagttagcagcttatcttatttttttttcaaaaatccagctcctaatttcattgatcttttgaatgttttttttttgtgtgtgtgtcccaatctccttcagttcagctctgattttggttatttcttgtcttctgctttggggttggtttgctcttggtcctctaagtttttttagttgt

SEQ ID NO: 200636 - DNA, 453 bp, Homo sapiens
agccaaaccatatcagtaggctattattaacaaactcaattttggagcttgttattggtctgttgagtgaatcaatttcctcctggttcagtcttgggagggtgtctgtgtccagaaatttatccatctcttctaggttttgtaatttctgtgcatagaggtgtttatagtagtccctgctggttacttgtatttctttggggtcagtggtaacctccctttgttgtttgtaattgcatttatttgaatcttctcttttactctttattaccctagttagcagcttatcttatttttttttcaaaaatccagctcctaatttcattgatcttttgaatgttttttttttgtgtgtgtgtcccaatctccttcagttcagctctgattttggktatttcttgtcttctgctttggggttggtttgctcttggtcctctaagtttttttagttgt

SEQ ID NO: 200637 - DNA, 542 bp, Homo sapiens
gagtttcttggttatagaaagtctttgtatgatggctttctcagatgctggttgtggtggcaatgtgcttggtgtgtgagcaggttcactgtctcctgcagggctagaatggcagaagtttctggaagcttatcttgttccccattggtgtgcacttttttatttagttatttttttccccaacattttatttactgggttgaaatgttcaggcttcagkccagtaggggaggtgtctgggggtaaaaaccagatgtagctaaagtatgtgggtagatgcaatacccaatgttggggagagatcacggccttgacaaaggtagctgggagaattctcagtgaaatgcactgtggtcttttcaggaggaagggagagagctacctcagctcctctgccagaccagaaggaaagctactcaactcccagacacactcttcacccagtgtttcacctattcagattagacaggcacctcttttcatctgcaggaattttgatattccaagtagagaggaactatgattctacctttcatgcaagc

SEQ ID NO: 200638 - DNA, 374 bp, Homo sapiens
tcccacatacttggcaaggcaggtttcacacctacagtgttccactagcagcagctagctaggttctgagcagtctgcactcagaaggcttatgccctatgccataagccttccctgttgagatagaaactgtggctttcaggccatgcccctcccagtctgcccatgaagcagaaatattgtataattattaaaaccctgatgaacattccatttagtgagcatgtatggaagcagaaatattgttccaatattagtgttttgctattcagtagtaaatatttaatatgcaaacagaaatatgtgaaaagcaattgtcttacattaaataagtgtatctttatgtagwtttttttcatatgtggtgtgacaag

SEQ ID NO: 200639 - DNA, 491 bp, Homo sapiens
gaattccacctctactcacttaaatagtctgaactttagttttctcaccagaaaaaggcatatgctggggtgttgtattacataagagaaaaataaaatactgtttgaaaaactgtggataactattatctctatcttccttggctactgactttatttggggactagaacattaatagttcacactttgtggagttgtaaaactggccacagtcattttgcgataatgcctaatttcaggaggctgtgcaacctgtgtttgagtgttttttttctttttaacmctatgagctagcatggggtaaaaaaaagcaaatgtcaaagactgcataaaatttagattataggaccttcctttccatttactgtttttgagagataacattgcctctttgaggcaatcatagttgtttctgatgatagaaaatatttcatggtattatgaagaattacagagaatataaaaaaaatcttactattgtttggatctt

SEQ ID NO: 200640 - DNA, 461 bp, Homo sapiens
taaagataaaaagatggagaaagctaatatgtaagagaaggatagctaatcaaagataaattgccttttctattttacttgtggccagtctatagatcagtataaactccatatatcttgctcaactaactttaaacaagatttttggtctgttgctttataagatataattagataatagagtggggttaagattcctctaaaacattatagctatctgaaaattatgaagtcatttcacagtttttcatttttcatttctcaaatcaatacttacatatctctagtgtatgtgtacaaaaaaaaaagtgtgttagcaaraaatattttcaagaagtaagaagtaaataccaaattgaaaatattcttttctaatttttttaaagacctaaaggcttttattgtatcaaattatttgagaatataatgctcatctacataattcacttacatcctatttg

SEQ ID NO: 200641 - DNA, 648 bp, Homo sapiens
actattaatattaataaaggccatacgtatctatttttttcctgtgtaaaagtaggtgaatttactctcatcccctaatactaatccaagcataggataaggagcaatttaccccccctgcttttttgtatatacattggaaatatgtcctctctaatattgaaaggaagtaaaacctcttctgctctaattacgactctgcatcagaatactctgggtctgaagttagttgttaatatatatgcatttmtctataaactactgagtgactgaataaaaagttatttcctcaggaaagtgctcagggaaccactcatggttaactgtactaaatatttaattatcatctttaatcctcataagcaatgtcctcattttattaatgaggttaaataacagctaagaagcaacaaccaaaagaaaattgagatctaccagactccaaagcctatgattctaaacactcctatatattgcctctagtaataaatagctaccatttactgagtgcttaccatgtggcatatattgtgctatgtgtatatataaagtaaattttgtgtaatcctcacaacaaccttgatgaagaaagtactattagtcccattttatacatgaataatctgggattaatgcagattaaacttg

SEQ ID NO: 200642 - DNA, 592 bp, Homo sapiens
tctataaatccctgttgattgatttctatctctttctttttggtaaattaagtagttctccaccaaaatattgaagatccaatgaaaaattgactgtaaaatatatttaatatatagagttgaatgggttttctcaactaatatgacaaggacttttaagggaacttttttgattttcctattcttttcaggtagttctcatactaaacagaatcttatagatgtaaaaatgaagacctctgtaacaaatgattttttttctattaagttttctgaaggctagacaatcaacatctacaaatcacrctgatgtgtcgtagtattaaatgaattgtattatattagaacattagtgaatactgaaaaatttgttcaatactcttgatataaaatttacctctgaaaatttaacctcctgagaaagacattgtatattgcattttaaaatgtatttgtgaaaactagtttgttttattaaaaatgggagtactgggcaaagttacatattaaaataacatcttgttctgctctctgaacatgaaaatactccctttcttacacaacctataaaggcatgctcaccaaagttggg

SEQ ID NO: 200643 - DNA, 541 bp, Homo sapiens
tctaatattcaggcttcagagcatccaaggtaactgcaggctgaagtggacccccagcacagcatagatgctctaytaaaatgtggccagactgctttgttaaacaggtcaatgatcccaattttcctcgctgggcaggacttcctaactggggtctccagccacctcctacagatgcctttggtccagcaacaggcccatacttcacctccctgggatgaagctcccagagagagggtcagccccccatctttgttgtttctcaggcttcactggtgatacctccaggtgctgggaaatctgaggcaactagggactggagcaggctcccagcataccacagcagccccacagaaaagtgaccagactgctacgtgggtgcttgttcccatacctactcaatgggcaggtcctccaggcctgggcctcagccacctgccaccagaggtattgagccagtaccaattcaccaactccgtggacagagcctccaggggcaactgaaagcctctttgccactgcctctgcagtggaactgccc

SEQ ID NO: 200644 - DNA, 395 bp, Homo sapiens
accagctaacagcacaataacrggatcaaacccacacatagcaatactaaccttgaatgtaaacaggctaaatgccctaatttaaaggcacagggtggaaaactgatttaaaaagcaagacccaatggtttgctgtcttcaagagacccatctcacaggtaataacactcatagactcaaaataaagggatggaggaaaatctaccaagcaaatggaaaacagaaaaatgcagggtttgtaatcctaattgcagacaaaataaagatttttttaaaaagacaaaaaagggcattacataatggtaaaggtttcaattaagacctaattttcctaaatacatgtacacccaacacattagcacccaggttcataaagcaagttcttaaggagatac

SEQ ID NO: 200645 - DNA, 438 bp, Homo sapiens
ttggttaagctacaacccacatgcagatggctgctctaatcaggaattcactccaatggtgtctagctagcattctaattaggtaactcttgcatctaaaaataagttccagagacctgctatacagtatagtgcctatagctaacaatatygtattgtatatgaaattcgctaaagggctagatcttacaaaaaataataataaaggtcacaagagaaaactctggaggtgatgaatatgcttacggccttgatgatggtgatagtttcacaggtgtataatcatctccaaacttattgaggtttatacattacttatatgccaatcatacttcattcaataaagtagttttaaaaagaatgtgaataaaataaatgtattcttctcctagactaaaagtattttttgaaaggaaaagtcttattctagaattggca

SEQ ID NO: 200646 - DNA, 567 bp, Homo sapiens
ttagaagaaaacctaggaaaaactcttctggacattggcctagacaaggaattcataactaagatccgaaaagcaaatgcaacaaaaacaaaaaatacataaatgggatttaattaaactaaaaggcttctgtacaacagtagaaataatcatcagagtaaacagaaaacccacagaatgggaaaaagtatttgcaaactatgcatccaacaaaggactaatatccagaatctaaaaggaactcaaacaaataagccagaaraaaaaaatctgaaaacaataatcccatcaagaagtgggcaaatgacattaataatttcttctccaaaaatatatacaatggccaagaaacatacgaacaaatattcaacatcactagtcatcagggaaatgcaaattaaaaccacaatgagataccaccttgccccatccagagtggccatcattaaaatgtcaaaaatcagtatatgttggcatggatggtgaatagggaatgcctatatgctgctcgtgagaatgtaattagtacaacctctatggaaaacagtgtgaatatttctcaagtaa

SEQ ID NO: 200647 - DNA, 556 bp, Homo sapiens
tttctaagtggtaatggagttatttcttaagtatctaacatttgagctgcaaaatcaagatagacctggtcattgaattattatatggaagacaatttggttagagaaatgttgaaagctgcatttttcatttttcatttatttgcatgaaaaaaattggaatgctgtgtttaaaacattgagatgtggagattgtttttattatagatttaacctcatgtatgctgattaaccttataaccaatgttttctgctaaagcttgtatagtttttattataaaattgattcagggaagtacaaaaaagaaaataatagcctcacttcacttataaatgcatgtttttaaaaacctaatagaaacatatattaaattttaatcatatatatattatacatatataaggtaagtaaatacagcaagttttataaaatatattatgatccttaatttaggtttatctctggaatgtgaagttggcttaacatcagaaagtatccatatgatgatatattacatcaacataagygaacaattatacaattatttcaatagat

SEQ ID NO: 200648 - DNA, 541 bp, Homo sapiens
gcatggttgatgacagactatgtcagtcgcttcccctcagccctagactactattaaaatacagttcttgatctcaagcataaagatttgttgatattcatggattggtcccacatttatggtgtctagcagtcatttatcgtatgtgctgttggtcttaggagagactacctattcttaaagtattgttaacttgctgtgtgaggcagtatagtatagtaattagagtattagctctatacataaaatggtgcattagaattcttgttctaccaattattaaaagagtagttgaagctcttcaagactcactttattctatctgtgaaatgggcaagataatamcataatagcacatacatcactgtgctattaatattagcacatacatcactgtgatcaatcatcaccaggactgatattaatatcaaacataaagtactttaaacctactaactgacagaatcttcccaactatttttattctcattttacaggtgaggaaattgaagtagaaacatgttaagtaaattgttcaagg

SEQ ID NO: 200649 - DNA, 393 bp, Homo sapiens
gtcctttccccatttcttattcttgtcaactttggtaaagatttgatggctctaggcatgcagttttatttttgggttctctatgttattccattatcctatgtgtctgtttttgtaccagtaccatgctgctttgattactgtagttttatagtataatttgaagtcasgtaatgtgatgtctttggttttgttctttttgattaggattgctttggctatttgggctattttttgggtctatgtaaattttaaaatagttttttctagttctgtgaaaattacattggtagtttgatagtaatagcactgaaagtctagattgctttgggcaggatggctattttaatgatattgatgttttgatccatgagcataaaatgttttttcatt

SEQ ID NO: 200650 - DNA, 617 bp, Homo sapiens
tactattattgtctgactgtctaagtctctttgtaggtctaactgtacttgttttctaattctgggtcaaygttggtgcatatgtatatatatatttaggatagttaagtattcttgttgtatttgaaccctttattattatgtaatgcccttctttgcctatttttactgttcctggtttaaagtctgttttatgtaacataagaatagctcttttttgtgtttctgctctttttttgttttctctttgcatgacagatctttctccaaccctttactttgagccagtgggtgtctttatgtgtgcgatgcaactctggaatacaatagatggttgggtcttgtttctctatccagcttgccactctgtgcctttcaagtggggcatagaggtcatttgcattcaaggctaatattgataagtgaagttttgattatattgtgaagttgttagctggttgctttgtagtttctatcatgtggttgctttgtagagtatgtgggctatgtacttaagtatgtttttgtggtggcaggtatcatttattgtttccatgtttagaactcccttaaggatgtctgctctaatggtaacaaattcccttaccatttgcttg

SEQ ID NO: 200651 - DNA, 617 bp, Homo sapiens
tactattattgtctgactgtctaagtctctttgtaggtctaactgtacttgttttctaattctgggtcaacgttggtgcatatgtatatatatatttaggatagttaagtattcttgttgtatttgaaccctttattattatgtaatgcccttctttgcctatttttactgttcctggtttaaagtctgttttatgtaacataagaatagctcttttttgtgtttctgctctttttttgttttctctttgcatgacagatctttctccaaccctttactttgagccagtgggtgtctttatgtgtgygatgcaactctggaatacaatagatggttgggtcttgtttctctatccagcttgccactctgtgcctttcaagtggggcatagaggtcatttgcattcaaggctaatattgataagtgaagttttgattatattgtgaagttgttagctggttgctttgtagtttctatcatgtggttgctttgtagagtatgtgggctatgtacttaagtatgtttttgtggtggcaggtatcatttattgtttccatgtttagaactcccttaaggatgtctgctctaatggtaacaaattcccttaccatttgcttg

SEQ ID NO: 200652 - DNA, 617 bp, Homo sapiens
tactattattgtctgactgtctaagtctctttgtaggtctaactgtacttgttttctaattctgggtcaacgttggtgcatatgtatatatatatttaggatagttaagtattcttgttgtatttgaaccctttattattatgtaatgcccttctttgcctatttttactgttcctggtttaaagtctgttttatgtaacataagaatagctcttttttgtgtttctgctctttttttgttttctctttgcatgacagatctttctccaaccctttactttgagccagtgggtgtctttatgtgtgcgatgcaactctggaatacaatagatggttgggtcttgtttctctatccagcttgccactctgtgcctttyaagtggggcatagaggtcatttgcattcaaggctaatattgataagtgaagttttgattatattgtgaagttgttagctggttgctttgtagtttctatcatgtggttgctttgtagagtatgtgggctatgtacttaagtatgtttttgtggtggcaggtatcatttattgtttccatgtttagaactcccttaaggatgtctgctctaatggtaacaaattcccttaccatttgcttg

SEQ ID NO: 200653 - DNA, 508 bp, Homo sapiens
atttgggtttgtgacatttttgtcactccagatgaattttagaattttttaaatttctgttaaaaacaccagtgagattttgatatggattgcattgaatatgtagcttgatttgagtaatatggacatgaagaaatagaaaatctaagcagatgtgtaactagtatggagtttgaaccagtaatcaaatatctcccaacaaagaaaagcccaaggcccgatggcttcattggtgaattttcctgaacattcaaagaatttgtaccactccttctcaaatttttccaaaaaattaaagagaaaggaatatttcataactcactttataagatcgacattctcttgataacaatgtagtcaaataagctacaaaaaagaaaattataggttaatattgttagtgaaaatagacatgaaactcctcartatgacactagcaagctgaatccaatagcatattaaaagaatcatacaccatgaccaagtgggattgattcctgagatacaa

SEQ ID NO: 200654 - DNA, 562 bp, Homo sapiens
tgttgcttaccaggctttgtcactttccccagaatggggataatataccaaagatcagtttcagaggcaggagacaccgtgttgaaagagtaaggatycttgtttcagtgacgggaagcattcaggtaaagaccagtggctaactagtattaaaacaaatggccttctaaggaacagggtgacacactgaagagcagcctttgccttgttgagattccaacccttgtttggacatttttagtgatagacagcataaaatgttttctttccctgattacattagttgagacaatagcagaggcctaatactccatttggcatgtagtcctatcatcctgtcttgttctacttgtcaaacaagtttgaaactgtcaccagcatcctgaccaattcaccctgccttatattccttggccccagacatctggagagttgaggccttgccatcagatctcaaattttcattccctctaagtcccagcaatgcatatcccaggttaaaataaaatatatatatattggatacacgttcatcccatctctgaactcccaattgtcagtc

SEQ ID NO: 200655 - DNA, 513 bp, Homo sapiens
taggtttatccaaatttctttctcaattttatttattgctgttgacgtttaattgctaaaataatcttaagggagccacagaaatgggtggggcactcaagaactgtgctatggtctttctgcatgtcagcattagaacagattatttcaatcccatgtttgtgtggaaagcatgcaaagagaagatagattgacaagcctgattggtatgttccaattcttttgcttccatagcaatttagtatatggaagtcaaacttctttaaaaatcctagtttgcagaaaagaaaggctgagtgctggcagcagaaggtacatgatactggggaactctactctttmctccagttgacaagcaagcaattagatccatcgagctgcggatctatgttctcaaggacccaaggaagtcagcttttggaaggcaataaaatttttgttttaatatgcagtgtccttcagtgaaaatgacaaggaggctgaagtaactttaggatgctgcagacaagaatt

SEQ ID NO: 200656 - DNA, 475 bp, Homo sapiens
gaattcgcattaactgaacatgatgttgggacaggatgtgagaggctctgatgaaggcagacaggggctggtgattcttataatgtgtctttaggatatctgtagtgctgggacccattagttagaaccatttggtagaacagtttggaaatatagatgttgaatatcatctggctatactattgtgttgtaaatacattttatttaatctgtgtgtacatgctgaaaaataataacttcatgcattgattcaaatactaaaaaacagcatcgtaattatttttcacttgttatgcatacagcctcctcctatagaaagttttcaggttcgggcagtgtctgcaaagctgatttgaatcatttcatatcactgtaacactttaaggcaagctttctttcactgctgtggctcaggaattgccaagggctgcatggawgagctaaaattataggcaaagttatgttcctgccctta

SEQ ID NO: 200657 - DNA, 608 bp, Homo sapiens
ttctagaaaccttctcccatggacgtggttagactttctccctgctgaatttggattaatgagcaaacaacccgaggaaggagggagatggggtccgaacccaggtgccctgggccccaaggtgaacacgagtcctcctgctctccttcccttcccctcacggagacgcctctctgagctggggagtcttgtttgggatgtggatrgaagggaaggctgggcatctggagcaccaaggcacttttagaggagctcccgcaaggtgagtgggggctttggttgagtacatagggcttttggcagacaggaagtggaaagcgtggccagccatctttgtgattcggggtagtctgctgctggcccttccctttccccagagctccagacggctctcaggacagttggtagcagctccctcctggctgcaccaggagaccagagagccgagctggctatgagtcagccccgtggcccagcagcgggataaggggattctcaagccagcctggtctgcccagcagcaggctgggtgtgtggctgcctgggagcagtggacactgggttccaaacaccttccgctggggtcttcagatgacctctgcctttat

SEQ ID NO: 200658 - DNA, 531 bp, Homo sapiens
ttgccatgtgctgactgtgtcccccaacaggtagcttgctctacgtgacccctccccctcccagggtctgtagcctctccatcccctcattcttttaggccaaggagtggtgacagctagcaccaggctgctgcaccatccttacagattccctgtaccccactcacacccgtataattagtttctttgtcaattaaccctccacaaattatcctaattggactgtacctgctccttcctgttgggaagcagcaggcctcaattgcttatagagattttcaattgtttgagttggacactggggctccaggtgactcataaagcgacatagtgcagttcttccragaatgtgggacatggctagccattaagggcactctgatgcgtggcagctttggggaaataaatagcagtttgggaaactattctttgtttaggagagactttctcccacggataacgtgtaggatcttattttagactgactgttaagtctctgaagttgccccttttcatggttgtgtatctgac

SEQ ID NO: 200659 - DNA, 577 bp, Homo sapiens
tacgatggctggaggttcattcagcttcttaamtctgtagactcatcagtttttagaaaattctcattctctccatgaatattgcttccgctctattctctctccttgcttctacttctgggactccaattacagacatgctaggtctttcatttttctttgagatagggtcttgctctgttgcccaggctagagtgaagtggcacaaacatggctcactgcagcctcgacctcctgggctaaagtgatcctcccgtctcagcctcccaagtagctgggattacaggtgtgcaccaccatgcccagctaatttttgtatttcttgtacagatggggtttcgccatgttgccctggctgatctcaaactcctgggctcaaccaatccatctgcctcaggcttccgaatgctgagattatagacaggagccaccatgctggccatgcacaatattttttacactcatcaattatttttccctgattcttggtactctctgattctatttgggtattttctattaatctgctttccaggtcactaatcctggccactgatgtctccaatctgctgttaaa

SEQ ID NO: 200660 - DNA, 451 bp, Homo sapiens
agtcaggagagcaccagacagggtccatgaatttccaaattaggccatgagaaaatgttatattaaaagggcaatcaaaagtggagataggccaggcgcattggctcacacctgtaatcccaacattttgggagaccaaggcgggaggattgcttaagcaggagtttgagaccagcctgggcaacatagtgagaccgtgtctctacaaaaattacaaaaattagccaggcrtggtggtgcatgcctgtgatcccatctgctcaggaggctgaggtgggaggattgtttgagcccagaaggtcaaggctgcagtgagctgagatttcaccactgtgctccaacctgggcaacagagcaagaccctgtctcaaaaaaaaaaaaaaaaacaaaacagtggagatagtggaaagaaaacttaatgcctttttaaaaatatagtttgggaagtggc

SEQ ID NO: 200661 - DNA, 565 bp, Homo sapiens
agactgaattttgagcactaaccaggttaatctacagaataaacaccttagctctcaaatctaaggcagtttttccacctttaatgtcatctctgtctataaaccatatagttcacataaggattctgttctttctgattaagagaaggaggaaattctgccagctaamtcaatatcttaccagtggaaaaaaaatcgaaaattgtaaataatagtagcaatttttctaggactcatgaaatgcattgaaagagcaagcatgattctctctagggctgggaaatttaactttcatcctagacagctcattctgatacttccaaggtttttaagagcaggaataaaacaacaacaatatattttattgcatttttctgcaatggtatttcaagttccgtaagtaactgcaacaattactaacctttggcacttctacctatattatctattttatagtctcatatttgtgaagtacatataacattgcatggcacatagagcatcatataagcattatacacataaagcatcatattcaagtttttaaaataaataaacatcatat

SEQ ID NO: 200662 - DNA, 565 bp, Homo sapiens
agactgaattttgagcactaaccaggttaatctacagaataaacaccttagctctcaaatctaaggcagtttttccacctttaatgtcatctctgtctataaaccatatagttcacataaggattctgttctttctgattaagagaaggaggaaattctgccagctaactcaatatcttaccagtggaaaaaaaatcgaaaattgtaaataatagtagcaatttttctaggactcatgaaatgcattgaaagagcmagcatgattctctctagggctgggaaatttaactttcatcctagacagctcattctgatacttccaaggtttttaagagcaggaataaaacaacaacaatatattttattgcatttttctgcaatggtatttcaagttccgtaagtaactgcaacaattactaacctttggcacttctacctatattatctattttatagtctcatatttgtgaagtacatataacattgcatggcacatagagcatcatataagcattatacacataaagcatcatattcaagtttttaaaataaataaacatcatat

SEQ ID NO: 200663 - DNA, 520 bp, Homo sapiens
ctttaagtttaataaccagtgtcattgcacccgtttagatcattcagctccataaacaatggtgtgctggcaaactttaataaccagctctccaaagtgggggatggaaaaagcctgatttataatgtttgacgatttctgtggtgtaagtatttcaatgacagattaatrtgacatcatcagatacagtagttttcagaagaatataatcagttcttataagaaagtacaagttgactcagagacaccatttataactacttgtgtatgtgatagtcactattgttatttttacaagttaaaaattaaaaaaaagctaaaatacctttttcattatatatttttcaatgattttgcccaaatctagatcttctttctctatcatttattttatatatgcccaattatacttcttaattcttattctaggttattgtcagcattggcctagaactagactggtaaatgtggtccacacattattattccccaaaccccaccgtatctttctgtgcattac

SEQ ID NO: 200664 - DNA, 520 bp, Homo sapiens
ctttaagtttaataaccagtgtcattgcacccgtttagatcattcagctccataaacaatggtgtgctggcaaactttaataaccagctctccaaagtgggggatggaaaaagcctgatttataatgtttgacgatttctgtggtgtaagtatttcaatgacagattaatatgacatcatcagatacagtagttttcagaagaatataatcagttcttataagaaagtacaagttgactcagagacaccatttataactacttgtgtatgtgatagtcactattgttatttttacaagttaaaaattaaaaaaaagctaaaatacctttttcattatatatttttcaatgattttgcccaaatctagatcttctttctctatcatttattttatatatgcccaattatacttcttaattcttattctaggttattgtcagcattgrcctagaactagactggtaaatgtggtccacacattattattccccaaaccccaccgtatctttctgtgcattac

SEQ ID NO: 200665 - DNA, 597 bp, Homo sapiens
gcagaaatacctaatgtagatgataggttgatgggtgcaccaaaccaccatggcacatgtatacctatgtaacaaacctgcacattctgcacatgtatcccagaacatatatatatataaacataaacccacacttttaatcctgactactttgactatatctkcagttttctttaaaattttttggctaaaatttcaaagatcaaataaattaattgttttaaaaaaacatatatttactgaagtggatggaaaattcagaaaaagcacactttttgacatgagtttcaaaaataattatcacatgctgaaaatttacgtgctgagatgcaggtgattactataagcaatatttttaagagtttcatctttgattcaagaggaataagtgggactcatggtttagatatgtcatttatgtgaccttgaagaatgagtgaccttgagtcattcttgagttccgggtatgccatgttaccatatgtcactattagagcgtaccttcataacatttttattcctcagagattacacaaacctaacttaattacatgatgtatatgcttctgtgaaaaatgtcttagctttctactcgtt

SEQ ID NO: 200666 - DNA, 643 bp, Homo sapiens
agggtgtggtggctcacgcctctattcccagcactttgggaggccaaggtgggcggatcatgaggtcaggagattgagaccatcctggctaacacggtgaaaccccgtctctactaaaaatagaaaaaattagccgggtgaggtggcaggcacctgtagtctcagctacttgggaggctgaggcaggagaatggtgtgaacccgggaggcagagcttgcagtgagccgagattgtgccactgcactccagcctgggtgacagagccagactcygtccccacccccccaaaaaaaaagaaagaaaagaaaaaggaaaaaaaaaagttgtactattcaaaatactgcatcaggttttctatattatttagtatcacatttaatgtataaactatttctcataatttagtttcctaatgcctatatatttttatttagctttgtgattgtttcactagcaaaaaaatcattaaaaaatacaagaggcttgaacattaatacgaatttttccatcagaaaaatagtatatttggaaaaactaaccaaataagaatgtgcaatatctgaggaaactagtaattatttcacaaccacttatgattttacaccccactgagagcagaatgtgtgcttaatttgtgtgaca

SEQ ID NO: 200667 - DNA, 596 bp, Homo sapiens
atgtccacatgtctacagaatgtagaggatgtttctaaggaaagccacagtagaagaatagtttttttttctcccattttaaaggggagaaggaagaggatggccgtgctacaatasagcgtcaaaagatctcttataaaccaggacccaaagagcgtatcacagcttgtcaaggcctctgaagacaattgcttgtgccagtttcctgttacagtagcagcctggcctctgcaagttctcatgatcaaaaacattgattagttcttgtcataggccttcagtctccctctagcttctaattaagtcccgcctacattctgctctgctgggcaccccctctgttacagtgttatagattcagtaaattccatgctgtacctcatcaccctccctggctaaaagacaatcactaaggcttggctagagaaaacagagggtgggagaaggtagccattgtagattttaccacaactgattactaaaactccaaattaaaattgcttaaaatgtgaatactcacaagtctgttcatataatgatttttaactctgcatattacattctagctccatgaaggcttatatatacagttcttc

SEQ ID NO: 200668 - DNA, 615 bp, Homo sapiens
cgtctcaattttgtggatttttctgcagcaaattttttgctccagatttgctttcttttactaatttagagttcatttctctgtgtcaccatttgtacatgattcagttttgtaatctaataaataccattctaataaaaatattagtaagatataaaagatacaatataaaattttcaggtaatcaatttaaaatcaaaacagatattacttggttatctgcatctcttcccattaccatggatacttggaagtatctatgtattcattaataagtgtcttagtttgtttactgttgctataacagaatacctgagactgagtagtttataaagaacagaggctcatttggctcacaattttgggggctggaaagttcaagattgggcctgtgcatctgctgagggcctcaggctgcttcaactcacaacagaaagtaaaaaggcagccttcatgggcaagataycacacagggagagagaaagcaagaaagagggaggggccgggctctttttaacaactaactcttgtgttaactaacagtgagcacactcactttgaagagaggtcaataatctattcctgaaggataccacctcatgattcaaacacctc

SEQ ID NO: 200669 - DNA, 461 bp, Homo sapiens
agggattttattagggaaaattggctcacagatcacaaggygaagtcccatgataggccattggcaagctgggaaagaagttaatagtggcttagtacaagtccaaaagcctcaaaagtaaggaagccaacagtgcagccttcagtctgtggccaaagccttgacagacccctggcaaacgactggttaagtccgagagtccagtggcaaagaacctggagtctgatgtccaaggacaggaggaacagaaggaagcatcagacatggaataaagatgaaagccagaagactcagcaagccagcttatcccacattcttcccccctgctttgtactagttgcactggcagccaattggatgctgctcacccacagagagggtgcgtcttgctctctcagtccactgactcagatgtcagtctcctctggaaacaccctcacagacacacccagaaacaatac

SEQ ID NO: 200670 - DNA, 588 bp, Homo sapiens
ggtagtgatagtttcatgggtgtatacttatcttcaaactcatggagatatatacattaaatatctacaactttttacgtgcttatcatacctaaataaagcagttaaaaaaaatagtaactctagggccggatgcagtggctcacgcctgtaatcccagcactttgggaggccaaggtgggtagatcacctgaggtccagagttcaagaccagcctgactaatatggcaaaacctcgtctctactaaaaatacaaaattagcgggcttggtagcgcatgcctgtaatcccactactctgggaggctgaggcaggggaatcgcttgaacccgggaggctgaggttgcagtgagttgagatcataccattgcactcctgcctgtgcaacaaagagcaaatctccaccccaacaacaacaaaagtaattctaaagataagatgcttaacatatacattaaaaaaaggcattaataaaaacaracaaatattatataactaatatcatgcttaatggtaaaaactgaatatctaccacttcatcagaaataagtaaagcctatctattctaataattaccgttcaacattg

SEQ ID NO: 200671 - DNA, 442 bp, Homo sapiens
agacaacatggaatagggagatcttgaaacaaattctactactaactgtttttgtccattracctttctggacctcaattttctcatttctaaaatgagtattaatacagtcattttataagtttcttttcattaaatgtaaatgaataaagaatctatgactagacctaaggagttttcatgatcagaaacacatttatttaatttatttagagggtgatttctattgacactaaatattttcttcttgtatcacttacttcagtaccaagatggtatgctttaaataccttgtgatcctgtagatcgagttcacctattatttctgatgcctcatattaggttttaatttcatatttaatttttttgtggggatgtttgtggtctacagcttagttcttaaccatgatatttacagggtttgtgttgctttctgcattcc

SEQ ID NO: 200672 - DNA, 485 bp, Homo sapiens
gatctttattatgcaaatcaacccctctacacctaatttctcaagaggttctccatttctcaagctcataaataaatgaattcatatgkctatttaccaaagtaaattactatagtttcaaagaataaattccatgcccctcccttcatggtagaatgacatattccaacagcatattttccaagtgaatgaatattttccatgtacccatgagctgccagaggttagtgtgtaatatgtcaggtgaagacagggcagttcaaattcccgttttgaagaagacactctgctatgctaaaacagagttggaaaccctgtaggtttgctctgacctggctttgcaagaacagtttaacagacctcgcagcctgtttctactcagaagacaaggaatgattcatgagccaaattttaggttccgcatgttcctttttgcctgtcacattctgaaaaacaatgtactcgtgtgcagagaacaggacaca

SEQ ID NO: 200673 - DNA, 599 bp, Homo sapiens
agcataatgatcaggacacgaaggaaacacaggcttgtcacacccaagacgagcttctaggaagcccagaaatatttctgagaagatgaggatggaagagaaaacccactgcaactcgtacacaaacacccgcctgataccttccaagcataaaggcactggcttcttcgtgtaattcatctgtgatctgtggataacctgctagctggtattaaaggaatagtgaggtgtagaggctggctttagttagtgctagctctgccactggccagctggtcaaccctcatcaagtctctttatatccctgagcctcagtgatgttcctcatacctatttaaggaccttttagccaacttttgtgacaaattgtcacaggttagctttgtcagggctgaaacccccctttgttgaggtggtccaagcatctgccagggcctgggcattctgaggacttggcacgcatttcaacttagcaaccttttctacatgaatgcttgaatcctttgggacacrtgaactttcataatttagttcgttccttgttaaaatttagtttgtcttttcattttcaaataaaaatctagacgtaaaggaaaaac

SEQ ID NO: 200674 - DNA, 372 bp, Homo sapiens
ggaggagtccctcctcctcaattttttggaatagtttcagtaggaattgcaccagctcttttttatacatctgatagaattcagctgtgaatctctctggtcttgggcttttttgtttggcaggctttttcttactgattcaatttcggaactaattattgggttgttcatggattcagtttcttcatatttcagtcttgggagratgtatatgtccaggaatttgtccatttcttctagattttctagtttgtatacatagaggtgttcatcatagtatctaatggcttattgtatttgtgtggggtcagtggtaacatcctctttgccatttcgatttgtgtttatttggatcttccctcttgtttttat

SEQ ID NO: 200675 - DNA, 569 bp, Homo sapiens
cccttccaaaataagatggtaagcaggagcctcgtaaagcgcctgtaccatctccaccagaacccactgctccgtggcagtcgccatagttagccgcttccttccatacrctgtctcatttctatctcactgttcagcttagctgctgtccagacaaatgtttctcaaaatttgagtcacctatagacccaagcaaagggaagaaaaaagaaaaagacaaaagaaaaatctatgcattttagtttgtgagatgctggtgtaaggactgtaagccccattcgaggacaatgtcttgtaaatttttaattatctcagcaaaaaaaattagaagttttatgttttggaatggcaaaataactgagattaatatcacaatggagttcaaattttcaaattctcataaaacatatcaacatccaagaatatacctacagatatacctgtctttggatctcaatgtgagaaacaataaaccaggataaatagaagtgtggggccaagatcaagaggagggcacagtaacctctgggtgttaagtagaaaggacaaacggccaatgagaaaaggat

SEQ ID NO: 200676 - DNA, 564 bp, Homo sapiens
cacaattatttttaatatgccaggtaagatgaacccattatgataatgtcttatctcggactttccccaaacaattcatagtgcttccaaatatcttacctcaaagcctccccacattccttcaggaaagataggtagagttgctgccattcccaattyacatcaaagtaaatgggggtcttggctgattagggctgatccaactattctgacagcattacctgagtcagttcaatagacacagcatttgaattaagtcgtatcatccacatcagatctatatgattgctgtgggtaagccaagagccctcagtcctggtgaagagacatgacagtgtcatcatcagttgtaaagcatgctgcaaagatatttgttactcatgagaattaaaatgtgagaaagcataaatgattgtctcttttcattcattgtagcaggctcaaatttctctcttaaatgaccttgtcacacatctaatatctgatctctcccctagaaagaaaagggtggtattaaatctggcccaaagggaatttacagatcatacatattcaattatcaac

SEQ ID NO: 200677 - DNA, 588 bp, Homo sapiens
ccatacaaaatatatctaggttgttccaagtcaaagaacaagacgtatgaatcccaaatttgaaagatttatagcagaactgctaagcgtccaaacacatccagaaattagccttataaaatagcttacacttctaaagcaaagtggtgggcacaatcgcaatctggcgttagttccctttggatataccaggtgcacagttgcttcctccttttagtatgttttttttccctctcttccttcttattgaagactcctaaaacaagatytctggactactttggtaattattctcctcagtggttgcttaaaactgcctacgttcaccacagagttttcgtggtcaaccctagattcttatgttgggatggctttttcctttccacatagtcctcttgggaaggatcccttttaaagtgattccaagtcagttcccactcacacattcctactccactagtggaagtgtagatttctctttttctttattctgttgcctgaaaccaaaactccaggaaaaacacagcaagccctccaaatgctccccttggaactcttctcacttgcattggtagaaaaaaaaaaaaa

SEQ ID NO: 200678 - DNA, 567 bp, Homo sapiens
accatctccataacataaaaatgcaaggtgaagcagcaagtgctgatggagaaactgcagcaagttaaccagaagttctagttgagaaaactgaygaagagggttacactaaacagtgttttgttttttgtttttgtttttttgagacagagagtctcactctgtcacccaggctggagggcaatggcatgatctcggctcactgcaacctccacctcccaggttcaaaagattctttgcctcagcctcccatgtagctgggattacaggccaccatgtccagctaatttttgtatttttactagagatagggtttcaccatgttggccaggctggtttctaactcccgacctcaaatgatccctcacctcagcctcccaaaatgctggaattataggtgtgagccaccatacccggccaacagattttcaaggtagataaaaaagccatatattggaagaagatgccatctaggactttcatagctagagagcagaactcgatgcctggcttcaaagcttcaaaagataaattgactcgttagggtttaattcaactggtaacttt

SEQ ID NO: 200679 - DNA, 567 bp, Homo sapiens
accatctccataacataaaaatgcaaggtgaagcagcaagtgctgatggagaaactgcagcaagttaaccagaagttctagttgagaaaactgacgaagagggttacactaaacagtgttttgttttttgtttttgtttttttgagacagagagtctcactctgtcacccaggctggagggcaatggcatgatctcggctcactgcaacctccacctcccaggttcaaaagattctttgcctcagcctcccatgtagctgggattacaggccaccatgtccagctaatttttgtatttttactagagatagggtttcaccatgttggccaggctggtttctaactcccgacctcaaatgatccctcacctcagcctcccaaaatgctggaattataggtgtgagccaccatacccggccaacagattttcaaggtagataaaaaagccatatattggaagawgatgccatctaggactttcatagctagagagcagaactcgatgcctggcttcaaagcttcaaaagataaattgactcgttagggtttaattcaactggtaacttt

SEQ ID NO: 200680 - DNA, 626 bp, Homo sapiens
attttctaacaattcatcaaaaactctcacggaaaaaggactgggtaagattcatgagcactgggttcttttctgaccactgactaccttagtaaccatgggcaagttttctatttttatggcctcatttttctctttagtartaaagtaaggatcatttagattgccctgaaaatgcattcctagtctaaaaatgtatagttaaaatataactctaagtatttgttaaaaaaaaaaaaagtacagttgacacaactaaaatagcaccaaagtatcttcaaaggttcacttaaagacactgctgtggggggaaaaaaaacaaaaacgaaaaaactaaaatgttgtacttaggagatatcagtgtgagaggcaggaggtaagcccagcactgttctaaaggttacagcttttggggtcagatagatctgagattcttttgtcctgacttagtggttttgctggatgtgtgactctgggaaacttaatttttctaagctttagtgaaaaataatgatcatgcatatctcctagtgtagtgagggaccaattaagacacataaattggaaataaaacctagggacaatcctttctcctgtgttaataagtattaagagttctaaatgct

SEQ ID NO: 200681 - DNA, 525 bp, Homo sapiens
cacattttctaacaattcatcaaaaactctcacggaaaaaggactgggtaagattcatgagcactgggttcttttctgaccactgactaccttagtaaccatgggcaagttttctatttttatggcctcatttttctctttagtaataaagtaaggatcatttakattgccctgaaaatgcattcctagtctaaaaatgtatagttaaaatataactctaagtatttgttaaaaaaaaaaaaagtacagttgacacaactaaaatagcaccaaagtatcttcaaaggttcacttaaagacactgctgtggggggaaaaaaaacaaaaacgaaaaaactaaaatgttgtacttaggagatatcagtgtgagaggcaggaggtaagcccagcactgttctaaaggttacagcttttggggtcagatagatctgagattcttttgtcctgacttagtggttttgctggatgtgtgactctgggaaacttaatttttctaagctttagtgaaaaataatgatcatgcat

SEQ ID NO: 200682 - DNA, 546 bp, Homo sapiens
tttttctcatgttatatagtcacagkcttaatgtcatgccctggacttggttcacagagcagcaaatggcagagctgaactgagatcaactgtggagcatttgacaatctactttaaaataatgatctcagactctaaagggaaatggtctcagatataaacaattttgcttggtgaaggccaaggacaagataatgtttattcagttacttttggtcctcctgagtctaaagatagatgatcaagagaaagaaaagagacattcagacaggtcagcattccctagatcctggcaagagactgtatgtgtggtttcaaaatttttttttttcatatctctagcagtacttaaataaatacaagtctatttagttagagtgctctagttaattgccctaagaaaattcaataaaaaaggagacccatattgacagagatacatacaggaatttggttatattaatggattttaaatgtggccagttttagggatggtttaatactgtagcctttttgtggtctaaagaaagaataatgttgcacccc

SEQ ID NO: 200683 - DNA, 546 bp, Homo sapiens
tttttctcatgttatatagtcacaggcttaatgtcatgccctggacttggttcacagagcagcaaatggcagagctgaactgagatcaactgtggagcatttgacaatctactttaaaataatgatctcagactctaaagggaaatggtctcagatataaacaattttgcttggtgaaggccaaggacaagataatgtttattcagttacttttggtcctcctgagtctaaagatagatgatcaagagaaagaaaagagacattcagacaggtcagcattccctagatcctggcaagagactgtatgtgtggtttcaaaawttttttttttcatatctctagcagtacttaaataaatacaagtctatttagttagagtgctctagttaattgccctaagaaaattcaataaaaaaggagacccatattgacagagatacatacaggaatttggttatattaatggattttaaatgtggccagttttagggatggtttaatactgtagcctttttgtggtctaaagaaagaataatgttgcacccc

SEQ ID NO: 200684 - DNA, 610 bp, Homo sapiens
caagggggctgtttctttttactcagaaagtccctccattccaggagcctccacttcttgaacaaaatttcagtgctaggcatctccttctaatgtttttttgggaggagagtccaccaaatccagattragcagtaaagtagacctaagaacagtgggaggtggaagaggagttgggaaaggatggatgaaaggaggatgtgggactcattccctgctgaatcctactgttcaacatgtgaaggtctgtagtacaccctcccaaaagggcccagctaagactggaagtgtccggagccggatgcagaaatcgatgcagtgctgacagatattttattctttttgtagcagctgtgaatgggagttcattcatgatttggctttctgcttgcctgttgttggtgcatacgaatgctagtgatttctgcacattgattttgtatcctgagactttgctgaagttgcttatcagcttaagaagcttttgggctgagacgggagggttttctagatttaggatcatgtcatctgcaaacaaagataatttcacttcctctcttcctatttgaataccctttacttatttgtcttgactgattgccctggccag

SEQ ID NO: 200685 - DNA, 572 bp, Homo sapiens
aagcttgtgtatcatccattatcatgtgtaataaataaacgatttaattctcttgaaagtaaataaataaataaaatgaaggagtggctccttatgagcctccttgcatctgaattccatcagcataagttctcagtttaaayggctgcctccttgaaacagtgccgagggaatggacaacaagatggacaagtattcatgcgggcaacaaggggaaaggaaaaattcaggaggctgagatatttcagaggagccaaattagcccaagtgaactgggcactgtcatgtgccccaagagcagatcatctccccaaagaaaaattctctccacttcacagcttttcctaaattggtcttaattctgaatcaagagcctcagttcaattttttatctcaggacaccatcatattatgtgtggattttttaaatgacattttccagaggaatgaccgagagtgataactctgttaatattcttgcaaaatgagggtcttaaaaatccatggtcattctcccatatgtttacacaaacggggcaatgggagcttctttctcatcgcaaattcatcac

SEQ ID NO: 200686 - DNA, 566 bp, Homo sapiens
cctttctgttctttggcctcctgtagtagatgcaatatttcatctcttagtcattttagccagggtcctttctgattgttttatgacttaattacaatgattacatcatgtttatagactatgcctgcccagcacagtgcaagctttcatatcacacccttaacagagaagaatcaatgggtatgcttgctggatacaaaatcaactaatgggctacaactgtgaagcaggaagcttttccaagaaaacatacaacatcattagttgaggagactgtatctcatacagcaagacttggtgtctgcttttcaacccagagacttcaaacagacctaayagatcttttagtcttcatttaaggaaagctcagggtgcagaatccagcatcccttgttttttctcatcactatgacaagtagtagcaatcttgtgggaaaaaaaaaatgccaggagagtatcatgaaactagctgcactcaaatataaaaacggtattttttttctttcttggatttgcttcataccctggaagcaaccagctaatttatatacgcccaagcctagacc

SEQ ID NO: 200687 - DNA, 475 bp, Homo sapiens
gcttggacagcttttcctatcacaatcactttatctttctaactcaaagtagagaaaaatctttatgttgtggtgttgaagcacccagaatagacttcaatttatacccatggaaatgagctgcttttttttttctttctagcaacaaagtcctttcgtctcatgaataaattgcaaatattcttctgaattttctaagattgttaattaaaatccacttgatttaagctgcttctcccattttgcactgacaaaccataaattatggaggaggtcaaagaatgaatggcaatttgacatgaagaggttgatttattgcttcagaaggatttttataccagatgtggcagaagtcataaattaaatsctaaatgttatgtattattacgctttcaggaatataaatgtgtctaaaatactatgcaggtggaatgataaaaatatgaatctactctcctggcaattttaaaaggcc

SEQ ID NO: 200688 - DNA, 578 bp, Homo sapiens
tcagcctgtgttcccagcatcatttctccccagctccaatgaaggtcattatgacagaccttggtcagtgctgactttcttttggatcccaagaataaaagcaggggagacattctattctacacatatacacaatcttatcaacacccaacaagaattatgtgttcaaaaagaaattccctaaaaggacacctgtcaaaacaacttcagaaaaatctctttttcrtgtccctgtaagaaaaaagtaaacttccctttgaaaggcccttctccattcctcaaaatatttaacatagaatttccatatgatccaacaagtccactcccagttacatattcaaaaaaactgaaaacaggaactcaaacatatttgtacaccagtgttcattgaagcattattatcaaatatcccaatatgggaaacaaccaagatgttcatcaatagatcgatggataaacaaaatgtgatatatccatagactggaatattatttagccctaaaaagttataaaggtctgatatgtgctacaacatgaataaccttaaaaatatcacactaagtgaaagaagccggaca

SEQ ID NO: 200689 - DNA, 585 bp, Homo sapiens
agtaaacgaatgttatactacacttattcaaagatacctctagtactcaatgcatgcatactaatcctcctgttttattatctttacaatatttttaatttgctgaaaagtaattgtcaaaagttatcacaaaccaggaattttgatagagactgaagagtcaaagcaccaaaatatcaagaaacctataaaccacatgaagaataaagacacrtgaaaagggagtagaagagatatgtgctgtcactgaggtgttaagcaattgttacagcagcacagaacacaaccagttctcaccaggaggttctagaggtcaaaggacaagtgagagctttacagagagagagaatgggaagggcatttcggagcatgaagtacacatggcaaacttgagggcaggcaaggatgctggggctaatcttcatgctttgaaaaccaatctgatttttgtgggggcagggacttgtcagatatctttgaaagccaagtctgataaacaaagtagtagataaaatgttggcaaaaaccatttgagcccaagcagacatcataaactggctctcagggagtgtctaagatagaatt

SEQ ID NO: 200690 - DNA, 589 bp, Homo sapiens
attatacatttttgaataactgtaagaggagctttaaattttatatcacctacttgtgcaaaaaaaattcttatacatgataactcttaagaattgaaaaagattattattaaagagtctcagtcagtagtttccttagccatttcaaatacagaacctgatatgaaatggtaatgttcacataagcaagctcaaatgtatcactaaaaattttgagtggaaattatatgcaaattcaatttggaaaattttatccaaattcaataactgtgattttgtttctattccataataaaatatgacataaaggaagtataatgacgtttcttaatcaaacccccattaaacatcagatcccttccagtttaccctggwatgcagtactctatatgccatgataaaaataattcatagaaattggcatcagctaacaaaacaataattggaataagtcatttttgcccagcctctgcgactctttctatcatgttgaagaccagtgctggttgatttgaacaaggcttggaatttatcactgatacatgtgtagatactgtttggggaagaatataaaattaaaaggagcaag

SEQ ID NO: 200691 - DNA, 450 bp, Homo sapiens
atattggagtagggtgtgctctgaattcgatgtgactggtgttttttccttaacaaatggagacagatgcacacagggataccatgtgaatctgaaggcagagataaggaggaggggtacatctacaacccaaggaatgccaaagatcgccagcaaaccaccagaagctaggggagggcatggaacagattctccctcactggcctcagaaagaaccaaccctgctgacaccttgatctcaggctttcagcctccaggactgtgagacgatcaacttctgttgtttcagccactcactttgtggtctttgttatggcggcttcagggaacccattcagctcattgcttccctggcagttgtcagcactagagctgcctctacttcctgattttgtcttgttctctttccrtctgggtctaggttctactgcagggcttggtggaactgac

SEQ ID NO: 200692 - DNA, 489 bp, Homo sapiens
taggtggcaacatgtcctatcttccagcgtaggaagcactactggtaaattcaagtccccatgatccatcccaggtcctctggctctaagctctgctttgcctttagggaaaatagcttgcactttctgagaatcttcttcctagttgtgtaatgttagctgtatcctgtcatcattcagaatcacagttccctcatctgtagaatggagaggatattaggtatgataggaccttctgcagatgaaattagagaacatatatgtatcatcatgtcaggtatattagtctgttctcatactgctataaagaactkcccaagactgggtaatttataaagaaaagaggtttaattgactcacacttccacatggctggggaggcctcaggaaacttacaatcatggcagaaagggaagcaggcacatcttacatggtggaaggcaagagagagcctgtgaaggaggaactgtcaaacacttataaaaccat

SEQ ID NO: 200693 - DNA, 551 bp, Homo sapiens
cccatcccacttctctccactaagcatcaaatcctcctccttgtcttatacaggtctccttgggctgatagggtaaaaaaagtctctcttaattttaccctaaacaatctctccccatgaaaacatgtatatttatgttctaagaggagttctgatgtgccaacatttttctcttctcctgaaaatgtttgcagccccttgaaatttttgccatgcagattttctgctcaagaactatraaagattaggttaaaacaccaggtctgttaaaccatggcctgacatatccacaccctcctccaagtatgaacaaaaaccattttttggaaggatgagcaagactcatctcagagcctcttgtggggaattgcttcctggctttgcacaagtagtcatgcacagggagaggttttcacctttccatgcaagcctcatctcttcaacacccgcaccaggaggtctctaatgaagcctatgggctggagcatgtgcaatagatggtaggtccacatggcagccttggagctgaagagcatctacagagacgttgg

SEQ ID NO: 200694 - DNA, 599 bp, Homo sapiens
ttctgacagccaaggggtaagtggaatttgctaagtgaaagaggtccattttaggaagtcccactttctcttaaatgacaaccagcctcctcctaagtctttcccacttgctctaggcctgaattcagagttccattgttctttcacagaactccttggagtgacaatcaactaaattaaatcaattaatccaacatttacagaaagtcaggcatgtactgcttctggggaaagtggaaacagatcagatgcaggcactgtccagtggtttctttttcccaagaggacaattttgaaactccctcctcacatgcccctagggtagccaaaacccayagaggttcattctccaagatagggtggtacagtgggcagagcatcagccctgggggccacaacacactctgttagaacccagctccattattattacatcatcttggggaaaagtcacttagactccatgaaccttgttttcctcctctgaatctttcagagaataatctctaactcacacgatcactctagggattacatgagacgatgtgtgtgaattttctagaacagcacccaacacacagtaagtcctcaataaatgt

SEQ ID NO: 200695 - DNA, 571 bp, Homo sapiens
gattgactccttccctaaatcccttcccagagccattctgggaattatcaggcagaaaccagttatctcatatgaggactcaaatgggcaaagacaagaaaatgaatgggtttagaaaaacaaacgacaaaagtccatgaaacagaaggacctctcattaaagtagctgactcattttgaaacaggtgagcaaactgaagctttaggggaccacccaccccaggaagaggatcaactgacaattcaataracctaaatctagtgtcagaatttcaataaatttagagacagattagagacaaagcccccagaggctttttgcaagtcctcagcaatttcctctcccataagagagcagtcaaactgtaaccaagtaaattgggaaaatagcaaaggcaaattcagcattaccaatttggatcaaataacaccatcaggtaactgcccccactgatatagtggtcaagtagagggggaaaagtacaagacttaaaggaagattgtgtgtcccccacagtaggtttcacacgcaaagatttttttttaaaactcaccctggaagaagagatgc

SEQ ID NO: 200696 - DNA, 478 bp, Homo sapiens
gtcactagtgagacagcagaaagagagagatgggacttcaacttcacaggctgttcttagatgcccaggttggtcgtgaactccttgaggttaggaaaggaactattagcaaaatggaacatcctccaagtagaaaattatgctgatgtcaaacaatttcatgtagctttaatggatgagaggcaacatgatattgggcatgacatgcttaaaaagcattgctttcagtggcccagaaagtgtcataaaagaggccacatcaaagtagctcttctttagcacattacaattgagaagtcattcctcccattaaaaaaaaaaagcaaaatgcaactctttacaagggataggggtaggagaaaagggttgagcccggaagaaagaatactcaggctgcagaaacactatggctgtagttggagtgaaatacaggccacccaggggragctgctgtcctgtgaagtccactgatagaaac

SEQ ID NO: 200697 - DNA, 582 bp, Homo sapiens
tgttatccacatcttcagcagtaagtgctacatagaagatgctcagtcaacgtgcgtgtttgctttttttttaccatttgcagtcaccttcctaaaaaggaagggtgtgtggggaggggaggaagaaagggaagcaaaagagatttcctgttgcagaagaaaaatggcataaactctagagaggctaccatatctctaatttgacctgagctgagcaatatatccaggatttaaatgatgctggtcactcacttctttctaggtcacctttgtccaaggagacatccttagaatcacaatagtaggagaagacgatggaagaggagaggagagaagggaaaggaggagggaagggagggaaagaagaaaagggtagggaggagaggaagagggagaagggagaggagaaggttaaggaagggtagaaagggaaaagaaaggacaaagagggaagggccagggaggagagggagkaggagttacacagaagctcattccctatggacaacatgagtttaagaaacgccgcacactctatccccctcttagtgatgcacaacacacattgccatagcaatataa

SEQ ID NO: 200698 - DNA, 590 bp, Homo sapiens
tttcatgtttctcaccatttgtttatcttctttggacaaatgtctatttcagccctttttaaaaaaaaaaaaaatcaggttatttgttttgttattgttgagtggtaggcattctttatgtattccagatagtaaccctacaagagaggtttgtaaatattttctcccattccacaggttgtcttttaattctgttccctttgaaacacattagttttaagttagatatagtctcatttgtctatatttgctcttgtcgcctgtacttttggtgttatatccaagaaatcgctgccaaatccaacatcataaaactttctacctacattttcttctaggggttttacagttttcactcycatgtttaggtctttaatccattttgaattaatttttgtgtatggtgtaagttaaggatccaacttctttctgctacatgtggatattcaatttactaaatgccatttgttgaagaaattattctctctccattgtgtagtcttggtacccttagtgaagattatttgaccatgtatgtgagagcttcaaaggttttataaacctctaataccctgtattaaaccccttcc

SEQ ID NO: 200699 - DNA, 345 bp, Homo sapiens
ttatatgtttatacctttagagtatatatctttatgtctgtatctattgtagaataaattgctttctcctttagctttctttatgttcatattcagttgactactttcaccactctatttcatctgtattcatgtgcttgttaagacttccctctacactgttttttccagcaatgtatattctattttgtttttgtattgtttcactttttgctgtcattatttatgggctctttaatmctattaatgctattttgggcctcaatttgtttccttttgtccctattaatctcatgctgtccatttattccattatcctgaaccctcgctttattgacctggtgt

SEQ ID NO: 200700 - DNA, 413 bp, Homo sapiens
gaattctccttgcagataaacttcatgtgttagaagaaatatttttattcacttctcagaaggaaggttttttcaatcagaaggcccctattttgctgaacaccaacattagtttaaacacgcaagcttgtgggaagaacccagaagcaaaacctaattgccttccataacagaggggaaaaaagtacaacagaagagagaaaagagatagaacaagctagaccaaatgctgagtaagaaaaatgaagagttaagtaaaagcaatgggggtacaggtgagaatgaacattgaaaaaaagatggtctgatattaattttcagttgtttcctctgaaaggtatactttctccatctcacacaaggaatatttaktaaagtttatactattcactgatgtttttgtagtaggtttt

SEQ ID NO: 200701 - DNA, 466 bp, Homo sapiens
gttggcctgcgtccaggtcttagagctcagagacttgaatttcaagacagacctggyctttcttttcatattcaaatactctgcttggttccgcattgccaagcttgtaaggagtcatgaggatcagcttctaatctgggagggctttgcaggaaatagaaatgtccaagggttgccatttattcaacagctggaagtacacagaccaggtggtggcactgaagtctcagcagccatttatacctggtttcagggacttgtctcttgggaggtgggcagttgagagaacaaagaaactcccaggaatgtattgcagtggatggagggtctggggtgggaacatgcctggccctatgtgggaggcggggagaggaggggctcctggcacctaggcctgggcagcaggaggctagggtaacctgttcctggcaggttccttgattacaggcatctgaggtggatacag

SEQ ID NO: 200702 - DNA, 463 bp, Homo sapiens
ggcctgcgtccaggtcttagagctcagagacttgaatttcaagacagacctggcctttcttttcatattcaaatrctctgcttggttccgcattgccaagcttgtaaggagtcatgaggatcagcttctaatctgggagggctttgcaggaaatagaaatgtccaagggttgccatttattcaacagctggaagtacacagaccaggtggtggcactgaagtctcagcagccatttatacctggtttcagggacttgtctcttgggaggtgggcagttgagagaacaaagaaactcccaggaatgtattgcagtggatggagggtctggggtgggaacatgcctggccctatgtgggaggcggggagaggaggggctcctggcacctaggcctgggcagcaggaggctagggtaacctgttcctggcaggttccttgattacaggcatctgaggtggatacag

SEQ ID NO: 200703 - DNA, 461 bp, Homo sapiens
cctgcgtccaggtcttagagctcagagacttgaatttcaagacagacctggcctttcttttcatattcaaatactctgcttggttccgcattgccaagcttgtaaggagtcatgaggatcagcttctaatctgggagggctttgcaggaaatagaaatgtccaaggrttgccatttattcaacagctggaagtacacagaccaggtggtggcactgaagtctcagcagccatttatacctggtttcagggacttgtctcttgggaggtgggcagttgagagaacaaagaaactcccaggaatgtattgcagtggatggagggtctggggtgggaacatgcctggccctatgtgggaggcggggagaggaggggctcctggcacctaggcctgggcagcaggaggctagggtaacctgttcctggcaggttccttgattacaggcatctgaggtggatacag

SEQ ID NO: 200704 - DNA, 541 bp, Homo sapiens
aagaaacattccctttgtatcttggtgttttactagtgagttatttcccctaagtacttccagtagatgtaactgtaactctgccatacagyccagcagttaatataagcttatctttttcaatgcacagggatagatttattgagctgataatatttgctcactcttcttttcagtggtgatttatttaaactctccagctaatttaaatttaataaaaaaggaaccttgtacattgctttattgaagctagattcatctccaaaaacactgcagtattcaagattgtgcaaaagtggcaataactgttactggatttaattaaaaacaacaaatcatttggtcagtggtaatggatgctctgtacaacccattggatacatggtaatttaagaaactgatatcttaatcttaaaatgttggattagacaagaccctggagccgatggccctgctcccgctttgctcaacatggtaccatttcatccgcaatggctttcctttgatgttgggaccgcaagggttgactggccagcgggga

SEQ ID NO: 200705 - DNA, 541 bp, Homo sapiens
aagaaacattccctttgtatcttggtgttttactagtgagttatttcccctaagtacttccagtagatgtaactgtaactctgccatacagtccagcagttaatataagcttatctttttcaatgcacagggatagatttattgagctgataatatttgctcactcttcttttcagtggtgatttatttaaactctccagctaatttaaatttaataaaaaaggaaccttgtacattgctttattgaagctagattcatctccaaaaacactgcagtattcaagattgtgcaaaagtggcaataactgttactggatttaattaaaaacaacaaatcwtttggtcagtggtaatggatgctctgtacaacccattggatacatggtaatttaagaaactgatatcttaatcttaaaatgttggattagacaagaccctggagccgatggccctgctcccgctttgctcaacatggtaccatttcatccgcaatggctttcctttgatgttgggaccgcaagggttgactggccagcgggga

SEQ ID NO: 200706 - DNA, 633 bp, Homo sapiens
ggttggggagaaaaaaaaatcctggggaagyaaaataaagattaagttcatctaaaagtaatcttttcccagagatcttaaaatactcggagcaaaaatgattgcttctcactctcccgtgtccctgaattctcgttcagccctaaaaatagaagcactgaaagctttccaagaccttcctgaaacaacacatttgagaccacataaaaatattttatgatgacttctgtagcctgatttctttccgtgtgtgacatggagagttcaaagtcatttccactgaaaacaaccctcttctgatgcccgtacaatgctaactacagccactgcatcccagggtgtgtgcaaggcggttcaggtgagggttgctgtccccggcaaagtgaatccattttggaaagtttctcggcagggacatccttgtacggaaagatcagatgggtctgtcccaattagtgatgaaacgtggtggcatttactcagaattttgtgctttcaatgcacaaaaataagtcagctgattacttttccggtgcaagggtatcctgcagggaatctcagttctgtttttattttgaaatggctccagcagaaagatctaaagtaattaagcttattacagaaagcattggt

SEQ ID NO: 200707 - DNA, 392 bp, Homo sapiens
acgacttactgcactccagcctgggcaacagagaaagaccttgtctgaaaaaggagggatggaaggaaggaaggaagggaaggcargggaggggaggggaggggagggagggaaggaaggaaggaataaaggaaaggaaagctcactaaggaaccaataatgaggaaagtgtgagcacagctaacattcaagaacaacagccgtttggaaaaatggctgcaagtaacaattaaaacaagcaaataaaaaagcaacaaagtacaatttttacataataagtcaacaaacataatgataaaaaccctgggctccagaggctctgtggaatctggtgcactgtgcatacaagtgaagtccccacaccctttcccctccaagacacacacttcccc

SEQ ID NO: 200708 - DNA, 602 bp, Homo sapiens
cctactggggaaatcgggtctttcactaacctccctaactcttacagcctttgcagtggccacatggggtgtagtaaagaggcacttctaaccatcccaaccaaggtgtatcagtggaggccaaactgggagccctaaatcccaccgtagctcagcagtagtcataaatatccttctcagatgtcaacacaggctgagggcagaatgtaaacatctacccccacttagcaataaggagcctgtgtattcccttcccctgttattgctgtgtcagagaaagtcagctaaagcagtaggtttaacgaagatacagaccctcataccacattagacaaaacgtcagccgtcagttgaaaattacttgctatacaaacatccagaaaaatctcagcttgaatgaaaaaagacattgactatttgccaacacctaaataaaagacatgtcagagttatcaaagatagcagtagtcacaataatgtttcaataagcatatttataaacacaaatgaaatatatgaaaaaaacagattttaaatgaagaattggaagaggtatagaaccacataaaaactttagctytaaaaaatgtaataactaatct

SEQ ID NO: 200709 - DNA, 276 bp, Homo sapiens
ttcctttttctatgtgtatatgtatgtgtatgctacttttaggaaattctatggaataagataaacataattcctcaaggaagaaacaatataaacattgtcacaaaaatccatgtacagatagcaccatacactttataaatgcatgcaccaatccccagaatgctgagttagggggaaagaatcaaattrcaaataattaaggtatcaaattatatctcaacttgattatcttaatacttattgaatactgttgtggacagagaaaaagaattc

SEQ ID NO: 200710 - DNA, 211 bp, Homo sapiens
acaatgacagtatttagatatcaagttacacgtttttcaaaagaaaaatatttcactattttaattattaagcayagttatgaactgtattttaaaattaataataagatccaaatagttgtatattatattatatatacttcctttgtgggattaatgcctaattaacctgatctacatgtatatatgaaaaaacagagtgacactaatt

SEQ ID NO: 200711 - DNA, 680 bp, Homo sapiens
tatgttcagaagtgataaatgaatgtcacatgtcactggccaaagcaagtcacttgatgatgcctgagatgaatgattggtatgcattatcatctcacagggagtggtgctgaatattttggaaaacatatattttgccagacaaccattaattkaattataaccccacaaatattcacctaaagattacatacattaatggagaataattgaatcaatggacatcacataatgaaatctgagaagacttttagagttaggtcaaaacttcagagtgtaatcagaacttaaatatgtaagtcttaccaagtttggggagaattctgacactaggaatcttgatgacccgggcataaaaagagaagaaaaaaaaaaacgcttgaacattaaaatgcctaaaacttttaaaataagctttaaaaatgttgagtaaataacaaaatagtttaatgatataaaatgtatgggtgcctcagggaaaaattggaaagcaatgtagtgggcatattgcaaagttctttggatgccaacattttagagagaacacaaataaaaagctgttattcattaacaaaagcatcaacactatcaacatctactctcaagatgtgtgtttttaatatttaaaagtgaaaacttcttagtcctgcagtttagacacaaaggaaagtcattgaact

SEQ ID NO: 200712 - DNA, 680 bp, Homo sapiens
tatgttcagaagtgataaatgaatgtcacatgtcactggccaaagcaagtcacttgatgatgcctgagatgaatgattggtatgcattatcatctcacagggagtggtgctgaatattttggaaaacatatattttgccagacaaccattaatttaattataaccccacaaatattcacctaaagattacatacattaatggagaataattgaatcaatggacatcacataatgaaatctgagaagacttttagagttaggtsaaaacttcagagtgtaatcagaacttaaatatgtaagtcttaccaagtttggggagaattctgacactaggaatcttgatgacccgggcataaaaagagaagaaaaaaaaaaacgcttgaacattaaaatgcctaaaacttttaaaataagctttaaaaatgttgagtaaataacaaaatagtttaatgatataaaatgtatgggtgcctcagggaaaaattggaaagcaatgtagtgggcatattgcaaagttctttggatgccaacattttagagagaacacaaataaaaagctgttattcattaacaaaagcatcaacactatcaacatctactctcaagatgtgtgtttttaatatttaaaagtgaaaacttcttagtcctgcagtttagacacaaaggaaagtcattgaact

SEQ ID NO: 200713 - DNA, 680 bp, Homo sapiens
tatgttcagaagtgataaatgaatgtcacatgtcactggccaaagcaagtcacttgatgatgcctgagatgaatgattggtatgcattatcatctcacagggagtggtgctgaatattttggaaaacatatattttgccagacaaccattaatttaattataaccccacaaatattcacctaaagattacatacattaatggagaataattgaatcaatggacatcacataatgaaatctgagaagacttttagagttaggtcaaaacttcagagtgtaatcagaacttaaatatktaagtcttaccaagtttggggagaattctgacactaggaatcttgatgacccgggcataaaaagagaagaaaaaaaaaaacgcttgaacattaaaatgcctaaaacttttaaaataagctttaaaaatgttgagtaaataacaaaatagtttaatgatataaaatgtatgggtgcctcagggaaaaattggaaagcaatgtagtgggcatattgcaaagttctttggatgccaacattttagagagaacacaaataaaaagctgttattcattaacaaaagcatcaacactatcaacatctactctcaagatgtgtgtttttaatatttaaaagtgaaaacttcttagtcctgcagtttagacacaaaggaaagtcattgaact

SEQ ID NO: 200714 - DNA, 680 bp, Homo sapiens
tatgttcagaagtgataaatgaatgtcacatgtcactggccaaagcaagtcacttgatgatgcctgagatgaatgattggtatgcattatcatctcacagggagtggtgctgaatattttggaaaacatatattttgccagacaaccattaatttaattataaccccacaaatattcacctaaagattacatacattaatggagaataattgaatcaatggacatcacataatgaaatctgagaagacttttagagttaggtcaaaacttcagagtgtaatcagaacttaaatatgtaagtcttaccaagtttggggagaattctgacactaggaatcttgatgacccgggcataaaaagagaagaaaaaaaaaaacgcttgaacattaaaatgcctaaaacttttaaaataagctttaaaaatgttgagtaaataacaaaatagtttaatgatataaaatrtatgggtgcctcagggaaaaattggaaagcaatgtagtgggcatattgcaaagttctttggatgccaacattttagagagaacacaaataaaaagctgttattcattaacaaaagcatcaacactatcaacatctactctcaagatgtgtgtttttaatatttaaaagtgaaaacttcttagtcctgcagtttagacacaaaggaaagtcattgaact

SEQ ID NO: 200715 - DNA, 528 bp, Homo sapiens
tgatgcatcttggcatgcttttatgttgtttttttcctgctggaataaatacacccatcaagtgccttttatctgtaggtatgccatttttatcaaatttagaaaatacccaggcatttttgccctcaaatatatatttttctattcttacctttctttcccttcctctgtgcagattagttagtatttcccatatgttgctgaggttgagtttactttttcggttctctttctatttttattttctatgattcaccacaagtggtttcaactactaggttttcatatttgctcatattyattctgcagggcctaatacactgttaatcctctctaggaaattgctctggctaggaattcaagtactgcgtttaatagaggtggccaggtgagcatccttgccttggtgaaaaagctttcagtttttcaccactgagtatgatgttatacatgaacttcattatgttgaggtaacttccttctatacctaaattgttgaaagtctttttttttttatcatatattgaa

SEQ ID NO: 200716 - DNA, 528 bp, Homo sapiens
tgatgcatcttggcatgcttttatgttgtttttttcctgctggaataaatacacccatcaagtgccttttatctgtaggtatgccatttttatcaaatttagaaaatacccaggcatttttgccctcaaatatatatttttctattcttacctttctttcccttcctctgtgcagattagttagtatttcccatatgttgctgaggttgagtttactttttcggttctctttctatttttattttctatgattcaccacaagtggtttcaactactaggttttcatatttgctcatatttattctgcagggcctaatacactgttaatcctctctaggaaattgctctggctaggaattcaagtactgcgtttaatagaggtggccaggtgagcatccttgccttggtgaaaaagctttcagtttttcaccactgagyatgatgttatacatgaacttcattatgttgaggtaacttccttctatacctaaattgttgaaagtctttttttttttatcatatattgaa

SEQ ID NO: 200717 - DNA, 598 bp, Homo sapiens
acaccaatcaggtatcacttgcctgcaaacagctgcatctgttgggccaggagtggtggctcacgcctgtaatcccagcactttgggaggctgaggcaggtggatcacaaggtcagaagatggagaccatccaggctaacatggtgaaaccccatctctactaaaaataygaaaaaattagccaggtgtggtggcgggcacccgtagtcccaagctacttgggaggctgaggcaggagaatggtgtgaacccaggaggcggagcttgcagtgagcccaaatcacaccactgcactccagcctgggcaacagagcaagactccacctcagaaaaaaaaaaaaaaaaaaaagaaaaagaaaagaactgcatctgttggaattcagatgtaacaagaagtatgtattcaaataggtgaaagcagctttctgacagtaccattttagaaccaaggatctttagagcacactttgaaaagcagtgtcctcagaaatctagatacacaagatgctggcaccaactcaggaaaggaaatgatctgttaaagggaagggaaacaaaaccaagctaaaaaattataagagcaaaaatcaaagttgaa

SEQ ID NO: 200718 - DNA, 587 bp, Homo sapiens
atacaaatattagcagataatactttatttatagtatctgaaatgttgtagacattcggtaaattttaccagcttaattgagtcaagtatctgcaaatgcttgttttcaggcatgaatggattaatcccaaacaggactaggactatgcttagaattaggaaaaaagaaaacwtacagaacatggtatattggaagataaatacagtggtagtagtagtggagacaagagatgcgtatctccataaaacgctgttactctcaatattaaattcttatgtctaagaggaaggaaattaaaactgtcagaaaaattttagtgccttaagaccttcaaagatatgtaaatcacctaaaatatgaaagtattatattgttcaacatgtataaacaataacaatgttttattcatatatttcttcaatcactttatttgtgttaatttgcctaaaagtgtgcttggaaacaagaatgaaagagacaaaagtgattcttgtcctaattgagtttacattttcatgcaagacatagacaagaaaataaataccatacttataatttatgattgtgttaagtgctatgaaatacc

SEQ ID NO: 200719 - DNA, 587 bp, Homo sapiens
atacaaatattagcagataatactttatttatagtatctgaaatgttgtagacattcggtaaattttaccagcttaattgagtcaagtatctgcaaatgcttgttttcaggcatgaatggattaatcccaaacaggactaggactatgcttagaattaggaaaaaagaaaactwacagaacatggtatattggaagataaatacagtggtagtagtagtggagacaagagatgcgtatctccataaaacgctgttactctcaatattaaattcttatgtctaagaggaaggaaattaaaactgtcagaaaaattttagtgccttaagaccttcaaagatatgtaaatcacctaaaatatgaaagtattatattgttcaacatgtataaacaataacaatgttttattcatatatttcttcaatcactttatttgtgttaatttgcctaaaagtgtgcttggaaacaagaatgaaagagacaaaagtgattcttgtcctaattgagtttacattttcatgcaagacatagacaagaaaataaataccatacttataatttatgattgtgttaagtgctatgaaatacc

SEQ ID NO: 200720 - DNA, 587 bp, Homo sapiens
atacaaatattagcagataatactttatttatagtatctgaaatgttgtagacattcggtaaattttaccagcttaattgagtcaagtatctgcaaatgcttgttttcaggcatgaatggattaatcccaaacaggactaggactatgcttagaattaggaaaaaagaaaacttacagaacatggtatattggaagataaatacagtggtagtagtagtggagacaagagatgygtatctccataaaacgctgttactctcaatattaaattcttatgtctaagaggaaggaaattaaaactgtcagaaaaattttagtgccttaagaccttcaaagatatgtaaatcacctaaaatatgaaagtattatattgttcaacatgtataaacaataacaatgttttattcatatatttcttcaatcactttatttgtgttaatttgcctaaaagtgtgcttggaaacaagaatgaaagagacaaaagtgattcttgtcctaattgagtttacattttcatgcaagacatagacaagaaaataaataccatacttataatttatgattgtgttaagtgctatgaaatacc

SEQ ID NO: 200721 - DNA, 587 bp, Homo sapiens
atacaaatattagcagataatactttatttatagtatctgaaatgttgtagacattcggtaaattttaccagcttaattgagtcaagtatctgcaaatgcttgttttcaggcatgaatggattaatcccaaacaggactaggactatgcttagaattaggaaaaaagaaaacttacagaacatggtatattggaagataaatacagtggtagtagtagtggagacaagagatgcgtatctccataaaacgctgttactctcaatattaaattcttatgtctaagaggaaggaaattaaaactgtcagaaaaattttagtgccttaagaccttcaaagatatgtaaatcacctaaaatatgaaagtattatattgttcaacatgtataaacaataacaatgttttattcatatatttcttcaatcactttatttgtrttaatttgcctaaaagtgtgcttggaaacaagaatgaaagagacaaaagtgattcttgtcctaattgagtttacattttcatgcaagacatagacaagaaaataaataccatacttataatttatgattgtgttaagtgctatgaaatacc

SEQ ID NO: 200722 - DNA, 491 bp, Homo sapiens
gtgttttttgtttgtttgccatttatgtgcttataattaagaaccctgacctggatgctaggtgtagttattgctacttaggtggcatagtttctaagacctgtctggggagacatagctagaaaatatatgtaatacagaaacatgcacacatgaaaaaacatacgtgtctatctaatctatctgaaaaaccgtgaatmtgtactgatacctttagtctgaatccaataccacatgcttaatttgaggcttctctccttatgcttaactttttaaaattacttacttgttcattcctagaatacacaaaaagttgtttcagaaatatcaacccataccacagctacaaacaaatctaccaactagaattcaatatttgtttacagttctttaaagctttagtctaagaatatatagtaaaaatgttcaaaaattatttttttaattagctgtcacactcaagtgttatgactttatttatttgaaacaca

SEQ ID NO: 200723 - DNA, 619 bp, Homo sapiens
acagctacaaacaaatctaccaactagaattcaatatttgtttacagttctttaaagctttagtctaagaatatatagtaaaaatgttcaaaaattatttttttaattagctgtcacactcaagtgttatgactttatttatttgaaacacaattaggcttatgagtttctgcttctatttcaagtactcccccaacaactttgtggatccattatttacgtttaagtatgcaaatcattaacatgtttccaaagtaagaattatacaaaaagataacaaaaaagtatcaggcctgcaccaaaatccctccgcttcactttcaaactctcccaagagataaacacaaacatttgtttctggtttatccttcatgtgagtgtccatggtgatgttttcctgtttttttttcttattttctctctcttgcacaataggtaatattaaayacatgcttatatgcctttgcactttttttcactcaacaatatatcctagaatcacatagtgtcatttttcattacttgttgaagccacatgataatctattgtctgggtaggccacaaccgaactttcgtacatgagcatttggttacttctgatattttgtaattccaaac

SEQ ID NO: 200724 - DNA, 541 bp, Homo sapiens
tagcaagtagaatttagtaacccattaaaaaactaatatatcctggctaaatggatttaataccttgaaggtctcagcatccccttcttgtttggtgagttgattacatgcacatggactacaacctatgttgctataaagctgttgagcattagattttacacaccttaataactaagtgatagttatacctcctgatttatacattctacatcacgtatctggttagaaagcaaacaggagaaagaatagcgcaatctacaaaatttgggcttygttgtcatagagataagcatttgaatcatgcagtgctgcttatgttcttgaaaaagttacataacatcttggagcttcatttttctacctgtaaaacatatattccgatatttaatcaaactgatttttagttaaataaatggaaggactagcactttgtagtcacctaataaatagtctccccattccccagtttggtaatcaataatcaaatctcaggaactttactgttgggcccctagtgactcttctgtcttgccaaaat

SEQ ID NO: 200725 - DNA, 574 bp, Homo sapiens
tttaattaagcatgccatcaccaaatacgtattactgtaagattgcatcattttactatttttccataattcagagtccttgagggaaagtctaagtggccaggtcatctgtctgtgttctacatcactgggtctcaaagttggctgaatattggaatcacatggatagggccttgtgttaaaatactgatgtctaggtctcatttgcagagcttctaatttaattggtgtgaagmgcaacctaagcaatagaaattttttgaagctcttcagataattctgatgtgcagcaaaatttgatatttactcttccagatggttagagtccacttgctgaagaaacagaggaaatattcaaataactcctacttatatattagttaattgattaataaattatcatttttcaaatataattcatactccttttagaaagttaaaaaaaaaccatcttatgaaagttacccataatctcctatccaaggataacttctataaatgttttcatttatctcccccgatattctactatgtgtgtacacacacatctcgcacacacatacatgattgattt

SEQ ID NO: 200726 - DNA, 412 bp, Homo sapiens
tagaatcacattcccccagatattgcttttacttttttttcactgctttaataaggcataactgaacttgaaaaagtctacatatttaaggtagacaatttgataagtgttacayaggcacataactgggaaactaccgcctttctctatcttctatctatctatctatctatctatctatctatctatctatctatctgatatctacttacctttaggtaagtggaattaaaaccacaatgtagtattactaaaatggctaaaattaaaagaaaaagataaccaaaccaagtgtttgtggaatgtgaagaaaacggaactctcatatattcctggggaggaatataaatggcacaaaactttgtaaaagagtttgatcatttcaagaagttcaacatatacctatcttatg

SEQ ID NO: 200727 - DNA, 612 bp, Homo sapiens
tttttggctattgtgaataagctgctatgaatatttatgtacaggtttttgcatgaaatgtttttaactatcttgtgtatgtgtgtgtgtgtatatatatatatatatgtatacttacataagtagttgtagggtactctatttcttcatgtggatttggattacagcttatggtttggattacaggatttcttcatatggattagaatttgacctttcattcaagactgaattacttttctttagtaatttttgtagggcatgtctgttagtgacaaattctctcaactggtgtttatcaggtaatgtcttaatttcttcttcattttcttttcagtcatcccactgccttctggmatccatggtctcagatgaggaatttgctgctaatattattgaggatcccttgtatatcatgggacacatttttcttgttgctttcaattttctgtctttggtttctgataaattaaatatacgtgtctaggtgtaggtatttttgagtttatcttatttgaaattcattgagcttcttaggtgtttacatgaatgtacttcataaaatgttggaagcttttgaccattattccttcaagtattattctgtttcag

SEQ ID NO: 200728 - DNA, 498 bp, Homo sapiens
tccagtagaggccagagggtgcctgccaggtattggagcttcaagctggtaccaggagtggtttaaagaagggaaacgggagaatgggcctgggtgcggtgatttggagtcattctttttgcatctccataaagtttttcctagtatctcattgtaatattgctgtcctaggcaagttaattctcctactgggtctgtaaaggcttttccccagtgcacaatgcagaatctcttgataagagaggtttttaagagccaggtgctcaagcttgtgagtgttggttcgggggaggggatggtcagagtaaagttactttgaggcattagctccttttcctcccatggtgactggtcyccatgtttgttcccccacagacgtaacatgaagagatgggcaagctgctggttatgctttctgccagttgggtgaatagatttttggctatgggagggggttcaggcaatttctggttgacctgctcatagaatgacttgaaa

SEQ ID NO: 200729 - DNA, 435 bp, Homo sapiens
tagcacttttgttacttctcgtgctttctctgttctggtggggaaagcctcaacacatcctgaaatggtgaagattagtrctaacatataccaatagccccctgctcgaggcagctcagtaaagtccatgactaggttttcacagggtgtggctcccatttcttgaattcccgggggctgagtgggcccttgccatgggttattctggacacagattagacattgttcacaaacagcttgagggatggtagtgagccgtggcatatagaaatgacgttccagtagtgtttctagtgccgttttttctatatgagttccttgatggaattgcttcacaaatctaggggccactgtttcagggatggctagcctcctattggagaatttccaccatcctcctttaatgtaacttccagtatctttggcaaaccaggc

SEQ ID NO: 200730 - DNA, 452 bp, Homo sapiens
tagcacttttgttacttctcgtgctttctctgttctggtggggaaagcctcaacacatcctgaaatggtgaagattagtgctaacatataccaatagccccctgctcgaggcagctcagtaaagtccatgactaggttttcacagggtgtggctcccatttcttgaattcccgggggctgagtgggcccttgccatgggttattctggacacagattagacattgttcacaaacagcttgagggatggtagtgagccgtggcatatagaaatgacgttccagtagtgtttctagtgccgtttttyctatatgagttccttgatggaattgcttcacaaatctaggggccactgtttcagggatggctagcctcctattggagaatttccaccatcctcctttaatgtaacttccagtatctttggcaaaccaggccctttcatttggagaat

SEQ ID NO: 200731 - DNA, 583 bp, Homo sapiens
aggagaggtaaagctatggcttcctcttcacaatgtagggtagccattgctacctctctgtccacttttctgtttcctttggcctctagtgttcctgctctttggtgccccttgcaaagtataactgccactttctttggggccaatactacatttaaaagctgtagaattttttctttatattttatttctttaccctcagcagttgtgagtcctctttatttatatatagccctatgaacatgcaacayggcgaaggcatatttggaatctgtatagacattgacctttttgtcttttgacaccagagagctcttgtcagggctattagctctgctttgtgggctgatgttccagtagacagactgagcctctatcactgagtctaatgttactactgcatacctggcctgtcagaccccttctagtacaaaactgcttccatctgtaaagtattctacatctggatccctgaggggttggtctgtgagatccctctggcttgagaatacttcgtctactgcatctacacaacaatgaagtggggctcccggtcccagttcaattgggagcaaggtagctg

SEQ ID NO: 200732 - DNA, 585 bp, Homo sapiens
aagctatggcttcctcttcacaatgtagggtagccattgctacctctctgtccacttttctgtttcctttggcctctagtgttcctgctctttggtgccccttgcaaagtataactgccactttctttggggccaatactacatttaaaagctgtagaattttttctttatattttatttctttaccctcagcagttgtgagtcctctttatttatatatagccctatgaacatgcaacacggcgaaggcatatttggaatctgtatagacattgacctttttgtcttttgacaccagagagctcttgtcagggctattagctctgctttgtgggctgatgttccagtagacagactgagcctctatcactgagtctaatgttactactgcatacctggcctgtcagaccccttctagtacaaaactgcttccatctgtaaagtattctacatctggatccctgaggggttggtctgtgagatccctctggcttgagaatacttcgtctactgcatctacacaacaatgaagyggggctcccggtcccagttcaattgggagcaaggtagctgggtttagggtat

SEQ ID NO: 200733 - DNA, 427 bp, Homo sapiens
atctcaaaactttgaagctattgcttactggtgattaaataccaaggtcctaaaagagtgattaaagatattacgwccctaataacctcaaaatctactgcttaacttttattattttttaatgtaagatgaccacaataaactttaaaaattatcagatgcatgatgatatgggattactatgacatgagaagctgaatgcccctgtagtaccctcccctcccttccttctttccatgaggttgacagaggaagcatggcatgcattcttgaggggagcaaatacctcctgcacagaagcttgcaggaggaaatgcccagctccatggaaggagtgaggaaagagggttcagcatagagggaggccaaagcccgtcacccccatctctgcagcccaagagtgagtcccactagtcccacctaccct

SEQ ID NO: 200734 - DNA, 552 bp, Homo sapiens
caggctttctggaactcagctgtatggggttggcagagttgctgtgctrtactctatgggatggaaaggtacactgctattgctcaaatcaactgaaaactgggcttcagaatgatggtgcagtcctccaactcagacctcttctagctaaggaacagataggtggccatcacttcattgtactcctggcccatgagtgagtcctgggtctcttccagtatgtaaccacagacactgtcaactcagtccactggagtcctaatagtcagggaatggctctacatctggctttagtttattatcttaatggtctacattcatccatcaatctttaattattttctctaatatgactctcttgctgggatttagaaggataaatttcttgagcaggtttccacattccatggatatgtacaagggaatatggtattgcactctcagtacttcctctcacagctccttggatttctgtgcatcaaaaggcagagccccactgatcagtgtatatatgactcccaagttctacacatcaacctcaagcccatcata

SEQ ID NO: 200735 - DNA, 481 bp, Homo sapiens
ttcgcaacaatttcctatgtgggggcatatcaccttcctgagactctgcctgaggtaaaggcacagagcctcactcccttgatcaagcttccttccatccttcttactccaacctgttttctgtttgccacagaaatctcaccttctttcagagacacaaagggaactctaccccaagatcaattttataaaggctcataattccagttctctcttgataatagagcagtctcgaaatcagttactaaatgtagggtggattaaytttagatcttgtgtataggacttggtctgaatcctttaaaatcgtaggtatatactttacataagccttaccccaagggcagccataattttctttcaaccatattttgtaggctggtgagtcctgcacctgccccaagtttcaggcaattaacttgactgtggtctcctgccatgcacactgagctttagctctcattaatctgtgggagacaaa

SEQ ID NO: 200736 - DNA, 487 bp, Homo sapiens
aatgggtgtatgaatggatataagagtgggtatatgctgttcattatcataatattttatagtttagaaatgttaataattgatagttgaaaaataacctgctataatattttgaaaaaaaaggaagtctaaaaaaatacaatattccacctaattccttattctcaatcacggccaaaaatgttcctcataacttgrtagacttcattttttcaaaagctgcaatatgaaatgagcactactaaaaaatttatgactattttagcaactgcaaactgaattagtacaatttaaaatatttaatagtcttatttgttaaagaatccagagttttttgaataatcatgccagtaattccacagcaataaaagtttttaaataaaccagtctgcagtctagacagttaaatttttggagccctgtacttcatgttgacaaaggctataagagtgattcattgctgagtgagaaaggggcaaacacagat

SEQ ID NO: 200737 - DNA, 543 bp, Homo sapiens
ttgcctgagccatcctctttctcttcagtattaaaatcacaagctctgaaatcaaagttcgagtctaagatgctctaaggtttgagttgaaggtttgagtctaagattttccacacattgctatgtgatgtcaggcttttaaaccctttgaacttccatttcctcttctgtaaatggtggtagtaatatttatttgaagatatgtgagatgatgtatgtaaattatttagcacagtaccatagaaaataaagatataaataatagaacatagagaaataacaatgttacccttatcatcaccatgactaatagtctggttttactaagctggaatgccatatatgggcacatattataatatttaaaggaagaccccaagctgtccatcttctttgcatgagattgtctttgtttctcagtacatatccamcctcagctacacagttttcacagaatacacatagctactttaaccaagactttccaatatcaccacaatatctgccccgaaagcatcctttcctggtattagagagtagctt

SEQ ID NO: 200738 - DNA, 627 bp, Homo sapiens
gtggccaataaaaaatagctagcatggataaattattccaagagtaaagcattaataaagattttagagaaacattttgttttacacagacataaaccaatagcacattttcctgggtaataactaaactttcttaattactatctaacaaatcatctctatgctkttcttcatggaccatttttcaaattctggttttatgatgagctggtaaatagagccaaggtaagatcaaacttctgctagagtttcagcttctggtgggaatgtttcggcaaaattggtgggatggtggctggcaggggaacaatcccttggcccatgagtagatcatcaaagcatttgtttctttaataaaacatcaaaggctactgcatgctgtagggtatttgtgagactgaaattaaggtgaacttcaagtgcttcacagcagaaaataagaaaggagttattttgtgaatcttttgaattcttcctggtaagaatttcccccttattttctaaatattcatttatgggtttttctacaatgcagaaagatatattttaaggtctgaagttgagattttcttttctgttacttggaaaagatttgctggatgttgaatcagaatctcagcagtacct

SEQ ID NO: 200739 - DNA, 627 bp, Homo sapiens
gtggccaataaaaaatagctagcatggataaattattccaagagtaaagcattaataaagattttagagaaacattttgttttacacagacataaaccaatagcacattttcctgggtaataactaaactttcttaattactatctaacaaatcatctctatgcttttcytcatggaccatttttcaaattctggttttatgatgagctggtaaatagagccaaggtaagatcaaacttctgctagagtttcagcttctggtgggaatgtttcggcaaaattggtgggatggtggctggcaggggaacaatcccttggcccatgagtagatcatcaaagcatttgtttctttaataaaacatcaaaggctactgcatgctgtagggtatttgtgagactgaaattaaggtgaacttcaagtgcttcacagcagaaaataagaaaggagttattttgtgaatcttttgaattcttcctggtaagaatttcccccttattttctaaatattcatttatgggtttttctacaatgcagaaagatatattttaaggtctgaagttgagattttcttttctgttacttggaaaagatttgctggatgttgaatcagaatctcagcagtacct

SEQ ID NO: 200740 - DNA, 627 bp, Homo sapiens
gtggccaataaaaaatagctagcatggataaattattccaagagtaaagcattaataaagattttagagaaacattttgttttacacagacataaaccaatagcacattttcctgggtaataactaaactttcttaattactatctaacaaatcatctctatgcttttcttcatggaccatttttcaaattctggttttatgatgagctggtaaakagagccaaggtaagatcaaacttctgctagagtttcagcttctggtgggaatgtttcggcaaaattggtgggatggtggctggcaggggaacaatcccttggcccatgagtagatcatcaaagcatttgtttctttaataaaacatcaaaggctactgcatgctgtagggtatttgtgagactgaaattaaggtgaacttcaagtgcttcacagcagaaaataagaaaggagttattttgtgaatcttttgaattcttcctggtaagaatttcccccttattttctaaatattcatttatgggtttttctacaatgcagaaagatatattttaaggtctgaagttgagattttcttttctgttacttggaaaagatttgctggatgttgaatcagaatctcagcagtacct

SEQ ID NO: 200741 - DNA, 619 bp, Homo sapiens
ggatgcctcctttcgtgatacctytcaaagataatttccatgccatttgaaaagttgtttaaaaataatttcagtcttacagaaaagttcaaaactagtacagaagattcccatgcattcatcacccagcttcccttaatattaacaccatacacaaccattgtaccattatcacaactgagaaggtaatctaagtataataccatgaactaaacaacagactttattcatatttcatcagttttcccagtaatatctgttttttcagctccaggatcccaaagtacatttagctattatatctccttgcctccagcctgaaacaatgatcatgttcgtcttaattacttggataatatgtcttctgggttcctctgctctcaagttaatactttctcctttgtaattaataagtgtcttaaggaagatactttgagattctacagatatgccattgtatcgttttgttgcccactaattttagcatccatcagtggatcttgcctgtcttaattattactgtgatgttctaacagtgattttctatttccctcattctccttacatttattaattccttcaacttcatttgaatttaaagttgttactgtaaaaatag

SEQ ID NO: 200742 - DNA, 604 bp, Homo sapiens
attccgcagctctgtgtggggacccaatgataatttgcatttctaacaagttctcaggtgattctgatgctgcagtttggggtaacactttgagaaccactgcagtagactgaacaagtcaggctccaggggcacagaacagggtgagaaggatgaagaatgggtttagaggggaaaacagaagatacctggcacaacagacaataaaacacaacagactgtgaagtaaaaagtgttaattasacgtgtgatgggagttcaagcatggttgaaagccaagcagcctgaaagagtggaagattttgtggaagagatggaatttcatcagagggattataaaggtttcaaaaggaggggaggcggggagggcatttagcaggtaggaagttcacagaccagggtacattggcatggtctcttttaggagatttaattgcttaaggatagcaatcttgctcaatgagaaagtcagtttttaggaacatttagaaaaacagctaattgtataagagcagagcagaaaggtggataattttgtctgggattgatgagggtgagaaaagggagccagtacaagttcttgagtaagggaatgttaagaaag

SEQ ID NO: 200743 - DNA, 533 bp, Homo sapiens
acttgtccattgctgagaatagggtgttgaagtcttcaactattattatattgtggtatatctctgcctttagcactaataatatttgctttatatgtatatatgggtgctccagtgttgggtgcatatatatttacagttattgtattttcttcctgaactgattgctttttcattatatagtgacatttcattatatgaatgacactctttgtctctttttatattttttgacttaaagtctattgtatctgaaataaggatagcttctcctcacttttagtkttgatttgcatggagtatctttttccagctctttacttttagcctatgagtgtctttacaggtgaaatgagtttcttataggcagtatatactggagtattgttgctattgtttttaatcctttcagctagtctatatcatttaatagggaatttaaactacttaaattcaaggttgttattgacaggtgtagacttactcctgtcattttattaactgttttctggttgtttctggttgtttaaaat

SEQ ID NO: 200744 - DNA, 519 bp, Homo sapiens
aaagtcttatagctacatgtaaacccattttatagccactacaatgtagcaccctcaaaaatagcaactaccactgctagagatacaatattgggctttatacctactctctgaattcatttaatgtaattatctctaaaaactcagaagatggtgtaatttactgaatgtctgtgtctcctccaaattcatatgttgagactctagtctccacgagatggtattaggagatggagcytttgggagataatgaggtcacgagggtggggccttcatgactgagattagttcccttgtaagagagaccccagggagctttttgaccctctttctgaaatagaggaatacaatgagaagttggcagtctgtaacccggaagagggccctcactagaactcaatcatgctggcactctgatcacaggcttccaacctccacagctgtgagaggtttctgtcatctatagcttatagtacttagtcagtttaggctgctatgctaacaatgacagatgatatt

SEQ ID NO: 200745 - DNA, 519 bp, Homo sapiens
aaagtcttatagctacatgtaaacccattttatagccactacaatgtagcaccctcaaaaatagcaactaccactgctagagatacaatattgggctttatacctactctctgaattcatttaatgtaattatctctaaaaactcagaagatggtgtaatttactgaatgtctgtgtctcctccaaattcatatgttgagactctagtctccacgagatggtattaggagatggagcctttgggagataatgaggtcacgagggtggggccttcatgactgagattagttcccttgtaagagagaccccagggagctttttgaccctctttctgaaatagaggaatacaatgaraagttggcagtctgtaacccggaagagggccctcactagaactcaatcatgctggcactctgatcacaggcttccaacctccacagctgtgagaggtttctgtcatctatagcttatagtacttagtcagtttaggctgctatgctaacaatgacagatgatatt

SEQ ID NO: 200746 - DNA, 557 bp, Homo sapiens
accaagcatttaatgtattgcctaactcaacaaatatcttttgaggacccaccatgcccagagtactctgctctccattgtcttcatgtgtgactgcaaggaatgaatgatatgacggagatagaaaacaggccaattgcaggacctctttttggactgcatgagtcttctggctttactaagggtaagggtgttttctctcccattctttctatggcagaacacaagcctaaaccacatctaccatcattagtgtctctgttagagttcttggattgtaaggaagagaaaactctggccaacagccatcgaaatcatttattagaagaatactgggtggctcactgaatccatggaagatatgaatagcaatgtacagggaaggataagaagcaggacagcttcagcctttggacagtaggagtcaaggagagtttattcacacaggtgctgctatgagatgaattgaatccaacattgacccagctccmtgtacttctgtacaagatatactttcccaagagagagatttcaatggggccagcatcatgacaggc

SEQ ID NO: 200747 - DNA, 564 bp, Homo sapiens
acaaaagcactgagaattcattaccagcagacttctatttccagatattataaatggaagttctttggctaaaggaaataattccagatggaagcatgaaatggtagtgaggaaggaagagcaacatacagataaaaaattagaaaaagagtcaaagaatatttactgttataatattaatcctactagtgtcttgtgtagattataaagtctgataaaataagtggcattcataactcagtgggcagaaggaggatagagttaagttctcttaaattttttgcttcgtttgggaagtgataaaagtactaatctaagataaactgtcacaaatcaaggatacacattgaaatccagggtaaccatagaaaggattacaaacaaatgtacaattcaaggccaataggagagaaaaaaaatagaatagtcctttcaaaaaagaaagccaacaraaatagcagaatcaaactgtaaacagaccacagaggtcaccatagctaataaaatattgtatttctttctgccaaagtatgtagtcacagttcctaatccattacccacctc

SEQ ID NO: 200748 - DNA, 592 bp, Homo sapiens
gggtgtgtgtgtgtgtgtgtgtgtgtgtatgtgtggttatcttccttttggcagggtgcattatgattcttcagtcgcaggacacaatgagctctcagaatcctatagttctggaggtgtctgggtgtcttggccaatgtgtacaactgacctgtcttccagcacttttcaatgataattaacctcactatggaattactttaacaagaagaatcgttatgcttcctttgaccttaactcctattatttcttgttgcacctaaaataatgtcctaaatccttaacaaggccctacagtttctagcccccaccttctcctctggtctcatcttggctacttgtcctgattccctttccatgttagctctactgaagttctctcagttttacccactcagtttgctttctcctgccacagggctttcttttttcttaacaagctattcgctattygtagaaagcctttccccttgataaccagtggtttatgactaagcttgaataaatggtatttcctcaaggatacttttctgtgtctcccctacccagttttgcatacacctaaactttcatagacctccttattacatga

SEQ ID NO: 200749 - DNA, 470 bp, Homo sapiens
tctacaaggattgaactgatttacactcccaccaatagggtaaaagcgttgctatttcacatcgtctccagcatctgttgttttctgactttttaatgatcaccattctaactggcgtgaaatggtatctcattgtggttttgatttgcatttctctaatgaccagtgatgatgagacatggatgaagctggaaaccatcattctcagcaaactaagacagaaacagaaaaccaaacactgcaagttctcactcataagttggagctgaacagtgagaacacatggacacagggagrgtaacatcacacactggggcctgtcaggggatgggaagctaggggagggatagcattaggcgggttgatgagtgcagcaaactaccatggcatgtgtatacctatgtaacaaacctgcacgttctgtacatgtatcccggaacttaaagtataatttaaaaaaaacttacata

SEQ ID NO: 200750 - DNA, 465 bp, Homo sapiens
tagctattaatatatgccatacttgaaatcaacattgagaaaaatagacaatatttctgcaattaattaatgaaaaaataacattaatacacccattatatattagcataattttttctgaaaaataattatagcatgaagggctattgaattttgtccaagcccttttctgcatctttttcaaaacaaaaacaatgtagtgaggaggatggcattgttttacattcttgcaaatctgwtcattgtcttaataggacacagctggtttctcatagctgcttcttgcattcagtttgttgtgatattgcatgtcatatattctggaaaactccacttacattcttttatttatttatttatttatttatttattttttttttacttgtacttttttctcactctcttcttttttttatgatactttaagttctagggtacatgtgcacaacatgcatgtttgttac

SEQ ID NO: 200751 - DNA, 465 bp, Homo sapiens
tagctattaatatatgccatacttgaaatcaacattgagaaaaatagacaatatttctgcaattaattaatgaaaaaataacattaatacacccattatatattagcataattttttctgaaaaataattatagcatgaagggctattgaattttgtccaagcccttttctgcatctttttcaaaacaaaaacaatgtagtgaggaggatggcattgttttacattcttgcaaatctgttcattgtcttaataggacacagctggtttctcatagctgcttcttgcattcagtttgttgtgatattgcatgtcatatattctggaaaactccacttacattcttttatttatttatttatttatttatttatttwttttttacttgtacttttttctcactctcttcttttttttatgatactttaagttctagggtacatgtgcacaacatgcatgtttgttac

SEQ ID NO: 200752 - DNA, 514 bp, Homo sapiens
tttgtttcagcagattaacaacagtttattctgttctcagattttttcctattctcataatccagcaaaaactaattaatatcttattccttttacactcatggtaggcatctctacgcatttatacatttccatatacatacacttcagggtagatttgactcagttgagaggagtgtgttgaattctttgtcagactgtgatgcctggcctggcaggctgctaaacacctttctttttcttttcttttttaaagaggtgggaattgctatgttgcccaggctggtctcgaacttttgggctcaagcaatcctcctgcctcagcctcctagagtgctgagattacagacatragccaccatgcccgtccactaaacacctttctattctaatacctctttagattctgcagtaagtagaatcctaggtattagaatagaaagctgaatcaaatgtgaaggatgaaataatctcttctctaccatcttggtgtagacagatgagaagccaagtg

SEQ ID NO: 200753 - DNA, 485 bp, Homo sapiens
aatacctacattaagaaacctatgaaaaatttagtgtgcttactgcataaaagcagtcctcaacatatctccctaaatcaatttacaaattcaaagaaatcccaattaaaatccccaaagattttcatggaataggacagactgattttaaaatttatctgaatatgaaaatgcccaagaatagaacattttgcttttaataattaaaataatgtggcattagagcagaaataaacaaatagataaatgatacaaaaagataaaaatcctaaacatactcatatgtataataaggatttagtatataaactttttaatgtggtatgttgaatcattggaaaaaagatgaagaatgaaatcagtaattttgataattgactaycgatttgaaagaaaataattagatttcctaccattcacaaaaataaattccaggtacattaaatattgaaagttaaaaacaaaacgtgaaaaagttggaggaa

SEQ ID NO: 200754 - DNA, 424 bp, Homo sapiens
atttatacaaatgcagattcctggattttgtctcaggaaaatggaatcagactctctgggagaggggctaaagaattcatgtatattagatgctttcaggtgatttatggctggccagctttggtagtcttagcccaactgcacytatgccctgctagaaaacctcaggaggaaggggctgtcagcaagcaatgtgtgggtactaggggaaggtccaccattcacccagactcttccaagtgcctaaatagggctacgcaggccctccttccatttattcaaataacaaacatcttttaggagtctaatataagtgaattataagaaggcagggaacagaagaatacgacattctctgccatcaagaaactcagaatctactcactcagtcattcattcattcaccaaatgtttattgagcatc

SEQ ID NO: 200755 - DNA, 465 bp, Homo sapiens
tgtcttggtccccaaactttactgattactggaaccactcagagaatttatacaaatgcagattcctggattttgtctcaggaaaatggaatcagactctctgggagaggggctaaagaattcatgtatattagatgctttcaggtgatttatggctggccagctttggtagtcttagcccaactgcacctatgccctgctagaaaacctcaggaggaaggggctgtcagcaagcaatgtgtgggtactaggggaaggtccaccattcacccagactcttccaagtgcctaaatagggctacgcaggccctccttccatttattcaaataacaaacatcttttaggagtctaatataagtgaattataagaagrcagggaacagaagaatacgacattctctgccatcaagaaactcagaatctactcactcagtcattcattcattcaccaaatgtttattgag

SEQ ID NO: 200756 - DNA, 578 bp, Homo sapiens
aacttggagaatttgtgaagttatagagaaagcaagatgaaacagagaataattattataatcatcattatctcagccatattgaatttaccctaaaaactaaattaattatattaaatatataagccaaaacaaaactgttaatctcccctttctccaaaatttggccttacttctatcttccccttagaaaacagatccaccgcttttattaaaccaaaaacctgagttgtccrtgaatcctttcattcacaaaacacccacattcattttattagcaagtttcaccagctccacttccaaaatgtatcccaaatcaattcactttaccttcactttactcttatttctaccactcttgtccaggccaccatcttttataacatggactactcaatagctctccccacctctaaatgccttattcactcaggagccaaggtaatctggctaaatattaatcagataacataactctcctatttaaagcttcctagtgtcttagaattaaatccatacacacttaaaaagaatatcatgacctggcctctgcctaccttgtaggacttccccttcca

SEQ ID NO: 200757 - DNA, 560 bp, Homo sapiens
ctagaaattgctgggaatttaagaacctctgggagcctcccactgactatcttaatttgcagaaccaactcaagtgattaacaaaaatttactataatatgtttcagctaaactgtagtgagtgattcacaggagactgtcagaaaatcatataactgccatctgcctacttgtctgcctgyaactgtctcttttagtcacatcttctaaacagtgtgagatggtttctcattgacagatgttaacatagaaccacatagggaagaagatgttgggaaatttatttagaaggattcctagcaggggtgaagatgatgttgagttaacaaaagacaatccaatgttctatcacaattgaggaatacacagaaatacaaaagatcctcagactattacaaaacacctctatgcacacaaactagaaaatctagaggaaacgggtaaattcttagaaacatgcaatttccacagattgaatcgggaataaattgaaactctaaataggccaatatcaagttccaaaattgaatctgtaataataatttaaaaaaccctatgaa

SEQ ID NO: 200758 - DNA, 544 bp, Homo sapiens
ctgcccctgttgtctttaggtaagaaatttcaccaatgacagtaacatcttactcttgtgtagagttttatatttctcaaaatgttttcacctgtgttatttcttcttatgtattcacagaaactgaaagatggaaaagatctcagatgctgtgacccccatgtaacagatggaggaattgaatccaagagatgaagtgaccactttgcctaaaatcaaatagccatgtagcagccgagctaaaacaaacattcagtcctcctgaatcctaactcagtgattttctcttaatatcatataataacatccattgttttcctgartctcccctatcattttactattcttcttgatccattcatattagtttttttttcttttttggattaaaggtgaccttaatcaaaatttgatatttacataagtatgatataaaataacttatatctatatttaataatttcttattttagttgatgctttcaaaaactgccagaaaacagatttttttgccacaagcagttacagtttcatcttcatattc

SEQ ID NO: 200759 - DNA, 521 bp, Homo sapiens
atattacataaatatatactatcaacagtaccaatatttattgaaaagttcactaagctacaaattataactaccaagacaagtcaccaaaattgttaccaagtccatttggtaccgaccagagatctcaattttttaagttattatctaagacaagaaatattcattctttttactccacgggctcaactgtgagtaaayagtgtgaaggactataaattctgggaaggaaaagtatattataaactcatagaaaacaaaggtattaagtcaaaaatcatgccacaccaccccaactgttaatacacgtgagaattagatgtgtatttctttagtggaactgattgcatgctggaatttgaatgacataagtatagccaaagtagactactgcaacccagactacagtccattgtcccaacaaatccacagatttctcctcccttgaaatagccccattgtttcagatctgattccagcctcatcaaattaaatgattgtccagatttgcagagcagatg

SEQ ID NO: 200760 - DNA, 564 bp, Homo sapiens
gtcttaaacctgaacttgggctaagcaagtaagactgctttttaaatttattttttatgtgagttactacttaaattcttcctgttctatggttaaagcatcttgtttacattacattccgaatttggcccatgcaactgggttgccactggcttaataagacaagaaaagatagagctgggaagaccaaagaagcacatatttgcctgggttcagatcctctgaatttttcctcttgtcttaattagcccttggttattttcatattcagagttgccaagggctaaagagacgatgctaaggaatgagaaggcctaaaaggttttaggtgatacaaataactccatcccatatacgtcaggttatctacagggttcccttgcttaaacattgatagagtttcttaggttctgaaatttggaatctagatcactaggccaagagaaaccgctagctgatctattttggactccargtgacctacaaactctgttctgctttagagagaccacttagagccattctgtgtgcatcaaaaaggaatccaacagggaaaggggatgg

SEQ ID NO: 200761 - DNA, 444 bp, Homo sapiens
atttgagctctgaaactgtttacttcttytcccatcacagtgcctttctctattcactggtttactgtagggggatttgagaatccccctacagtaaaaatcctcctcaaaaaaaaagaggaaattttgtttaaacctgtttggagtatgacttaaatgtttctaagtatattccctgcttgcccagaccatctgcttattcatatatcaaggcttactatgttaatcagaaaagagttgagtatgaaatgtaaagataagtcaaatgggaaacagatactaagaaagtaatgagtctcatctttctggcctctgttgaacttagccatggttgttcctgtttattgcgtagagcagggaggaactgagcatgaatttggaagggcaggggtctcatacgtaatctcccagattagtgtttaaatctcctcctaattttatcta

SEQ ID NO: 200762 - DNA, 459 bp, Homo sapiens
gggtccctattagaaggatgcagggctggacacagtggctcacatctgcaatcccagcacttccagcaattcgggagagcaaggcaggaaaatcgcttgagtttgggggtttgggaccagcttaggcaacacagtgagactttgtctctattaaaaataaattagccagatatggtggcatgcacccgtagtaccagctactygggaggctgaggcaggaggattgcttgagcccaggaggctgaggttgcagtttacaagaaaattagctcctgtggaccgtattaagaattttcaccctccccaaagcagaatcttatgattagctttgcatttggaaatcagtatttggctgcagggtggaggaacagaagaatcgggacaagtgtggactaggagacaccaataaggaggcagtggcattacttgccacacagtgcttgagacacagagggggcc

SEQ ID NO: 200763 - DNA, 459 bp, Homo sapiens
gggtccctattagaaggatgcagggctggacacagtggctcacatctgcaatcccagcacttccagcaattcgggagagcaaggcaggaaaatcgcttgagtttgggggtttgggaccagcttaggcaacacagtgagactttgtctctattaaaaataaattagccagatatggtggcatgcacccgtagtaccagctactcgggaggctgaggcaggaggattgcttgagcccaggaggytgaggttgcagtttacaagaaaattagctcctgtggaccgtattaagaattttcaccctccccaaagcagaatcttatgattagctttgcatttggaaatcagtatttggctgcagggtggaggaacagaagaatcgggacaagtgtggactaggagacaccaataaggaggcagtggcattacttgccacacagtgcttgagacacagagggggcc

SEQ ID NO: 200764 - DNA, 504 bp, Homo sapiens
ttttggtctgcttgtgtgccatcatcatattgttgttaatgttggcactttatactttgtgtaaataaaaatagggctggwaagcccctcactgcttttttgtcaagcttttcagtgactaccattgattaacatttccttgtgaacttgagaatctgtttcaccttgttccaggataataatcgtaagaacagtaacatttattgactatttttatataaagaagaaaagtcttgaaatcttaggctatgtatagtcaggtgcttcctcagaaagactggtcatttcccaggcatacatcttgtatgtacacttgtgtatctgccattagcgtataagcctcaggagtaggaaagagcttatcattccatcccagttcttattaccatgtaggaatttggttcatgaaagaaggaaacaaaaactggtaactttttaattatttatataaattatttctgtcatttacattgctgattgtaataggatttaacacaataagtg

SEQ ID NO: 200765 - DNA, 511 bp, Homo sapiens
ctggaattcgggagactgcaacttcattgtgaatagatactgcttcggaaggcacagcctactccacctacggttcagcactggcctgtgccaatgatacaggcacctcagcatctggagaggcagtcaccaactacacatctacaaggcaaatacacaggcataccaatgaaattaaaagtgaaggtaagtgaaggaaaacaaagggggacacatttcaagtttatcaactcagaaattcatctcttgttcagatgaaaaaactgaaaacggtgtcagtttgagggattacgactaggtctatgtatctacctggttttgttctccagaagcacttactgtggcaggcggggtctcactagcgcaggcctccataactgtttcagtactgactgactggttgagttacatattaaaagctgaaagagcsagccagtgcccttaaacaaggctagaatgtaacaaaagccccccaagagttttgcctaggcctttcctggaccttgaagca

SEQ ID NO: 200766 - DNA, 565 bp, Homo sapiens
gaatcttggctagagtccaaattgggtaataatcagactaccaaaaattccctctgcaatttgaatgagaagtgttgttctctattttgtctgctaaagttcttttcttggggttgctgggtgaaagtgacaattctatcatatatgaaaggtgacatttcatttgtatttattcaatgtaatccattcactgttgtaaaaatgagaactgcttcttgctaccacataacagaaggatgcagattatttcattgccattagcagtgcaagttaataatgttattgccattgagtcttaygcctaaaagtggggcacaggtcggaaaagaggaaataagttggtatgtggaaaagaaatggcattctttgctgccattttttcccattgaagatagtaatctatctctctagtgaagtatgttaactgatgtatttgaattttacttttgcttaatcctacatgagggagacattaaaatagcagtgagtacttttaatctactcacagtctttctaacatgtaacattggaagctgtatcactacaggcaattacaaaaaaaaaa

SEQ ID NO: 200767 - DNA, 629 bp, Homo sapiens
ggctactgctgcaatgggggcatggtggtcatgaaagagcaccacccaaatcacctggtgcagagaacatagctgacttacaataccatgtaagtgccccctttggatctactgcagcatttatagaagccatatgtcccacaggctacttctagcttgtctgagcacagcaaggctattagtgctggtccattactactagatgcactattctagtaactggtgactttagtcaacagcatgactaaagctttctgagaatttcactgcagtctgacattcttcccatcaaaccccacttccttgcttctataataggtgccaatcaaaagaaaatacagacaacagcaagttgtctcaatagagaccagattccctgtcacwgtatactttaatgacagtgacctgatggtcaaaagacacacattaagtttcccaatgttacttctactaacagaaagaatggaatgtctgtatgggaagggagggaggaaggaaggaaggaaggaatggtaaggggaggaaggaaagaaggagggagggaaggagggaggggaaagaaagaaagattgtctctggtaacaaatgcaaagatggtgtttatagaaagaagaaaaccacagacagtg

SEQ ID NO: 200768 - DNA, 566 bp, Homo sapiens
actgctacatatttcatagcccagaccatttcttgaggcactgaagagcttagctcctggtaaacaaagatcaagcataaacctactgataccaccacagccggctcttatctgcaagtgctgcctccgggcctggaggtggaactgcacttcccaaggcaaaatttactgtcacaaggacacagcacttgggaatgagacctctgccaccccagctacacagggggccatgagcctgttcaacacacccagtataccactactactggtgtttgagaaaattaccacactaaagctatctataaccaaggaattaatatagtcttcactaatgaaagcacccagaagcaaagccaaacaattctactcaacatatattatagtgacatcctaaataatttaaaaagtcccatctaaatgaaagcagattcaaaaataagaagtgacagttcctctagttgagaaggaatcagcataacaattctggaagtatggaaaaatagagttytaagacacctccaaaggatcacactaactctccagctatgaatcctaaaatttgtgaa

SEQ ID NO: 200769 - DNA, 388 bp, Homo sapiens
tatatgtgtgtcttcttttgagaaatgtctgatgaagtccttggcaacattttaaagggatgatgatcatgatgaggatgatgatcattattattattgctgttgggttgtttgagttccttgtatattctcaacattacaagacattcaattctgaatagtttgtgaaaattttctccaattctacaggttgtctgttcactctgttgattattttatttgttctgcagaggccttttagtttaatataatmtcattcatctacttttgtttttgttgcttgtgctttggaagtctcagtcataaaattgtagcctagaccaatgtcctaaagcttttcccttatgttttcttcaggtagttttatagtttggggacttacatttaa

SEQ ID NO: 200770 - DNA, 388 bp, Homo sapiens
tatatgtgtgtcttcttttgagaaatgtctgatgaagtccttggcaacattttaaagggatgatgatcatgatgaggatgatgatcattattattattgctgttgggttgtttgagttccttgtatattctcaacattacaagacattcaattctgaatagtttgtgaaaattttctccaattctacaggttgtctgttcactctgttgattattttatttgttctgcagaggccttttagtttaatataatctcattcatctacttttgtttttgttgcttgygctttggaagtctcagtcataaaattgtagcctagaccaatgtcctaaagcttttcccttatgttttcttcaggtagttttatagtttggggacttacatttaa

SEQ ID NO: 200771 - DNA, 605 bp, Homo sapiens
tctttcatttatgagaaggcagctttcagaggtcttgattacattataatctgggtaaccagcactttttaaaaaaatcttttcttatatttcatcgtgtaagrataatagcacattttgtgaataattggttataaaagaggtggggaatggtgtctaaatggtttatacgttagtgataaatagctcctttcattcagtgatgctactggcatgatctgctaaaatatgaatccacataagaattcaaccgtgcagcacctaaggcatgcatttctatgcttaagtcttattgtccctggatttataattttccatagtaaaaaattcaccgtggagcaagacactgtatgtgtaaataaaaaataatagaaataaaacaaatatgggaataaataaatattataaatagtttttccagagtcatgtgatttaaaactaccatcttaaatatgaaacacccagtttcttaatgcaaactggatgtttcttttctgggaatgtgtttttctattagccagttattcaccttttgtaaacctcctatcaatgtgcaatttttagtatctgatttaaacctgccctttttatggagtgcctcattc

SEQ ID NO: 200772 - DNA, 605 bp, Homo sapiens
tctttcatttatgagaaggcagctttcagaggtcttgattacattataatctgggtaaccagcactttttaaaaaaatcttttcttatatttcatcgtgtaaggataatagcacattttgtgaataattggttataaaagargtggggaatggtgtctaaatggtttatacgttagtgataaatagctcctttcattcagtgatgctactggcatgatctgctaaaatatgaatccacataagaattcaaccgtgcagcacctaaggcatgcatttctatgcttaagtcttattgtccctggatttataattttccatagtaaaaaattcaccgtggagcaagacactgtatgtgtaaataaaaaataatagaaataaaacaaatatgggaataaataaatattataaatagtttttccagagtcatgtgatttaaaactaccatcttaaatatgaaacacccagtttcttaatgcaaactggatgtttcttttctgggaatgtgtttttctattagccagttattcaccttttgtaaacctcctatcaatgtgcaatttttagtatctgatttaaacctgccctttttatggagtgcctcattc

SEQ ID NO: 200773 - DNA, 392 bp, Homo sapiens
ggctgaatccttgtccccgaatgttcactgctcctgatctagcaaagacagctggctgctgacttcagagggaggtcatggaataagttattgggtcctagggaaagttgytttcataagttctactttgtgtcacaagaaaatgaattatcattgtttgttaggcattcaccttccaacattacttatttccttttccctgtcatttgtgtttaagtgatagtccccctccttggctccacacctcctttttctgttcttatgacaaatcagattctctttgaaataactagtctattcccacaagataaaaaacttaaaatgaaaaatccagtcccaccaaaagttaacatggggagagtgggagaattaaatcacactgctgagccatc

SEQ ID NO: 200774 - DNA, 543 bp, Homo sapiens
agaaaactaatacactcacagacacgttggaaggaagagtttcagtttgtacaaaagctatcccccagattctatggttctttgatgatatttggctgaattcaacttcctgcctgcagcaagtggaataggagagggttgaatgcaagtgtagtgatatggtttggctgtggtccccacccacatcttatcttgaattgtaatcaccacatgttgagggagggatctggtgggaggtgagtggatcctgggggggttttccctacgttgtccttgtgatagtgggagagttcttttttatctgatcatttaaaagtggctgtttcctctgtgttctctctcacctgctgccatgtaagacgtgccttgcttcccctttgccttctgccatgattgtaagttycctgaggcctcctcagccatgtggagctgtgagtcaattaaaccccttttctttataaattacccagtctcaggtattctttatagcagtgtgaaaatggactgatatatgtaggttaagaaaagcaggcagccaactcc

SEQ ID NO: 200775 - DNA, 421 bp, Homo sapiens
agacttgggctttattagtattactttatactaatgcactttttccctaagcatgtattcttttttgtaattttaggaatcaaaaaagatgaaaatgcaataaagatacactatgagaaccttgttttgaatgatgtctggcaaacagtggcgaccctcagtaattgtgtgctcagtgaagggctatgcaggagatggtctttaaagattgcctgtggyttctggaagtttcctgtaacccagctaatgttgcaggatggcaagcaaagaaaacaaacaaacaaacaaacaaacaaaaaaactggcttttacaccaaactccctggtggtcttccatgtttttatttataaaaagaaaaaaagacacacagtaagtaggccaaagtgctgaggcaagtgcgtcttttgtctcatctacaag

SEQ ID NO: 200776 - DNA, 390 bp, Homo sapiens
  misc_feature (1)...(390): n = A,T,C or G
gataccctgaatgacctggtgcattcctaggtaagagagaagcagtggtgttgcacatacagacagatgctcaccacctggcagcctgaattcaggcaggtgntaaatgtctccagtgcctcatcttgagtggtagtagactctggcattctctcatgggggagaaagggtagctcccttaggcaagggtaaaggcactaccttagtgaacatgtgcttctcctctagagccttctgcaacccgggtagcactgagagaaaggcttctctgctgagacaaaggctgtgagggtggcgctcaggcaagggtsccatgcagcagtgaggacagttaggatcaggatatagttgaggaacagcatgacttccccttctataggaattaacagg

SEQ ID NO: 200777 - DNA, 587 bp, Homo sapiens
catcctgttaggaggctgttgggtgatccaagtgagagatgatggcagtttggatggagaagcaacagaagggatggagaaaagcagctccatacagsgggtgtatagaaggtaggactgagagggcacgcactccacacattatagattttcaacaggggaacagaaaggaggcctccccaaactcatgcacagaacacattattattattctttctagtagtgaaactccattcatttgtgggatttacatatttgataatttggaaatgtaggacaagatgaatttgaagattccctctagtcctcacagtctgtggtgccatgaacaatcctctatgaggttatttcaacaatactaaaatactctgaggcgtgtgcctagatgcattattacagattgtttattagtcacacatgtatatctataatgccaatttttgatccaggaaaataacttcatgactgaaactgaacacaatctgtgcatgaagatccttgcagaaagggagggcagaaatactgttagcctacaaagtgtgaggatggggataaggaaattcatattcatgtattaacccaattac

SEQ ID NO: 200778 - DNA, 437 bp, Homo sapiens
ctgggttctggttagaacacagccactagaacaaactccagtctttttcagtctgttgctgtacttcagrtttaaaatctgggaatgagcatgcagcaatgctccaccagatgaggaagaaaagctgttaaaaggaactcaggatgttgttaggaagggggagtggatgccaggccttcaccagactatccagaagccattccatggggtatttggtctgcatactgtgagacactgagctggttccaacacagcccctgctgtcaccaggtacacagtcaggccaaggagacagccacggaaatgggaaaaccaggatgagtggagatgtgactggggatgtacaggggctcgggagcacagaggagagactctcctccagctttgatgggaatgaggtgcagggtactgggttagggaagacaggtctctggaag

SEQ ID NO: 200779 - DNA, 420 bp, Homo sapiens
agatctctaataatcttcagcaaagtttcaggatacaaaatcaatgtgcaaaaatcagtagcatttccatacacaaataacatccacgctgacagcaaattaagaaagcaatcccattcacaaaaaggcccggcgtggtggctcacacctgtaatcccagcactttgggaggctgaggcaggcggatcactggtggtcaggagtctgagaccagcctgagcaacatagtgaaattctctactaaaaatacagaaattagtcagatgtggtggcaggcgcctataatcccagctactcgggaggctgaggcaggagaatcgcttgaatccaggaggcggaggttgtagtgagctgagatcacgccactgcatgcyagcctgggtgataagagtgagactccatctcaaaaaaaaaaaaaaa

SEQ ID NO: 200780 - DNA, 369 bp, Homo sapiens
aggttccatctggtgctccctccctaagcagtaacttggaattctcttaaggcagtcagctctggcagtcatagaactcacctcatttgcttcatgtttcttttggatcattttcctttgcacctaatattcagtgtgttaaaaacctttgttttatatattttgttccttaagaggattggttcagatagaagggtaaacccygtccccgttacttcatcttggccagaaaaagtacccatctagttttttgaatatgaatatatgtagaatttaaagccatttaggatgagaatgactccttaccttattaatgtatcatcatccacaatgactaaccatgctgttttgtcctggctacgattcaga

SEQ ID NO: 200781 - DNA, 433 bp, Homo sapiens
gaattcctttaaaagagaggaccatcacttttaatatagagcttaaaataaaacatacccccaggagtgatgagcaaaaaccctattcattcatcggcatatactggatatctactgtgagcttagccctgtgctatgtgctaaagaaatagacatgaacacaactcctgtgcccaagaaactcacatatcataatyagtatcaagtgctgaacaaagtgatctggaacaaaagcaaagatgaacgtatctggctgtgcgtgacagggatgagctctgtggcagcgtgggatggggcctagaagaatactgagtttggcagtggatgcagcattggctgagaatggcccacgagatgcactgagactggcatcaagttctcttctgcttcagtgggtctggctggaataacttgtgatctgatttggggctga

SEQ ID NO: 200782 - DNA, 549 bp, Homo sapiens
ctgaggaacaagccccttgtgtctcagtttctcttctgtttccagtaatgtacagtgttcatgcattcttttctttttttgttgttgtttaaaaattttatttattytataagtcactcaaatttcttctcttaactatttcagtttagtattacacagtatacagagtgggatgtaagaaccataaactgttccataaccacgtttgaatcaaataatcatgatttgtgttccctttggcatctcagtatctccaggctccagcacttgcttagctgttatgactccggcgagcctgtgtttctgggagagcgctacggctacggcctgggcactggtggctacagctacatcacgggaggaggagggtaactatgatcacagctttcttcaactactttaaacataaacttccctttccacacgagaggtaggtctctggcactgggatctatactgtacgtgagtactctgtgaatggtggttgttactataataggaaagtgaacattatatttgctaaatattaaaagaacactcagtaaagaa

SEQ ID NO: 200783 - DNA, 596 bp, Homo sapiens
ggaattcctattttttcaacttctatcaactatttctacctattcttgaatttcctataaaaagaatctatgctttctttcgtgtctgcctccttttgttcaatatacctgtgagaatcattaacattgtaatgtctaccaatagttttctccttttaattgctgtgaagtaattatccatcactgtayggatatataataatttatccatctcttcttggtagaaattttttttcaatttggggctgttataataaagcaaatatgaactcttttgaacatttcattttgtggaactgtgcactcaggagaggaattactgagacatagtgtagacccgaggtcagcaaactttttctgtaaaaggcagataggaaatatgtagactgtgcaagccatacgttctccattgtaatgagtcaactctgccatagacaatatgcaaacaaatgggcgtgcctgtgtaatacaattttgttgaccaaagcaggtggtggcctggatttagcccatgggcagcagttggctgaaccctggcatagatgtttggtttgctttagtagaaaatgctgagaataattttgcagtgtggctat

SEQ ID NO: 200784 - DNA, 549 bp, Homo sapiens
ctgaggaacaagccccttgtgtctcagtttctcttctgtttccagtaatgtacagtgttcatgcattcttttctttttttgttgttgtttaaaaattttatttattttataagtcactcaaatttcttctcttaactatttcagtttagtattacacagtatacagagtgggatgtaagaaccataaactgttccataaccacgtttgaatcaaataatcatgatttgtgttccctttggcatctcagtatctccaggctccagcacttgcttagctgttatgactccggcragcctgtgtttctgggagagcgctacggctacggcctgggcactggtggctacagctacatcacgggaggaggagggtaactatgatcacagctttcttcaactactttaaacataaacttccctttccacacgagaggtaggtctctggcactgggatctatactgtacgtgagtactctgtgaatggtggttgttactataataggaaagtgaacattatatttgctaaatattaaaagaacactcagtaaagaa

SEQ ID NO: 200785 - DNA, 547 bp, Homo sapiens
tgaactaaaaaaatgattctgaagtttggaatctgaatggctaagtaccatggttagagaagtcagagagaagagcttgttaattgaaaagatctggttttccattttggacaaattgcatttgaagtgaaggtgaaccatctgcaaagaaatgttcagtaatcaggtagacacaaagactggagcttagagaatagttawcaactaaaatacagatgtgaagtgacccacaaaagaatgagaagagaaacaggagttattcagtatagagagagagtggcgattgtcataacaccaagttggggacatcaccttgggagctgttcagtttttttcctcttgacaccaaactccgtgtcttttccaacactacttctccaactctctgacaccaactgggtgtccaacaattcaattcaattctgacactatgtacctgaaatcagcatcacatctcacaggttaaagggctcagtcccataagactgaccccacttcagatgctactcacaagtctggggcacttctacttctgttctcacgacct

SEQ ID NO: 200786 - DNA, 616 bp, Homo sapiens
tgtaattatcaaatcttgggtagttgggatctctctcacctcaaatacttttctttgtgttgggaatattacaattctcttctggctattttgaaatataactcattaactatagtttccctactgtactatcaaataatagaaattccctcagccaaactgtattttttacaccttaagcaacttttttttcacaactccccaccccctgccaccttcccagtctctggaaaccaccattttttttctctgcctccaagaaatcayattttagcacccatatttggatgaaaatgtgcaaaatgtgtctttctgtgcctggcttattccacttaatgtaatgacccctattccatccatgttgctacacatgacaggatttcagtctttttatggctgaatagttctccattatgtgtatgtaccatattttctttattcattcatctgttgatggacatttaggtggattttatttcttggatattgtgaatagtggtgcaataaacatgagagtgcagataactctttgatacactgatttcctttctttggaatatatacctagctgtgggatttctggatcatatggcacttccctttttagtttttagag

SEQ ID NO: 200787 - DNA, 486 bp, Homo sapiens
agtaacttcttttagtagtttcatagtttcaggtcttacatttcaggcttyaattcattttgagttgatgtttgtagatagtaaaggatcgggatgtagtgtctttcttcatgtggatattgtggatatccagcttcacagaaccacttattaaaaatattgtcctttctctaatgtttgtcctaatgtttaatctggttcatgggtatttgtgtctgtttttattccagtaccatgcagttttgattagtacagctttgtagtataatttgaaattaggtagtgcaatgcctccaggtattttctttttgttcagaatatttttggttattctggatcttttgttgttctacatgaattttgggaattatttctatttctgtgaagaatgtcattggaattttgatagggattgcattgaatctgtagattgctttggatagtataaaccttttaataacattaattcttccaattcataagcac

SEQ ID NO: 200788 - DNA, 523 bp, Homo sapiens
ccaacactcacaatttccaggaaagaaaaaaaatccctgctgccagaaattctgtaaatgtcacaagrattccacaaaccctttctgtacttcccagagaaaaaggatagcctttttttttatggttattgtcaagcagaacactgtgtattggttatcagtgccaaaggatggcttcaatgacatgcggggtagcaaagatcattactgtgccaaccatcataagtagaagttcacacacttctgcccactgcatcttggtatcagagtcgccaaggaaaacactttattcacagaaaaaaggcagagcaacatctgctccaagagtttgtcatggtccctagtggctagcactccacactctcatccctcacacccctctgaccccctgcagttaggcagggtaattggcttatatgtacccctctcctcctcacaatagaaggatcccgaccctctcccacagattctgaaatactaaaagctggggggtgtgcatgcctgagggatattaccatacaca

SEQ ID NO: 200789 - DNA, 523 bp, Homo sapiens
ccaacactcacaatttccaggaaagaaaaaaaatccctgctgccagaaattctgtaaatgtcacaaggattccacaaaccctttctgtacttcccagagaaaaaggatagcctttttttttatggttattgtcaagcagaacactgtgtattggttatcagtgccaaaggatggcttcaatgacatgcggggtagcaaagatcattactgtgccaaccatcataagtagaagttcacacacttctgcccactgcatcttggtatcagagtcgccaaggaaaacactttattcacagaaaaaaggcagagcaacatctgctccaagagtttgtcatggtccctagtggctagcactccacactctcatccctcacacccctctgaccccctgcagttaggcagggtaattggcttatatgtacccctctcctccycacaatagaaggatcccgaccctctcccacagattctgaaatactaaaagctggggggtgtgcatgcctgagggatattaccatacaca

SEQ ID NO: 200790 - DNA, 587 bp, Homo sapiens
taatttaaagcatgagaaccaaaacagaaagacagtttaacaactttcctatatacattaaaattactataaaaataccataattttgaaagaataaatcatttcaggaagaaagaataaaggtgcacatattcccatcccttaggagtcctcaaacatccaattatactacctcctactaggaggataaagatataaaacaaagaaataatgcccggcctatataatttacagtcaaatgttaacaartgtacaatggtgagaaaaaattttcagataaaatatgagtacaatataatgccatatggcaagtgtactttactgcacagatggctcatagaaacttaatgaagattgtttggagatttactgtacacacataagctagggtctttaaaattagacaatacaagggaggaagtttaacagtcaaatgaataaaataggtgtagaaaaatgtgctatgataaaggaaatgagaggtgatgtcaggaaaagaagaattataataatttgaaatattttattacaataatttgaaaacattttgttcttaaataatagcaacccatattactatgacttaa

SEQ ID NO: 200791 - DNA, 587 bp, Homo sapiens
taatttaaagcatgagaaccaaaacagaaagacagtttaacaactttcctatatacattaaaattactataaaaataccataattttgaaagaataaatcatttcaggaagaaagaataaaggtgcacatattcccatcccttaggagtcctcaaacatccaattatactacctcctactaggaggataaagatataaaacaaagaaataatgcccggcctatataatttacagtcaaatgttaacaagtgtacaatggtgagaaaaaattttcagataaaatatgagtacaatataatgccatatggcaagtgtactttactgcacagatggctcatagaaacttaatgaagattgtttggagatttactgtacacacataagctagggtctttaaaattagacaatacaagggaggaagtttaacagtcaaatgaataaaataggtgtagaaaaatgtgctatgataaaggaaatgagaggtgatgtcaggaaaagaagaattataataatttgaaatattttattacaataatttgaaaacattttgttcttaaataatarcaacccatattactatgacttaa

SEQ ID NO: 200792 - DNA, 468 bp, Homo sapiens
tttattacaataatttgaaaacattttgttcttaaataatagcaacccatattactatgacttaaggttgagaatactgaggatattataatggataaaagcaaataaaaattaataagagtaatcaattcagattaaattaatacattactacccatgatatgatcactctgaatcgcttaagggtgacacagatttattttaataacattggctatattgcttcaaatatgtggtagaagttttattgtcttaaagacatttgtcttttaattaactgccttgagaaaggaagaaatgtgttctatttaagatgataaagcagtacaaaaagtccctaatgaagatcatagataatttcctagtgawtaatgaggcagttggacactgaggcatcctatttcaggtcctcttataaaaagtacctttagagtttttttaattcattaaaaatgatatagtacattg

SEQ ID NO: 200793 - DNA, 444 bp, Homo sapiens
acttttcttctgattttttagttgcagaatgataatgacatcagtttcatatgtttcttgtgaagttcagataagtagaaaggaagtggttgccacattgaaagcattgaattgtgctactttgactttcctgtgtatttcattgcttactgaaaatgtctcggcctgatgctccaggcctcctctaacttgctcccacaccattctttcagcttgatgccctacaatgccccattcaaaagtggcacttgagctaaatttgttgatacrcagtcctcaattttcatgtattgatttttgcacaaagtttactttttcacattaaaagtgaaccgtttttagacctttaagtcaaaactagtctcattgtaaatcagttgtctgataatgactttgagtttttaaaaagacactgcttatctttattatttgttggtcagaagc

SEQ ID NO: 200794 - DNA, 448 bp, Homo sapiens
gttaacttttcttctgattttttagttgcagaatgataatgacatcagtttcatatgtttcttgtgaagttcagataagtagaaaggaagtggttgccacattgaaagcattgaattgtgctactttgactttcctgtgtatttcattgcttactgaaaatgtctcggcctgatgctccaggcctcctctaacttgctcccacaccattctttcagcttgatgccctacaatgccccattcaaaagtggcacttgagctaaatttgttgatacgcagtcctcaattttcatgtattgatttttgcacaaagtttactttttcacattaaaagtgaaccgtttttagacctttaagtcaaaactagtctcattgtaaatcagttgtctgataatgactttgartttttaaaaagacactgcttatctttattatttgttggtcagaagc

SEQ ID NO: 200795 - DNA, 457 bp, Homo sapiens
ttaactacgcacagcctagtttaattgatatgtatttctatagtttaaaaaacttttgttggttgtwttccaaatgtgactaatttgtattttaatgctgatattatattcagttcatggctgtagctaaggaaatataatcagaagagtttaattttgctttgaaataggtatatgatttgtaaagatcagaaaaaaagagggggtatttctttgagttttaaataactgcaattttagcccacttttgatatcacaattgtcttggactaatttgaatataaccccttgtagcagggttgaaccattttctccaggatcacagttcaattccatatatagaacaaaaactgaaaggatttaaaaagtgtttctaattgtgccccacccccaacacccacaaagaaggccgtgtcttgtcactgttgtacagttatgcttgtaagccacttaaatc

SEQ ID NO: 200796 - DNA, 457 bp, Homo sapiens
ttaactacgcacagcctagtttaattgatatgtatttctatagtttaaaaaacttttgttggttgttttccaaatgtgactaatttgtattttaatgctgatattatattcagttcatggctgtagctaaggaaatataatcagaagagtttaattttgctttgaaataggtatatgatttgtaaagatcagaaaaaaagagggggtatttctttgagttttaaataactgcaattttagcccacttttgatatcacaattgtcttggactaatttgaatataaccccttgtagcagggttgaaccattttctccaggatcacagttcaattccrtatatagaacaaaaactgaaaggatttaaaaagtgtttctaattgtgccccacccccaacacccacaaagaaggccgtgtcttgtcactgttgtacagttatgcttgtaagccacttaaatc

SEQ ID NO: 200797 - DNA, 382 bp, Homo sapiens
acgcatgcatttatgtgttgacatacttacatacttactcacttatctaagaaataataataatatgcctgtgaaaacaaccaggttgtgtctgttttaaatacagagaagtcacccttttccgtgctcaagattttcccatacactgatgaagaaaatttgaaatatttctgtttcgattcctgcagtgaataatttcccatctgttcaccatctctttattctgcaaatatttcaaaggtaacaaaatagcatgttccatcctttataagtttctaccaaaattcccaccgaacagactacacaaaatgtatgcaaagtaggctcactatcatttgcatagcttaaaaaagggaatatwtgcaactaagaatttcaaaag

SEQ ID NO: 200798 - DNA, 583 bp, Homo sapiens
cctctcttgttaggagctaatgccattggtaactttaagttgaagtcaatgctcatttaccattttaaaaatcctagggctcttaacaattattcccagcctactttgcttgtgccctataaaaatggaacaaccaagcctggatgagagagcatgtctgtttacagcatggtttattgaatattttaagcccactattgagacctactrctcagaaaaaaggattcctctcaaaatattattactcattgaaaacacacctggtcacccaagagctctgatggagacgtgcaggagattaatgttgttttcatgcttgttaacacagcatccattctgcagttcatggatcaagaagtaattttgactttcaagtcttattatttaacgaatacatttcataaagctatagtttgcatagatagtgatttctgtgatggatgtgtacaaagtaaattgaaaaccttctggaaaggatttactgttctcaatgccattaagaacatttataattcatgaaagaggtcaacatattaatataaacaggatttgggaagaaattgatctcaaccaccatggatga

SEQ ID NO: 200799 - DNA, 582 bp, Homo sapiens
aaattttatatttaacattaagatgcattaatgaaagtgcaaggtgttaatttttcagcacttctccttttttggtcagtattcacctggcatgtttggagatgattgccatcaactttgtgactgtgaaggagaaaccttctgccacccaaaaactgaaaaatgcctctgcccccgtgggagaactggagccagatgtgatgctggtaggacccaaagcacgtcaggactcccccctgacccatsgttatacagagatctgtagacattttcctgctagaagtggtactctattaaagagcattgcccagaattgcttgatactttccccttagtaagatgagcagggtgtgtagctgttacatcacaggcagctcaaacaacgttacagctgtcggaggacacgtgttaagtacttaaagggacacagttaaatgccccatcacaaaggtgattcatagaaatcactgagaattaaggcaattaaggtgtggtccagatagtattcttgagacccaagcttccagctactctttgggaattgaaatgtgtatttcgtttttcttttcactcagagaaata

SEQ ID NO: 200800 - DNA, 531 bp, Homo sapiens
ttgcagcctgaccatgtggtagaaaagaaaaatcaattttctgtaaagaaattcaagccagctggagaaatttacacaaataatgaggagctggatgttaatagccaagacaaaggggaaaatgtctccagggcatttcagaaatcttcatggcaacacctcccatcacaggcctggaggcttaggagggaataatggtttcatgggctaagaccaaggccttgctgctctgtggagccttgaaacataacaccctgmatcccagccactccaggtccaggaatggataaaagggggccaatgtacagctcaggccattgcttcagagggtgcaagccccaagccttggcagcttccatgtggtgttgggcctgtgggtgcacagaagacaaaagttcagctttgggagccttcgcatagacttcagaggatgtatgaaaacacctggatgtccgacagaagtctactgcaggggaggagccagcatttccttttatatagattttttggtactcctttaggtattatgtt

SEQ ID NO: 200801 - DNA, 554 bp, Homo sapiens
gccaaactaacagtatgatcatcttcccttccctgacccagctctcttgaagacactgtgaggcattttcagtcagtttatattgtaggaaataactttttttttttttttggcaggctgacaggccaagaccagatcttccagcaactggygtctttagttcctggaaggttttgaaaatgttagactatctgtgcattgtgcattgcctttctcacttgtcagtaaagattgcaatgtattatcaccaccactaatttaattttctgaccgagaagcatataccttaaaaaatgagaaaagaaaaagaaatcttaatgatagcttcttgaacactttaggcattactgtaaattaggttttgtgctagaacagtctgtttggtgccaggaacaattcaaaaggcttacaatacaaaaaaggtaaggttttaacacaatgtagtctagacagaaattgtgcgacaatgcagtaaattcattattgtaaaatttaaaaaaattaaataaataatgcaaaattgtttttatttacctcttggtgctagatcctgc

SEQ ID NO: 200802 - DNA, 513 bp, Homo sapiens
taataaggaatccaatgaaatttgggcgcaagatgccaaagactgcgaaaagggaaaataaatagctctatagcaaatgaaaacatttcaaccttatttgtaatgcaagaaatttaagttaaaactatattgagatatgattttttaccttcagtttagaaaacaaaacctaaaagtttgatatgttacattaataarggtgtggaaaaacctgctttttcatgaattgatgtcaataaagtggaattttctataagtaatttgacaacgtctaagctttttacatgtatgtgccctttagccaagcaattcagcttctaggaatttatcatgcacatatggtggctcctgcgtagaatgatatgtatctgaatatctattgtgaaatattctttattgggagcattaaaacaacctaactggactttaatggaagtctggaaagaaattatatcacatctataaaatagaatattatgcttctataaaaggatgaagcataaattaggaatt

SEQ ID NO: 200803 - DNA, 546 bp, Homo sapiens
tttgctcagatcaatatcctggagtgtttccccaatattttcttctagtagttttatagttttaggtcttatctttaagtgtttaatctttcaagttgatttttgtatacagtaaaatatgggtatctaattttattcttctgaatatggacaaccagttttgtcagaaccatttgttaaagagattgtattttccccaatgtatgttcttggtgyctttgtcaaatataagtttgctgtaagtgcatggatttatttctaggttttctattttgttccattggtctatgtgtctgttttttagctagtaccatgctgttttggtaactattgctttgcagtgcaatttgaaatcatatagtgtgatacctccagctttgttctttttgctgagtattgctttaactatttagatgattttgtggttccatacaatttattaaagttgcaggatacaaaatcaacataaaaatcagtatgctaagagtaatcctgaaaaagaaatcaagaaagcaatcccatttacaatagctacaaataaaatat

SEQ ID NO: 200804 - DNA, 462 bp, Homo sapiens
tccccaaagccatctattgattcagtgcagtccctataaaaacaccaatgacattcttcacaggaatagaatacacaatcctaatcttttaataatctttgaattttacagctcatgcatgtatgacttattaccaaaatattttcaatcaaaaatttgcattacctttaaaatgcttttcaatgaaattcttcaaaatttctaattcacgtaattcctttaatcaaattctctaatattgaaaggataatttctaccataygattggcaccattataaaaatccattaactttctttcatggacagcaggatttcccatcatatcagctgcctagtgcacccaaccagtctgttcctcagaatgaaaatgacaaaatattccatgtcctgcttcttaaggggttgcctgcaaataatggaatttgaaaaagttatgtgtttgaaagctagaagtcagatct

SEQ ID NO: 200805 - DNA, 609 bp, Homo sapiens
tgtgtcccctctcaatcattgcctctcaaagttaccattactatgaatggtaggtaattgcttttgtttataccacctaagctggcattattaaacatttccttttgtcctgtttttgaactaaatttaaaatgagtcatactatacatacatatatatgtatatatatgtgtgtgtgtatatatatatatgtatatatatatatgtgtgtgtrtatatatatatatatacacatatatatatatatgtatatggcttctttcactcaacattattccatgcactcatggatattccccaagttgtttaaaaattctactattaaagacattgagtagtttttagttttgactatggtaagaaatgctgctatgaacatttttatgcatatctcttaatataaatgttttgtattatcttaggtgtatattaaagagtagaattacaaggtcataacctacgtgtattttcagctttagtagacacattttttacaaagtggtgtagcagtatacaacccgatctccctaatactgattagtgatattttaaaatttaggcttttctataggtggttttaatttgcagtttcctcattactaatgaggc

SEQ ID NO: 200806 - DNA, 609 bp, Homo sapiens
tgtgtcccctctcaatcattgcctctcaaagttaccattactatgaatggtaggtaattgcttttgtttataccacctaagctggcattattaaacatttccttttgtcctgtttttgaactaaatttaaaatgagtcatactatacatacatatatatgtatatatatgtgtgtgtgtatatatatatatgtatatatatatatgtgtgtgtatatatatatatatatacacatatatatatatatgtatatggcttctttcactcaacattattccatgcactcatggatattccccaagttgtttaaaaattctactattaaagacattgagtagtttttagttttgactatggtaagaaatgctgctatgaacatttttatgcatatctcttaatataaatgttttgyattatcttaggtgtatattaaagagtagaattacaaggtcataacctacgtgtattttcagctttagtagacacattttttacaaagtggtgtagcagtatacaacccgatctccctaatactgattagtgatattttaaaatttaggcttttctataggtggttttaatttgcagtttcctcattactaatgaggc

SEQ ID NO: 200807 - DNA, 383 bp, Homo sapiens
ttaggatattggtgcaaagtgttagagagctggggaaggtcagatgatatgagcccaggaggcctagggattttgtgctttatccgaagggcagtgggagagttttaagcaagagaatgttaagattaggctagatttttttataaagccactctggctgcaggtagagaatggayatgtggaggggaaagggggagcagtggtgtggagacaaatttagagagcgtgcaataatccaagtggaagaatatgaagtcttcaagaccaatatggtggcagtgaatatcgagaagtgagtaaattcaagacaaatttcagcagatggtactttaatggattagacatggggttgggggaggagaagggagcggatacaatggaat

SEQ ID NO: 200808 - DNA, 583 bp, Homo sapiens
aagttgtcttttactctgattgaaatgaggagccattacagtgttttgagcagaacaattatgtgatctgacttgctttttaaaaggattactctgctgctatgttgaaaacattctgcagggaggcaagaacagcagcggggagactagctaggaggctattgaaataatctggggaaagatagtggtcacccagaaagggacgtaatagagaagggagtgagaagtggtcagattctggttatattttgaaggaatggccactttaattttctgatggattagacgcaagttsagaggaaaagaggaataaaataggactacaaggttcttggcgggagaaactaaagttgccatcaagtttggaagaaagatcagttttaaatattttgtgtctgggatgtccactagatggttgaagtaggatctcaagaagatgttttgagtttaggaggcagatgtggaatgaaaatgtaaatttgaggcattccaacacgaagaggttgaggagcagatgaggaaccagccaaggaccctgaaaaggggcaaccaatgaagtagcagcaaaactcaaaaattgcta

SEQ ID NO: 200809 - DNA, 508 bp, Homo sapiens
tcccccttcactctctcttctttcttcttcaaccaggtaagacgtgcctgcttccccatcaccttctgccatgattgtaagtttcctgaggcctctttcctaaggtttctcttttctttataaattacccagtctcagatagttctttatagcaacgcaagaacagcctaagacaccaactttccaaactctactttttatctaacaatgaaaataagagaagaatgagatatgagtgatttcttataattttatggttgactcagaatccattttgaatataaggtgcgctttctcataccaaagcagggcttggtcaccattgacagtttccatctatctgcctcttccaaattcctcagtatggtcgatctagatatctgccttacacaacttaytcctggtgaccacctccctatgggacagctagatacaacacacttgattcaccccactgactcccaaaccctgcacggactatgcagatacattgcagtgaccacctcgc

SEQ ID NO: 200810 - DNA, 522 bp, Homo sapiens
gcatcttgctctaagcagttcatcttcaccatgggagggaaaagtttaccaccgtcactggggcatctgttataagtcttaacttgtgttacatagtcagtggaaaatgagttttctgtcagcagtttccagagagagatccagaggatgagtggcctcttagatagcagtatcaagcttcagtctatgaaggcagtgagatgtggtaaaaagaayattagaaagaaaactggaacgccttgggctttcttgccaacttacttcatggccttggataaggcacttttttattttggagaaattacattttaataattatataagatgagttcactgctttgttttcactttaactttagcttacctttcttttgtaaaattcaaattaatttttttcttccaacttttattttaggtccagggggtacacgtgcaggtttgttacatgggtaaattgcatgccattgaggtttggtgtacaaatggttttgccaccccggtagtgagcatagtacccaatag

SEQ ID NO: 200811 - DNA, 531 bp, Homo sapiens
tctttgctattgtgaacagtgctataatgaacatacttgtgcatttgtctttatagtaggatgatttatatttctttgggtatatacccaggaacgagactgttgggttgaatggtagttcattttgatttctttggaatgtatctcaattgctttccctggtggctgaactaatttacattcccaccagcagtgtataagcatttccttttctccatcaccttgctgacatgttatttttgacttcttcttagtagccattctgactggtgtgagatagtatcttatggtaatttggatgtgcatttctctgatgattagtgatactgagcattttctcatgtttcttggcctcatgtatgtcttcttctgagaagtatttgatcatgtcctttggtaaggcacttttctattctacacatgacaacctgctgatgttggagataatatttgtgarttttgtgtaccccaatggttttggggaccagcccctatcaagaactagactatggccctttcataggtgttgtt

SEQ ID NO: 200812 - DNA, 422 bp, Homo sapiens
cacagttaggatttcttggatttttacaatttctcactcttctcttgatgatatgactggtgaacttggatttcagatagtcccatttcccctttgcaaggtaagcctgtgatgttgttaggttattgagggatttgagttgtttttctgtatatgactatagactatcacaaggacatctctccagagtatattyctaccatgaagaaagttgcaggaagggaagcagcaagcctaaaccaaacttggaattaactgattattatataaaaataaggtcccctcttcagggtttaatacaatatattttaaataaaatggaactctgttaaccaagcctgtttcttttcttgtcatgaaaaatgttaggatagacacagaaagaggggaaaggaaacttcttaatccaaaacatttaacat

SEQ ID NO: 200813 - DNA, 422 bp, Homo sapiens
cacagttaggatttcttggatttttacaatttctcactcttctcttgatgatatgactggtgaacttggatttcagatagtcccatttcccctttgcaaggtaagcctgtgatgttgttaggttattgagggatttgagttgtttttctgtatatgactatagactatcacaaggacatctctccagagtatattcctaccatgaagaaagttgcaggaagggaagcagcaagcctaaaccaaacttggaattaactgattattatataaaaataaggtcccctyttcagggtttaatacaatatattttaaataaaatggaactctgttaaccaagcctgtttcttttcttgtcatgaaaaatgttaggatagacacagaaagaggggaaaggaaacttcttaatccaaaacatttaacat

SEQ ID NO: 200814 - DNA, 396 bp, Homo sapiens
acggttgtaacaaaaagcaagcaagcaagaaagcatgacccttatcagctccacacagcatctggtctatacatactgtgtctagtggcagagggtgagtaagagagattgtttttccaacatcactagcttttgacagcatacctaaagaggtttttatagtttaatcgaagataaccatgaaatacaaaaattagagaaatgagaattgtcttagatattcaggttagattcagagtcattcaaatatacaaatacagagcacaaactagcaaacagattgtttttctcagacgaagtcagctgtccctgcaatttttgtccctataattttatttctkaatttaatggagtatttcaagagaaggatttgttcatcactttaaaggattcatg

SEQ ID NO: 200815 - DNA, 396 bp, Homo sapiens
acggttgtaacaaaaagcaagcaagcaagaaagcatgacccttatcagctccacacagcatctggtctatacatactgtgtctagtggcagagggtgagtaagagagattgtttttccaacatcactagcttttgacagcatacctaaagaggtttttatagtttaatcgaagataaccatgaaatacaaaaattagagaaatgagaattgtcttagatattcaggttagattcagagtcattcaaatatacaaatacagagcacaaactagcaaacagattgtttttctcagacgaagtcagctgtccctgcaatttttgtccctataattttatttctgaatttaatrgagtatttcaagagaaggatttgttcatcactttaaaggattcatg

SEQ ID NO: 200816 - DNA, 565 bp, Homo sapiens
cttctcttcccatttagggaaaagtatcttttatatctcatgaaaacagaatcaaagaactcaactcgccacccttaaaatgtctttgatttcagattttatattcttcaagaggactgaaaaaatctgacttttctggatttatttatgtagatttaatcaatacatgaaaatggggctgtatactcaaattgtgcctcgtatattcttatgtttttcttgcttgcacttgttttattaggaactaaagaaaaaaacaaaaccagaaaagmctcactgcaaacatatcagcatatggatttccacctcaatacaatgcatcacttttttaaaaggcaaaatttcataacataaaattaaccactttaaagcataaaattcagtgaaatttagtatactcacaatgttatcaaactatcaactctgtctagtttcaaaacagttttatcaccagaaaaggaaagccatattcattaagcagtcactcccgttcatttccacccccacctcccaactcctagaagccactaattggctttctttctctaggtatttgcctatttgg

SEQ ID NO: 200817 - DNA, 393 bp, Homo sapiens
agcaatccacccacctcggcctcccaaagtgctaggattaaaggcatargacaccgcacttagccaaataattttaaatatcattgtaatgcttttcttctgatatttccactcttctgatcacaaaaaagttttttccttaaaatatgctttatatgaatgactattatcttgtagtctttattccttatccttcctctagccattgacattttctttcctttcttcatgttaaaggcaactctgtctcccaaatctttgccacatgcaagcagcaaaggataactgttattttaatagccactgatttcttcattgtttaatctgatctctcttacattcaggtggctaacttaaacctcagaaagttaagaatgtatacattactcagcc

SEQ ID NO: 200818 - DNA, 578 bp, Homo sapiens
tagttatatgatatctaattatgcagacagtaacaaacaaatggaaccctagcacacacagtttcctccagccacagaaggctcaacccactactagactcctcttaacacaacctagactgtaatctagctggtgcccaagtttggaatgcatctaatttggtgaagatgagaaatagtattgactttcataataagaattccatctttcttttcagtttgctttccttctttctaactagattgctatagtgcaagtgaattttatatatatctctctaatatttgctaattttttaacaataaagagacacaaacaccagctcacatttttccataggcaacactttggctacaatttaataatattattgtgtttgtattccatatctttgtatgcacactttttatttatttttatgtatagctataaacacatttgtttgaaaaaaattgaacagatttaatgaaaaatatttttaaagatttcaataacagagttgctatcaaatgagtaratttatgaagcagtcttctgactgatatttcctttattttgacacttcatatttgtaata

SEQ ID NO: 200819 - DNA, 461 bp, Homo sapiens
aaaataaataaataaataaataaataaataaataaataaataaataaggaagcactgtaaaaacccagtctgaaaaattgattcttttaaaatctggagaaatagcaactagaaaaataatgagaagtatatccaagtgtctagaattccatcttagtctttaaattcgaataaaattaccctcaatgtgcatcattaaaaaggtattaactttatagtggacaaaacccacatgattcaygacctacactgacttatataatcaaaaacatgtttaaagtattaggcagtcgtttcactcaagaaagagttattgcaactgcaagtttaatttactattaagtatgtttatgtaagtttctgtgtgccagagcttgaccaaactctctggaaccttacaactatatgagttctaaacataagtgaagaaaggttatcctttaagttggactattttatgg

SEQ ID NO: 200820 - DNA, 402 bp, Homo sapiens
agacttgatattgtcaatatatcagttcttcccaacttgatatatggattcgatgcaagcccaataaaaaccctagcaatttattttgtggatattaacaaatatgtggagaaagaaaagacagaatagccaacatgatattaaaggagaacaaaaattataagactgacatgacccaacttcaaaacttactataaaactaaaataatcaaagcagaactgtattggtttaaaaaagtagacaagtagagcaatggaagagaagagagagcrcagaaacagatccacacaaatataatcaagtgatttttggcaaagaaataaagataatacaatggatacatagtctttttaacaaatggttctggaatagctagacatccacaagataaaaaaagatct

SEQ ID NO: 200821 - DNA, 619 bp, Homo sapiens
aatcctaaaacacaacaataaaaagaataacctgattaaaaatgagcaaaatatctgaacagacagctcatcaaagaacatatacagatggcaaataagcatatgaaaatatatttaatgtcatatgtcaggagaaaagtgcaaattacaacaacragataccactacacacttattagaatagccaaattcagaacactaataccactaaatactggtgagaaggtggagcaacaagaagtcttattcattgctggtgagaatgcaaaatgctacattttgtaagacattttggcagttttttagaaaactaaatacacaattaccatgtgatacaacaattgccttcttgatatttagtcaaatgagtttaaaccttatgactacacaaaagcctgcacaaagatagttttagcagctttattaatagtcacccaaacttggaagcaaccaatataactgacagtaggtgaatggataaactgtggtgtatctagacaatagagtattattcagtgctaaaaagaaataagccaccaaatcaagaaaagataatggaggaaacttaaattcatattactaagtgaaataagccagttagaaaagtctacaaactgta

SEQ ID NO: 200822 - DNA, 619 bp, Homo sapiens
aatcctaaaacacaacaataaaaagaataacctgattaaaaatgagcaaaatatctgaacagacagctcatcaaagaacatatacagatggcaaataagcatatgaaaatatatttaatgtcatatgtcaggagaaaagtgcaaattacaacaacaagataccactacacacttattagaatagcyaaattcagaacactaataccactaaatactggtgagaaggtggagcaacaagaagtcttattcattgctggtgagaatgcaaaatgctacattttgtaagacattttggcagttttttagaaaactaaatacacaattaccatgtgatacaacaattgccttcttgatatttagtcaaatgagtttaaaccttatgactacacaaaagcctgcacaaagatagttttagcagctttattaatagtcacccaaacttggaagcaaccaatataactgacagtaggtgaatggataaactgtggtgtatctagacaatagagtattattcagtgctaaaaagaaataagccaccaaatcaagaaaagataatggaggaaacttaaattcatattactaagtgaaataagccagttagaaaagtctacaaactgta

SEQ ID NO: 200823 - DNA, 540 bp, Homo sapiens
acgtgtagccagaggcaaggaaccaacaaagaatggtgaggtgcccagggccggggaccaggcctgaaggggcaaaggaggaaatgttgtgagcagagttatgggagacggaccttcccacagaagccagagccatagaagaatgtaacagcaggaaagcagggttgagccagcgcggatgggggtgggatggagcagggaataaatgtgtcaacctccaatctcttgccagcgcctcccattrgacaaacccaacaggaagccaagggaacagggactctggtgatgcagttatagaaaacacagagggcaggagaggcagtggacaggggaggcacatggagaataaccagctcgggagtctggttatcccatgacagggggagtctgaatggcctggaccctgtggtatactggcagtgaaattcccagccaggttgatgatgacagcagtgataacgaagaaggtgaccctatcttagatttatataactgttttgtcctccaacaatatcgggttacccagagcatctttcagga

SEQ ID NO: 200824 - DNA, 492 bp, Homo sapiens
ttttaaaagtgggagtttccctgtacaagctgtctctcttgcctgctgccattcatgtaagatgtgacttactcctccttgccttccacaatgattgtgaggccgtcccagccatgtgggactgtaagttcattaaacctttttttctttccagtcttgcatatgtctttatcagcagcatgaaaatggactaatacagttggtaagactgttttgcatgtattataggataaagcaatgagtaattatgttgttttgaaaagtgggatgttttacatcccaggtatggatataagatcaataaagttaagtagaaacactttagtcttacctaaatttgaaatagaactattagtaagaatccatraagtatttgcttgtaaaaaattctttctagaaaccatcatcaattcaaaagcaagcatttcttgcacacagaatatgatctctaaatgccatttactaaaagaaagcagggctccttagaaaaat

SEQ ID NO: 200825 - DNA, 494 bp, Homo sapiens
aaaatctggaaaaagaaactagatgaagtcccaagttcctggttgagctctaggaatgagatggtgagtttctttatctcacctcctagtattattattaaaatgtgaaatcttacttcatgagttagtttgacctttaaccacttagctctggagagaatgccgggagctgtctgctaattctatttcgtgggtcttcttcatatcttacttctggagattatgtgtaggattttaaagatacactgtttctaaattgagaaatgggagaaatgatgttctgatgcattcctttgctcatctgtgagcactgccttctcaaagcgttgccaaytgcttcacagcttgccagcagtcccttgggcatttcccaaaactcacttcaattcagtaagaggggtaaggtgcagcacacagaaaccctggcagggaattcagaatgggtgggagtctggacccagtttcgcctgatgctaacttgctatgactgacct

SEQ ID NO: 200826 - DNA, 539 bp, Homo sapiens
gagttgtaagtgctttgcctgcattcaatcattccatctgacataatactctaaggtatttgccatcattatgtcttatgtacagacaaactaaatattagggagtatagaggtgagtgaaattggtcaagattacaaaatatttgactgtggaattggtatttgaactcaagacttctgattttttctgacttaaaaaatcagaaaaaaaatatatatatatatatatctgtccttgagtcccattatagaggcrgtaggaggaagagagtacctcatgttctgacataatactgtaatacatttacttaaaattcattaatattcccatgttacacattatttttaaatgatgaagagaatgacatgagtatgtcagtgtattaactgcatattttttctgtccatgagctatcagttacaagaaatactttgtttctaggtacaactaggcatataccaaaatcatgtttaaaaaattgtatcagtgaggttcttatcatattctagtcatttcttaataacactatttttttcag

SEQ ID NO: 200827 - DNA, 539 bp, Homo sapiens
gagttgtaagtgctttgcctgcattcaatcattccatctgacataatactctaaggtatttgccatcattatgtcttatgtacagacaaactaaatattagggagtatagaggtgagtgaaattggtcaagattacaaaatatttgactgtggaattggtatttgaactcaagacttctgattttttctgacttaaaaaatcagaaaaaaaatatatatatatatatatctgtccttgagtcccattatagaggcagtaggaggaagagagtacctcatgttctgacataatactgtaatacatttacttaaaattcattaatattcccatgktacacattatttttaaatgatgaagagaatgacatgagtatgtcagtgtattaactgcatattttttctgtccatgagctatcagttacaagaaatactttgtttctaggtacaactaggcatataccaaaatcatgtttaaaaaattgtatcagtgaggttcttatcatattctagtcatttcttaataacactatttttttcag

SEQ ID NO: 200828 - DNA, 539 bp, Homo sapiens
gagttgtaagtgctttgcctgcattcaatcattccatctgacataatactctaaggtatttgccatcattatgtcttatgtacagacaaactaaatattagggagtatagaggtgagtgaaattggtcaagattacaaaatatttgactgtggaattggtatttgaactcaagacttctgattttttctgacttaaaaaatcagaaaaaaaatatatatatatatatatctgtccttgagtcccattatagaggcagtaggaggaagagagtacctcatgttctgacataatactgtaatacatttacttaaaattcattaatattcccatgttacacattatttttaaatgatgaagagaatgacatgagtatgtcagtgtattaactgcatattttttctgtccatgagctatcagttacaagaaatackttgtttctaggtacaactaggcatataccaaaatcatgtttaaaaaattgtatcagtgaggttcttatcatattctagtcatttcttaataacactatttttttcag

SEQ ID NO: 200829 - DNA, 593 bp, Homo sapiens
taaaataataaatgtagagtgtttgagatactttttcatgattttatgatccctcagtgtgattcatttaataaattgatacattacacttttttttattaggtaacaataggttaagatcaagcactgtgtcatgacttttgtactgagatttctgtgcagtttatttcttgcttatcactatggtacaaatgtggatagcttcatgagtgtaggtcctgcacagtaacactgaacacagtagtgttgcccccttggtttaaggttttgttgttgccatcttaaaattcttagtagtttttaacaagacgcttgcatattcattttgcatggggccttgcgtattacattcctgatcctgagtaccaaatcaggtttaaggtttatgacttatgacaaagatgtctatatctcccttgggtttcatttatgtttttagcctcagaaattagagytgaattaaaaacccatatgatagaagtcactcttcatgttgcattgtcactaatgataagggaaatgtagctgaagagttatactcatgtcttttaatgattttcacgtacactagcattcactatcccacatgaagg

SEQ ID NO: 200830 - DNA, 337 bp, Homo sapiens
ggaatagatctattgcccagcaatccttgtccttaaatcattttatcaataaaatcagctagtcagccacttaacttaagtgaaagcccacagaggaaatcaacattacctatgttataatttttctgggtctatgtcttttactaagaatgaaggcttagaggctgttgtgaatttagaattaaaaatataagtgacttggataaatatgcattattattcgcttactttaagagatacagwttccttcgattaaaaagccagaaagacattatgttaatgtcgtacctactaacaacgtaagaatcttcaccattctttagaagtccagtaattt

SEQ ID NO: 200831 - DNA, 337 bp, Homo sapiens
ggaatagatctattgcccagcaatccttgtccttaaatcattttatcaataaaatcagctagtcagccacttaacttaagtgaaagcccacagaggaaatcaacattacctatgttataatttttctgggtctatgtcttttactaagaatgaaggcttagaggctgttgtgaatttagaattaaaaatataagtgacttggataaatatgcattattattcgcttactttaagagatacagattccttcgattaaaaagccagaaagacattatgttaatgtmgtacctactaacaacgtaagaatcttcaccattctttagaagtccagtaattt

SEQ ID NO: 200832 - DNA, 337 bp, Homo sapiens
ggaatagatctattgcccagcaatccttgtccttaaatcattttatcaataaaatcagctagtcagccacttaacttaagtgaaagcccacagaggaaatcaacattacctatgttataatttttctgggtctatgtcttttactaagaatgaaggcttagaggctgttgtgaatttagaattaaaaatataagtgacttggataaatatgcattattattcgcttactttaagagatacagattccttcgattaaaaagccagaaagacattatgttaatgtcgtacctactaacaaygtaagaatcttcaccattctttagaagtccagtaattt

SEQ ID NO: 200833 - DNA, 618 bp, Homo sapiens
aggttcaaccaattctcctgcctcagcctcccaagtagctgggattacaggcgtatgccaccacggccagctaatttttgtatttttagtagagacggggtttcaccatgttggccaggctggtcttgaacttctgaagtcaggtgatctgcctgcctcggcctcgtaaagtgctaggattacaggcgtgagccaccatgcccagctgctctgagatttttatgttctttgatttatcattcatgcaatcaaaacttttcagttcatattatttatatttaagtctttattcaattaatgttcattgaacatctcttctgtgctggcacttttcaagacactgaggatatattgaggaacaaaggagacataaaagaagataaaatcctgtggcttcatagagtttagcttgtattggcgtaggaaaaaagtaaaacatataagcgaaatacataatgtattagaaagtaaatactgcagattaaatgtgaggaatgacattggagcrcacaaagaagtgtttaaagtttggtttaattttatactgggtggattaggataagtatcctgagatggtagcatttcagcaaagtttgtgggacaggtggaggtgggaca

SEQ ID NO: 200834 - DNA, 547 bp, Homo sapiens
agtagaataaatatatctgtcttgttcagttactagtatttcatatttatatattatgcatatttcacggaaatgtcctttagaagtcaattttatgtgtttttctaatatgatagaatatttttaaaaatatatcattagagatatctactagmtttttcactagtgtctgcttgtatgcatgctctatttgattttggcatcacttgagtaagcatcaaaggaacatagatttaaactcaggagatcattaatgaaaactcaaacatggcttaccatgttagagtcataaaacttgtgtgcaaattacgggtacgttacttttaattcagctaagaagttagctgaggagaccaccatatagttctgccttgatagagttcgtatttcctgaagcataatgaagagcaaacacggaaatagcatatcagctgccaagagtggccgaaaaaaattggctgactgaaattggctggctaacaggaacgtaaaagctttatattgtatgagtatctattttcattgcctgatctcacttaacaagaaa

SEQ ID NO: 200835 - DNA, 547 bp, Homo sapiens
agtagaataaatatatctgtcttgttcagttactagtatttcatatttatatattatgcatatttcacggaaatgtcctttagaagtcaattttatgtgtttttctaatatgatagaatatttttaaaaatatatcattagagatatctactagctttttcactagtgtctgcttgtatgcatgctctatttgattttggcatcacttgagtaagcatcaaaggaacatagatttaaactcaggagatcattaatgaaaactcaaacatggcttaccatgttagagtcataaaacttgtgtgcaaattacgggtacgttacttttaattcagctaagaagttagctgaggagaccaccatatagttctgccttgatagagttcgtatttcctgaagcataatgaagagcaaacacggaaatagcatatcagctgccaagagtggcygaaaaaaattggctgactgaaattggctggctaacaggaacgtaaaagctttatattgtatgagtatctattttcattgcctgatctcacttaacaagaaa

SEQ ID NO: 200836 - DNA, 532 bp, Homo sapiens
tgatttcaattattttaagtttgttgggacttattttgtggcctaacatagtctgttatagagtatgatccatgtgacaaggacaagaatgtgtattctgcagctcttgggtgaaatattctgtaaatatctcttaggtccattttggtctaaattccagttcaattacaatgtgattttttgtcgttgattttatgtctagataattcatctaatgctgagagtggagtgtgacagtccccaactattactgtattggaccttaactctatctttaggtctaattatatttgcyttatgtatttgggagttcaagtgttgagtgcacatatatttagacttagatcatcctcttgttggattgatccctttatcattttatagtaaccttctttttctttttttactgtttttgccttagtgtctattttatctcatattaagtacagctacttctgctctgttgtggataaagtatgtttcttgtaggcagcatatagttgcatcacttttttaaaattaatttggccag

SEQ ID NO: 200837 - DNA, 532 bp, Homo sapiens
tgatttcaattattttaagtttgttgggacttattttgtggcctaacatagtctgttatagagtatgatccatgtgacaaggacaagaatgtgtattctgcagctcttgggtgaaatattctgtaaatatctcttaggtccattttggtctaaattccagttcaattacaatgtgattttttgtcgttgattttatgtctagataattcatctaatgctgagagtggagtgtgacagtccccaactattactgtattggaccttaactctatctttaggtctaattatatttgccttatgtatttgggagttcaagtgttgagtgcacatatatttagacttagatcatcctcttgttggattgatccctttatcattttatagyaaccttctttttctttttttactgtttttgccttagtgtctattttatctcatattaagtacagctacttctgctctgttgtggataaagtatgtttcttgtaggcagcatatagttgcatcacttttttaaaattaatttggccag

SEQ ID NO: 200838 - DNA, 554 bp, Homo sapiens
cacaaaccaatggaaatatagtccatgatcatggattgggagaagcaatataatyaaaatagcaatactgcccaaagcaatttacagatgcaatgctgttcctatcagactcccaacatcattcttcagataattagaaaaaattgttgtagaatttatatgaagtaaaaaatgagcctgaattggcaaagcaattctaagcaaaaagaacaaagcattttctaatatttgagttaacttttatagaggaagacattttttctcaagatgtgcctatgttgatggttgggaagtgtacctcagctttggttctggattcttgcagtagggtagtcttcatatgatttaactgactgtgtactgaatcagtgatgtctgtaatttcctcggtggcttggctgcagttctcagtacaggctgtggtgacactttgctggggagagaatgtcaggtgggcagtcctcaagccttggtgattacagtagtggcccgagcatgcctgtcatttcacgcctgggcagcatatgtagacattagttttagcaggtgcaggt

SEQ ID NO: 200839 - DNA, 554 bp, Homo sapiens
cacaaaccaatggaaatatagtccatgatcatggattgggagaagcaatataattaaaatagcaatactgcccaaagcaatttacagatgcaatgctgttcctatcagactcccaacatcattcttcagataattagaaaaaattgttgtagaatttatatgaagtaaaaaatgagcctgaattggcaaagcaattctaagcaaaaagaacaaagcattttctaatatttgagttaacttttatagaggaagacatyttttctcaagatgtgcctatgttgatggttgggaagtgtacctcagctttggttctggattcttgcagtagggtagtcttcatatgatttaactgactgtgtactgaatcagtgatgtctgtaatttcctcggtggcttggctgcagttctcagtacaggctgtggtgacactttgctggggagagaatgtcaggtgggcagtcctcaagccttggtgattacagtagtggcccgagcatgcctgtcatttcacgcctgggcagcatatgtagacattagttttagcaggtgcaggt

SEQ ID NO: 200840 - DNA, 355 bp, Homo sapiens
catcaagaatgtggataattaatttctgactatacataaaactttggtaagtttttcttagattttctgtggtcaaaatcttttgaggaagttcataaactaaaaacacattccaktttttagtagagatctcctgataaatataataatttgaatctaattttaaggtaaaatagcacttattcaatgtgtatttttgccttacacacgtcagtgttcttgcccttaattcttattttattttaaaaaacaccatttctacatattttaataaacacagaagcatatttcccttcaggtgacttttgatttattattcttagctgcataagaataataatcattttcattttta

SEQ ID NO: 200841 - DNA, 612 bp, Homo sapiens
actgtctctcctttgtttttgagaaacagcttttctggatgaagtattcttggatgacagtttattatttttttccaatgattgggaaatatcacccactttcttatagcctgtaggtttctgttgagaagtctgttgtcatattarttggagttcctttatatgttatatgcttttttttaacttgctgcttttcaaaaattatctctttgttcttggtctttgattattacatgccctagcatagacttatttgggtcaaatttgtttgatgttctctgtccttcctgtttctaaatatttatgtcctcctcaagttttggaaagttttctgttaattttttttttaataatccttctgccacatattcttgctcaactttctcttgaaccccaataatttttagatttggtctttttagttaattatctatttcttataggtgatctttattcctttttattcttttcctttctcctctgtctgtgtaatttaaaatagcctatgcaagcttactgatttttttcctcacttgattaattatgctgtgaaaatactgcaataagttcttaagttcagcaagtgtacttctcagttccaagatttacgtt

SEQ ID NO: 200842 - DNA, 612 bp, Homo sapiens
actgtctctcctttgtttttgagaaacagcttttctggatgaagtattcttggatgacagtttattatttttttccaatgattgggaaatatcacccactttcttatagcctgtaggtttctgttgagaagtctgttgtcatattagttggagttcctttatatgttatatgcttttttttaacttgctgcttttcaaaaattatctctttgttcttggtctttgattattacatgccctagcatagacttatttgggtsaaatttgtttgatgttctctgtccttcctgtttctaaatatttatgtcctcctcaagttttggaaagttttctgttaattttttttttaataatccttctgccacatattcttgctcaactttctcttgaaccccaataatttttagatttggtctttttagttaattatctatttcttataggtgatctttattcctttttattcttttcctttctcctctgtctgtgtaatttaaaatagcctatgcaagcttactgatttttttcctcacttgattaattatgctgtgaaaatactgcaataagttcttaagttcagcaagtgtacttctcagttccaagatttacgtt

SEQ ID NO: 200843 - DNA, 560 bp, Homo sapiens
gcttaccagtggcttctttttctatcacatatatttccccttttcctctagacttctatatacacatagctgatctctctgtgggtagagggagacttattctgaccctctttaatttctctctgattcaatgatggcaatgaaaaatgaaacttaatatcatctttagaggagaaaataccgaatgatatcaatttttatatgtctcttgttaggtcctagagaagcagatgctgagactgagtttttaatgcaaaaygttggtaagggatcaacatcagtaagcagaagggacgaaagcaggttgagtagagggaggagtgaaagtgcatcaaaggccaaacaaataatcagagaacttggtgaggagctctggagcaaggattgtctaaaacactgtcgcactacaggctgaaatagatgagatctttttaccaggggtcaccagaatacggtcagcctgccacatgttttttatagtctgtgagctaagactatttttttttacatttttaaatagttaaaaaaggcaaaaggatattttctgacatgaaaattat

SEQ ID NO: 200844 - DNA, 564 bp, Homo sapiens
ataatccagctgttgcctaccacagagagccctgagcayggatgcataagctctggatttggcatgtaaacggggaggcttcatgcgtccgtggcgtggttccaagccccatgaccagcctcacttttgcaattgagaaactggaattaattctcccatcctccccgatgcacagagatgtgttcaggataaaccgagtcatatttcataagttctgggtgctaaaggggaaagaaagatagtattacgaagacactggcatcacgacgcccacttctggaatgagccagtctgttgagcatttacataacaaaatagcaatgtactttccatgccatagcaaccctggaagaaaactgcgaggtggaaaccctggacaatttgtatgaggattcttgaaaatctgagatagacaaacgcattctgagagatcaagcttgcttataaatgttggttcataacaatgtaatctacatatgtgaatctcagaaagtacctttctcctgggaatttctttcagaaaaacaatcttctttagtttactgtttttaaaccttttccccc

SEQ ID NO: 200845 - DNA, 564 bp, Homo sapiens
ataatccagctgttgcctaccacagagagccctgagcacggatgcmtaagctctggatttggcatgtaaacggggaggcttcatgcgtccgtggcgtggttccaagccccatgaccagcctcacttttgcaattgagaaactggaattaattctcccatcctccccgatgcacagagatgtgttcaggataaaccgagtcatatttcataagttctgggtgctaaaggggaaagaaagatagtattacgaagacactggcatcacgacgcccacttctggaatgagccagtctgttgagcatttacataacaaaatagcaatgtactttccatgccatagcaaccctggaagaaaactgcgaggtggaaaccctggacaatttgtatgaggattcttgaaaatctgagatagacaaacgcattctgagagatcaagcttgcttataaatgttggttcataacaatgtaatctacatatgtgaatctcagaaagtacctttctcctgggaatttctttcagaaaaacaatcttctttagtttactgtttttaaaccttttccccc

SEQ ID NO: 200846 - DNA, 564 bp, Homo sapiens
ataatccagctgttgcctaccacagagagccctgagcacggatgcataagctctggatttggcatgtaaacggggaggcttcatgcgtccgtggcgtggttccaagccccatgaccagcctcacttttgcaattgagaaactggaattaattctcccatcctccccgatgcacagagatgtgttcaggataaaccgagtcatatttcataagttctgggtgctaaaggggaaagaaagatagtattacgaagacactggcatcacgacgcccacttctggaatgagccagtctgttgagcatttacataacaaaatagcaatgtactttccatgccatagcaaccctggaagaaaactgcgaggtggaaaccctggacaatttgtaygaggattcttgaaaatctgagatagacaaacgcattctgagagatcaagcttgcttataaatgttggttcataacaatgtaatctacatatgtgaatctcagaaagtacctttctcctgggaatttctttcagaaaaacaatcttctttagtttactgtttttaaaccttttccccc

SEQ ID NO: 200847 - DNA, 413 bp, Homo sapiens
ataaagggcagttcccctgcacacgctttctkgtctgctgccatgtaagatgtgcctttgctcctcctttgccttctgccataattttgaggcctccccagccaggtgaaacgactgagttcagtaaatctctttctctttataaattacccagtctcgggtatttcttcacagaagtatgggaatggagtaatatgttttatttcttctttctctgattctccttattgagggtctaacatttccccccaggtcagaacagagagttgcagtggccatttctccaaaaaggagactgaatggggccctttatgaatatgaacaatgaggcctcccaggaagaattgctgcatgggtgggggcaatgtaagaaatgaggcagcagctctggatttacagaggggcaaaagcag

SEQ ID NO: 200848 - DNA, 413 bp, Homo sapiens
ataaagggcagttcccctgcacacgctttctggtctgctgccatgtaagatgtgcctttgctcctcctttgccttctgccataattttgaggcctccccagccaggtgaaacgactgagttcagtaaatctctttytctttataaattacccagtctcgggtatttcttcacagaagtatgggaatggagtaatatgttttatttcttctttctctgattctccttattgagggtctaacatttccccccaggtcagaacagagagttgcagtggccatttctccaaaaaggagactgaatggggccctttatgaatatgaacaatgaggcctcccaggaagaattgctgcatgggtgggggcaatgtaagaaatgaggcagcagctctggatttacagaggggcaaaagcag

SEQ ID NO: 200849 - DNA, 291 bp, Homo sapiens
agttcagtaaatctctttctctttataaattacccagtctcgggtatttcttcacagaagtatgggaatggagtaatatgttttatttcttctttctctgattctccttattgagggtctaacatttccccccaggtcagaacagagagttgcagtggccatttctccaaaaaggagactgaatggggccctttatgaatatgaacaatgaggcctcccaggaagaattgctgcaygggtgggggcaatgtaagaaatgaggcagcagctctggatttacagaggggcaaa

SEQ ID NO: 200850 - DNA, 563 bp, Homo sapiens
cttcaacaaccaccaacactgtgtcagatgtccactcttcaagtatgaaacttgtgcagtagcatggcttctacctggtggcaagaacttagtaatcaacattactgatacccctgtcactactgatatctggagggcctatttcttcagaattattctccagagaaaacactttcaaactcacactgaggtgcaagtgatgtgtcctcacgtaacagagcaaactaaaaactcaactgaaatagagtattcrtttagtatttatggtcaggaggatggcgtaaagatcactccatcttgtggatcccatccttgctatgccacgtggatcgaatgtcatgtttaaaaagtggtcaagtctactctttagttcttcaaaagcaaggacacagcaggtcattggacacgtctgccacaggccacatcagttctccctctttcaagctccaagtctgagtcattcaggccagtgttctgcaaaacaaacaggcatctgtggaagagctagtatggtgttggtatcagtcacattcagggttggagaaatctgtgcactggaagct

SEQ ID NO: 200851 - DNA, 498 bp, Homo sapiens
gtctctccagaatctgtctccaacagtttatagaattcagwgtttgcaacttgcttttcacaaacacccaaaggggcaaagagggacccggcttccttctgggtgagtaaaataaggcaggtggcactgaagaagaaaggaatcttggtgataaaggagttctatatgagtggcagagaggccaacctgggtttgcctctccatccctgctgtgcgaggagccatgtcacttatacaccctgagtcctgaaggcctgacacataaaatcagggtatttacatccctgccccaggtattatgtggaaactgaacgaggttgagggtgcaggcaatgctttaaatagtgacagagggatggcagaagctctagtaggaaaggcagtctcttgcccaggtacctccaaagctacagatgccctgcagagactgagatggccacagggtcacacaggcttctccctgtcacgataggcagaggattctaggcgtgagtcacc

SEQ ID NO: 200852 - DNA, 498 bp, Homo sapiens
gtctctccagaatctgtctccaacagtttatagaattcagagtttrcaacttgcttttcacaaacacccaaaggggcaaagagggacccggcttccttctgggtgagtaaaataaggcaggtggcactgaagaagaaaggaatcttggtgataaaggagttctatatgagtggcagagaggccaacctgggtttgcctctccatccctgctgtgcgaggagccatgtcacttatacaccctgagtcctgaaggcctgacacataaaatcagggtatttacatccctgccccaggtattatgtggaaactgaacgaggttgagggtgcaggcaatgctttaaatagtgacagagggatggcagaagctctagtaggaaaggcagtctcttgcccaggtacctccaaagctacagatgccctgcagagactgagatggccacagggtcacacaggcttctccctgtcacgataggcagaggattctaggcgtgagtcacc

SEQ ID NO: 200853 - DNA, 592 bp, Homo sapiens
ctccctaaaaacctttccctcttccccaactgggaaaatcctatttatttatcagtgagcagctcaaataatattagagttgaagggttcttcccgcacccttcttgaccattgccaccatcttggatctgtcttccttaatactataacactttcagattcctcttagaatattcaacacacttgcttccaccaaataaggacacagcaacgtggtgcctttttgaaggatagaaagcagccctcaccagacaccaagcctgtctgcatcttgatcttgaattttccagcctctagaaccaygagaaataaatttctatttataatttttttatttctatctataataaacagagagagagagagagactgaatgcctaatatctatcagacatggcaagctattttcctatcctatatgtgtttctctccttaaggataggcatcatagcttattgacttctataatcctaggacttatcacagtgcgtgacacgtaagaagcaacacaaaatttgttgagtgaccatagccttcaggtaaactagaagataacctgtcactaatcatgaaatgttcttgggaaattcca

SEQ ID NO: 200854 - DNA, 578 bp, Homo sapiens
ggtaataataataataatgagaacgcagcaggcttagtttgaaaccagaccttgcaatccttgactgcacttgtcacaaacatgttttcctctaatgakcctcaagcatttcccactacctctttctttttgagcacagacactgaattaattacccagaaacctcacttttttatttttgagtactcctttatcttcccatgagaagagaaagctactgagattgcccaggatgtgtttcccaggtataatttccattttaagggaaagttaagacaggccttttaagaggtttgatgcaaaagcctctggaatcccttgtttttggagtctgtctggaagtttgaattggcattgggttggaatcctctaaatatgatcctatgtaagctgagtaatgaggaagatgactttgctatgcttagctgtggttcagtgattctcccctgagaatcaactgctataaaaatcactggttattatgtaaaacattgtgaccgaagcagtgacaagggtttatagagaaaacttaggtagacttgctcaatgaaattaagaaaaataaaaaaggaacaaca

SEQ ID NO: 200855 - DNA, 578 bp, Homo sapiens
ggtaataataataataatgagaacgcagcaggcttagtttgaaaccagaccttgcaatccttgactgcacttgtcacaaacatgttttcctctaatgatcctcaagcatttcccactacctctttctttttgagcacagacactgaattaattacccrgaaacctcacttttttatttttgagtactcctttatcttcccatgagaagagaaagctactgagattgcccaggatgtgtttcccaggtataatttccattttaagggaaagttaagacaggccttttaagaggtttgatgcaaaagcctctggaatcccttgtttttggagtctgtctggaagtttgaattggcattgggttggaatcctctaaatatgatcctatgtaagctgagtaatgaggaagatgactttgctatgcttagctgtggttcagtgattctcccctgagaatcaactgctataaaaatcactggttattatgtaaaacattgtgaccgaagcagtgacaagggtttatagagaaaacttaggtagacttgctcaatgaaattaagaaaaataaaaaaggaacaaca

SEQ ID NO: 200856 - DNA, 513 bp, Homo sapiens
gaattctagccctgctgcagagctgttgctctcaacagccatggagggcctactgggaggatgagtagacaggttgtggatgtgaacttgcaatttcctaaacctcccctctgctcctgcatttctgttttaacataaatatttaggtggtagaaaattaattaggaaatctttaggttagttggagacatgctgtggtactacaaaaatagcttaggaaccatagatctcaatttacctatcaggctgagtttttgcctcagctttttattctttaaacattaccaaagggaaaagagagaattttacaaataactagaaacttttacctgtgatgcattttattttcctttccttggtaaaataattctgatttttttctttagatctgaaaactcccctaaatgaccactgtaaatttctgcaaatttccagatataagcaaacatcycaagaaaatatcttatttttttcagactaatttaacaattggataccggtttcttataaaca

SEQ ID NO: 200857 - DNA, 536 bp, Homo sapiens
gagttcaggtgaggtcatattctgctaccaaatgaattagaaaatcagcttccaagttgtagtggtttttcaatttcagtattgcaggaaaagtactgtgaatttgaaatatttgttcctgcctctacggtgttttggaacccattaaacaaaattgtcacaataaagtgactctaagtgatattggagtatgaagccatactctctaaagaaagagtatttataaccccagggacactcaaagacatagagtgacgttttcatacagcaaattctcatgcaattgtctttacatgctctcttttaattgtatgttagtactttgtcaactaattcttcttaactcagcttaagttccctggttcttcwttataatcactcccttgcattcccccatttcctttgccccctcctgctcaatgttctcccttgtaaaaagactaatcctgattaaatcctactcttgcacccactttgtgatttcattcccacagctgaacattgctggagtaaacaatacaatcacactgaatggt

SEQ ID NO: 200858 - DNA, 572 bp, Homo sapiens
tggtacatcatgctatgaagtgacttctctatgaaaaaatgttggcctatggctggggatgggaaaggaaaaaacttagcctgttgttatcctcctcctttggcctcagcaacctccaacccatccatttgccccwccctgagtggacagtatgtagtggaccttagagacttgtgacatccttccccattggtgactgggacttttcccagaagaatgtgaaccacagaatacctccatgttcaaaatacaacaccaaactgaagctaatccgtgtttcctctacagggttccagcacaataactttagggaagaagagaagatgatttaacgactgaggtttttccttttttttattggttggttggtttttttacatcagatgggtaatgtgcaaatgtggtaacaaggttggagggcagcatatctcgcacatgagtataaatacccaatcatcacacataagttgcaaaaggatcaacaactgcattttgtaaagctgtgaggttttctgttattttaaatccccataataggtcagaaccctttgctaggcataatggaagagatg

SEQ ID NO: 200859 - DNA, 599 bp, Homo sapiens
tgtgactgtactggagtctctctgagtctatcctggcttgggaggcttcccaattcatgaattgttctttgctcaattaaagtctgttaaacttaatttgtctaaggttcttctttttaataaatagtgtcaaaagtgggatctgatgtagagcttctagtgacccccagaagcatcaagtgactaagtgaggtacttactgagcccgttgtgtctactgttctcctgaagcaactggggattgttacaagttctctctgattccaaagctccgcagatttgcgttttgagctctccaagtttgtttgagtaaatttccgagccaaactgggtttcgaagttgcaacagaaactggactgggttcaggactgaatggatttaaaattaactggcttggactcagttagaggcatcctatgtctccttgggtcagatagaaactggtagtaaacagcaatattgaaggrgatgtaaactttggcttttggaaattcacagagatttttattttctacccactttgtttattttttttcttgcctgcctagatagagaagaatcactggctaagttgttcaagggaatccaagagccaaag

SEQ ID NO: 200860 - DNA, 578 bp, Homo sapiens
tacgtatttataatgatggaatacaaaactgtctaagtcctggacctagtttcttattttataatttctgtatgtattattaaaacaagttttcttcctaattgacttatttttattrctaatattactttgataggccgttttgagaaatgctttcattaatgtaggtttgccttcctgaaaatcattttttaaagtcagagattcattattgttggtgaattgcagcattgtcaaggtcagtaacattttctaagcaccagctgcaccacctcagagagataattcttgtcttgcctcaattcacatttccctgaaatggtcaatttaataaatttctttatttacatgaacatagtagtcacataaatccatcagagcagatattctacaactttagataagttccataaccctaactgattgatgatattttcccaacgatcatgggaaacagaaaagcaattaaacaaagacatgtctcagggcatgctgactatcccatgctgtctttctttttgaatgcaacccacctgcataaaaatgaaaacatacatgtacccatctgattgcctaag

SEQ ID NO: 200861 - DNA, 545 bp, Homo sapiens
agatctaatcaggaggacatgctaaatcaagaagtttaatacaggacattaatacaggcaatgagtcacaaaggaagagaargagctgaaagacaattagggaatggtaaggacacccagagttaagcatcaacacccagagatcagtgtcagccaaaagttactcaagaactgaagagacaaaggaagtgatgagtccagaagccagaacactcagacacagacagtagtggaaccatagaggagcagccacgcatggagggagggtcccaactgggaactgggatgatggcaggcatttgcccaacagaagttgtgagtacagagagaaggtcagccagagagagatggaattatggaggagaatcagcctatgttagaaatgcagcccaaagatgagagagaaggcacagaaataacctggcttcctcttctagtcctccaacttcccggttttgcttcccattatccatatctaagcagaaagcaattggtagatggatgatagaaaataaagtttgcaaatgtcagggccccaagacact

SEQ ID NO: 200862 - DNA, 529 bp, Homo sapiens
acatgctaaatcaagaagtttaatacaggacattaatacaggcaatgagtcacaaaggaagagaaggagctgaaagacaattagggaatggtaaggacacccagagttaagcatcaacacccagagatcagtgtcagccaaaagttactcaagaactgaagagacaaaggaagtgatgagtccagaagccagaacactcagacacagacagtagtggaaccatagaggagcagccacgcatggagggagggtcccaactgggaactgggatgatggcaggcatttgcccaacagaagttgtgagtacasagagaaggtcagccagagagagatggaattatggaggagaatcagcctatgttagaaatgcagcccaaagatgagagagaaggcacagaaataacctggcttcctcttctagtcctccaacttcccggttttgcttcccattatccatatctaagcagaaagcaattggtagatggatgatagaaaataaagtttgcaaatgtcagggccccaagacact

SEQ ID NO: 200863 - DNA, 583 bp, Homo sapiens
tcattgctagtatatagaaaaacacttgacttttgtataatcaccttgtatcttgcacccttgctataatcacttattcatttcagattatttttctttttctttttttgtgtgcctattttgagattttctgtgacagtaatgccacctgtgaataatggcagctttacttcttccttccaaatctatataccttttagttccttttcttgtgtgattacattaagcagaacacaaacatttattttttgctcatattacatgttagcaattatcatctgttgccatggatctggtctatgtctttgcttcattctgggacctagatggaaagaaccaaccctgtctggagtaaaaaatgagcaagagctctagtggaatcacaatttccctcacagattctcctcagaacaagcacatcaccacttctgctcacatcctattggcctaagcaattatcacatgtcctgaggaggcattatgaatcacwgatcaatgaaactcttacatataaaggggcaaatgtttggagacaagattaaggaattaacatacctatagtgtctaatatctatcatatggt

SEQ ID NO: 200864 - DNA, 560 bp, Homo sapiens
tgtgtgtatcagaatataaatgaaatgctcttctccctccactcttgtgaaatgcctgatgaagcttaagcatttaactttcctgttgctctacttattctcctgttgccacagcaactaaaaatgttcattccactgctcttgcaggtaccttgcaaatacagttttttttctttttttttaataaaagacaatgaatcatatttwaaaaaaacaatgtggtcaatatggagagctaccattcatgtgtttcttcagccccaatgaaaaagtcttaacttttcctagtaaaattctgtcattttaagcatcatgtcctgcataatattggaactggaaaaatcaggcttttattattctagaattaagacatgtatagagactcacaatgtacaaaagcctatttagtcagggttttccaagagatagaccaattagatagatagatagatagatgatagatagatagatagatagatagatagatagatagatagatagataaaagatagatatgagtagggatttatgagaggaattggctcacatgatgatggagg

SEQ ID NO: 200865 - DNA, 491 bp, Homo sapiens
aataatatcttttgactaaacaattgcattctgggacttaggcacaaggagccatatactaggtcacaatattcattggagcactgttagggatagcaaaaaactagaaataagcacttactaaaagagtagttaataaataaatggtacaattacagaccataaactaatgtacagtggtgaaagtagatkatatacacctattatactcaaagcatgttctgtggatcagtgtcagttcgtaagtcatttgttatcaatctatgtcaagatgagaactaaaattgagaggaaatatttagaaacttttatagcaacttggaataatttttatctgttaaatgaaataataaaaaagtttgatgtgttttattacgtttctaataatttattttattacattttaataagacattggttcataataaattgaaaattattaaaaacaaaaaaactttcttttccaaagttggagaagctagatgaataga

SEQ ID NO: 200866 - DNA, 597 bp, Homo sapiens
gcaataatatcttttgactaaacaattgcattctgggacttaggcacaaggagccatatactaggtcacaatattcattggagcactgttagggatagcaaaaaactagaaataagcacttactaaaagagtagttaataaataaatggtacaattacagaccataaactaatgtacagtggtgaaagtagatgatatacacctattatactcaaagcatgttctgtggatcagtgtcagttcrtaagtcatttgttatcaatctatgtcaagatgagaactaaaattgagaggaaatatttagaaacttttatagcaacttggaataatttttatctgttaaatgaaataataaaaaagtttgatgtgttttattacgtttctaataatttattttattacattttaataagacattggttcataataaattgaaaattattaaaaacaaaaaaactttcttttccaaagttggagaagctagatgaatagacagtaaatctcaaaaatataatattaagtaaaaagagaaaatttgaaaattgtaaatacagtgtgttgccaactatcttgtaagtaaatatatacatagtaaaa

SEQ ID NO: 200867 - DNA, 521 bp, Homo sapiens
ttcttccctcctgagaccatgctgagaatagatttaaatgttaatactggaatctcacagtatattgatctgtaatacattttctataattgtgcacaagtaaaaacctctaggccaggtgcagtggctcatgccagtaatcccagcactttggaaggctgaggtggagagatcatgagatcaggagttcaagaacagcctggccaacgtggcgaaaccccatctctatgaaaaatacaaaaattagctgggtgtagtggcaggtacctgtaatcccagctcctcaggaggctgaggcacgagaattgcttgaaaccgggaggcagaggttgcagtgaaccgagatcatgccactgcactccagcctgggcaacaaaagcaagacttcattaaaaaaaaaaamaaaaccctctgaagtgtggtttcttactctcaaataaacttgccttcataaattcataaattttaaaaacaattaaatgttattataaacatcatgaattggttgacatttaagcaat

SEQ ID NO: 200868 - DNA, 594 bp, Homo sapiens
aaatccctgttgcactgaatttgcttgtcttggctgcctgccttactgcctgtctttaccttgccaaattaggagttttatataggattcttttgagattcctccatttatttccccaacattctctttttcaccttcagaggaattgtgagtcagtgaggtgtgcctgcttctacactgaaccatacattctatagtatgaaacttcatggaattcatataccatttttctttcttttttaaaaaatttctccatttattttgactgttcacctttagaaatcattacatctagcaaaaccatttcctagggcttcatttcaagtttattattattatttttagcaatgaacatttttatagcactctacatgtgccagacaatccactaagcacttgacatatattaattcatgtattttccscactttacagataagaaaactgaagcacaatgatcttaaccaactttcccaatgtcagagctagtaagagcctgggccatagccccaggaattctagtttcttaacccagctcggaagtttgacttggatgttcatgtgatagaatggtagagaatggaagaaaataac

SEQ ID NO: 200869 - DNA, 543 bp, Homo sapiens
gccctgggaagatgacccatttggaaaacatcaacatgcttccttacccaccagctttcacttgtctttggctaacagggaccccaaggaaggaggagagtgaggtcaaggtatactttccttgatgccctccctgtgaggtctcctagagctgtagcctctcgaacaatggtcccttttcttttcaaggtgatcttctccacatgatgctccctttccagatgaaggttgttcctttctctccctaatgttggattgtggttctttctcactttgttacagttggtagctagtcagacatgagcagaacaggagacggctccccatgacacacacgtgcacgtgcacgcgccacacacacacacacacacyaggaatgttaggtgaccatcacgtgatggtcaggtggttgtgagctgtctctctaaaataataatttcccaacatcaggcaaagacctcccaataaacaaaaacacctgaaactattgatcagcaaaatgtctcccaataaaccaaaacacctgaaactattgatcagcag

SEQ ID NO: 200870 - DNA, 601 bp, Homo sapiens
gtctcaatgagtgtccacctctcaacagagaggagacccacagtgggcagctcctttatgcaggcaggttgtcccaatgagtgtccagctctcaacagagaggagacccacagtgggtagctcctttacacaggcaggtcattccaatgagcatccagctctcagcagagaggagacccgcactgggtagcccctttctgtaggcaggtcatccagactagtgtccagctctcagtggagaggagacccatggtgggtagcccatttccacaggcagatcatcccaatgagtgtgtgagcctagctgagtctggggtttttatatgctcagaatggaggaagtgtgtgctgattggtccatgggtggccacaggcaggcctggaaaaggcaccatctgattggacraatggtcaccgatgaagttctcactctgggccactaacttcacctggaactggcagcccagcccccaggcttcaggccattcctggcttgaagaagaggtttcaccagggacctaccccttcctacctaggaatctgtctgcttcctgcagccatcaacatgccattgcagcacccaggctgtctgtcacaatgg

SEQ ID NO: 200871 - DNA, 481 bp, Homo sapiens
tgcagagagttgataaagtttttttccttaattgtttggtagaggccaggcactgtgacagactcagtggctgtcctccaaaatcctacaaattttgattaagttgtttttcatttagttcaaaatatcttttaatttttcttaagatttctcctttgacccatctgttatttagaagtgtgcagtttaatctccaagtattttggaattttccagctacgtttgttactgatttctagtttaattccactgtggtaraaacagacagtgtaaatatgtatcttatggcctggactgtggtctatatcttggtgaatgttccaattgagcttaagcagagtgtgccatctgttgtcattaaatgaagtactctatagatgtcaattatatccagttaagtaatagtgccgttgagttcaactatgtctgctgattttctgcctgctgggtctgtttatttctgtcagaggataataatgaa

SEQ ID NO: 200872 - DNA, 491 bp, Homo sapiens
gaattctctttgcttctgttctccaaaagagattgcagagagttgataaagtttttttccttaattgtttggtagaggccaggcactgtgacagactcagtggctgtcctccaaaatcctacaaattttgattaagttgtttttcatttagttcaaaatatcttttaatttttcttaagatttctcctttgacccatctgttatttagaagtgtgcagtttaatctccaagtattttggaattttccagctacgtttgttactgatttctagtttaattccactgtggtaaaaacagacagtgtaaatatgtatcttatggcctggactgtggtctayatcttggtgaatgttccaattgagcttaagcagagtgtgccatctgttgtcattaaatgaagtactctatagatgtcaattatatccagttaagtaatagtgccgttgagttcaactatgtctgctgattttctgcctgctgggtctgtttat

SEQ ID NO: 200873 - DNA, 569 bp, Homo sapiens
tctcatatacaaaaatcaagtgaaaacagttgattaaaacaaggatgatattgaacccatttagaaataatgaattaaaacaatactatatcttactgacataaaatagaagtcttaaaatcacttggattacatgagataaatattacacaaaaaatcatttggattatgatgataggtcaatttaaatttttttaaaaattgtttaagacattctttatcttgaagagatattagtgctcccatgttcactgtagcatgattcacaatagccaagatatagaaatactctaaatgtccattgacagatgcatggattaaaacaacatagtgtgtatatacaatggaatattatgcagcctttaaaagaaggaaagkctgcaatatgtgacaatatgaatgaaccttgaggacattgtgccaagtgaaacaagatggtcacagagggacaaatactgtatgattccacttatataaagtatctaaaataggctcatagaagcaaaatggtggttgccaggtgctgaggtgtacagaaggagagttgctacaggaaataaagtttcagt

SEQ ID NO: 200874 - DNA, 469 bp, Homo sapiens
gaattaaattgctcagttcagtaaagtaatgagaacttgggtgttctggcagttctagagggaaaagactctgtgggcctagaagatgagaagaggaacagaaggggctagaaatggagtgcaggcctcagaaaacatagcagggggcgctgccagaatgagaaggccctgggcaggaacagctggtagttagttgcaagtcattgcctaatccgagcagcacgtaggactcctcttgagccctaaactttcatcaaatccttgtgctgttagtgccttgggaaatgaagagagaggaattgaggccaccaaggaatgcaggccaccaaggaactcaggccaccaaggaacacaggccaccaaggaactcaggccaccaaggaattgaggccaccaaggaactcaggccaccraggaacacaggccaccaaggaactcaggccaccaaggaacacaggccaccaagatg

SEQ ID NO: 200875 - DNA, 553 bp, Homo sapiens
accaagagtctataatcactaagaaggaaggtttcttgcaatggttcagactttggcggcaggaaggaaaaaatcattctgaggagataatgcaacattatcctatgcctgtacacgtaaataaattaagggatgaagttaagattctgactaaagtggatatagtttaggggagctataagaagtaaagttacttggaagtaaggttagattattgttarggtatgataagactaaacaataatccaggaataaaagcataaagtccatactggaaatacttgggaataaatttaatttcttgtacagggaagtggccccaaattagcagtatttgtaaagagtaatctgtcggttatatattgagtgaattccaaaggggagcaaaaagaagaaaaatgtttcttaagaagcacaattagtgtttccatgcttgccaagaagagaattgcctttgctttgatgaatataaattttaatatctgtttgaactcctttgcaagacatatatttcctctttactgcataaactattggaattttattacttagt

SEQ ID NO: 200876 - DNA, 553 bp, Homo sapiens
accaagagtctataatcactaagaaggaaggtttcttgcaatggttcagactttggcggcaggaaggaaaaaatcattctgaggagataatgcaacattatcctatgcctgtacacgtaaataaattaagggatgaagttaagattctgactaaagtggatatagtttaggggagctataagaagtaaagttacttggaagtaaggttagattattgttagggtatgataagactaaacaataatccaggaataaaagcataaagtccatactggaaatacttgggaataaatttaatttcttgtacagggaagtggccccaaattagcagtatttgtaaagagtaatctgtcggttatatattgagtgaattccaaaggggagcaaaaagaagaaaaatgtttcttaagaagcacrattagtgtttccatgcttgccaagaagagaattgcctttgctttgatgaatataaattttaatatctgtttgaactcctttgcaagacatatatttcctctttactgcataaactattggaattttattacttagt

SEQ ID NO: 200877 - DNA, 404 bp, Homo sapiens
ttactgggagcaaaggcgcaggggccaatcctgcttccataatttgtttcttgcactcaagtagtctagctactggggacacrgtgcattagttcagtgcatacatctcaacctagaagatgccccaagatgctgctttagatgctttaattggtgtttgaatattctattaaccagcttcttccaagatgacacactgtatgagaggaccagtgaatccctggtcaggtatttagtgtcctaccttcttccttagaatgaatcatttgatctgagtttatattatagagggtcccatgtactctataagcatttgagttgtgttgtgtcaagaaacactgtgaacaggaaaggcaacttgatatccagaggtgatttcaattctggcaagagaaaattgctgt

SEQ ID NO: 200878 - DNA, 404 bp, Homo sapiens
ttactgggagcaaaggcgcaggggccaatcctgcttccataatttgtttcttgcactcaagtagtctagctactggggacacagtgcattagttcagygcatacatctcaacctagaagatgccccaagatgctgctttagatgctttaattggtgtttgaatattctattaaccagcttcttccaagatgacacactgtatgagaggaccagtgaatccctggtcaggtatttagtgtcctaccttcttccttagaatgaatcatttgatctgagtttatattatagagggtcccatgtactctataagcatttgagttgtgttgtgtcaagaaacactgtgaacaggaaaggcaacttgatatccagaggtgatttcaattctggcaagagaaaattgctgt

SEQ ID NO: 200879 - DNA, 404 bp, Homo sapiens
ttactgggagcaaaggcgcaggggccaatcctgcttccataatttgtttcttgcactcaagtagtctagctactggggacacagtgcattagttcagtgcatacatctcaacctagaagatgccmcaagatgctgctttagatgctttaattggtgtttgaatattctattaaccagcttcttccaagatgacacactgtatgagaggaccagtgaatccctggtcaggtatttagtgtcctaccttcttccttagaatgaatcatttgatctgagtttatattatagagggtcccatgtactctataagcatttgagttgtgttgtgtcaagaaacactgtgaacaggaaaggcaacttgatatccagaggtgatttcaattctggcaagagaaaattgctgt

SEQ ID NO: 200880 - DNA, 404 bp, Homo sapiens
ttactgggagcaaaggcgcaggggccaatcctgcttccataatttgtttcttgcactcaagtagtctagctactggggacacagtgcattagttcagtgcatacatctcaacctagaagatgccccaagatgctgctttagatgctttaattggtgtttgaatattctattaaccagcttcttccaagatgacacactgtatgagaggaccagtgaatccctggtcaggtatttagtgtcctaccttcttccttagaatgaatcatttgatctgagtttatattatagagggtcccatgtactctataagcatttgagttgtgttgtgtcaagaracactgtgaacaggaaaggcaacttgatatccagaggtgatttcaattctggcaagagaaaattgctgt

SEQ ID NO: 200881 - DNA, 574 bp, Homo sapiens
aactttcagcaaaacaaactcaaaaaggcatgtgtgatcaggtaccatttttgctgcacatatgtaattaatcaggccaaatctaatgagactaggcatattttgtcaacaagaatcaaaatggaagtaactgtagagataaattttatgtattgataaaaacctatagtgtacccttgtgggttctcaattcttctggtttcctctgaygtggctacaattctgaaaactaaagtttccaatttttctcccagcctcctgacttggagttactaagaaataaaactgctcttttctgaagctgggtgatttaatataaactttgaagaaatcactgcaatagatcatgtacgggcaaaccttgtgcctgcttctgtgtgagccactcagaaagttcatcagaactcctgatgccatcaccaaagacattcaaaacacagacaaggacatctgtgggactgccactttcgtccttgagaaaaacatttagaaattttctcaattggctggtccctggactcaaacgaagtttccaactacttatccttgttttactttaattttcatagaaatt

SEQ ID NO: 200882 - DNA, 574 bp, Homo sapiens
aactttcagcaaaacaaactcaaaaaggcatgtgtgatcaggtaccatttttgctgcacatatgtaattaatcaggccaaatctaatgagactaggcatattttgtcaacaagaatcaaaatggaagtaactgtagagataaattttatgtattgataaaaacctatagtgtacccttgtgggttctcaattcttctggtttcctctgatgtggctacaattctgaaaactaaagtttccaatttttctcccagcctcctgacttggagttactaagaaataaaactgctcttttctgaagctgggtgatttaatataaactttgaagaaatcactgcaatagatcatgtacgggcaaaccttgtgcctgcttctgtgtgagccactcagaaagttcatcagaactcctgatgccatcaccaaagacattcaaaacacagacaaggacatctgtgggactgccactttcgtccttgagaaaaacatttagaaattttctcaattggctggtccctggactcaaacgaagtttccaactacttayccttgttttactttaattttcatagaaatt

SEQ ID NO: 200883 - DNA, 575 bp, Homo sapiens
tattaattttttctggcttattatatttagtgtgtctttcacttttctgaccaaactctggctgatatgatagataatgtaaggatgtggttcagaaaacagattctcgcagatgggaatctgtgatttgcccttggaaggccatagtgaccccatcatcagtggaaagtaggatactagtagttgaaagaaaacaatggcaaacaacttgtgtttacagaggtacgaaatactaaaccagaaataggatttgatcatgtggtttgcaaacgtaaaaggaaaattaaattcttaattatgccagggcttcaatgtaaaagttggggtattgattaagaaagagtagaattccaggaattgggatgaaaactttttgatgaattccaaaaagtctgaggacttcaaactgcctacctcattgatccttaatttccatcagaaacagcccatcttttctgtttgagaacatcagtcttccttcacctgaagattctaaatgacctcaatgatgtgtcctcttgtaaggcaatgmcaattttattcaatacctactaccactcattgcttccagatct

SEQ ID NO: 200884 - DNA, 607 bp, Homo sapiens
gatgaaaacaagacaagttgggaataactacaaagtctaatccgagggatagcacatacacgaaaacagaaacattatctttcaaatttaccttcacacaaaccaggggaggaatgtagggaggaatgactgtaaacgttttgaagcagcacacacacacaaaaataccataccaggtaccacattagattactgatatgggtacctttaccggagattctggtgtgactgtgacctcaagcaggtgggagtggttctcgtagtttattcagtctgttgatttaaatctgaacatagaagtgacctaaattaaataaggttgaggtgccagaatgtccttagtttaatgtagactaatgaatctaaaagcttaaggaaataggaatgatggaggrtgttttcatgggaaactcacatattttccattattgtgtccctgaggaggatttagagaacacttccttcaccaaagctttaagagataccagggaaggcagatccagcattgttgcaaaggtagtggtggctgttctttgcaggcaaggaaagactgtgacagattaagcctcttacatggactcattgattttaaagaaataaaagatct

SEQ ID NO: 200885 - DNA, 619 bp, Homo sapiens
gaataaaatggccattatgaagatgaagtctaaacaaagatttttattctgagaaagctcatgtggcaatcatgacagccaaagaatgaaacaaccaatagtgtagaccaaaccgaggccctgatatagaaccatttcctagtgtgacwagtgagccagtcagtggcagaataattactttggacccccgccattctggaagggaagaaaacattgcctttagaaaagataatttggatataaatttgtatttcttcccccacattgctttcaccagcatcaccacctgcgtataataccttattctctcacttggtatcccacataatatggcttcggaccaaagagctcattttacagtgaaagtagtcactcatatcagtgagacttactggtgctaccatgtaccacattgtctgaagatgctgtcttaatgaaatagcccgatggtctattgaagaaacagtacgtcacctgctgggaggacaagaagagccaacacatacacataaaagcttgcaagtccaaggtatcttctgacaagatgtacaatatattccaatagcaattgatagcaataatgactaataaatacatgatgctgtttctacaatagtca

SEQ ID NO: 200886 - DNA, 475 bp, Homo sapiens
ccttgcactgccaccgagttcccctgttcttaacacctttcattagtgtggtacatctgttacarttgatgagctaatattgatatgttatctttcactaaagccaaaatgtgcctagagtttactgtttgtgttgtacattctatgggttttaacacatgtaaaatgacctgtatccatcattatagtatcatacagaatgatagctttcactgttatattgcattttcatttaatattttttaaacaatttactgaacacattttgggttaaaccagctttcatgttgtgctgaaagttctccaattgttcttccagattattcatttatctcctttcatcctgctctgtacccctggtggtgacctctacagaatgcattactgggactctgccgaatttgggtagtttactcagtgaaaattatcagcaggtgatcagaggaggggaggagaagggaggtcaagggtgttt

SEQ ID NO: 200887 - DNA, 609 bp, Homo sapiens
aagtctttgtgggctttctagtgagcctgtgaactcacggaagccatctaaaaacttgacctgtgtaaatgttgtaaaatagtgactaagtgtaataggataaatccaaatttgctgtatatttttccttttatgtgtttaaaaatatttactatttccctgctcttacatggtttccatgtgtggaatacaattccttattctcagtcaaaaataaataacatgtctaaagaaaagataaaataattgtatcaaaagataattgaaaaaatagtgggtagacgcagaatagtcaatgattcagttagtgcaaatattagaaatataataaatgaatttayaaaataattttttgttcaagtaattgaagtcaacaatgagctttctggcaaagaatttgataccattaaaaaagaaccaaatggaaattctagatttaaaaaaatacaaaatgactgaaattaagaaatcagtgactagcctgggcaagaaagtgagacccagtcttgaaaaaaaactaaaatattagctgggtatggtggtgcacacctgtagtcccagatcatgtcatccaattttcaaaactgtgtttttctgctgatctaaaaa

SEQ ID NO: 200888 - DNA, 609 bp, Homo sapiens
aagtctttgtgggctttctagtgagcctgtgaactcacggaagccatctaaaaacttgacctgtgtaaatgttgtaaaatagtgactaagtgtaataggataaatccaaatttgctgtatatttttccttttatgtgtttaaaaatatttactatttccctgctcttacatggtttccatgtgtggaatacaattccttattctcagtcaaaaataaataacatgtctaaagaaaagataaaataattgtatcaaaagataattgaaaaaatagtgggtagacgcagaatagtcaatgattcagttagtgcaaatattagaaatataataaatgaatttataaaataattttttgttcaagtaattgaagtcaacartgagctttctggcaaagaatttgataccattaaaaaagaaccaaatggaaattctagatttaaaaaaatacaaaatgactgaaattaagaaatcagtgactagcctgggcaagaaagtgagacccagtcttgaaaaaaaactaaaatattagctgggtatggtggtgcacacctgtagtcccagatcatgtcatccaattttcaaaactgtgtttttctgctgatctaaaaa

SEQ ID NO: 200889 - DNA, 509 bp, Homo sapiens
cacagcccaggttctgtttcttgcagagacaagtctaggattctaactcaacttcactttgcccaggactctaatacagcttcttacaaacagaaaaatcaagggctctacccacagcttctgaagtatactcacgatgttaagaatagaaatctgtcctaactgtgtgcttcaagggacatctggagcactggttcagaagtcagactcatcaatggatccctggttggtcagtcaggagtgaaaacaaagacttcaaatgtgcacatttgggtcccaagtgagaagttcaggagtccaaagatgaatctgatactatccaagttgttttaccataaatgttaaagaaaaaaccagagactggtgggagttaaarcagataaaacagattttactcaaacactattgcaataaggaaaaagacacctcagtatagaagtagactcaattcaaaatacaaggaaaagtgagaatttatagccaaggagcaggatggagctcagtggatg

SEQ ID NO: 200890 - DNA, 578 bp, Homo sapiens
gtgaaacattatttaatttctttagttcacatgtggattaaatctttcatgtcacgagcatatctgcattggcctatgtgtgaacctatagtgatgtttatgttcataataatgatcttgaaacttttcatagaaaatcctkatattttttaagacattgttttgtatagtttcaatgttaagattaatttaaggttaaaattaatttaattgcaaccagagtattttattttattttattttgaaacgaaatcttgctctgtcactcaggctggagtgcagtggtgtgatcttggatcttggctcactgctacctctgcctcccaggttcaagcgattcccctgcctcagcctcccgagtagctgcgactacaggcatgtgctaccatgcccagtgaattttttttttcttttttgtatttttggtagagacttggttttaccatgttgaccaggctggtcttgaactcctgacctcaagtgatctgcctgcattggcctcccaaggtgctgggattacaggcatgagccacagcacccagccctcaaccagagtctttttttttaacttttaggtt

SEQ ID NO: 200891 - DNA, 585 bp, Homo sapiens
tggcgatttagacagaataatgctcatgaggaaaactctagccatgtggttacttgatggtccagaatcagatgccctcatctattaggcttgccataaaatccatacagtgtttgatcccactgcagataattctagcactagagtcccaggttgtatggcctcagtgacagggttgtttgcactgtagcctaaacttgttctttcctggaaagctctttcctgtttttgtctccactcaaatatggcaatttttcatgtcactgtctgtggtaaataggttaatcagtatttccagtagaagagctccaaaatacctactcagtgtggtgattttgttttgtttttagttgtgggagatgcaagatgcaatcacttgccctttatttgtcctcacacacccaagattactgggtccctaaaaaactttactgatttggcagtttgctaatacawtgtagtatgtatctaccaccctatggcgtgcatgagtctattaagtttctgacatactgtttactgctcgctcatcccatgagattaaaataatgcctctgtgacatgtccagataattaaagttcctt

SEQ ID NO: 200892 - DNA, 525 bp, Homo sapiens
taagtaaacataaggctggggtgcggtggctcatgcctgtaatcccagcacttcgggaagctgagatgggaggatcacttgaggccaggagtttgagaccagcctgggcaatatagtgagatcccgtctcttaaaaaaatgaaaaaattagcagggcgtgatggctcatgcctgtaatctcagttactaragaggctgaggtgggaggattgccagagcccaggagttttgatggtgcagtgagctatgaccatgccactgcacttccagccttggtgacagagcaagaccctgtctcacaaaaaaaaaaaaaaaaaaaaaaaaggaaaagaaaaaattagcagggcgtgatggctcatgcctgtaatcccagctgctagggaggctgaggcaggaggattgcttcagcccaggagtttaaggctgcagtgagctatgaccatgccactgcactcccacctgggtgacagaacaagagcctgtctttaaaaaaaaaaaaaaaaaaaaaaagtaaaaataagcatt

SEQ ID NO: 200893 - DNA, 525 bp, Homo sapiens
taagtaaacataaggctggggtgcggtggctcatgcctgtaatcccagcacttcgggaagctgagatgggaggatcacttgaggccaggagtttgagaccagcctgggcaatatagtgagatcccgtctcttaaaaaaatgaaaaaattagcagggcgtgatggctcatgcctgtaatctcagttactagaraggctgaggtgggaggattgccagagcccaggagttttgatggtgcagtgagctatgaccatgccactgcacttccagccttggtgacagagcaagaccctgtctcacaaaaaaaaaaaaaaaaaaaaaaaaggaaaagaaaaaattagcagggcgtgatggctcatgcctgtaatcccagctgctagggaggctgaggcaggaggattgcttcagcccaggagtttaaggctgcagtgagctatgaccatgccactgcactcccacctgggtgacagaacaagagcctgtctttaaaaaaaaaaaaaaaaaaaaaaagtaaaaataagcatt

SEQ ID NO: 200894 - DNA, 544 bp, Homo sapiens
ttttactgtcattaagtaaacataaggctggggtgcggtggctcatgcctgtaatcccagcacttcgggaagctgagatgggaggatcacttgaggccaggagtttgagaccagcctgggcaatatagtgagatcccgtctcttaaaaaaatgaaaaaattagcagggcgtgatggctcatgcctgtaatctcagttactagagaggctgaggtgggaggattgccagagcccaggagttttgatggtgcagtgagctatgaccatgccactgcacttccagccttggtgacagagcaagaccctgtctcacaaaaaaaaaaaaaaaaaaaaaaarggaaaagaaaaaattagcagggcgtgatggctcatgcctgtaatcccagctgctagggaggctgaggcaggaggattgcttcagcccaggagtttaaggctgcagtgagctatgaccatgccactgcactcccacctgggtgacagaacaagagcctgtctttaaaaaaaaaaaaaaaaaaaaaaagtaaaaataagcattaatattt

SEQ ID NO: 200895 - DNA, 566 bp, Homo sapiens
gggccctttgtcctccagtggctggtaggcwgtggctgggaggcagcggcccaattagtgtcgtgcggcccgtggcgaggcgaggtccggggagcgagcgagcaagcaaggcgggaggggtggccggagctgcggcggctggcacaggaggaggagcccgggcgggcgaggggcggccggagagcgccagggcctgagctgccggagcggcgcctgtgagtgagtgcagaaagcaggcgcccgcgcgctagccgtggcaggagcagcccgcacgccgcgctctctccctgggcgacctgcagtttgcaatatgactttggaggaattctcggctggagagcagaagaccgaaaggtgagtcggcctgcggactcttccggcccgaacttctcttacctaccccgcgctccccggtgcagccgggctgtggaaggcttgcaggggaggaagctaaaaagtttgcacagggcaactcccgcccttgctccctcgggactctccgtggagctcccacggactgaaagagcgtgccccccaacccgaacgagccccgccggggcctttgc

SEQ ID NO: 200896 - DNA, 446 bp, Homo sapiens
cccttgaagacatccagtcctcttcactccarcaagaagccccagcacagcttccacagctccttgaggaagaaccttcttcaatgcagcaggaggccccagctctgcctccagagtcctctatggagagtctaactctaccgaatcatgaggtgtcagttcaacctccaggtgaggatcaagcttattatcacttgcccaacattacagttaaacctgcagatgtggaggttaccataacttcagagcctaccaatgagacagaatcttcccaagcccagcaggagaccccaattcagtttccagaggaggtggaaccttctgcaacccaacaggaggccccaattgagcctccagttcctcctatggagcatgaactttccatcagtgagcagcagcagccagttcagccttctgagtctcctagggaggtcgaatcttctccg

SEQ ID NO: 200897 - DNA, 446 bp, Homo sapiens
cccttgaagacatccagtcctcttcactccagcaagaagccccagcacagcttccacagctccttgaggaagaaccttcttcaatgcagcaggaggccccagctctgcctccagagtcctctatggagagtctaactctaccgaatcatgaggtgtcagttcaacctccaggtgaggatcaagcttattatcacttgcccaacattacagttaaacctgcagatgtggaggttaccataacttcagagcctaccaatgagacagaatcttcccaarcccagcaggagaccccaattcagtttccagaggaggtggaaccttctgcaacccaacaggaggccccaattgagcctccagttcctcctatggagcatgaactttccatcagtgagcagcagcagccagttcagccttctgagtctcctagggaggtcgaatcttctccg

SEQ ID NO: 200898 - DNA, 433 bp, Homo sapiens
ccagtcctcttcactccagcaagaagccccagcacagcttccacagctccttgaggaagaaccttcttcaatgcagcaggaggccccagctctgcctccagagtcctctatggagagtctaactctaccgaatcatgaggtgtcagttcaacctccaggtgaggatcaagcttattatcacttgcccaacattacagttaaacctgcagatgtggaggttaccataacttcagagcctaccaatgagacagaatcttcccaagcccagcaggagaccccaattcagtttccagaggaggtggaaccttctgcaacccaacaggaggccccaattgagcctccagttcctcctatggagcatgaactttccatcagtgagcagcagcagccagttcagccttctgagtctyctagggaggtcgaatcttctccg

SEQ ID NO: 200899 - DNA, 280 bp, Homo sapiens
tccttagttaaatgtattcctaggtttttgtttgttttcggtagctattgtaaatgggattgccttcttaatttctttcttggctagatccttattgatgtatagaaatgctactgatttaaaggttttctaaacctacagatatataatcagcaaagagacaatttgactttctcttgtccagtttggatgcctttcatttctttctcttgtctgattgttctggctaggatttccagtactgtgstgaataggagtggtgaaaatgggcatccctgcc

SEQ ID NO: 200900 - DNA, 573 bp, Homo sapiens
taatgccatatatttactctacctttctatatttacatatgtttagttacacaattacccattatgttacagttgcttacagcatttggtgctgtaacatgctgtacaggtttgtagcctaggagcaataggctataccrtataggtttgtgtaagtacgctctatgatattcatataacgatgaaatcacctagtgacacatttctcagaatgtatccctattgttaagcaacacatgagtgtgtgtctccatgcatatatgtgtaagagttagcatgtgtgtccagaggtagaattgctgggcgataagtcatactcatctttacctagttatgccagtttatactgtcactagcagtatatgagtacctgttatttatatcctctccaacacttaatattgctgacattttaacttttacaatataataggtgtaaaactattgtttaaatttgcatgttgtcctcattactagtgagattaagcatttttcatattggtcattgggatttccccttctgtgaattacttttgtatatttgctcattttttctgttgggctgtgtatttt

SEQ ID NO: 200901 - DNA, 405 bp, Homo sapiens
gaattcagatttctaggagtgatgtctggaaatctgcattttaacaagctccattggacattggtgcatattaaaggttgacagctgctactctaagtactgaaggattgagcccaaagatatgatcagaattaggtggcattaataaaggaggtgatttctggggacagaagaacatgaactgttagagtaggtagaaattccaggtgtagtaaagaagaaataaattgtctgctagggaagatatttgctaggctgaattaggggcccaatagaacagcacataaaaggagttaaaagctaagggacrgaaggaaaaaaaacaaagaaagaaaaaactataaaattctgaaaccagtaaagatacatgctgccatttggcagcaaggcagacctgctatagaa

SEQ ID NO: 200902 - DNA, 576 bp, Homo sapiens
tgctttccaaacctttaccatgtttcccagtatcctctcttcatccctcattttgttgatgacctagttcctgcttcacatagtcaacagaacccaacaggaataacctcagctttcttcctccttgtccctttatttaactggtctcagaaggagaggtgtctttacaagctctccctctccattcctcctctgttgccaaagttyctgaaagtgtggtctccatatctgcttatgctacttagttttcttctaagtgaaaggtagggactcaaccccaaatgctctgaccctgttcgaagaccctgtggcctagagcggcatgtatttcctgatttctaaacctagtgccctttttccaggcctcatcctctatcactgcagcatttatctctgttgtcacattcttctgcttaaaacttttcacagcttttcacgtacccagggcaggcattcaaaaatattgaagcagtagttttgatgtcttttctgagctttcaccagtatttttaataggcactactgcctaaatgtcaaatgccttatagccaaaaacaagtaatgatttcctgtaat

SEQ ID NO: 200903 - DNA, 463 bp, Homo sapiens
gtgaaacctcaaacaatttgggcttttgagtgcctactgtcatccagccacgaaatgaagcattttacataagtaatttaagcccagtgatgcaggcagtaagtattatctccattttaagatgaggaaattgagacagacgagattacctaactctctcaaggtttcaccacagagctgtggttcaaacccatgtgttctagttttattacagttaagaaactgcaagagtttgccaatttgtcaagtgccagtccaagataaatggacactctgagtatcaaaaaaatacataatctgcagatcaaaacacgaagatacaaacatctaagagtcaccatggaagttgcggggcatccagtggtttttctgaaaatccatgaaggaaaagaataaagcatttttccagcctytcttctacaaactatatttcagggaaaccaaatatttgatgagggaattc

SEQ ID NO: 200904 - DNA, 613 bp, Homo sapiens
tctttaaaaaaaaaaaaaaggaatgggttgaacttataatattttagcaactcataaaataacttgaagaaaaagatcatttggaaggagagacaaaacagactgaaagacattgtttaaatttatgacttttattatcttacttgartgctatttttgcccctctcgctattattaaaccctttgcttcctgttttcagttgctcctgtcaaggtatgaatttttctttggatgattgtcatctatttcatattatctagtattcctctctattatgagaaaatcaaaagtagacagtgtatctatagctatagatttaaatgcactaaggtaattatatatttgaatcagagacctaaggaataatctagtgtagcatttaccaaatttatttaaacttaacatgcttacatgaagacagacctatttatgtttccaaggaacaccagtttgagaaatgctgatcttacctgtgtcattcttattttgtagatgaggacattgggacctcagaagaataaggcaacttatttaggctaaagtcactgcttgtctactggggctggaatccaggttgcttagtctggtgccctttaggcttcatgattcagc

SEQ ID NO: 200905 - DNA, 613 bp, Homo sapiens
tctttaaaaaaaaaaaaaaggaatgggttgaacttataatattttagcaactcataaaataacttgaagaaaaagatcatttggaaggagagacaaaacagactgaaagacattgtttaaatttatgacttttattatcttacttgaatgctatttttgcccctctygctattattaaaccctttgcttcctgttttcagttgctcctgtcaaggtatgaatttttctttggatgattgtcatctatttcatattatctagtattcctctctattatgagaaaatcaaaagtagacagtgtatctatagctatagatttaaatgcactaaggtaattatatatttgaatcagagacctaaggaataatctagtgtagcatttaccaaatttatttaaacttaacatgcttacatgaagacagacctatttatgtttccaaggaacaccagtttgagaaatgctgatcttacctgtgtcattcttattttgtagatgaggacattgggacctcagaagaataaggcaacttatttaggctaaagtcactgcttgtctactggggctggaatccaggttgcttagtctggtgccctttaggcttcatgattcagc

SEQ ID NO: 200906 - DNA, 520 bp, Homo sapiens
aaattatttacttggattcttctgattgctagcagaatctgttgaaacacacatactcaaagtccctttgaagaaaacagctttgtttgtaaaccactagaatctttgcaacagacatttaatactgcacagtgacttcttttgtttacctcttgctatttgacctcagtaactcacagaaatgccatgcctgttgttcaaagcaagtgtgaaaaaacagtctttgtttataacctgcttttgtggtgagaactgtagaagctcacttacccaatgtgacttggactggtaattaastgaaaagttggttaaaggctttttcttggaggtgtggtccatggattggagttctgtattatcttttgtgcatacactttacccgtaatttccaggtggatttctttgaaatggctggagaacttagactttgtagagcatctgagagtgccaaaacctcttggatttttgtagagttcactcccaaccttttctaattttaatgcttatacctagttagcag

SEQ ID NO: 200907 - DNA, 466 bp, Homo sapiens
aattagctgtaagaaatcagagcacaaatctgggcaagaggaagcaccccagcttggttactagagggagaagaggcttgccaccaggaggaataagtacaagaaggaaacagacagagaacagttcctagagatttattataatctgtttcttctttggctttttgctttgccccatatgcacacatagtagagatttctataatctgcattcttctttggcttttgttttgccacatacacacacatactcaaataatcaagtggcctaaacacagagattagaaaccaatcagtaagaaatcagaagccctaccagtctacccctccccgaccctgcatytgatgtggagccatagtcaagtgcctaggaggaagacaagcttgaaggacgacccttaataaagagcttttaggaaagttcagagatctcagaagaacttggtgcacagccaaagcgctgaca

SEQ ID NO: 200908 - DNA, 444 bp, Homo sapiens
cacaaatctgggcaagaggaagcaccccagcttggttactagagggagaagaggcttgccaccaggaggaataagtacaagaaggaaacagacagagaacagttcctagagatttattataatctgtttcttctttggctttttgctttgccccatatgcacacatagtagagatttctataatctgcattcttctttggcttttgttttgccacatacacacacatactcaaataatcaagtggcctaaacacagagattagaaaccaatcagtaagaaatcagaagccctaccagtctacccctccccgaccctgcatttgatgtggagccatagtcaagtgcctaggaggaagacaagcttgaaggacgacccttaataaagagcttytaggaaagttcagagatctcagaagaacttggtgcacagccaaagcgctgaca

SEQ ID NO: 200909 - DNA, 573 bp, Homo sapiens
ttgaattagccgtcataattctttttgtcttttattacacagtataaaaataattcatccattcccttcagatatgtctatatttatgttcttcctcattttagttgctactggcacttgacttttccatgtgcctcctaaaatgtaagaccctgacctgagaaaaacctaccaaatagggttgggtcaakggacaacagagtgggactactattctccatggtacctcagtgatatattatttatgtgctacataaatttgtaggccaagaatttttctcccgttttagaagcctcgccaaagttttctggccaactgcaatgcctgaggtcatttcctcattcctttagagttgagaagcagagcagtcaggatgtcctcagctaacagtgactcaaaccataaggatatttattgtctatttaataagaagtctggagaaatgcaatttcaggcttgtttggtgaataaatgatgtcatcaagatccaggttcttttcttctttctattctgttgtcctcagagaatgagtttcatgtttgtggtctcatggtttcaagatggctgccac

SEQ ID NO: 200910 - DNA, 591 bp, Homo sapiens
tggagagtattacaaatattccttagcttctgtttttcttgacccactaataattttcccaagaagatctatcaagattgttcattgtaattgacattgtgtaactgccatggaaacaacaagtgatcattcttaacaattttaatttgataagtagacaccayttctcctttaaaattgctgaaattttagaagtcccaaataataccttcacagttaaagagaaataaaatttaagatgcaaatatgtaggcatttcagcaaaaggaatcatgagaaaaaaatgcctcattattttcccctgcttctatgtatctatccatttgttcatccattagagaaacatttattgagtaactattaggtgctaagcattgagaagaggcttcagggataaaatgatgatcaaacaaatgtctgagctctataaaacttacctggtgagaaagacagatatggaataaataaccacctacattcatcattgcaaaatgtaataagtgctataaagaaaatgtttgaggtactatgagaacttgtcatacaaagacttgatttagcctgggggtcagagaaggtttccctgagaag

SEQ ID NO: 200911 - DNA, 596 bp, Homo sapiens
cgtactgctgttgtacagcatggtcgtgctctgtggtgaaactgtgtttaatcctacaagtaccatttcatgttacagtgaattactgctggacctgtccracctatgacttgatgattcatacatatccaggtcacaagggggcagttctgactgcatgatcacttggtgtcccatggcactccatctccaccagtgctcagtaacatgctaacaataatttcccaaaaggtgcatgattaattctgtgacaggtagcatgccccagagccctgtggatctgcattatgattcttccactgatactggccataaaatgcacgtggcatttttgctgaccactgaggcatctattaccatagggtctgctggaatatatggcccaaaagacagattgcttgacctccagcctggactttctgtatatccctttcctgctccaatcccaacgaaaagctgacaactcttcctgctctggaccttcactaaaagctggaaacttggtagatgtgttgaagcaatattcccaggtatggaatatgctgccctcagaatccagagaagctgatcaggcctgaggcacttcttctttatgg

SEQ ID NO: 200912 - DNA, 381 bp, Homo sapiens
agagaaatggtaaaatttattgccagaaaacttttcagtttgatcagtttttatagttccttaaccttcatcgttctttgtatgcctcctgcctgtcctgaagggaaaaagaaaagcattcaaagcttaagcactttattaaaccttttatagcttgacaccatttggaaccatttcagtatttcatattgaagacaaagacatgtctttctgaaaaattaaaatgaaaacagacccaattacagtggcttcagcagtcttggctgagggctgaacgtctgacagctkcacgacacagggctttatccatgtaaccagcgagtggccttagagacctgattattggaagggtagagggtcctgtgattctagcgctttgat

SEQ ID NO: 200913 - DNA, 562 bp, Homo sapiens
ttacccagagaggtgtgtgtacatgtggcttgcaacacatgcaatcccatcagacatatgtgcccatataagggaatatggaacagaagaaatgactttttaggaatgtgaggactggaatgggrgaacaaagaaatactgctgccttcctccaatatctgttaggcttttctttttttttcttaaagtatggaaagtttattcttttcaccataaaagcctctggcagtgataagcatgatttccaagattgtacgtagcaccagaagagctccaactaacgtgctcagcttcgatttcagcattgctcattagagcaacaatgcaaaccagctgtcccctggtgtttggcgaagaaagatccaattaactggccgtcatccacctggttccagatttagccctctccttatgagtctgtaagagcagccagtttgcatgaatttttgtcattaaattcaagccagggggtgaggagccatggggggtggggatggatattctctggactgctgtggagggttaaaataaagtgtaaggccctctagagtttggacatctg

SEQ ID NO: 200914 - DNA, 507 bp, Homo sapiens
cagaaaagggacagaaggcactaagtttcaggcaagttagagacaaagaccaagaagaggaaccaaggtcaagataagtaagccgaaaatgtagtcaaagcaagaagaaatcctgagactaaagaagtcagagggtacaatcaggatgacaggttaagacatgagagagcaatggatagtgatctaggcaaaagcaagacctgtcacaacctgaccctcaattatttcttcagccttatgcttcagtaatactcataccatcacagttctgtgccttggcttggcatgccctttaccaactgatccacccagaaatcttaactctctttcagagcagaattcaacatcactcccmcaaagaaatctgttccaagaagacttaggcactccatcctaatattcccaatgtactttatgcataccaccattatacgataatatatcatactttaactgcttatgtgccagccaccccattagctaaaatctctgtctgagaataggcac

SEQ ID NO: 200915 - DNA, 589 bp, Homo sapiens
cacatcccattcatacagtgtgaaatacgtacttttatggtaattagtcatttttgatactgttaatatttaatgaattcaacctaaggcatctttagttaatctaaatataaaatcattaccccttcattaactacgatacataaatctccttataaaatatttatctaaaagctacatgtaggtttttccttctrtggtcaattaaccaccagttatctattaattttctttaatgaaacttcccacaatttaaaaacaaattttagtggttttaagtataaaaataccttgtataggcataatttcaaaatgttaatatactttttctcctttcagtaaccaagacattattcttgaatactggcaactagtttcacccatgcctatggaatttttaaagaggcacacacacaatgattctcaatcttactacacactagacttacctggggagattttaaaagacccaaagtctaggcccaccaccacaaaccctgattcaagtgttctggggtgaaacccaagcattagcatttctgaaaactcctcaggtgattctaaagtacaaccaggctggagactgctg

SEQ ID NO: 200916 - DNA, 589 bp, Homo sapiens
cacatcccattcatacagtgtgaaatacgtacttttatggtaattagtcatttttgatactgttaatatttaatgaattcaacctaaggcatctttagttaatctaaatataaaatcattaccccttcattaactacgatacataaatctccttataaaatatttatctaaaagctacatgtaggtttttccttctgtggtcaattaaccaccagttatctattaattttctttaatgaaacttcccacaatttaaaaacaaattttagtggttttaagtataaaaataccttgtataggcataatttcaaaatgttaatatactttttctcctttcagtaascaagacattattcttgaatactggcaactagtttcacccatgcctatggaatttttaaagaggcacacacacaatgattctcaatcttactacacactagacttacctggggagattttaaaagacccaaagtctaggcccaccaccacaaaccctgattcaagtgttctggggtgaaacccaagcattagcatttctgaaaactcctcaggtgattctaaagtacaaccaggctggagactgctg

SEQ ID NO: 200917 - DNA, 549 bp, Homo sapiens
atagcaagtttttaattattcatgacacatacttagaaaacttggaacttgaagaaactatagaaattatctggttcatttgtctttttttttttttttcctggataaggaaacttagggcaagagaagttaaaaggctcatctaaggtgaccatacttgtcatccaggactagaattcccagatcttgtctttttccttgattcatggtaattgtagaaggcataattaaaaggcacaaatagacaaatccctaatcttaraaggacctcgagcttctcttttactagaattcttaataagtggcaaaatgcacagagtacttaaaattttttttctcttgaataatatatagtagatagctatgcaagcatcttcaaaattcaatagtcaaggaaaaataattggaatcagcagtgttcataccttcaatttttttgtgtttttttttggttctcccatatattactcagcatggaaattactgcagtattaatcccctctaatgtcattaatgagaccagttcctactaaagtgaacaaattgggt

SEQ ID NO: 200918 - DNA, 172 bp, Homo sapiens
ggacagttcagtagtgttaagtgtactcacaytgttgtgaaaaaaaaagatctccagaacttcatcttgcaaatctgaaactctgtatcattaaacaattcccgttctccctttcctcagcctctggtaaccgccattctattttttgtttctataaatgactactttagct

SEQ ID NO: 200919 - DNA, 524 bp, Homo sapiens
taatttaaatataaggagatttctcagggacagtactcaaatagtagagtaggttaaggaaggaaaatatagaattggtttctctagaacatgcagaaattacctttagttagcaatttttgcatacctttacctacatttcataatgttgcagccttcttcacctttttagacatgcttaactttttctgttgttttggatataaaaaataaataatatataaatatgaagttgttaaaaaaacaraattataatagacatgtacatttttaatgtttgtaatataaccctttggtaagtgactaagtgactaatatgaaatttattttcaaattagtatttcttgctaatatgaaatttcatgctaatatgaaatttattttcctattttccatttccctagagatggaaaaaattaataattccgatgtataggaatataagaggcagcttctctattctttagacttttcttttgtcttttagctttgtactgctgggtgatgcttttcttgccttggcc

SEQ ID NO: 200920 - DNA, 403 bp, Homo sapiens
tatcagaacattcctttggaacactcttgggtctstgaaataatgtagtgggacagaggccagactggcagagagaattttaagaaatcatactgctctggcctgcaccaaagtgagcagtaagcaacatgtcagggtgaaagtcttattacaaaaccaggggtgatgaagaagcagaagaagaacattttgaactggacatcgctaaagaggttggcacagatccacagcacttcagcattaccaagggcttgaaacccatgagaatcatgtgaagcaagtggagtctataaatattcaggaagaaatagtttgatttttttggttgatgcctccagagctatgtttgaatctcagagtgaagatgagttgactccttttgacatgagcatccaggagttgg

SEQ ID NO: 200921 - DNA, 403 bp, Homo sapiens
tatcagaacattcctttggaacactcttgggtctctgaaataatgtagtgggacagaggccagactggcagagagaattttaagaaatcatactgctctggcctgcaccaaagtgagcagtaagcaacatgtcagggtgaaagtcttattacaaaaccaggggtgatgaagaagcagaagaagaacattttgaactggacawcgctaaagaggttggcacagatccacagcacttcagcattaccaagggcttgaaacccatgagaatcatgtgaagcaagtggagtctataaatattcaggaagaaatagtttgatttttttggttgatgcctccagagctatgtttgaatctcagagtgaagatgagttgactccttttgacatgagcatccaggagttgg

SEQ ID NO: 200922 - DNA, 465 bp, Homo sapiens
ccttgtgaaagttagtgtcaagattatattggtaacagtcaaatatattttctttttctgttctctgaaagtcttttttaaatttggtgttataaattttttaatgattggcagaaagcaccactgagccaacttggtcatttgttttctttatagaaagacttaaaattatatagcaaccagtagatttagaaacatttatattttctgtttttttcttattattttgctaggggtgatatggcatttaagcgttaatttcataatcgctgtgttctttactctgtattgtatatatcttakaagaatcatatggccatttaaaacatattgctgacaatcatgtatatttaaccattggaaaatttcatctatttaacatttaatgttattattgacaaattatttggattatatctaccctgttattatttattttccgcttgtctcatctattttgtggtc

SEQ ID NO: 200923 - DNA, 500 bp, Homo sapiens
tgtaactcccaaatgtctaacagatgaggcaactgggattcaatataataaaaataagacttatcctcttacttataaaaatgctttcctgtgaatatcaggcctaactcagattactcccaacttactacacggtatgtgagtgaggttgattctatttcaaaaacctacatatatttagtccctctttttcacaggcattgcttataactcagctcagctacgatctcacctgggacattgcaaaatcctcccaagtactagtatttatctctcgttttttcatacctgcatctattcacagcmcctctatcattttctaaaatggaagttaaatcatatcattgccctattcattaaaatcttttaaagactcaatcaaccatttttgcagagcctatagcagccattatgttctgcctgatcttatcctcatttcttttctgccctactttctttcccatcaaacctatgtatttgctaccattgattttattttg

SEQ ID NO: 200924 - DNA, 502 bp, Homo sapiens
tatcttctaatcttctttgtttctaatgaaaattcagtttgttcccctgggtcagtttgggtcccaggaaaatgtatgtcaagaggaaataggcatttaagagatatttgggagaaatgcctatgaagaataatttgagagggagcggctcatagatgaagaacacctatagaccataatataagtctgacatatgtgaaaagatagagagaaagaattgggtaatatgaatattagacagcaggagrtttctaagaaagtcttgactagcttggtaagcagtttgtgagcaaagattgctcattagagaagtccttcatcatgcaggagtgacccagcactattatccctgctgtgtcagaagaaaggagcctcaaggaagtatagtcttggagtagatattgtgggaaagaaaataaagtagtagagattgttagtaaagttctcagtatgctatgttctcttcaattaagatgaagatgtagtcacgcatttaaatggc

SEQ ID NO: 200925 - DNA, 625 bp, Homo sapiens
gagttgtgtttccaatactattcctccatacagaaaagctgctcacatattttaatacagttttgtatattcaccattatatgaactttgtctaatataggaagataaagctctgcacacatttcagtattttaagtaaagtaattattcatgtaaacaattgtggatgagtagttacaaggtaataagaccctgggtaaaaaatgtaaggctgcttctaaggttggatttttaggattcagacaatagtgacaccaaagatccaggaataagcacaccttgttattttttttctggaaatagtttgagcattttggaaggctgagttttcaagataggccttagaaaataaagatmtattatgaaataatttaaaaaaatttacaggcaattaatatagccaaattattttgggcatgttgactgatttatttttgaaaagtagttaaatacactatgtacattaaaaattaattataaagtgttgcatttagtattaaccatagataagatcttatttaatgacattcactataggatacattttcaaggatccacgtctttttaaatacttcgtaataatttgataaatgacattttattttgatggcaacataaggcatat

SEQ ID NO: 200926 - DNA, 625 bp, Homo sapiens
gagttgtgtttccaatactattcctccatacagaaaagctgctcacatattttaatacagttttgtatattcaccattatatgaactttgtctaatataggaagataaagctctgcacacatttcagtattttaagtaaagtaattattcatgtaaacaattgtggatgagtagttacaaggtaataagaccctgggtaaaaaatgtaaggctgcttctaaggttggatttttaggattcagacaatagtgacaccaaagatccaggaataagcacaccttgttattttttttctggaaatagtttgagcattttggaaggctgagttttcaagataggccttagaaaataaagatatattatgaaataatttaaaaaaatttacaggcaattaatatagccaaattattttgggcatgttgactgatttakttttgaaaagtagttaaatacactatgtacattaaaaattaattataaagtgttgcatttagtattaaccatagataagatcttatttaatgacattcactataggatacattttcaaggatccacgtctttttaaatacttcgtaataatttgataaatgacattttattttgatggcaacataaggcatat

SEQ ID NO: 200927 - DNA, 543 bp, Homo sapiens
tagtccattaatagttcaccaaacatttgtgagaacctattatatggtagctatattaaaatcaatggctacacaacagtgagaaaaaaagtctctgatggcttacatagtaatgaaagatttcataaacatcattatgtaagattatagcaaaaacatcttgaaaaaagaaaaacgtaaggcaagaaaaatgaatgggaagtactggtagtggaggtgggacagaattaaaaacaggatcactagaaaacatattttgatgggaacattcacaatgttatcactaagcaattcaaaagttttgtgtgacagagataagaacactgtgatgagacactggtattaaagctcagagcaagtcacttcacattatgggaaccccagttcttcaattttaaaattgagattagactacaggaacagcaaagctagtttctgctttactgttcatttattctaaagaaggatttgtgragttaagtagttttgtgtatttttgaaaaagtacccatgtttcataaacatcattatgtaagattatag

SEQ ID NO: 200928 - DNA, 623 bp, Homo sapiens
tactctttgtttaccagtctagtgaattaaattaaggaatatgtagctcccattctgtagggtactctggaaggcagtcatgaaaagttaccaggacacttagccacttctgtgattttacaagtcatatgctttatcttgacttatttcttataaactgmgtagtaatatggaactacacattgggttcaggcatattaatctgtgttttccatctctgcttgtaatataagatctttgattattgatgacaggttgtgcctctgtgttttatagtatcagctgcttttaagtcaaaatggcactgaatctcctcttagttttgcaaatccatatttttgtgattcttggagaggagaaaatttctcttcagaaagaagccaagggaacataattcctccttattcattggcagcaatggtgagaaagtgttttctaggtttggccaatgagatgagtccaccaagaatttgaatcttcctgtgactcacaataaatggaaaatgaaatcagaatcttagtggtggtgttgcagtgaggtcagtgctgttcttatcagtaatgtacacgtgcaagtaaagacaggagtaattattagtagcagcatttatttttgtgttctc

SEQ ID NO: 200929 - DNA, 388 bp, Homo sapiens
ataatataaaggaatgaaccttccagacagcagtcagtataccacggaatagcaaaggatgtcgaaataagtgaccatctccaatatgccagggaatcttatttaagggtttttcccagttgcagtgtaatacatttatatattatttgtcatgtgggatttgatcaatcattttctcacyatattgctcaaacaaacactttctgaggttcaacaggcaaaggcgcaaagattattaagtcatgagagctgcacttcaggatcatatgaaagagacagacacaaaataagtaagcataacgcaaatcgatgcagactatatttaagacatatgcaatgtatttggaatcacaaaggaaaaaagatgaagaagcttggagtgtcattg

SEQ ID NO: 200930 - DNA, 360 bp, Homo sapiens
gaggttcaacaggcaaaggcgcaaagattattaagtcatgagagctgcacttcaggatcatatgaaagagacagacacaaaatargtaagcataacgcaaatcgatgcagactatatttaagacatatgcaatgtatttggaatcacaaaggaaaaaagatgaagaagcttggagtgtcattgtagaaagagagacaattgagctgaagagtaatatactggatagacagaaggatgaaagggcataacaggaacattaatcagaaagtgcaaaatcataaatacatgaacagttatgaaaaggttatactttagagctgttagaggtggtaagtgttttatagagaaaatagaaagggg

SEQ ID NO: 200931 - DNA, 388 bp, Homo sapiens
ataatataaaggaatgaaccttccagacagcagtcagtataccacggaatagcaaaggatgtcgaaataagtgaccatctccaatatgccagggaatcttatttaagggtttttcccagttgcagtgtaatacatttatatattatttgtcatgtgggatttgatcaatcattttctcactatattgctcaaacaaacactttctgaggttcaacaggcaaaggcgcaaagattattaagtcatgagagctgcacttcaggatcatatgaaagagacagacacaaaataagtaagcataaygcaaatcgatgcagactatatttaagacatatgcaatgtatttggaatcacaaaggaaaaaagatgaagaagcttggagtgtcattg

SEQ ID NO: 200932 - DNA, 360 bp, Homo sapiens
gaggttcaacaggcaaaggcgcaaagattattaagtcatgagagctgcacttcaggatcatatgaaagagacagacacaaaataagtaagcataacgcaaatcgatgcagactatatttaagacatatgcaatgtatttggaatcacaaaggaaaaaagatgaagaagcttggagtgtcattgtagaaagagagacaattgagctgaagagtaatatactggatagacagaaggatraaagggcataacaggaacattaatcagaaagtgcaaaatcataaatacatgaacagttatgaaaaggttatactttagagctgttagaggtggtaagtgttttatagagaaaatagaaagggg

SEQ ID NO: 200933 - DNA, 360 bp, Homo sapiens
gaggttcaacaggcaaaggcgcaaagattattaagtcatgagagctgcacttcaggatcatatgaaagagacagacacaaaataagtaagcataacgcaaatcgatgcagactatatttaagacatatgcaatgtatttggaatcacaaaggaaaaaagatgaagaagcttggagtgtcattgtagaaagagagacaattgagctgaagagtaatatactggatagacagaaggatgaaagggcataacrggaacattaatcagaaagtgcaaaatcataaatacatgaacagttatgaaaaggttatactttagagctgttagaggtggtaagtgttttatagagaaaatagaaagggg

SEQ ID NO: 200934 - DNA, 575 bp, Homo sapiens
ggaagtacgccaagtatatggtgataggtacataaaagccaaagcaatgaaaaaattagccaactgatatacttaaggacaaaattacatgaatatgataattgttcattatttgatccttaaatttaaaattttacatattcacatttgatactgatktaagtaaaaaatgtgtgataaaattatattgacagatgaaattaagagagaggatgaaataatattgtcaaaaatgatctaaatttggtggattaaaatggagaaacatatgccaatgggattgtatatttgactattggcatatgagagcagttctgattttattttatctcttttatggcaaataaaagatattttatctcttttatggcaaataacttttatctctttcatggcaaatgtcatgacaaatgtccacattgaagtgtacttgtctttcagtatctgtgggaaattgcttccaggacttttccctgcggatatcaaaatggatgctcaaatcccatatgtaaaattgcatagtattttcatataacctatgcatatcctcatgtataattcaaatcatcggtaga

SEQ ID NO: 200935 - DNA, 577 bp, Homo sapiens
caaacatgcctttgaacatcccaggtagcctttcctattggcacaactgccagcattcatctgtgcaagcttccagcttgcttgtctatgtctgcagcttgtttttacaggcttctctttgttagaaaagaaaatgatttgggggctgcttttcattaaaatgcgaacctttctgaggactcctgtaccctcactgtctacctaagtaatttcttcttaactcatatatcaatatgggattatatatatagagatcaaatctacaactcactggcattcctgagagaaataaaataagaacaaaataaaataaaaatgttattttcctaagaaaataagcaatttyaaaaatatattttgaggatatagtctgtgaaaatttctctaatcttgctagagtggttagcgtacaaattcaagaaatgcagagaactctgaccagatactatacaagataaccataccaaaggcacatagatatcatattcactagatcaaatagtgatcaaagtcaatgcagaagaaaaaatcttaaaggtagctacagagaaggagcaggtcacttgcactgggaacc

SEQ ID NO: 200936 - DNA, 469 bp, Homo sapiens
gcaatttcaaaaatatattttgaggatatagtctgtgaaaatttctctaatcttgctagagtggttagcgtacaaattcaagaaatgcagagaactctgaccagatactatacaagataaccataccaaaggcacatagatatcatattcactagatcaaatagtgatcaaagtcaatgcagaagaaaaaatcttaaaggtagctacagagaaggagcaggtcacttgcastgggaaccccatcaggctaataacagacctcttagcggaaatattacaagccagaagacatagaagagattgagaacctattttcagaatccctaaagaaaagaaattacaacaaaaaattttatcctgccaaactatgcttcacaaataaatgagaaataacatccttttcagacaagcaaatgctaaaggaatagatttcaactagaccagccttataagtccttaagggagtgct

SEQ ID NO: 200937 - DNA, 583 bp, Homo sapiens
ttgtgtttgtttaataaacctccctattggactgcccatctctgtacgttggaaggggggatgaaaatatgttgattaatggatacaaatatactgtttgatagaagaaataagacctggtagggtgactagagttcaccattaactattgtgcatttcaaaacagctagaagaattcaaaagattcagcatttaaaaagaaaacaaatatttaaggtgatggctatcgcaaatactgatttaatctttacaaattatatgatgtattaaattatcacatgtgccctgaaactatgtatatctattatgcatcagaacaaacaaactctgatggagctggccaatcctacctcagaaaagctgctccaggccacattcccctgcaagttaaggggaggggctgttccaccagattgtattttcctttttctattttgttttgcctacagatatgtgtatttgagcacaaggtaaaatgtttcttgctatgggttgtggtcaaataagtytgacaggctgggcgcgtggctcatgcctgtaatcccagcactttgggaggccgaggcaggcagatcacctgagg

SEQ ID NO: 200938 - DNA, 394 bp, Homo sapiens
ctcctgggctgcagactgctgcctttctccttgtagcctctggagcctcttatttatttattttttgagaccaagtttcactcttgtcacccaggctggagtgcagtggcgcaatctcagctcactgcaacctctgcctcctgggttcaagtgagcctcctgcctcagcctcctaagtagctgggattacaagcacgtgccacactcctggctaattttttttttttttttttttttggatttttagtaraaatagggttttgccatgttggccaggctggtctggaactcatgatctcaggtgatccacccgccttggcctcccaaaatgctgggattacaggcaggagccaaggcgctcggcctggagccttttttataagggtgtgaattc

SEQ ID NO: 200939 - DNA, 608 bp, Homo sapiens
aaatattgataatacaaaatatagatttaattatgaaatttcattactatataaaagtaaagtaaaggggaataaactttttacacacgggccattttaagaaaaattataatatttgtagtccattaaaagaakacatatttttaatcaggaaatataatattgtaactgtgcttatgtgcatttcttttttccttataatgaaggaatttcttctctgttttgttttgttttgtttttttttttcagatggagtctcactctgtcacccagactggaatgcagtggcataatctcggctcactgcaacctctgcctcccaggttcaagagagtctcctgcctcagcctcctgagtagctgggattacaggcatgtgccacgatgcccagttaattttttgtatttttagtagctacggggtttcgccacgttggccaggctggtctcgaactcctggacctcaggtgatccgcttgcctcgacctcccaaagtgcgggattacaggcataagccaccatgcccagccaagaatttcttatttgggttaaaatttcaaaaactacttaagcgcaggcatggtatagtctaaccataacgttagattt

SEQ ID NO: 200940 - DNA, 608 bp, Homo sapiens
aaatattgataatacaaaatatagatttaattatgaaatttcattactatataaaagtaaagtaaaggggaataaactttttacacacgggccattttaagaaaaattataatatttgtagtccattaaaagaatacatatttttartcaggaaatataatattgtaactgtgcttatgtgcatttcttttttccttataatgaaggaatttcttctctgttttgttttgttttgtttttttttttcagatggagtctcactctgtcacccagactggaatgcagtggcataatctcggctcactgcaacctctgcctcccaggttcaagagagtctcctgcctcagcctcctgagtagctgggattacaggcatgtgccacgatgcccagttaattttttgtatttttagtagctacggggtttcgccacgttggccaggctggtctcgaactcctggacctcaggtgatccgcttgcctcgacctcccaaagtgcgggattacaggcataagccaccatgcccagccaagaatttcttatttgggttaaaatttcaaaaactacttaagcgcaggcatggtatagtctaaccataacgttagattt

SEQ ID NO: 200941 - DNA, 608 bp, Homo sapiens
aaatattgataatacaaaatatagatttaattatgaaatttcattactatataaaagtaaagtaaaggggaataaactttttacacacgggccattttaagaaaaattataatatttgtagtccattaaaagaatacatatttttaatcaggaaatataatattgtaactgtgcttatgtgcatttcttttttccttataatgaaggaatttcttctctgttttgttttgttttgtttttttttttcagatggagtctcactctgtcacccagactggaatgcagtggcataatctcggctcactgcaacctctgcctcccaggttcaagagagtctcctgcctcagcctcctgagtagctgggattacaggcatgtgccacgatgcccagttaattttttgtatttttagtagctacggggtttcgccaygttggccaggctggtctcgaactcctggacctcaggtgatccgcttgcctcgacctcccaaagtgcgggattacaggcataagccaccatgcccagccaagaatttcttatttgggttaaaatttcaaaaactacttaagcgcaggcatggtatagtctaaccataacgttagattt

SEQ ID NO: 200942 - DNA, 571 bp, Homo sapiens
aatgccacatttcagagcacatgattttatttcacttgtacaccaaagcttcaaaaacaatcactgaatattaactcattcataagcacgacaattcttataactgggattctaacatgagcctattttgttgatctacttctcatgttctttttcttcttttttcttattttccgttgaaccagtttggcagttaagattctggtgtctatctatggatagcattttgactacaatgtcaaatggctggttgctttttcttccaaatatcagtagtccagatcctctgtctttgcaataatcagcatagtaacatttgggtgaaagaacatctgaattagtgtgagtcagatctaagtctaattctccactctggtctctagttgtgagaacaagctctrggatgatgggtgtatcacttagcattcagtaaaggaaaaaagaaaccataccaattcttctaaaagacagaaatcaatattttaaaatgtgtcaattagataaaattattaactagatgacttcaaagataagaagataaccttaaggtattacagaggtggcaaatgca

SEQ ID NO: 200943 - DNA, 606 bp, Homo sapiens
atgtagattaaaataggaaatactgtgacaaattctgaagtcaataaaaataatggaatactataaaaaatggtttatgattcaaaatcttaggagaaatgaatcaatttcttgaaagccgctgtgttaatccattctcacattgttataatgaactacctgagattggataattaataaagaaaagaggtttaattgactcacagctcctcaggctgtacagaagcatggctgggagacctcaggaaacatacaatcacagcagaaggtgaagtggaagaaagcatgtcctacatgacttgaacaggcagaagagagcaaacggggaggtgctacacaaatttaaacaaccaaatctcatgattactcactcaygatcataagaacagcaagggggaaattcacccccatgatccaatcacctcccacctggcccctcttccaacactggggattacaatttgacaggagatttaagcagggacacaaatacaaatcataccgttctgcccaggcccctcccaaatctcatctccttttcacagggcaaaatacaaccatcctttctcaacagtaccccaagtcttaactcatttcaacattaac

SEQ ID NO: 200944 - DNA, 599 bp, Homo sapiens
acatttggaaatatttcattgaggaacagcagtcttgctgtcctcttttatttacctcrtctgatgttactattagagtatctcacctttcaataattatggtcagatgtgtcatgtttttcatttcctctgagttcagtagccatgttttaccatggattggtctatacattttatagtcttggaaactggaaaaccatctcagttagctttttgtgacattcaagaaaagtatttattctaatctattctcaaactacaaataggcttttccctctcccctcacccaatcgtggatgaagcaagctcacttggatggaattgcttgctctcttccttctcattcaagaaaccttctgaaaattcatttcttcattgtggtggaacaactccaatttcctggatattatgtaagtacataagtatatacctgtttgtcatcactaccctaatagagtttttcttacaggtacctgctgatgcataaagcctgaataaatatcaagccttttaaggaatttcatttttataaaaaattgtatgtacttccagattttaaatatattttactttgattagtgacactgtcatttgttttc

SEQ ID NO: 200945 - DNA, 415 bp, Homo sapiens
gtttgatgtatttttgtatatcataattttaatctttgcatatgtgttgcatcaactgtttatggccaaaatgtttaaaactattttaaagtgttccccatttctcataatattaataaaacctattcttatcatagataaaacgtctgcattgtttatggaagttcaacattcatcaaatgtgttttactaattcattaagtttttgatatgcaaattttaaaagacatagtttgacagtctgattttataaccttgmcagcacttgttttcacaattcttaatttggtatttgtatgatattagaagttttgaaaaaaattaagaatctattatttgaaaatataacattttcataataataaacatcaaataggtttttctctaataacaaagaccagttacattttaacag

SEQ ID NO: 200946 - DNA, 461 bp, Homo sapiens
actctatataatcacatttataatttaatcatttaaaagtttgatgtatttttgtatatcataattttaatctttgcatatgtgttgcatcaactgtttatggccaaaatgtttaaaactattttaaagtgttccccatttctcataatattaataaaacctattcttatcatagataaaacgtctgcattgtttatggaagttcaacattcatcaaatgtgttttactaattcattaagtttttgatatgcaaattttaaaagacatagtttgacagtctgattttataaccttgacagcacttgttttcacaattcttaatttggtatttgtatratattagaagttttgaaaaaaattaagaatctattatttgaaaatataacattttcataataataaacatcaaataggtttttctctaataacaaagaccagttacattttaacagtcagcaaa

SEQ ID NO: 200947 - DNA, 404 bp, Homo sapiens
ttggaattgtagcagtgatacttacytcataaagctgttgtgaagattaaattatttaatcaacatataacccttagcaccatatatgatagtttctataatattccccagtgagataatggtgagaagaagtaagtgggcatttattaattgctatattatattactgttgacgtttcttatgatagaactttttacaatctcatggaatattattgtcccaccttacaaataaggaaactgatgtctaatacaaagatactttgatttgcacatgcaaggtatagaatcaaggcagttaaacaatttgagttttgcttaaattgctccaaccaaagttgtcctttggttggagcaagagaagctggccaagagaaattagataatttacctggtcttggtga

SEQ ID NO: 200948 - DNA, 404 bp, Homo sapiens
ttggaattgtagcagtgatacttacctcataaagctgttgtgaagattaaattatttaatcaacatataacccttagcaccatatatgatagtttctataatattccccagtgagataatggtgagaagaagtaagtgggcatttattaattgctatattatattactgttgacgtttcttatgatagaactttttacaatctcatgraatattattgtcccaccttacaaataaggaaactgatgtctaatacaaagatactttgatttgcacatgcaaggtatagaatcaaggcagttaaacaatttgagttttgcttaaattgctccaaccaaagttgtcctttggttggagcaagagaagctggccaagagaaattagataatttacctggtcttggtga

SEQ ID NO: 200949 - DNA, 404 bp, Homo sapiens
ttggaattgtagcagtgatacttacctcataaagctgttgtgaagattaaattatttaatcaacatataacccttagcaccatatatgatagtttctataatattccccagtgagataatggtgagaagaagtaagtgggcatttattaattgctatattatattactgttgacgtttcttatgatagaactttttacaatctcatggaatattattgtcccaccttacaaataaggaaactgatgtctaatacaaagatactttgatttgsacatgcaaggtatagaatcaaggcagttaaacaatttgagttttgcttaaattgctccaaccaaagttgtcctttggttggagcaagagaagctggccaagagaaattagataatttacctggtcttggtga

SEQ ID NO: 200950 - DNA, 404 bp, Homo sapiens
ttggaattgtagcagtgatacttacctcataaagctgttgtgaagattaaattatttaatcaacatataacccttagcaccatatatgatagtttctataatattccccagtgagataatggtgagaagaagtaagtgggcatttattaattgctatattatattactgttgacgtttcttatgatagaactttttacaatctcatggaatattattgtcccaccttacaaataaggaaactgatgtctaatacaaagatactttgatttgcamatgcaaggtatagaatcaaggcagttaaacaatttgagttttgcttaaattgctccaaccaaagttgtcctttggttggagcaagagaagctggccaagagaaattagataatttacctggtcttggtga

SEQ ID NO: 200951 - DNA, 427 bp, Homo sapiens
caagaggctcaggagttgcaagagarcacagacagttaaataaattctgaaaaataatacataagtaaattaagaatgtaaacaaagtaatagaagtatttctttaaagaacaaaacaaaaattctggaactgaagaatacagctgaaataaaatattcaatgtaagtgttcaaaagcatatttaatcaagcagaagaaagaattagtgaactgggaggggtggaaccaagatggccaaataggaacagctctagtctacagctcccagcatgagcgacacagaagatgggtgatttctgcatttccaactgaggtactgggttcgtctcactggggagtgtcagaaagtgggtgcaggacagtgggtgcagtgcaccgagtgtgagccaaagaagggtgagggaagtgaaaggggtcagtgaattc

SEQ ID NO: 200952 - DNA, 570 bp, Homo sapiens
ctgctatgtttgttaaaaataaatccattgcattcctttattcactatagtgctttgacatcattttccctttgattagaaatcaatcctaatattagtattcctagataactgttcattaattttcacagtagatataggtgaaaggacaagataccaagctgaaatgttccctgccaccaacttttagctcctctcagcatgtgrtctttcactgacttctttaatgaaaacagttctgctgacaggtgagaaaatggattcatatgtcagtgctttcaaaggtccattaaatataatgttatttaaaagcatattaactatcctaaccagtgtcagacaacaactagggaagtgcaggagcttgaagactaatgtagattcttaggatgctgaatgcaaatgtaaatcacaaccctcactaattaaaactttggccctttgattgctcctggagcaagttcacaggggtgatttttcatctctgcttgggttgacacaagcccaataattcactctggcattctgacatcacttgcttggctctgcttgtctgtggagtcagaaaaa

SEQ ID NO: 200953 - DNA, 502 bp, Homo sapiens
aaaataaaatgagacataaatatcctctgtattatgtttactgcacatcatgatgcctaatactactggaattgtgaaggcatattaaggagcctggaatttggtatttttatgttgtaaatcatacatacatgtatatgtgtatgtatatgtatatatatactttttaataaaaatatcagggtctttggttactttagcataaaaatacttttactggaaatctaaatttgtgaaagaaaacagttatattgcccgttaggatttttcctttcatcctagagaaatctagtaatttattcaggaacactcttctttctctcagagcagtcctaaaatatacaaatcaaaatcaawaatagtgaaatcagagggcctagcttttttattgtccactgttgcttggaataagtaagctataagctagaactttcaaaactctttgttatacttgtggcaatttcctaacctatgatggtaccttccacacatgcagtcagag

SEQ ID NO: 200954 - DNA, 502 bp, Homo sapiens
aaaataaaatgagacataaatatcctctgtattatgtttactgcacatcatgatgcctaatactactggaattgtgaaggcatattaaggagcctggaatttggtatttttatgttgtaaatcatacatacatgtatatgtgtatgtatatgtatatatatactttttaataaaaatatcagggtctttggttactttagcataaaaatacttttactggaaatctaaatttgtgaaagaaaacagttatattgcccgttaggatttttcctttcatcctagagaaatctagtaatttattcaggaacactcttctttctctcagagcagtcctaaaatatacaaatcaaaatcaatwatagtgaaatcagagggcctagcttttttattgtccactgttgcttggaataagtaagctataagctagaactttcaaaactctttgttatacttgtggcaatttcctaacctatgatggtaccttccacacatgcagtcagag

SEQ ID NO: 200955 - DNA, 518 bp, Homo sapiens
gaaaatttataccaagtctcaccattttgttatatttccttccagtctttcttttatgcataatttttcttatgatttgtttgttttacatgatcataagaatacatgtaactttgtgaagtttcacaattttatcttttaaaattatatcttagcataaacattttccctgctatgtaattttttaaagcctacatagtaatcaattgatygagtatatagtttagccttttccaagtgatttagcatttagcctgtttttgttttcattgttataaatatcactgtatttaaactttttatgcatgaaactttgctgtatttcgaatgatttcatggaaatgaaagtattggatcaaagaatgtgaacttctataaagttctggttaagcatggccaagatttccataggtgtctgaaagtgtgcctgaattttcactatttgattcatgcaagaatctgagtaatatatccagagctgagaggtgttccttgtaccgtggttgaaaagaccacat

SEQ ID NO: 200956 - DNA, 432 bp, Homo sapiens
agcaagaccttatctcaaaaaaaaaaaaagaatgttcatagcagctttatttttatatccaaaatcaagaaacaacccaaacctccaccgtgagtaaatggataaacaagtttagtggaagattactcagcaacaaaaagaagtagctattgatacatgctgcaatttagataatctcaaataaaaatgtatgccaagtgaaagaagtagacaaatgaacgtacacactgcatggttcaatttatataaaattctttttttacttttattttargttcaagggtacatgtgcagtttgctatataggtaaatttgtgtcatgagtgtttgttgtacatattattttgtcacccacgtactaagcctagtacccagtaattttttatgctcttctccatcctcccacccgccaccctcaagtaagccacagtg

SEQ ID NO: 200957 - DNA, 614 bp, Homo sapiens
acataatatgtagtacattaatttgctcaataaatatttattaaatgtctattatatggcaagcatatagatgatgcaaagaaaagacaatagaggcagagaccacttcctttcaccacatgaacttttacaccaacctacatttaggccttgtgaaactaccactccataatggarctgttgctaaccagtcaatctaggagtttgtcagtgaactgaaggaaatgtaatactgtactgagagggcaggattgatatcctttagatataaggaaaggccttagaagatgggcataggtattgaggggataggttaaaaaactcatgttgcattgctgctatcttcttaggaacagagaaggacaagtaagtgaatgagagagcttagtgggcggaacatgtgagacatgagttgcatggaaaagattagaaatagcaattaaagagtgtgtggacaagagtcaacaagagaaagaataagaaggaacagggaaggaagtcacattcatagtgtctcaaatatgtgtcaggcaccatactagtgacttgttagacaggtaacagtcgttattcttcggaaggaataattggtccaaattagaatgcattcatgc

SEQ ID NO: 200958 - DNA, 453 bp, Homo sapiens
tgcacctatcttgaataacctgtgtccttcaactacccatgtccaaayactagttcattgaaaagagctcattctttcaaaatagataagatatgtatttctatcccagctctagtaccttggacaagttaatctctttgagcctcagttttctcatttgtaaaatggggagaataactggaccttcctctctgctaaaaattccttgaatgttcactgagatgacttaggcagatcttctggtacatactggtactcattaaatggaatcgttgttattacttatatttcaagacaattactgtgccccttactccatcatgtctcccttgatgcaacctgagggcatctctccctcctctgaacagcatctatttagcattgaaccagacactaagatgtgccattcatttgtttattaattcaatgagcaactatttattgtgcatttag

SEQ ID NO: 200959 - DNA, 453 bp, Homo sapiens
tgcacctatcttgaataacctgtgtccttcaactacccatgtccaaatactagttcattgaaaagagctcattctttcaaaatagataagatatgtatttctatcccagctctagtaccttggacaagttaatctctttgagcctcagttttctcatttgtaaaatggggagaataactggaccttcctctctgctaraaattccttgaatgttcactgagatgacttaggcagatcttctggtacatactggtactcattaaatggaatcgttgttattacttatatttcaagacaattactgtgccccttactccatcatgtctcccttgatgcaacctgagggcatctctccctcctctgaacagcatctatttagcattgaaccagacactaagatgtgccattcatttgtttattaattcaatgagcaactatttattgtgcatttag

SEQ ID NO: 200960 - DNA, 485 bp, Homo sapiens
taaaggacttaaaaagcattcaaattacaaaaatgtaaattttgggaaataaatagatttggtggaaaatgaacaagagaatagactagtacaatttataaaaacaccatcttttaatgaaatagaaaaatccaattcattgatatcagccaaatagatgtttacctcacttggttaacatttgctttcatctttctttccatgcacaattcaaacatcactttattcatgagacttcatttcaatgttaagacttcaacttacaaccagttaaattttggaaacacttcttaaraagaaaaaaaaagtatttaggtttaccaataagctattatccttttagacactagatggcactggatagtaaacaaatttacatctatgtagacggccgtaagtaaatagctcccacatttacctggaacttgatatatggatgactaactttgtttccataattcttaaaaataaatctgctgaagttc

SEQ ID NO: 200961 - DNA, 564 bp, Homo sapiens
catggctgaataatatttcgttttgtatatatcacattttcttcatccattcacccattaatgggtgcttaggttgattacatatttcggctactatgaatagtgctgcaataaacatgggaggacagatatatctttgatatgctgatttcctttctttgagatatatagttagcagtaccactgcattttatggtagctctgtttttagttttttgaggagcctccatactgttttccataatggctgtagtaatttacattcctaccaatagcgtacgagcattcccctttcttygccagcatttgttgttttctgtcttttttgacaacagtcattttaactgaggtaagatgatatctcactgtggttttgatttgcattttcctgatgattagtgatattgagcattttttcatatacctgttgggtatttgtatgtctttctcctcttgagaaatacctattcagatcttttgctaattttttgctcagatttttttttttttactattgatctgtttgagttccttattcctgttcaggttattaattttttgtca

SEQ ID NO: 200962 - DNA, 544 bp, Homo sapiens
gggcagttcaggtcgcatgatgacttgatgacccatagtcaaaacattcagtttccaccaaagcccagtaccaggccaatagctgtctctcaaaaggagagtagttatctggtggagatggcagggccttgctccaaaatcctagaggcctccgctgtggttcacctatggggacctgccaaaggctccaaacagcatccctgtctactactgacacctcaagcaccattggatctgctgggtyatatagtccaagtggcagagcagcttgcatgttagcctggacctgttgcagagccttttcctgttctggactccactcagaactggcagccttttgggtcactcaataaatgggctggagtaacacaaccaaatgagaaatgtgtggcctccaaaatccaaataggctcagtaggcattgtgcctccttcttggttgtaggaggggccaaatgcagcaacttattcttcaccttagagggaatatcttgataggccccagaccactggacccctagaaattttactgaggttaggagatc

SEQ ID NO: 200963 - DNA, 492 bp, Homo sapiens
taataggggttttgctaatttaatagatgaaaagtagtatttccaagtagttttctgcatttcttttttaatatatctaagagccacttcccacacacactcaccctacccccattaactccatgtttaaatctttttcctgtttcttttttctgctacattttcaggttttgtcatctctattttttaagaacattttacatttcagtagatattctttaatataatttagaattattttttgatttgttatttgtgttttgactatgctcatggcagttttttctcattactttttgtattaagatttttcctttattgcttctgggtttcgagtcattgtgagaaaaaaactttccacaattggagattataaaataattccatttttatattgcacttgatatggatcagctctgkgtccccactcaaatctcatcttgaattgtaataatccccatgtgtcaagaacggggccaggtggagataact

SEQ ID NO: 200964 - DNA, 331 bp, Homo sapiens
taagtgatcctctccctcgagttttcttatctctcttgacctagtccagttctacccatctgaaaacacagytgactcttaattcataggttaaatgcccttcctccttcagaatggctggaaatttaatacggattgtaaaagtatgtgattaacatctctttatctactagcccataaagctctgagggaatgaagactacccttgattttactttcccttatctctttagtacctagtacaactgtggcaccttttaggtattcactcaacattgttgaatcagtgtgtgaatgaaataataagtaaaaaaaaacatgaaaacccaga

SEQ ID NO: 200965 - DNA, 679 bp, Homo sapiens
ctgcagcttttctaagcacacagtgcaagctgttggtggagttactgttcyggggtctggaggatggtagccctaggcagtgccccattggagactctgtgtgggggctccaacaccacatttcccctctccgttgccctggtagatgttctccatgagggctccaccctggcagcagacttctgtctggatatctaggtgtttctatacatcctctgaaatctaggcaaaggtccctaaacctcaactcttgtcttctgtgcacacatagacccaacaccacatggaagatgccaaggcttggggtgtgcaccctctgaagccacagcctgagctgtacattggcctcttttagctggagctggagcagctgggatgcaatgcaccaaggtctgaggctgtacagagcagcagggccctgggggcagtccacgaaaccatttttccttcccaggtctccaggcctgtgatgggatgggctgccatgaagatctctgacatgctctggagacatttttcccattgtcttggggattgacatttggctcctcattacttatgtaaatttctgtagttggcttgaattcctcctcagaaaataggtttttcttttccaccacatggtccagttgcaaattttcccaaattttatgccctgcttcccttttaaacataagtt

SEQ ID NO: 200966 - DNA, 679 bp, Homo sapiens
ctgcagcttttctaagcacacagtgcaagctgttggtggagttactgttccggggtctggaggatggtagccctaggcagtgccccattggagactctgtgtgggggctccaacaccacatttcccctctccgttgccctggtagatgttctccatgagggctccaccctggcagcagacttctgtctggatatctaggtgtttctatacatcctctgaaatctaggcaaaggtccctaaacctcaactcttgtcttctgtgcacacatagacccaacaccacatggaagatgccaaggcttggggtgtgcaccctctgaagccacagcctgagctgtacattggcctcttttagctggagctggagcagctgggatgcaatgcaccaaggtctgaggctgtacagagcagcagggmcctgggggcagtccacgaaaccatttttccttcccaggtctccaggcctgtgatgggatgggctgccatgaagatctctgacatgctctggagacatttttcccattgtcttggggattgacatttggctcctcattacttatgtaaatttctgtagttggcttgaattcctcctcagaaaataggtttttcttttccaccacatggtccagttgcaaattttcccaaattttatgccctgcttcccttttaaacataagtt

SEQ ID NO: 200967 - DNA, 679 bp, Homo sapiens
ctgcagcttttctaagcacacagtgcaagctgttggtggagttactgttccggggtctggaggatggtagccctaggcagtgccccattggagactctgtgtgggggctccaacaccacatttcccctctccgttgccctggtagatgttctccatgagggctccaccctggcagcagacttctgtctggatatctaggtgtttctatacatcctctgaaatctaggcaaaggtccctaaacctcaactcttgtcttctgtgcacacatagacccaacaccacatggaagatgccaaggcttggggtgtgcaccctctgaagccacagcctgagctgtacattggcctcttttagctggagctggagcagctgggatgcaatgcaccaaggtctgaggctgtacagagcagcagggccctgggggcagtccaygaaaccatttttccttcccaggtctccaggcctgtgatgggatgggctgccatgaagatctctgacatgctctggagacatttttcccattgtcttggggattgacatttggctcctcattacttatgtaaatttctgtagttggcttgaattcctcctcagaaaataggtttttcttttccaccacatggtccagttgcaaattttcccaaattttatgccctgcttcccttttaaacataagtt

SEQ ID NO: 200968 - DNA, 679 bp, Homo sapiens
ctgcagcttttctaagcacacagtgcaagctgttggtggagttactgttccggggtctggaggatggtagccctaggcagtgccccattggagactctgtgtgggggctccaacaccacatttcccctctccgttgccctggtagatgttctccatgagggctccaccctggcagcagacttctgtctggatatctaggtgtttctatacatcctctgaaatctaggcaaaggtccctaaacctcaactcttgtcttctgtgcacacatagacccaacaccacatggaagatgccaaggcttggggtgtgcaccctctgaagccacagcctgagctgtacattggcctcttttagctggagctggagcagctgggatgcaatgcaccaaggtctgaggctgtacagagcagcagggccctgggggcagtccacgaaaccatttttccttcccaggtctccaggcctgtgatgggatgggctgccatgaagatctctgacatgctctggagacatttttcccattgtcttggggattgacatttggctcctcattacttatgtaaatttctgtagttggyttgaattcctcctcagaaaataggtttttcttttccaccacatggtccagttgcaaattttcccaaattttatgccctgcttcccttttaaacataagtt

SEQ ID NO: 200969 - DNA, 610 bp, Homo sapiens
accctgggcattgtccaggtggggcttgatggaacacactggctcactgcaagatgtggagggaggaggcctcagacacagttggcractgtggagactaacactgatccagtttgttcacggggaacttgccgacttttctcttttctcctgggacaaatccactgtaaccaatgactcatcctttgctggggttaacttttttgaggagcctatcccttttggaatagtgacacagtgtcttggtcaatagcatccctcttggtcccccatccaggacagggtggatcatcatctctctagcaagggaagttcccaacattgcattctcttttggattgaagtctctgattggagattgcgtactcttttctaaacttgggtctaaattgatgttctagccccactgtggagcctgaaccttaaaattcctgtactcctcccacaccagatcactccctctgtcctccaggtagatgtagtacacctggaaatgtacatatctcttctttacacactctgggcctggggctcagagtcctcaaaagacaaaatatctgggtcaggggttcttcagaggtgcagccatggccttctgttcctcccttta

SEQ ID NO: 200970 - DNA, 534 bp, Homo sapiens
aaaaatgaatggttaataaatgtcaaaacaaaattttaaacttagtaattgtcaggaaaataacccacttccaatcattggtaaagatgaagagcaatgataactctcagacatggcaaatgggagtttaaattggtaaagtttaagaaaataatttagcattacccaccaaatttgaacacactcatatactgtacttgtgtaaccatgcatcctagtatgtccactttacttacttttagaataattgctaacattatcctcttcaagttttcaaaacgttccaatttgaacaatatactaaatgatcatcgtatctgtggccaacaattctacttctggatacatttatctgagaaaacctcttgttcatgtatacagattaactctgtgagtgcttttkgtagcattatttggaattgtgaaacctgaaatcctactaaatgttcaacagaaaggttagataaaagaggatatgtttttatactagaaggctaggcagaaagaaaataaaatgaatacatctttactcca

SEQ ID NO: 200971 - DNA, 609 bp, Homo sapiens
acatttttttagtcagggtccttggtcgcaaacaacagagacaaagcctgaataaattaagcagaaaaggaatttattggaagaatactggataactccaagaataattgggaagagtaaagaactggcctcagaaaatgagcagaagctgaagtaggctagtgtgtgtgcctgaattacatctaagaagatgctacaaaaagaatctgacctacaatactaggtctgggtattagaagtcaccactgacatggttgctgggagatgcatgccgtcaccacagttagaggcattccaatttgcttcctgtgtctttgctttatttgctcccaattaaagtcccagggaaaatatgcaattgattgagtttcaatgaagtgcctgttgtctagctgccaggagttagggaaaacatatctgtcctccaagggagtgagttccaatactgagtagcccaaaaaggcaaatacccaattcagttgctatcttcttaacaacttatagatcaattgaatcagayagacatatagtaaaatgtacgaaattaaatacattccatagagtacaagtaaacatttttttttaatctggcacctttacaatttgacc

SEQ ID NO: 200972 - DNA, 533 bp, Homo sapiens
ttacattccaaacccctcaggccagtggcatttgaatggtatgcacttttaaaaacaacctcatatattacctcatttaatcttgtgtaatcacctatagcagatggttagagtgtgtcaggttattcccattatacagatgagaaaatcgatggtcagaataatgaatagccttaggcttgtaaaatggcttagtgtggacagaaagaaggcctggggattctgaatagttcaactgaggtttggctgcactttgttggacctccattttctcatctgtaaaatctggaatttcaaactgatgattcctttagtactaatatccagtggagattataacatgttcaatgttgtgcagtagtttagagtcagaggcaggactggagygtgagtgtcccacatctaggccagtgccttcccatgattccatgccattctgcgatgccctgtaaccccgctttcccacccaccatcaccctcttttctgctttggcaaccatttatgaagtagtctcctagaatgatcagtggtg

SEQ ID NO: 200973 - DNA, 595 bp, Homo sapiens
ttcccttaaaacaataattgcggctgttagattgacaatgaacaacacaggaataggagacacagcaggaagattactgaggtccttgaaatccagccagaaggactgctggtccacggtgatggcaacagagacaaaaggtggtgaacatattggtaatgcatggtgaagacagagatggcaarttctacccaatatgcacatcactcacatcaacagctctctactcagggaggaactggagaacagaatattccctgagcaactctgtctttccctgctgcttctttttctagccccattagacctaatgatctcccacctttcactctcatttaaataaaggaagtgtcacacataagggaaaaggatctgcagagaataccattagcaatggaacccctaacaattatttcctaagataatgttgtttgatggctacgcccttgagaactggtggttggcaatggtctgttctgagttctaacatgaaatgaaagtccctgaaggtctcagttggaagcctgacccatgcacatctcttccagggaaaagagagctctccctggaggccagaaaacatttacagtaataa

SEQ ID NO: 200974 - DNA, 428 bp, Homo sapiens
ggttatgctaccacagaggcacaaccacgtgaggaggcagcagggaaggtggctatctgcaagccaaggagagaggcaccaggaggaactaatccagccagcatcttgatcttggacttctatcctccagaactgtgagaaaatacatttctgtagtttaagccactcrgtgtgtggtattttgtgatggtagctgagcaagctattataggagctatgattagcattcctattgtgtagctaaccaacacaagactgaaaaaggtgaggtcacttgcccagggtcaccagaaggtggaattcaaacccaggtctgtctggttcccaagtttttgatccttgctctaatattggactgcctcaaagaaacataagataatggttttgaatgcagctcccaatttgtgtgggcttggagcatgtataca

SEQ ID NO: 200975 - DNA, 510 bp, Homo sapiens
catgaataaatcaaaaggtaggaaaggccagctaggggagcctgatgaatcaatagccctgctgatccgggaagtcacactgtgtgagggtaaacagggctcccagagggcctgcctacctgagtctgtcttcatcattcagaaacttcttagagactcagctttcagaggtatcaayctcactgacaagcaaggtgagcagggcgaaggggtcactacttcccctccctcaggaaagggaaggggtgaggggccactagggcctgggcatggcccactgcacatcaaatcccctcctttcctcagggagctgtgggctgtcagctgcccaatcaggcccgagggaggaagaaagtcaaagtgtgctaacccctacaggtcaccaggactgcttgctttagtaatgaactcaattgtttccccttccccaggcagcttcttaggcagcctgaattctttctccgtctactggtactttcagaaacactcacatgtctcaacaacaagaac

SEQ ID NO: 200976 - DNA, 593 bp, Homo sapiens
acataatggcctgagcctgccttgcctctgacccctgccctggctactcccatatgcccctgatgcccacaaatgcccctgcatccagaagaycttgatttcaggagaaacgaaggtggtgagggagaagatggacaagagtcctgtctacacagaggtggaaaatcactggttctgcagagaatgggccaaaaggcactgtgagtcctctagttccaggatggctgactcacaggcctaagtaaattttgcccagaacaatgcaggggaaccccagaggccgtagccaataggttgctttatctaggactaaagtcaagggcatgggtctctggggagccccagaagattgtacaagggtatatattagtacactagggctcagactccaagaaaacatatctagggtggaagaaagcacatatttatgcgtgcatgtgaatgtgcacacacacacacacacacacacacagcagataataatgtacatgcaagttaatagtcatttataacttcagagctggccagacccatttcaggcagtcagaccacttggcaatcaccaaagctgcatccctatagtgacctcttcc

SEQ ID NO: 200977 - DNA, 593 bp, Homo sapiens
acataatggcctgagcctgccttgcctctgacccctgccctggctactcccatatgcccctgatgcccacaaatgcccctgcatccagaagaccttgatttcaggagaaacgaaggkggtgagggagaagatggacaagagtcctgtctacacagaggtggaaaatcactggttctgcagagaatgggccaaaaggcactgtgagtcctctagttccaggatggctgactcacaggcctaagtaaattttgcccagaacaatgcaggggaaccccagaggccgtagccaataggttgctttatctaggactaaagtcaagggcatgggtctctggggagccccagaagattgtacaagggtatatattagtacactagggctcagactccaagaaaacatatctagggtggaagaaagcacatatttatgcgtgcatgtgaatgtgcacacacacacacacacacacacacagcagataataatgtacatgcaagttaatagtcatttataacttcagagctggccagacccatttcaggcagtcagaccacttggcaatcaccaaagctgcatccctatagtgacctcttcc

SEQ ID NO: 200978 - DNA, 387 bp, Homo sapiens
atgtgcagtggttatatgcaaatactataccattttatatgaagggcttcatggattttggtgtcctagggataggttctgaaaccaatcccccacaggtactgagggacaactgtatatatattcatgaatatggatatatataatccaaaaatgtctatgttctttgaaaaatcaggagatttggctgcagtggcctcaaattggctgggagtgatttcaactstccccttcaggcaggggatgtccccagttctcatccccaccccaacacacatgtttccttttagccagctccacacaggcaatggcataactttctggggactgctgggcaaattgcctgccctccagaatacaggattcattcacggagtgaatattcat

SEQ ID NO: 200979 - DNA, 565 bp, Homo sapiens
gacacaatcccatctgaactatgaaataattattctgggaagtggacagttggctgtagaataagggtttgagggtggggtgagctacgctgcaaaaatgggagacccgttaggaagctattacaatagtccaggtgagaaataacgtagccyggtgttatgcattgaattgtgtcccctaaaaagacactgaagtcctaacctccaatatctgtgaatgttacctcatttggaaatagggtctttacagatgatcaagtttagatgaggtctttcggatgggccctaatccaatatgactgtgtcagagaaggggaaatttgggcacagagacagacatgcataaatgaaaaatgatgtagggtacagagagaatgccttctacaagacaacgaacacctaaagttaccagcgctaggagagaggcctgcaacagaccctccctcacagccctcagaaggagccaaccctgccaacaccttgattttggacctccagcctccagaactgtgagactataaattgcacctactttgttacagcagctttagggaactcatacagt

SEQ ID NO: 200980 - DNA, 587 bp, Homo sapiens
catttactacatagattatcactaaaagaactttaaaaatttacttattcaagaagaaaattaagtacgaaatgtcatgaaatacaaaaataaattatgaatgaataaacaaaagagtaaagctaaaaataaatcatctattgtaagacagtagcaaaaataataattaaggtatttgaaatgctaagcattcagcaagaaatcagtgaatgactttagaaatgtaaacagtaatcttaaaatcataaaaatagaatatgtaacttccaaatgcatgtgaatgggaggaagggagggtgacaaggagagacgtacataaattaaatttgaacaagatagtagaaagcagaaagagaaaagaggcaaagaaaagaagaagcatggccagtaagaagtacataaaaagataatagaaataaatagagatctatatgactaatcacagtttatgtatacaaatcatactcaatgtttaatgacagatkgtcatgaaacagagattaaattgacagattgtaaaagtgactcaagaaagcaaaattcagctgtatggaatttacaagtgacttacctaaagtctaagaaag

SEQ ID NO: 200981 - DNA, 586 bp, Homo sapiens
gttttttgttcaaaatggtggggctgacgccatctacttatctccagtttcctttaaaatgccactaaagtatgactaaaggaatttttataggtataaaaccacttttaaaaaaagaataagaaagtctattgcagtwaaaaaaaaaaaaaaaaaagtatggtacttgaaagacagagagagctgcaggaattaaagaggcagtggagaaagcagacacctaaggtggcagtaggaaaactaacactcagcttacaaggaattcccagaaggtaaactgatgacctttggaaccaggggaaaatatgaaacagaaagtactaggactggttgaaaatctgttttagaagcagttaaaccctcaaatcatattgtttgcatgttctaagagaaaattctacaaatatatagaatatagtgacagcaaattttgtaagtacacagactagcaaacaacaatccaaaaacataacaatgaactccaaggaccacttccacctggtttcaaatggcacccaaaacaagccattcattcatttgtccatttattcatcaaaaacatattacagcaatataatgtgatgat

SEQ ID NO: 200982 - DNA, 284 bp, Homo sapiens
tttatttgttcttttattgttattcattaaaactatcagactaagaagtgatgaagtacttctggggtccttctgcagatggacctacagcctcagctactggaggcaagcaaggcttagagtctacattgcggatgctatttatatcctaaaatctatttaaaatttcaccmgatcaatctctggttgatagatttggaaacaaaacacatagatatcaccgattatttttcccaatagcctttcttttgtacaatgtgtttcgatttacaactctctgccta

SEQ ID NO: 200983 - DNA, 490 bp, Homo sapiens
cttctaaactgcattttatttattttttgttattttacatactctgaaattaaaacatttactttttaaaatttaagatgcttctgactgtatatgtttcaattaaaacttaaaacttttataaatatttatatcctcagttctttcctcttaaagaatttttttatttagcagaaaagaggcatgaaaaaagcttttgaataaatgttttttaaaaggtcatataattttaaagtagaaatggaycttaagtagttgggccctcccgtttgaagcccagagacattgtgttcctgaaaattatatagctactttttctactctgccaattatgtgctgatagatgatcaactggaaaaatcagagtttataagcattatgcattctacatgtagaaagagatcaaagatcaaaggacacctctacttctgtagagaaaatgttgttggaacaatcaattctgaatactaaaagtttataaaggatctga

SEQ ID NO: 200984 - DNA, 440 bp, Homo sapiens
gcataacccttatctggatggccatacattctgaatgactgatatgcaaattaatcaatgcattgaacccccacaatcatctagtgcctgagaaatagtgagaaatagtcagctctttaaaaatgtgcacgctaccctcttgttggccttaaagtggattcaatgctaaatactgatttgrtaagaacaaaacagtgaatctgctacagtgttgatgatggagggatgggagagacaataatatcattattttctaggactctacaaaatacttttactgacatcattttattcaacggaacccccaaaagttgaaaaactaggtattattgccaaccttctacctcctttccctttcttgaaataaaactcttaggttactggactcacccaaagccaccaaacaactacatggtggggagggtgaatccagttcttcc

SEQ ID NO: 200985 - DNA, 556 bp, Homo sapiens
ttgttacatgggtgtattgcatgctgctgaggtttgggcttctaaagttcccatcacctaagtagtgaacaaaggacttcataggtagtttttcaaactttacttcccaccaccctcccccgcttcaacaatctccagtgtttatttccatctttgtgtccctctgtacataatatttasctcctacttataagtgagaatatgcagtatttgtttttctgcttctgtgttaattcacttaggataagggcctccagctgtatccatgttgctgcaagagacatgatttcattctttttatggctgcatagtattccatggcgtaaatgtgccacattttctttatgcagtccaccactgatgggcatctggattggttctatgtctttgccatggtgaatagtgctgcagtaaacatatgagtgtatatatttaacagatttaaagcaacatttctaatgaaatttattagccatgtctaactgctggttacatcattcagattattaaagggctgagatttgaattcaccagctaaagttatgggagacttgtc

SEQ ID NO: 200986 - DNA, 580 bp, Homo sapiens
ctattgcaatagggaagagaggccagagctcaattagagctcaactccactgaaatgaaaggcagggctgaaataaggagaaagtattgaaggatgatagtggggaggttgatcaatgggatgtaaccagtgcactgagtaattttgagtctgtaattttttcttctgcgattagrccatctttgtttgctaattacaggcatggaagttagggtcctatcttcccaaagagggtgggaggtaggagtgctctctccttgatgattacatttcaaagggaaggctcccaagtctttcagaaaggcattcttggattatgaaactggcaagaggctttaaaaaatatttccatgtgaaggggcagaaaaagaatttactgttacaacttttctaaataaaatgctttaagaaaagggaggtcgagacctagagtcaggaagaagcctatctaaagtttaaccaggctgaggggaaggctaagcgtgtcttgatcagtgaacaataacatttcaatgcttttcaagttttcctgtgaagcgactctttaaatatactttgaattgatgaaatttattaatta

SEQ ID NO: 200987 - DNA, 580 bp, Homo sapiens
ctattgcaatagggaagagaggccagagctcaattagagctcaactccactgaaatgaaaggcagggctgaaataaggagaaagtattgaaggatgatagtggggaggttgatcaatgggatgtaaccagtgcactgagtaattttgagtctgtaattttttcttctgcgattaggccatctttgtttgctaattacaggcatggaagttagggtcctatcttcccaaagagggtgggaggtaggagtgmtctctccttgatgattacatttcaaagggaaggctcccaagtctttcagaaaggcattcttggattatgaaactggcaagaggctttaaaaaatatttccatgtgaaggggcagaaaaagaatttactgttacaacttttctaaataaaatgctttaagaaaagggaggtcgagacctagagtcaggaagaagcctatctaaagtttaaccaggctgaggggaaggctaagcgtgtcttgatcagtgaacaataacatttcaatgcttttcaagttttcctgtgaagcgactctttaaatatactttgaattgatgaaatttattaatta

SEQ ID NO: 200988 - DNA, 609 bp, Homo sapiens
agatcttggtgggtggcattaaagaagacattgaaggrcatcacccaagagattattttgaacagtacagggaaattgaagtgattgaaatcatagctgaggcagtggcaagaaaaggggtcttgcttgtgtaacctttgatgaccatggctccataaataaggctgtcattcagaaacaccttactgtgaatggccacaactgtgaagtaagaaaagccctgtcagagcaagagatggctagtgcctcacccagttgaagaggtcaaagtggtcctaaaagctttggtggtggccatggaggcggtttcgggggaataacaactttggtcatggaggaaacgttagtgactgtgtggctttggtggcagctgtggtggtagtggatatggtggcagtggggatgaatataatggatttggtaataatggaagcagtttcggaagtagtggaagctacaacaattttggcaatgataggattcaatcttcaaattttggatgaatgaagggtagaaactttggaggcagaagctctagttcctgtggtcatggaggccaatactttgccaaccaggaaaccaaggtggtcatggtggttccagtagcag

SEQ ID NO: 200989 - DNA, 572 bp, Homo sapiens
aaatgggcaaatgatttgaatgacacttcagcagagaaaaaaattagatgggaaataaacacatgcaaataggctcaacattattagtcattagatatttgccaataaaattatgatgtgatactacatgtctattagaatagcttaaaaaaaacaaaaggcagaagcccaccaatactaagggctagcaaacatgcaagcatgcagaggagctggaactctgacacattgcttttgagaatgcaaaatgttatagttgttttggaaagcagtttggcaaatgacatttttatagaattagaagaaaaattctaaattcatatggaaccaagaaagaacccaaacatacaaaataatcttaagaaaaaagaaccaagccaaagatatcacactacctaacttcaawttatactacaaggctgcagtaaccataacagcatgatactggcaccaagaaagacacatagaacaatggaacagaacagagagcccagaaataaggccacacacctacaaccatctggtctttcacaaagctgacaaaagcaatggggaaacgactccccatttaa

SEQ ID NO: 200990 - DNA, 572 bp, Homo sapiens
cctaaatcctgtcaggagaaatgttttataatgctagacaaaattgtttaaagagaaaaaatgttattccccttattttcatcagtttggaactacaaagcaaacatcaataacattgtgccagttcagttaaaccttgtgtcacgagtacaattatggaatttccacagtataaaagcaccaatcctgtcactaattcttaatattaagtgagctcagacccatttatagtcactatgcacttctctttgcccttatcattcacaactatttaatcattgctaattctgccttgaatacaacagaacacttaaagggaggtgatacttgagctgtgctttccagggagagagagaggttattatctcatagaaattaagaagaagagagaacaggaaggtggaaaatgatcagaagatatatagaatgtcaggcgtgtcaagaaataataaataataggggtagctagattattcatrgtaagggttggggaatgaaggtgaaagaaatgaaagttggggccagatggtcagagcaggatagtcatattaatgaattgaaactattatatg

SEQ ID NO: 200991 - DNA, 531 bp, Homo sapiens
ataatgaaatatagacatttagacatatagatttacttacttgtcattaagcctagggaaaaccargacttgcaatctttaagtcccctttcaattctaaaacttcctgacaatgagcaatctgacagttatatcatgatacgatcatgtctgccactgcttcagtgctaattcacattgaattgccctttcctgcctctcgactttcagattagttttgataaaacatgaatatggtattttctagctgatcattctgatttctaatctgacatgttgtcatatttttatttatagattttggtttacaagtcagcactccagagagatttctggttttttgaccttcactaagggtctctttcattcaaataatatctgaatatggtataagtatctgaatttcactcatattataaagctattttttaaaatctcaattataaaaattaaaatatccttcattaaaatataatttttttactaattataaacttaaaaagtttttaattgacatgaaatcacatgtta

SEQ ID NO: 200992 - DNA, 531 bp, Homo sapiens
ataatgaaatatagacatttagacatatagatttacttacttgtcattaagcctagggaaaaccaagacttgcaatctttaagtcccctttcaattctaaaacttcctgacaatgagcaatctgacagttatatcatgatacgatcatgtctgccactgcttcagtgctaattcacattgaattgccctttcctgcctctcgactttcagattagttttgataaaacatgaatatggtattttctagctgatcattctgatttctaatctgacatgttgtcatatttttatttatagattttggtttacaagtcagcactccagagagatttctggttttttgaccttcactaagggtctctttcattcaaataatatctgaatatggtataagtatctgaatttcactcatattataaagctatttttwaaaatctcaattataaaaattaaaatatccttcattaaaatataatttttttactaattataaacttaaaaagtttttaattgacatgaaatcacatgtta

SEQ ID NO: 200993 - DNA, 524 bp, Homo sapiens
aatgcagacttcatatctgaaaggatcaattgcttttaaaggctgtgtatgatttagtgctaaaattagtagaaacatgyagccaaaaaacttctgttgcttccacttgatgcagtatcagtgttgaactgtcctcttaacagaagtatttgaagatggtgagaataaagagcttttctcttattaagtgtgtggttaaagttgggtggattaaacaaaaacaaagtcaaaacataaaagtcacacatacaaaccttataggtagacactccactattctgaattccagttttctcatcaaaaaataaaatgggagaggtaagattaaatgacataaaatgcccctgccaacattaatattctgtaaacaccaaattgcactttggaggatattgacaaaaatgaaagcttttctcagtagtttcacagaggaggtggatttatggggtatataactcttatgcctcgaagtcactgatctcgatggagtgagctgaatattaacaggaggtgacaaattgttc

SEQ ID NO: 200994 - DNA, 524 bp, Homo sapiens
aatgcagacttcatatctgaaaggatcaattgcttttaaaggctgtgtatgatttagtgctaaaattagtagaaacatgcagccaaaaaacttctgttgcttccacttgatgcagtatcagtgttgaactgtcctcttaacagaagtatttgaagatggtgagaataaagagcttttctcttattaagtgtgtggttaaagttgggtggattaaacaaaaacaaagtcaaaacataaaagtyacacatacaaaccttataggtagacactccactattctgaattccagttttctcatcaaaaaataaaatgggagaggtaagattaaatgacataaaatgcccctgccaacattaatattctgtaaacaccaaattgcactttggaggatattgacaaaaatgaaagcttttctcagtagtttcacagaggaggtggatttatggggtatataactcttatgcctcgaagtcactgatctcgatggagtgagctgaatattaacaggaggtgacaaattgttc

SEQ ID NO: 200995 - DNA, 524 bp, Homo sapiens
aatgcagacttcatatctgaaaggatcaattgcttttaaaggctgtgtatgatttagtgctaaaattagtagaaacatgcagccaaaaaacttctgttgcttccacttgatgcagtatcagtgttgaactgtcctcttaacagaagtatttgaagatggtgagaataaagagcttttctcttattaagtgtgtggttaaagttgggtggattaaacaaaaacaaagtcaaaacataaaagtcacacatacaaaccttataggtagacactccactattctgaattccagttttctcatcaaaaaataaaatgggagaggtaagattaaatgacataaaatgcccctgccaacattaatattctgtaaacaccaaattgcactttggaggatattgacaaaaatgaaagcttttctcagtagtttcacagaggaggtggatttatggggtatataactcttatgcctcgaagtcactgatctygatggagtgagctgaatattaacaggaggtgacaaattgttc

SEQ ID NO: 200996 - DNA, 550 bp, Homo sapiens
ttctctattcaatttttggaatagtttaagaaaaagtggtattcattcttctttatatgtttggtagaattctgcattgaatccatcctgtcctgagcttttatttgttcatagaatttccattactgattcaatgttgctcctcattattggcctgtttagatttcctgtttcttcctcattgaatcttggtaagttgtatgcttccaagaatctattcatttcttctaggtttttcagttggttagtgtatagttgttaataataatctctggtgatcttttgtatttcaaaatatcagtcataatgtctcctttttcatttctgaggtcgtctgttttgagcttcttgcttttkttcttgggtagtctagttatcagtttatcaaatgtttaaatctctttgaacaaccaacttttgcattggtttctttagtctctattttgtttagttctgctctcacctttatcatttccttccttctgctaattttgggttagatttattcttgcttttctagttgcttgaagtgtacaatgagactatttga

SEQ ID NO: 200997 - DNA, 563 bp, Homo sapiens
agaagactcaaataagcataattagagatgayaaaaggagacatcataacagatgccacagaaatacaaatgattcaatacaaatacaaaagataatattgtgaacaattatatgccaacaagtggaaaaatctataagaaatgtataaattcctgaacacatacagcctaccaagactgaatcatgaagaaatagagaacctgaacagactaataataaggaagaagactgaggcaataatagactctcccatcaaagaagagtccaggacctgatggcttcacggctaataaatatttgccaataatattgaattatcaaatatttaaggaagaacacatattaacttttctcaaattcatcataaaaaattgaagaggtgggaatactttcaactcattttataaagtcagcattacaatgatatcaaaaccggacaatgatacaacaaaaaaagaaaactataggacaatatccctgttgaacatagatgcaaaaactctcaacactagcaaaacaaattaaacaacacattaaaaagatctttcattattaccaaatg

SEQ ID NO: 200998 - DNA, 589 bp, Homo sapiens
gaatgacattttgtgtcttgtgtccactcattggaagaattaatattaaatgtctgtactacccaaagggagctaaagattaatgttatccctatgaaaataccaatgatgttcttcatagraatagaaaaaccaatcctaaaatttgtatggaacaacaaaagacccaaatatccaaagcaattttaatcaaaaagaatgaagctggaggcatcatactacctgaccccaaaacataccacaaagctgtagtgaccaaaacagcatggtaatggcataaaaacagacacattggccaaaggtatagaacagagaacccagaaagaaatccacacacttacagccaactcatttttgacgaagttggaaagaatatacaccggggaaaagatagtccttaataaatggtgctaggaaagctcgattgcatactgagtaaatgcagaaactcctagatattttttaaataaaaagagttaatagatatctttgtgcactatgattagtacaggcaagtctcactggcttttgggcttttgataataataaagattaatgtatatacatacatacaaacacatataaaata

SEQ ID NO: 200999 - DNA, 589 bp, Homo sapiens
gaatgacattttgtgtcttgtgtccactcattggaagaattaatattaaatgtctgtactacccaaagggagctaaagattaatgttatccctatgaaaataccaatgatgttcttcataggaatagaaaaaccaatcctaaaatttgtatggaacaacaaaagacccaaatatccaaarcaattttaatcaaaaagaatgaagctggaggcatcatactacctgaccccaaaacataccacaaagctgtagtgaccaaaacagcatggtaatggcataaaaacagacacattggccaaaggtatagaacagagaacccagaaagaaatccacacacttacagccaactcatttttgacgaagttggaaagaatatacaccggggaaaagatagtccttaataaatggtgctaggaaagctcgattgcatactgagtaaatgcagaaactcctagatattttttaaataaaaagagttaatagatatctttgtgcactatgattagtacaggcaagtctcactggcttttgggcttttgataataataaagattaatgtatatacatacatacaaacacatataaaata

SEQ ID NO: 201000 - DNA, 499 bp, Homo sapiens
agtaagaaaattatataattatcttttctgaaagccaagtcataaaatattaagctatattagattattttgatgtgacataattcatttactttttgttaggggcacgtttgctttatgggaactacctacgaagctctcttacagaaataaactgttcgtttatcattgytgttgttattatttatgtattagaaagacatcaagtaaggtatgccacttcactttggcagcttaattaatccactgagtattaattagtagatgaggaaatgataaagattctctctttgaccaaactttgatcaaactcttctgagctctctttttaaccaggccccaactttcgaacttccatgttagtttctgcattgtccaatttagcaagaatcttctcagtttagccagaatttttcatttttgatatatgatcacactttggtatctgatcaggtttccttcctctacaatgcttctggtgatatttgatcaccctggt

SEQ ID NO: 201001 - DNA, 254 bp, Homo sapiens
aaatggtataaatggccaaggtgcagtgcttcttggggactgccaggtgacaggcacagaaggaagcaagggtacattgtgaagggctttgatgccactttagagcactggttcctgtcctaaagcctgtggagcagtgctgaggattctaagcacaggagtgacagcataagatrgctcatttacaaagaccaccccggcagatggattagatccagtagctcagttaggtgggtatggaagtctatgtgagg

SEQ ID NO: 201002 - DNA, 609 bp, Homo sapiens
gactagaactgggagtgcattctccacagggtgacaggctcctctctcctgcggccagcgccacaagcagcgggttcctggctgatcggagggtgggaacggggctgcggaccccgttgcgctccaggaggagcgccggcccttacctcgcccgtccggcttcatcagcagcgcgtggcccaccagtgggtaggcgcgggccaccgtggggatgggccgcatctgctgccatttccgcgcgtagctcgccaccctctgcagcaggctcaggaccagactggcgccggccagggaaasggcactcgccgcgccccacagcagcagcttctgccacacgagccccagccagagccccgccatcgccccggctggcggccgcggggtgcactccgggaaagtgcgggcccgcgggggcgtggtgcgaggcggtgccggccgcacaccgcccacttccccgcgcggacctggcgcgctccccgctgcggggtcgcccggtccccggaacgacgtttcccgcccgggcggcggccagagagggcgccacggggctgttcctgcgcccggcccggcctacgcagcaccgcggcctccacgccccagccgaaagcg

SEQ ID NO: 201003 - DNA, 609 bp, Homo sapiens
gactagaactgggagtgcattctccacagggtgacaggctcctctctcctgcggccagcgccacaagcagcgggttcctggctgatcggagggtgggaacggggctgcggaccccgttgcgctccaggaggagcgccggcccttacctcgcccgtccggcttcatcagcagcgcgtggcccaccagtgggtaggcgcgggccaccgtggggatgggccgcatctgctgccatttccgcgcgtagctcgccaccctctgcagcaggctcaggaccagactggcgccggccagggaaagggcactcgccgcgccccacagcagcagcttctgccacacgagccccagccagagccccgccatcgccccggctggcggccgcggggtgcactccgggaaagtgcgggcccgcgggggcgtggtgcgaggcggtgccggccgcacaccgcccacttccccgcgcggacctggcgcgctccccgctgcggggtcgcccggtccccggaacracgtttcccgcccgggcggcggccagagagggcgccacggggctgttcctgcgcccggcccggcctacgcagcaccgcggcctccacgccccagccgaaagcg

SEQ ID NO: 201004 - DNA, 638 bp, Homo sapiens
aactctacttacacacatcaaatcataaagggtagcaggaagttgttatgaaattttgaatcacaagtacaaggatcaaataaagtatacaacactcaaacgtccagtttcatgaacaaaccatcacttccatgtaaccacaacccagatcatgcgatacaacgtgaaatcatacagcatgcactytttcgtatctggcttcctaaactcaaccctgagtttagatgaatttgaaaaacaagttagataacttataccaagaaatatcaagacttataacattattaattaaaatcatgtaattggcacacaaatggaaaacagcaataaaacagatcatatgtatgtgtacaatcacctgatttatgacaatctatattgactatattgccatgtgtaatattttcccttatttttcacagctgtttattattccattgttggaatatattataatttattattcattttactgccaatggatgtttcagttgtttccagttttcctatgttgtgaagaattttgtatgatcattgttgtagatgtcttttgatacacatatgtacatatttctccttcctgtaaatatgcccaggaatggaattgctaggtcataaggcatgcatacatttagact

SEQ ID NO: 201005 - DNA, 459 bp, Homo sapiens
agcaacggcacagaagtggaaaggtttctggcrtggagggcaatagtggagagtgagagaccgcgagaactcatctctcattcactgggagatgaggatggaaaagcagttttgtgtgcagattgtgctgggactggaatttcatattaagaggcaagcttttattttgcagaatggacaccatctaacacttttggcaacatttttgtcatcattttatctttttaacactgattttagttttgcttagattgccttgagtggataaatttggtcttccaaaagctcacaagttcttttggaataggcttcaatcttttgtatcccctacaaagtttagctcattaccagtttcacaaagctttgtggtcctgcagaatgagtgacacagtcatcattactagaagctttgctctgtgattcttgtgttttctgctcattgtgcctcactttttcttc

SEQ ID NO: 201006 - DNA, 328 bp, Homo sapiens
aattcatgaactgtaattgcattaaatcacgaggaaaaactgtgtatttcactaaagatccccttgaaagatgaatgtgattcatatcacacaccgtacaatatctcacttcaaaagttctcttgattcygcttccagcaagggtggactggattgtttcagaccaaccaccagctgagagcaactagagaagctgaacactaggttaaagaccacgcaggaattagggtgaccagcaaatagagcagcaccggggactgaaacccagttttagatcttctcaattgctgattggattaaggtgacctgggactgagagagcccccag

SEQ ID NO: 201007 - DNA, 590 bp, Homo sapiens
gaattcatgaactgtaattgcattaaatcacgaggaaaaactgtgtatttcactaaagatccccttgaaagatgaatgtgattcatatcacacaccgtacaatatctcacttcaaaagttctcttgattccgcttccagcaagggtggactggattgtttcagaccaaccaccagctgagagcaactagagaagctgaacactaggttaaagaccacgcaggaattagggtgaccwgcaaatagagcagcaccggggactgaaacccagttttagatcttctcaattgctgattggattaaggtgacctgggactgagagagcccccagcacagtctgctataccaagcaaatacaatcctctttgaacttaagctgcaagcaacgactctgtattgtttaccagacaccagttaaatagaagaagaaagaaatgttaaaaataaatgtacacgtcaagtgtttgcatgtgcaaatattccaactaaaaggaagctgatgtatcttgtattagaccaagtagactcccaagtaaataggaagcattggtagaagtaccaagggccagttcatgaagattaaaggccactc

SEQ ID NO: 201008 - DNA, 561 bp, Homo sapiens
attgcattaaatcacgaggaaaaactgtgtatttcactaaagatccccttgaaagatgaatgtgattcatatcacacaccgtacaatatctcacttcaaaagttctcttgattccgcttccagcaagggtggactggattgtttcagaccaaccaccagctgagagcaactagagaagctgaacactaggttaaagaccacgcaggaattagggtgaccagcaaatagagcagcaccggggactgaaacccagttttagatcttctcaattgctgattggattaaggtgacctgggactgagagagcccccagcacagtctgctataccaagcaaatacaatcctctttgaacttaagctgcaagcaacgactctgtattgtttaccagacaccagttaaatagaagaagaaagaaatgttaaaaataaatgtacaygtcaagtgtttgcatgtgcaaatattccaactaaaaggaagctgatgtatcttgtattagaccaagtagactcccaagtaaataggaagcattggtagaagtaccaagggccagttcatgaaga

SEQ ID NO: 201009 - DNA, 544 bp, Homo sapiens
ttgtaactcatttcagcattaattcaaaagtccacagtccaaagtctcattcaagacaaggcaagtcccttccacctatgagcctgtaaaatcaaaagcaagttagttacttcctagatacaaaggggttcaggcattgggtaaatacagcctttccaaatgggagaaattagccaaaataaaggggctacaggccccatgcaagtccaaaatccagcagggcactcagatctttaagctccaaaatgacctcctttgastctatggctcacatccaggtcacggtaacgtaagaggtaggttcccatggccttgggcagcttcaccctgtggctcttcaggatacagcctccctcctggctctgtggctcttcaggatacagcctccctcctggctcctttcatgggctggtgttgaatgtctgtggtttttccaggtgcacagtgcaagctgtcagtggatctaccattctgaggtctggaggacggtggccctcttttcacagctccactaggcagtgccccagtagggactctgtgtggg

SEQ ID NO: 201010 - DNA, 614 bp, Homo sapiens
cttcttccttggcaatactcattgtttcagtgactggctttctgtgtggcaagcagcaggacctagactgaacccctgtgctttggtagcaacaggaattgcactaaatctgtagcttgctttgattaagatggtcattttaacaatattgactgttccaatctgaacatggaatttttcttttttggtgggtgtgtccttttcaatttttctcatcggtgttttgtagttttcattgtagaggtcttttatctccttggttaaatttatttctaggtactttatttttttgtagctattaaaaatgggattgcttttttgatttcttcagctagtttgttattggtatatagacttgctattaattcttatatgttgattttatattctgcaactttaccaaattcaytgatcagttccaagaattctgtggtgaagtctttaggtttttctctatataagattatgtcatctgcaaagagggacaatttgattttctcttttccaattttgctgtattgtattgctttctcttgcttaactgccctggctaggaattccagtacagtgttgaataagagtagtgaaaatgggcgttcttgtctggttccagc

SEQ ID NO: 201011 - DNA, 618 bp, Homo sapiens
cactcagtatacaacttttcccttttttagcctaggagtcttgtgtcttttgccaacatccatgaaacaatgataatgtaactcattagattgcaagtagagtaaacctcagaccctttacaattaagtgtttctccacagtttacatgaaattgaaaaatgaaggcaccaagaatttgtttttttctccttacacasacatctgggcttttacaattgtagggaccagccccacagggtcggagggtttttctccccgtgtgcggagatgagacattgtagaaataaagacacaagacaaagagataaaagaaaagacagctgggcctgggggaccactaccaccaagatgcggagaccggtagtggccctgaatgcctggctgcgctgttatttattggatacaaggcaaaaggggcagggtaaggagtgtgagtcatctctaatgattgacaaggtcacatgagtcatgtgtccactggacagggggcccttccctgtttggcagccgaggtggagagacagagagagagagaggacacagcctacgccattatttcttcatatcagaggtttttagtactttcactaattttgctacggctatctagaaggcag

SEQ ID NO: 201012 - DNA, 589 bp, Homo sapiens
aaccaaaggttgctttctttgccttcttggttttggggaattttgaccagcttctttaccacaacctcttttaccagtaggatctttgtgacctgtaccttgtgaaagcagtcctgccaaactcttatctcatccccacctcagagattaaatacacccccttaatcttaagggattggaaaaggacagaggtttcaccatctataacgatttcattctgaacagggactgtcacgcctatctgctctggagatacagaaatctctcactacctgatgtaataatttatagagacttggtctttcccacagtggcacaggctagaacccttgggaaaatacccttgggcatatttttctggaagagttttagtcaggaaaacataaactttaactatttgaacccccttgaacataacaaataattatttaacaggaaaatccaataacacctagtgayaactaaatgtgtaagtccagccgaacaatgcttataattaagagtagatgccatttggaatctagtaaatacactggaaaaccagtcttctgatttattaaacacaaatccaaagcatattgtcaatcca

SEQ ID NO: 201013 - DNA, 542 bp, Homo sapiens
atcggttcacccttcaaacctttcaaatatttttttcctaggtgtgtcaaggtgtatcatgaaaaaaaagtgacctttgaggccaccaaacaagtttcctgagtgaggctgtttgcctggttgggggactgatctggatccattttcaactctatctcctctcagtgtttgagcctgggcaatgacttaaggcagtggtcttcctcacktgtgaccttaggagaaataagtcacctctggaggttcataacagcctgacttctttttaattgtccagcctcagaaagaacaagcaatggtcacaattattctattattgatctatatctatgtggttccttctccagctttgctctggaaatgtgtcactcataaaacctcataaatgtgtaatctgttattgcgctgggaacacactgtgcttgacattgtctggtagttttgctccggcagcaaatccttacctgtatgattctgcagccatctcaattcttgcctcctcagaagaaataatttgacggaggggcataaggcagaaggag

SEQ ID NO: 201014 - DNA, 574 bp, Homo sapiens
aagctttaggacaagagtgaaagaaagtaaagtacacttggaagagggccaagtgggtgacttgagagattcagtgtgaggtttgaccttctgactagcggttttatacattggcgtacttccakggtcttgccttacttctcccgattcttcccttgggatgggctgtctgcatgcacagtggcctgctagcacttgggagttgagcatgtacagtgtgtttactggagttgcacacatgctcacttgaggcgttcttcttttaccagtcaaatgttcctggaaggtcatttgctgattaaattctgccattttaatgtgcatgcttgagcccgctcacccaacttctgagatcttattgggaagctgctgatcactagtttcaggtgttttctatctatggggagactgccctcccctggtactggctgtgaccaattattgttttagagactcagttaacaactgcctgaccatcatctgctggtcgcctggtgttcccgctgtgtatgtgtgaggggagccttctcttgccctgttcatgtctgactagctacctactataacagtttaa

SEQ ID NO: 201015 - DNA, 574 bp, Homo sapiens
aagctttaggacaagagtgaaagaaagtaaagtacacttggaagagggccaagtgggtgacttgagagattcagtgtgaggtttgaccttctgactagcggttttatacattggcgtacttccagggtcttgccttacttctcccgattcttcccttgggatgggctgtctgcatgcacagtggcctgctagcacttgggagttgagcatgtacagtgtgtttactggagytgcacacatgctcacttgaggcgttcttcttttaccagtcaaatgttcctggaaggtcatttgctgattaaattctgccattttaatgtgcatgcttgagcccgctcacccaacttctgagatcttattgggaagctgctgatcactagtttcaggtgttttctatctatggggagactgccctcccctggtactggctgtgaccaattattgttttagagactcagttaacaactgcctgaccatcatctgctggtcgcctggtgttcccgctgtgtatgtgtgaggggagccttctcttgccctgttcatgtctgactagctacctactataacagtttaa

SEQ ID NO: 201016 - DNA, 536 bp, Homo sapiens
ggagccttctcttgccctgttcatgtctgactagctacctactataacagtttaaccatcttgatttgaaaaaaagaagaaaagcttggtaaaataagttacctgtattgaacaattgtatcactacaaattatcatgtctgtctagcacattgtaatggaataaatgccaaaagcactgttaagtcttctgaagaactctaaaataatattttttaagtcattgcacatagagtcagccttagactaacattagcctgctataatatagattcagtgagcacygagcattgctctgattctcatctgcattctctctttctaattggtgattatgacatctctttatgttagttacataaacatccttccattagggccagtgatttttctcttgaaaagatgttggaacaaggtgtagaacaaactagtttgaccatctccttctgccttgttctaaattcaacagctctaaatgtgatttcttcttcttgaggaagtccatgctttatcatgctgtttctggtcttctgagat

SEQ ID NO: 201017 - DNA, 600 bp, Homo sapiens
tggtttgattgtctataaccaaaaacttgaccttttataagaaagacaggaatgtaaaatgaaataaagtatgaaatatatatttactttaaaaccaaatataatgtagcaaaatatattataagcacaattttgtaatgagatattgcagcagaaagttctttggaaattaacacattatacagcttaccaaagaaacatgttattattgatagaatcttttcacttctaacctaatttttattctgatatgaaagagaaaaatagattttcaaaggcctaattaaatcagtgcatgaaaaaaatacactggaaaagaaacccacacatttttgcttcacaaagaattaaggtaataaaacataccactgcaggtccagattttgcattttataacacaggtttccaacttataagtgggctatattataaaattttattgccaagttggtatttggaatgatttycccataaaaataatgatctagatgatgggattacttcataaaataagccctgtccacacacacacacacacacacaacaaaccaaaaaaaccacactctttctaattccaaaggtgaggcaacatagcagtac

SEQ ID NO: 201018 - DNA, 524 bp, Homo sapiens
ggtggtcaaattctgtgtgttttgatgtgaaaaaagaaaatccctctctccacattaatgcatatcctgtcccctgccaagcctactataatcatcccttgtattttcagccctcactgcctctctgttggatggtccttctctccttartttttcatgttctatccagttggaaaagttgcacaatggctcacacgctcatcagcggtctgtggctaattttggttagctgttagtcgggggtcaaacagcaagaggtttggcaagtgaagggattgggttagtttggttttgtccttctcggcctgaacccacaactcatgattcacaacagtgcttctctgttttcaatcttctgcttgcaactaaaatgggattctcatcagtcttggttagactagatatgcccaggttgaggttgcatgtgactttttaatctctcagagcagatgtgagagagagttagagaaaaaaaaaggcatgtgtgaggaggggggcattcaacttctattacgtgtttactg

SEQ ID NO: 201019 - DNA, 592 bp, Homo sapiens
acctctacacagaaaattctaaaatgttatttggagaaatttttaaagcccataaataaatggagggatatactatgttcatggttttaaagattctatactgtgaagacgtcaattctgccaaactcgcctacagattccacacaatctcaatgaaaaccatagcagtttttgtttattcattttgtaggaactggaaacagataaactgattttaaaatctacatggaaatgcaaaagaccaataatagacttgtcccaccggatactgaaacttattatacagcaacagtaattaagaaagtgtcattttggcaaaagagcagtgtaatggaatagaaagcccagaaactcaggcacatatatgttcaccagacggaaaccaacgytggtaggttcctggagcaatatcctcactctctgtgtaatcccagagaagttcttcccctttttggacctcaatttcttcatctataacatgaggcagatagactacgtcacccaaattctgatatgaaatgagaataaacagattaataaatccttccagactgcaggtctccccaattctcatttctactcaaaagcaaga

SEQ ID NO: 201020 - DNA, 592 bp, Homo sapiens
acctctacacagaaaattctaaaatgttatttggagaaatttttaaagcccataaataaatggagggatatactatgttcatggttttaaagattctatactgtgaagacgtcaattctgccaaactcgcctacagattccacacaatctcaatgaaaaccatagcagtttttgtttattcattttgtaggaactggaaacagataaactgattttaaaatctacatggaaatgcaaaagaccaataatagacttgtcccaccggatactgaaacttattatacagcaacagtaattaagaaagtgtcattttggcaaaagagcagtgtaatggaatagaaagcccagaaactcaggcacatatatgttcaccagacggaaaccaacgctggtaggttcctggagcaatatcctcactctctgtgtaatcccagagaagttcttcccctttttggacctcaatttcttcatctataacatgaggcagatagactacgtcacccaaattctgatwtgaaatgagaataaacagattaataaatccttccagactgcaggtctccccaattctcatttctactcaaaagcaaga

SEQ ID NO: 201021 - DNA, 611 bp, Homo sapiens
ttggctgtgttcctacccaaatcttatcttgaattgtagctcccrtaattcccacgtgttatgggagagacctggtggtagataattgaatcaaaggggcaggtcttttctgtgctgttgctgtgatagtaagtctcaaaggatctgatggttttataaagagaagttcccctgcacaccctctcttgcctgccaccatgaagacataactttgctcctcatttaccttctgccatgtttgtgaggcctttccagccatgtggaactgttagtcaactaaacttctttcctttataaattatctagtcttgagtatgtctttattagcagtgtctttattataacagactaagacaataagagaaagagaggttatacgatgtcttgaacaaagaagaaatcacatatgtgtaaagcaatcaagagcagaatcatggcagagctttgaaagcttgagtataattttctcaagtggagatgggattgagacttctggtttccaataatagcaaactaggttatttggagtcacactcccatagaatacaactaaaaatggtagataaaatattttctggaaatattttaaaagtcaaagagctgaacaagta

SEQ ID NO: 201022 - DNA, 570 bp, Homo sapiens
aactctgggaagtcctataggtggagagactggactcttgctgaaggtcataaaactactaaggtacacatctaagacctttttaactttcagcctgaaaaatttctttcaaagtaaaaactgcgttgtcactttgtgatgccaaagaacccttccatctatgttaccccatatcttgataaactggtaaaaaaaaaaaaaaaaagtggaatgcatgaactgtgtgcaacagtcagtcaacttggtggcatccttaaggtgccctgctcggtgaaatggcggcggtgggggatgcacatctacttctattaacactgggagttcaactgggctctctgcatcttcccaggtgctgcttcctgctgctttttacttctgctagactctgaccactctgrttgtttgggtggggtatatcccatcacatggataggccatgaaaaaacctcaacccccaaggcctggtactcaaggagaaatactagacgaacattagatggtttaaagctaacagggactgaaaccagttaaaagagggaatcagacataagttgcaaactgatagaacaa

SEQ ID NO: 201023 - DNA, 488 bp, Homo sapiens
actgtttccttaagatctgcacattttactgcacgtaagtcatgccttaaataaaatctgataccttaaataaagtgagagacaggaagaaattggcyattggaagcacaaaacaaaattgaaagtttagaaatggacccattagatatataataatttagtataggatgaaagaagaatttttaaaggtttttttagaaacagagtctcactatgttgcccaggctagagtacagaggttattcccaggcacaataatggtacactgcagcctcgaactcttgggctcaagccatcctcctgcctcagcctccgagtagctgggactataggcgtgcgccaccatgtctagcagaaattttaaatcagtgagggcaaaaagggatttttaaataacaatactgggatcaggaaagataaaagctggagtcatttcattcctaacaccaaaattaggtcagatgaataaaagattcagatagaaaaag

SEQ ID NO: 201024 - DNA, 488 bp, Homo sapiens
actgtttccttaagatctgcacattttactgcacgtaagtcatgccttaaataaaatctgataccttaaataaagtgagagacaggaagaaattggctattggaagcacaaaacaaaaytgaaagtttagaaatggacccattagatatataataatttagtataggatgaaagaagaatttttaaaggtttttttagaaacagagtctcactatgttgcccaggctagagtacagaggttattcccaggcacaataatggtacactgcagcctcgaactcttgggctcaagccatcctcctgcctcagcctccgagtagctgggactataggcgtgcgccaccatgtctagcagaaattttaaatcagtgagggcaaaaagggatttttaaataacaatactgggatcaggaaagataaaagctggagtcatttcattcctaacaccaaaattaggtcagatgaataaaagattcagatagaaaaag

SEQ ID NO: 201025 - DNA, 569 bp, Homo sapiens
ccggtctgctaagtagcgggtatttttccttgacactgacrctaccactagaccacagtccacttgaaaatgggcgtcttcccagacactggcattaccgttagaccaaggagccctttggtggccctgtccgggcataacagaaggcttgcactcatcttctggtcacttctcactatgtcccctcagctcctatctctgtatggcctggtttttcctaggttatgattgtagagtgaggattattataatattggaataaagaataattgctacaagctaatgattaatgatattcatatataatcatatctaagatctatatctagtataactattcttattattttgtatattttattatactggaacagctcatgccctcggtctcttgcctcggcacctggatggcttgccgcccacagactccttgctacttatgcaaatttctgcagccggcttgaatttctccccagaaaatggattttccttttctatcacatagtcaggctgcaaattttccaaacttttatgctctgcttcccttataaaactgaatggctttaaca

SEQ ID NO: 201026 - DNA, 569 bp, Homo sapiens
ccggtctgctaagtagcgggtatttttccttgacactgacgctaccactagaccacagtccacttgaaaatgggcrtcttcccagacactggcattaccgttagaccaaggagccctttggtggccctgtccgggcataacagaaggcttgcactcatcttctggtcacttctcactatgtcccctcagctcctatctctgtatggcctggtttttcctaggttatgattgtagagtgaggattattataatattggaataaagaataattgctacaagctaatgattaatgatattcatatataatcatatctaagatctatatctagtataactattcttattattttgtatattttattatactggaacagctcatgccctcggtctcttgcctcggcacctggatggcttgccgcccacagactccttgctacttatgcaaatttctgcagccggcttgaatttctccccagaaaatggattttccttttctatcacatagtcaggctgcaaattttccaaacttttatgctctgcttcccttataaaactgaatggctttaaca

SEQ ID NO: 201027 - DNA, 569 bp, Homo sapiens
ccggtctgctaagtagcgggtatttttccttgacactgacgctaccactagaccacagtccacttgaaaatgggcgtcttcccagacactggcattaccgttagaccaaggagccctttggtggccctgtccgggcataacagaaggcttgcactcatcttctggtcacttctcactatgtcccctcagctcctatctctgtatggcctggtttttcctaggttatgattgtagagtgaggattattataatattggaataaagaataattgctacaagctaatgattaatgatattcatatataatcatatctaagatctatatctagtataactattcttattattttrtatattttattatactggaacagctcatgccctcggtctcttgcctcggcacctggatggcttgccgcccacagactccttgctacttatgcaaatttctgcagccggcttgaatttctccccagaaaatggattttccttttctatcacatagtcaggctgcaaattttccaaacttttatgctctgcttcccttataaaactgaatggctttaaca

SEQ ID NO: 201028 - DNA, 543 bp, Homo sapiens
ttatcatctactttctagtaataggaaatctttcatgtctgcataaatgstgcatattccttcttagctttaaggtggctatttagtaggtttccaatctactgtcaataataaaacctggtttggatgatgtactatgataaaactttcttaactagagaacatatgactaagactaactttttcttgagaactttctagttttactatttactatttatttttaaagatcttcacttattcaacacatattgaattatattatctatacatacatacacacatctctctttaataataatcataaggaatagaagttatatatatatccacatatacatatatgactaagaaagtactaatataggactatcagtttcccatttacctacagaaatcagagtatagactttaatatttatattggctatattcctaaactgactttgtatctggctgcatgctatgtataaaaagtatttcaccagaattaagtacacgtaaaatattagatcactgtctaaaatgtattcctagactcta

SEQ ID NO: 201029 - DNA, 543 bp, Homo sapiens
ttatcatctactttctagtaataggaaatctttcatgtctgcataaatggtgcatattccttcttagctttaaggtggctatttagtaggtttccaatctactgtcaataataaaacctggtttggatgatgtactatgataaaactttcttaactagagaacatatgactaagactaactttttcttgagaactttctagttttactrtttactatttatttttaaagatcttcacttattcaacacatattgaattatattatctatacatacatacacacatctctctttaataataatcataaggaatagaagttatatatatatccacatatacatatatgactaagaaagtactaatataggactatcagtttcccatttacctacagaaatcagagtatagactttaatatttatattggctatattcctaaactgactttgtatctggctgcatgctatgtataaaaagtatttcaccagaattaagtacacgtaaaatattagatcactgtctaaaatgtattcctagactcta

SEQ ID NO: 201030 - DNA, 543 bp, Homo sapiens
ttatcatctactttctagtaataggaaatctttcatgtctgcataaatggtgcatattccttcttagctttaaggtggctatttagtaggtttccaatctactgtcaataataaaacctggtttggatgatgtactatgataaaactttcttaactagagaacatatgactaagactaactttttcttgagaactttctagttttactatttactatttatttttaaagatcttcacttattcaacacatattgaattatattatctatacatacatacacacatctctctttaataataatcatamggaatagaagttatatatatatccacatatacatatatgactaagaaagtactaatataggactatcagtttcccatttacctacagaaatcagagtatagactttaatatttatattggctatattcctaaactgactttgtatctggctgcatgctatgtataaaaagtatttcaccagaattaagtacacgtaaaatattagatcactgtctaaaatgtattcctagactcta

SEQ ID NO: 201031 - DNA, 543 bp, Homo sapiens
ttatcatctactttctagtaataggaaatctttcatgtctgcataaatggtgcatattccttcttagctttaaggtggctatttagtaggtttccaatctactgtcaataataaaacctggtttggatgatgtactatgataaaactttcttaactagagaacatatgactaagactaactttttcttgagaactttctagttttactatttactatttatttttaaagatcttcacttattcaacacatattgaattatattatctatacatacatacacacatctctctttaataataatcataaggaatagaagttatatatatatccacatatacatatatgactaagaaagtactaatataggactatcagtttcccatttacctacagaaatcagagtatagactttaatayttatattggctatattcctaaactgactttgtatctggctgcatgctatgtataaaaagtatttcaccagaattaagtacacgtaaaatattagatcactgtctaaaatgtattcctagactcta

SEQ ID NO: 201032 - DNA, 484 bp, Homo sapiens
aataggctcattccttgatatatactttctgatttaagcctcacagtaacccaacaggttgttgggarttttttgttttgtttactttttggtttggttttgtttatcagatatcgaagccaagattcagcaaacagtccaatgtttcactgtaactaagtagtgagagacggggttcaaatttaggtctgtctgaagagggagaaaatactttcctgtggtatcaggaaagacttcatagattttctgatcttttttcttttgtacccgtgattttgagccattttcgagtcatccattccttctataatctgataaaagtatttatcctttctcacaaaaacacacatatacacatagaaacaaacaccttccaacagtttcagagtgtccacagataccaagaaccacttttcagtacaggtcatacctgctaataaatgatatttcagaagttaaatcacaaaaaaactctacagacctt

SEQ ID NO: 201033 - DNA, 581 bp, Homo sapiens
gtggtgaaatcctacaatagtaagtcattagagctgaggggatctttatagatcttattaaaatcttcttaccagaggccctggggatttgaacaatagatacagtctctctacccctgtctatacttatttaccgtctcaaaaacttttaaattaataagacttgatttcccctttatcttcccttctgaaggccaaatgcctcttgcccctttcagaaattgaggagtcatttctgtgtatgctgcacatgtgacactgtgtktgtgcgtgtgtggtgtatgtgggtatgtgtctgtgggggaagggtatgtgttcatgtaacaagttggataaagcattggtatttcttatatagttggaaattcctattttatgccatgagcttgtcatatgagcaggcctcaaactaaaaggtcaaatagacaagttcctcttcagttgttttgcttctgggaaacccagctccatcccttgggtctgagaggaactgaaaaagcaaagtcccacaaagctgtgagtgtttcaatattatccctattggagctgtggcattaaagaagatgtatcagaaggtatga

SEQ ID NO: 201034 - DNA, 581 bp, Homo sapiens
gtggtgaaatcctacaatagtaagtcattagagctgaggggatctttatagatcttattaaaatcttcttaccagaggccctggggatttgaacaatagatacagtctctctacccctgtctatacttatttaccgtctcaaaaacttttaaattaataagacttgatttcccctttatcttcccttctgaaggccaaatgcctcttgcccctttcagaaattgaggagtcatttctgtgtatgctgcacatgtgacactgtgtgtgtgcgtgtgtggtgtatgtgggtatgtgtctgtgggggaagggtatgtgttcatgtaacaagttggataaagcattggtatttcttatatagttggaaattcmtattttatgccatgagcttgtcatatgagcaggcctcaaactaaaaggtcaaatagacaagttcctcttcagttgttttgcttctgggaaacccagctccatcccttgggtctgagaggaactgaaaaagcaaagtcccacaaagctgtgagtgtttcaatattatccctattggagctgtggcattaaagaagatgtatcagaaggtatga

SEQ ID NO: 201035 - DNA, 432 bp, Homo sapiens
tggagcccactcacctaactcctgagatcttatcaggaagccgcccatcaccagtttctagtttctggtgtttctgtctactgggagactgcctttcgctggtaccagctgtgaccaattattactttagcgagacagcttaacaactatctgatcatcaactgatggttgyctaacattccctgtgggggtgggaggggccctctcctgccctgctcacatctactatctactgtaacaccaccagttgaaaatctactcttttcttttttcttttttaatagagacaaagtcttgctatgttagccagggtgatcttaaactcctggcctcaggtgatcctcccgccttggcctcccaaagtgctgaaatgacaggtgtgagccaccatgcccagccaaaaatctaccctatttctaattgttctttgca

SEQ ID NO: 201036 - DNA, 523 bp, Homo sapiens
acaaatttctgttctttataaattataggtattttgttgcagtagcacaaatggactaagttggtgcacctgtgtgcataatgttggggtatgtgtaatgcataagaaaagcagctattttggatattttacttttcagttatttagacatcacagtcatagacacaactgaacttgattgagttcattggttaaccacattcttggaaggatgccgttgaatatcaaggaaagaatttgtcaacggtttaaatgtttactaatcacagatctctggatttttgtgtaggtaagttttgcttcatggcttcagtaagtaatttgggaagaaagaaattctrttatttgaattacctggctaccccttttctccactttatttagagctgtataacatttggagatgcttaaaattttatacaagtatgagtagaacacacaagaattcctaaaaagccttctgtaagcctattactgttttaggtagcttactctgtgttctgtttcattttcaaattaggat

SEQ ID NO: 201037 - DNA, 392 bp, Homo sapiens
tacatgtgtaaatatggacttatttacatgcacaagaatcaaattgaataaatttatttcatcttggtatttctcatccgatgaagacatccatgttcatgaaaccaccacacagggttggcaagaattgcactcagggttctggacggaaatatagttataattaagcattcatcagactgcactctggctcacttccttgttgctaaaagtcacgtaccactggatcctgaccatctgcaaccctgttgtttttatagctaggatctctgacattagggtcataagactgtaagaattgatttgtatccccattgttcctatasacaggatctctgacattagaatcataaggcttttgtttaaggattgcttaagatgtttttcagatc

SEQ ID NO: 201038 - DNA, 385 bp, Homo sapiens
cagctgtctctcaaacccttgtcaagataaagaatactaccgtaactcccagaaagttatctgctttccaggtaatccctcctctcctgcccccattggtaacctctgttctgagattcttttccgtcataaattagtcttacctcttcctgaacttcatattaatggaaccataacagtatatggtcttttgtgtcgtgtctggtttcttttgctcagaatatgagatccatgttacaattatcagtaatttyttcctttttattactaagtagtagtttattgtgtgaccaacccatgctttgtctattgtcttattaatgaacccctgagtttttcccagtttggggctatgatgaataaatttgctatgaatactttcata

SEQ ID NO: 201039 - DNA, 385 bp, Homo sapiens
cagctgtctctcaaacccttgtcaagataaagaatactaccgtaactcccagaaagttatctgctttccaggtaatccctcctctcctgcccccattggtaacctctgttctgagattcttttccgtcataaattagtcttacctcttcctgaacttcatattaatggaaccataacagtatatggtcttttgtgtcgtgtctggtttcttttgctcagaatatgagatccatgttacaattatcagtaattttttcctttttattactaagtagtagtytattgtgtgaccaacccatgctttgtctattgtcttattaatgaacccctgagtttttcccagtttggggctatgatgaataaatttgctatgaatactttcata

SEQ ID NO: 201040 - DNA, 385 bp, Homo sapiens
cagctgtctctcaaacccttgtcaagataaagaatactaccgtaactcccagaaagttatctgctttccaggtaatccctcctctcctgcccccattggtaacctctgttctgagattcttttccgtcataaattagtcttacctcttcctgaacttcatattaatggaaccataacagtatatggtcttttgtgtcgtgtctggtttcttttgctcagaatatgagatccatgttacaattatcagtaattttttcctttttattactaagtagtagtttattgtgtgamcaacccatgctttgtctattgtcttattaatgaacccctgagtttttcccagtttggggctatgatgaataaatttgctatgaatactttcata

SEQ ID NO: 201041 - DNA, 385 bp, Homo sapiens
cagctgtctctcaaacccttgtcaagataaagaatactaccgtaactcccagaaagttatctgctttccaggtaatccctcctctcctgcccccattggtaacctctgttctgagattcttttccgtcataaattagtcttacctcttcctgaacttcatattaatggaaccataacagtatatggtcttttgtgtcgtgtctggtttcttttgctcagaatatgagatccatgttacaattatcagtaattttttcctttttattactaagtagtagtttattgtgtgaccaamccatgctttgtctattgtcttattaatgaacccctgagtttttcccagtttggggctatgatgaataaatttgctatgaatactttcata

SEQ ID NO: 201042 - DNA, 448 bp, Homo sapiens
atcttggaaggttccaaaggcattaagtcaagtccaggtttgtcagtttctccaaaagatgtcaatgaaaactgcatacgtcttgcagctgaatatctaaagtatcaattgcctgaaaaatactgatgagcaaaatccactggtggctacaaaggtgattataaagcagtagtgacctagtcgtggggagatagcacactgagttaaggaaagcttgtgggtgttctggccagactgacctaggttcaaatccttgctgtgccctgtccagggaatgttagctgctgaagctctctgggctttatcagtaacaaggggtgattttgccctttgaagtttgctagaagattttctgacagagtgtccttttcagcgagtgacagaaatgcagtaggtrgtctctttctcctttcctagagatgaaaagaaacaggagctgatgagaagt

SEQ ID NO: 201043 - DNA, 575 bp, Homo sapiens
tcttttttctgtttttccctgacttttttcaaattgattatttttatgatccaactttatctcttttgttgtgttatttgctgtaactctttgttattgtgttattttcatatttcttaggattaacagaacacatctttaacttattatagcctaccttcaaatgatattataccagttcgcgtatagcataagaaacttacaacaggatrcttccatttctccccttctgacctttatattattgttgtcattcattttacttacatacatgttaacatcacgctacattgttattacttttgtttaaataattgattacattttatggtcatatccacttttctttctttcttcctgaggtcctgaagtcttttgttattatttcctttctgttctgagcacttgctttagtcattccttaagggcaagtcttctggtgacatattcttttagtatcctgtcatctgaaaatgactttacttccccttcatttctaaggaatagtttgacttctggtttgcaatccagtacgtaaggagcttggaagttgtcactacatcctaacaacaaat

SEQ ID NO: 201044 - DNA, 575 bp, Homo sapiens
tcttttttctgtttttccctgacttttttcaaattgattatttttatgatccaactttatctcttttgttgtgttatttgctgtaactctttgttattgtgttattttcatatttcttaggattaacagaacacatctttaacttattatagcctaccttcaaatgatattataccagttcgcgtatagcataagaaacttacaacaggatacttccatttctccccttctgacytttatattattgttgtcattcattttacttacatacatgttaacatcacgctacattgttattacttttgtttaaataattgattacattttatggtcatatccacttttctttctttcttcctgaggtcctgaagtcttttgttattatttcctttctgttctgagcacttgctttagtcattccttaagggcaagtcttctggtgacatattcttttagtatcctgtcatctgaaaatgactttacttccccttcatttctaaggaatagtttgacttctggtttgcaatccagtacgtaaggagcttggaagttgtcactacatcctaacaacaaat

SEQ ID NO: 201045 - DNA, 541 bp, Homo sapiens
acaaactctgtagggatgctcattaaagaagacgtttaaaaggatatatagagggtcagaaaactgaacgagaattaggcctgtctcctctttgttagacattgtcatttctgcttcagagtattgtttttatgctgtaatcagactcagtttttgctgttatttcttgatccccagcacactttaatacagaggatctattagggctccctactttaggaaccagataaaagcatgtatctaatcttgtgggtatgtgcatgtatatttttccaagaaagtgtccacagatttcaagagtatccaagggttctaagctctcttttttctcttaaaatataagaaacattgcggtagtggaaaggactttttgattctataacattaagctcaaatacaagttttaccaattactacctctgcaactttggacaaatgaagcractctcttaattatggtttccttgagttcctgagcgtgtcaagtgggctaaaagcggcaaagtatgcaaagccctggcccacagtggatgcataatac

SEQ ID NO: 201046 - DNA, 539 bp, Homo sapiens
ttgacatttttttgaataataaagtatctgcccataacacctttttcatgatagtcatcttataggttgctgttttggacattttttttctcttcagtaggagttgtcttctgccagctttcttttttgagacggagtctcgcactgtcaccgaggctggagtacaatggcgcaatctcggctcactgcaacctccgcctcccagrtgcaactgattctcctgcctcagcctctcatgtagctgggattacaggcgcctgctaccacactcggctaattttttgtatttttagtagagacagggtttcactgcgttggccaggctggtcttgaactcctgacctggtgatccggccgcctgggcctcccaaagtgctgggactacaggcgtgagccactgcgcctggcctctgccaactttcaataagagcacaagagctcaaacactggtcaccagctattgctgcctcttactgtcctaatgctgaaactcacaagggctaaattgtgtttaacgttcttggccttccttatagcag

SEQ ID NO: 201047 - DNA, 539 bp, Homo sapiens
ttgacatttttttgaataataaagtatctgcccataacacctttttcatgatagtcatcttataggttgctgttttggacattttttttctcttcagtaggagttgtcttctgccagctttcttttttgagacggagtctcgcactgtcaccgaggctggagtacaatggcgcaatctcggctcactgcaacctccgcctcccagatgcaactgattctcctgcctcagcctctcatgtagctgggattacaggcgcctgcyaccacactcggctaattttttgtatttttagtagagacagggtttcactgcgttggccaggctggtcttgaactcctgacctggtgatccggccgcctgggcctcccaaagtgctgggactacaggcgtgagccactgcgcctggcctctgccaactttcaataagagcacaagagctcaaacactggtcaccagctattgctgcctcttactgtcctaatgctgaaactcacaagggctaaattgtgtttaacgttcttggccttccttatagcag

SEQ ID NO: 201048 - DNA, 551 bp, Homo sapiens
tactagatacagaaactctaggactaggcagaatgttgcctagttctacagtatctgtaggaattacagactctttcctgaaagagcagagatgattattaaatgctgtaacatccagtctctttaggcattctgactactcctagcattctgactttgatccaggctcctagctccttcttcccttcaatctgtacagaagctctttgctcaagccagaatggcctctctrttgcagatattcactgtgaacattgtagtgcctctgctcacaactcttctttgatagacccattacctccataggaaatacccactttattttctgtctaattagattctatccattttttgaggatctgaggttttggtttttttttttttttcctttctttcatgactacatcagcctagagtaatctctgtcttttctgacattctatagtgcttttcatctgctggtctcttccatagtaatcattgatttagctgaaacctccatttggagaacaaaaagttcctgagtctttttcctgagtcactatgtattg

SEQ ID NO: 201049 - DNA, 573 bp, Homo sapiens
ttttttctttcctctacctaagtttttcttgataccactagagggaagcatcaccctatatagttcagcactctccctttattccagaaaacacagcagaaggtcaagattcagaatgtgcgctatgaatgtttatatgtaaaataatctaaggcggaagttatatggaactgattaaaaataatggataccatttgttaaaactagtccaccaataatactaatttttgccaaagtctttaattatttaatgtaatacacatatgaaattcttctaatacatgcatatatgttactgctaagaaggattctgctgacttggtaaggttacaagaataagctctccagggggtaaaacttgaattcaaaacagataagctaatatttttctcatctctatgacaaactttctttggaaaaaaagactactttttaataatttgtagtaaaatagattgaaaattcaactttttgaatagttgaaatrtgctgtagatagcacagggtatgcaccaagcaggatgtccaatggagcttagtaagaaatgtttaaagttatttaatgggaataga

SEQ ID NO: 201050 - DNA, 617 bp, Homo sapiens
tgcattacttatttaccattttacaggataataattaactggccttagaatatgatttgtaaagaagattgtaaagatttttgtccattcctctgggtgtatgaaacatttatcatcaaggaaaaagaaaagaaaagaaagacaagctctacttacaactctgtgacatctcttggaatacctttcggcaagaccttcaaacccttgttgctacatcggacgactgtatccaagcaagtacattcagtaggacagcgagaaagtggggagcaactattgtcatcatttcctaaatcgcagaggaaatacaggaaaaccaagatttgtggtcttgaaggtgctagaagggattktatgcctttaaattaacttaacaaacacaagagtcttaagctacataatcatttatttgcgggacattcagtatttactaattgataccgtaagttctatatagcactgttttcagactgcctagggaagaattctggaaaatggcttgcaatttgtaaactgtaattacaattaccaatacaatggaaaatagttatttgtacaaattatatttttaattacaatatgtaaatgtaaagtgaattacagagaaacggcacgga

SEQ ID NO: 201051 - DNA, 497 bp, Homo sapiens
acagagtatgtcccagtaaacatggttgttgaacaatggttgacattgtaaacacttagcaatagagcttgtgaaattaattatatgtccggaaatatctaaagagaacagaaggkgggaagggtcaaaattataacctgagtcaagaaggagggttgatttctcactggggtgaaggaatgccagtgatctctgcagattacctaagaacaacaacaagaacaacgatgagaacatctcatatttggaattgtccttgttggaaatttagtaggtatgaggaataactgggactgctatttattgtggccttgctagatgctgctgttgtgctgttgcatggaaatacacataagactggtgtttgcaggtggctattggaataagctgaactatggcagtcaagtcataggtggagagaagctgtgacctcctctctaatctgctcttctcttgtggctgtgactccattctgatgaaacagatgtccttgtaaa

SEQ ID NO: 201052 - DNA, 583 bp, Homo sapiens
tatatgtccggaaatatctaaagagaacagaaggtgggaagggtcaaaattataacctgagtcaagaaggagggttgatttctcactggggtgaaggaatgccagtgatctctgcagattacctaagaacaacaacaagaacaacgatgagaacatctcatatttggaattgtccttgttggaaatttagtaggtatgaggaataactgggactgctatttattgtggccttgctagatgctgctgttgtgctgttgcatggaaatacacataagactggtgtttgcaggtggctattggaataagctgawctatggcagtcaagtcataggtggagagaagctgtgacctcctctctaatctgctcttctcttgtggctgtgactccattctgatgaaacagatgtccttgtaaaagggtcacatttcatcttctcctgtctatctaagtctttgcttatatcctaaatatcagtgtgatcttccatgtttgtggtttggtcatccatttggtttctgatccaaccatatttttgctcatttttagagcattctatttaggacattttacatccatggccca

SEQ ID NO: 201053 - DNA, 609 bp, Homo sapiens
  misc_feature (1)...(609): n = A,T,C or G
actaaaacacttccccttgccttccgccatgactgtaaattttntgaggcctccccaaccattcaggactgtgagtcaattaaacctcttttctttacaaattacccagtctcaggtattctttatagcactgtgaaaatggtttaatatacccactcaggctgattttggatacccagaattttaaggtgatacatttttgccatgttcagccactaagtctgtagtaatttgttctgctgtagtagtcataggaagttaatgcactcccttttcaaagcacagtgttgtccctaataacatagttgaaaaacatgggatattgagaaaaacgaaatgactccctatctaacatattaatagatcccagctccctttccttatgyggacaccctcattgtgtaaaggaatggggtggaattgggaggcacctatgatattttatcttttaaatatcatgaacttctttctaactcaggtttggatgaaggcaatgcctattttctatgataaagggaataacacgggtcaacaagattttcacatgtgcactggctaatgttctatgtagtttttaaatagatggctatttttggtcatccacagtac

SEQ ID NO: 201054 - DNA, 609 bp, Homo sapiens
  misc_feature (1)...(609): n = A,T,C or G
actaaaacacttccccttgccttccgccatgactgtaaattttntgaggcctccccaaccattcaggactgtgagtcaattaaacctcttttctttacaaattacccagtctcaggtattctttatagcactgtgaaaatggtttaatatacccactcaggctgattttggatacccagaattttaaggtgatacatttttgccatgttcagccactaagtctgtagtaatttgttctgctgtagtagtcataggaagttaatgcactcccttttcaaagcacagtgttgtccctaataacatagttgaaaaacatgggatattgagaaaaacgaaatgactccctatctaacatattaatagatcccagctccctttccttatgtggacaccctcattgtgtaaaggaatggggtggaattgggaggcacctatgatattttatcttttaaatatcatgaacttctttctaactcaggtttggatgaaggcaatgcctrttttctatgataaagggaataacacgggtcaacaagattttcacatgtgcactggctaatgttctatgtagtttttaaatagatggctatttttggtcatccacagtac

SEQ ID NO: 201055 - DNA, 638 bp, Homo sapiens
ttacacatatcgaccagaaaaatctaacggcaatttttctaaaatgcccaatagttcccctaaaaatcaaattcttccttcatgctaatgcaagtatttacctgtcattactaaaatcacatagaattgcaaaatctctttaatatccaagtggcaatttttattaccccaaagacaaaacgatttkagaaattctcaatgatgtgtgctcttattgcctctgctaagaaactgagccatgctcataataattaaatgacaaattgtcctacctgtttggctcattgcagctctttgaaactgctcttcagaaatcccctccctgtcttcagagctaatacttatcctgggcgccatagagagcagtcacagtggcacaaatgcaccatttaaggcttggcctatccttaattccactggtttccaatattctaacatacttacctgtttataccctttctccatcctttatatgtattgtacgtaactcttttcctaactaaagtgtgaatcctgggtaccactcctcctgactcaccaaaccccagtactcccccaaatcagctctgagatcatgtccctaatacaaaccttcattctgttttctgctctgagcattagttatcaatcataattcc

SEQ ID NO: 201056 - DNA, 638 bp, Homo sapiens
ttacacatatcgaccagaaaaatctaacggcaatttttctaaaatgcccaatagttcccctaaaaatcaaattcttccttcatgctaatgcaagtatttacctgtcattactaaaatcacatagaattgcaaaatctctttaatatccaagtggcaatttttattaccccaaagacaaaacgatttgagaaattctcaatgatgtgtgctcttattgcctctgctaagaaactgagccatgctcataataattaaatgacaaattgtcctacctgtttggctcattgcagctctttgaaactgctcttcagaaatcccctccctgtcttcagagctaatacttatcctgggcgccatagagagcagtcacagtggcacaaatgcaccatttaaggcttggcctatccttaattccactggtttccaatattctaacatacttacctgtttataccctttctccatcctttatatgtattgtacgtaactcttttcctaactaaagtgtgaatcctgggtaccactcctcctgmctcaccaaaccccagtactcccccaaatcagctctgagatcatgtccctaatacaaaccttcattctgttttctgctctgagcattagttatcaatcataattcc

SEQ ID NO: 201057 - DNA, 638 bp, Homo sapiens
ttacacatatcgaccagaaaaatctaacggcaatttttctaaaatgcccaatagttcccctaaaaatcaaattcttccttcatgctaatgcaagtatttacctgtcattactaaaatcacatagaattgcaaaatctctttaatatccaagtggcaatttttattaccccaaagacaaaacgatttgagaaattctcaatgatgtgtgctcttattgcctctgctaagaaactgagccatgctcataataattaaatgacaaattgtcctacctgtttggctcattgcagctctttgaaactgctcttcagaaatcccctccctgtcttcagagctaatacttatcctgggcgccatagagagcagtcacagtggcacaaatgcaccatttaaggcttggcctatccttaattccactggtttccaatattctaacatacttacctgtttataccctttctccatcctttatatgtattgtacgtaactcttttcctaactaaagtgtgaatcctgggtaccactcctcctgactcaccaaaccccagtactcccccaaatcagctctgagatcatgtccctaatacaamccttcattctgttttctgctctgagcattagttatcaatcataattcc

SEQ ID NO: 201058 - DNA, 481 bp, Homo sapiens
aagctctgccctgctctcttattctgtgagcagcattcccctttgcrgccaagaaaagctgctgcttatttcaatcaggtagtctagttagggctgcctgtgatggtctttcaggagtctctccacccatggctcaagcgatggtccaggaagccagcagagaaataaggagatgggggtgcagaagaggatgcacatataatcaaagcaggccaccccgaatctttcccagaactgtttttgaatggagctgaggcagtacattcagtctttccctggaggtagaattgtgagctgggatttgcagaggaggccaaatgccatctttctagctccatggaagaagccccacatgagaggccactggacagcaggagatgagagaggccaacagaggcggtggtggcacttgtgctctggttccagctgtctggccccctaatgaatccctgtttctctgagtggtttggtgaggcttcct

SEQ ID NO: 201059 - DNA, 558 bp, Homo sapiens
tgcatatacgtgatgagatctyttggggatagggacaaagtctaaactcaaaatgtatttatatttcatagctaacttatacacatagcctgaaggtaatttatacaggatttttaataaatatgtgcataaaacaaagtttgtgtgtactgaaccatcaaaatgcaaaactgtcactatctcagccacccatgtggtatcatgtcagtgctctaaaattttggggttttagagcattttagatttaggattttctcactggggataataaactgtactccaaggcaaagagaaaaaaaggtgaggatgcctaggacagtattttaagggtaattgcccttcaaaggcagtttaaatctcaatttcagcaagtccactaggtcaaagtgagggtcctaattggaagaaggactctgaaattgagggtgctgacacttagataaacacgttgaaacatttaacacatagatttcaatgaacactcttgtagacacggcccaccccttcctttctgtggaacagctagttctcccttcttgattgacagcaatgcaaaag

SEQ ID NO: 201060 - DNA, 616 bp, Homo sapiens
atggtgccaatttcctgtattagttcattctcacactgctataaagaagtgtccaagactgggtaatttataaaggaaagtagtttaattgacttacagttccacatggctagagaggcctcaggaaacaataatcatagcagaagaggaaacaggcaccttcttcacaaggcggcaggagggagtgtgagtaagagcagggaaaactgccttataaaaccactagatctctctcactatcacaagaacagcatggaggaaactgcccccatgatttaatcacctcccaccaggtctcttccttgacactttgggattctgaggattacaatgagttttgggtgaggacacagccaaaccrtatcagcattgctgctacatgcccagttatgacatgaaccactggaatttatttccattattcagagcttaagaactctccctgtagtaagataccttttcaagaagtgtaagttttagacatgttactgttatattttttaatataaaagcaaccattaaatattcctaaaagtactaacaatgagtataaattatatgcatatacataattaatttgagctccaaaattatcttattattgccctgattttag

SEQ ID NO: 201061 - DNA, 616 bp, Homo sapiens
atggtgccaatttcctgtattagttcattctcacactgctataaagaagtgtccaagactgggtaatttataaaggaaagtagtttaattgacttacagttccacatggctagagaggcctcaggaaacaataatcatagcagaagaggaaacaggcaccttcttcacaaggcggcaggagggagtgtgagtaagagcagggaaaactgccttataaaaccactagatctctctcactatcacaagaacagcatggaggaaactgcccccatgatttaatcacctcccaccaggtctcttccttgacactttgggattctgaggattacaatgagttttgggtgaggacacagccaaaccgtatcascattgctgctacatgcccagttatgacatgaaccactggaatttatttccattattcagagcttaagaactctccctgtagtaagataccttttcaagaagtgtaagttttagacatgttactgttatattttttaatataaaagcaaccattaaatattcctaaaagtactaacaatgagtataaattatatgcatatacataattaatttgagctccaaaattatcttattattgccctgattttag

SEQ ID NO: 201062 - DNA, 616 bp, Homo sapiens
atggtgccaatttcctgtattagttcattctcacactgctataaagaagtgtccaagactgggtaatttataaaggaaagtagtttaattgacttacagttccacatggctagagaggcctcaggaaacaataatcatagcagaagaggaaacaggcaccttcttcacaaggcggcaggagggagtgtgagtaagagcagggaaaactgccttataaaaccactagatctctctcactatcacaagaacagcatggaggaaactgcccccatgatttaatcacctcccaccaggtctcttccttgacactttgggattctgaggattacaatgagttttgggtgaggacacagccaaaccgtatcagcattgctgctacatgcccagttatgacatgaaccactggaatttatttccattattcagagcttaagaactctmcctgtagtaagataccttttcaagaagtgtaagttttagacatgttactgttatattttttaatataaaagcaaccattaaatattcctaaaagtactaacaatgagtataaattatatgcatatacataattaatttgagctccaaaattatcttattattgccctgattttag

SEQ ID NO: 201063 - DNA, 508 bp, Homo sapiens
ttaaattgtcattactgctatgccaatttgcaaatacaaaattaataacagcagtctctgatttttcctacaaagtttgttatagtgtgtgtgtgtgtgtgtgcatgatcatacaaatatttgaattgtgaaatcaaatggaaactttcatgaaatgcaatagagttgcaggtattttgtgtactgtcacatacctcttgttgatttttatttcagcgtattctatttttgacaatatttattattatttgtgtgtatggtttcataaaaaaacttgttttttttttcttttcctacattatgstatgctgatgttttccttaattgctaaccctttattctgtcttcatttggggtatcatgcgagactttttgtcttcactttttctctcattgcctccctagtcatttgaaggatgttgaggctcagaaaacaatacccacaaatgaaggcctcagaagcaaaattttctctgccctctgtgccctcctctcttccagttccatt

SEQ ID NO: 201064 - DNA, 508 bp, Homo sapiens
ttaaattgtcattactgctatgccaatttgcaaatacaaaattaataacagcagtctctgatttttcctacaaagtttgttatagtgtgtgtgtgtgtgtgtgcatgatcatacaaatatttgaattgtgaaatcaaatggaaactttcatgaaatgcaatagagttgcaggtattttgtgtactgtcacatacctcttgttgatttttatttcagcgtattctatttttgacaatatttattattatttgtgtgtatggtttcataaaaaaacttgttttttttttcttttcctacattatggtatgctgatgttttccttaattgctaaccctttattctgtcttcatttggggtatcatgcgagactttttstcttcactttttctctcattgcctccctagtcatttgaaggatgttgaggctcagaaaacaatacccacaaatgaaggcctcagaagcaaaattttctctgccctctgtgccctcctctcttccagttccatt

SEQ ID NO: 201065 - DNA, 668 bp, Homo sapiens
ttatcaagtacatctgtggctttttctctttgtaagccaattttaattttatttaatcttatagtatttattgtttttcaaaaatcccttcagattttctgttctcaacatctgaaatctctacaagatacaaatttaatatatgcayaaagcatcctgtatttacaaataacactgccaaataatggaaagtccattatttgtaatgtttccatacactacaaagatattgagagagatatcattgtcatgtatcgcagtttgccaagttcccttctcagtgtctttcaaatatcatcttatttcttttatttaactacacaagtgtcttcagttagattgtaggaatacaaaagcaggtcaattcaaattttaagactgatgattctcaaagttgaaactcatgaatgctgataggaggtgggtctggaagattttctcagttaactatggctgtatatattttacaaacacaggatttagtggattaaagagtagcaattttattatttttcatgattctgtgaggattctgtgttctgcagtaaactaagtggcttggctggaatgtccataatggctcattcacacagctggttgttggtgcagacagttagtgcagagtctcaactggggctgtcaaatgaaacacctctgtccttaactgc

SEQ ID NO: 201066 - DNA, 668 bp, Homo sapiens
ttatcaagtacatctgtggctttttctctttgtaagccaattttaattttatttaatcttatagtatttattgtttttcaaaaatcccttcagattttctgttctcaacatctgaaatctctacaagatacaaatttaatatatgcacaaagcatcctgtatttacaaataacactgccaaataatggaaagtccattatttgtwatgtttccatacactacaaagatattgagagagatatcattgtcatgtatcgcagtttgccaagttcccttctcagtgtctttcaaatatcatcttatttcttttatttaactacacaagtgtcttcagttagattgtaggaatacaaaagcaggtcaattcaaattttaagactgatgattctcaaagttgaaactcatgaatgctgataggaggtgggtctggaagattttctcagttaactatggctgtatatattttacaaacacaggatttagtggattaaagagtagcaattttattatttttcatgattctgtgaggattctgtgttctgcagtaaactaagtggcttggctggaatgtccataatggctcattcacacagctggttgttggtgcagacagttagtgcagagtctcaactggggctgtcaaatgaaacacctctgtccttaactgc

SEQ ID NO: 201067 - DNA, 668 bp, Homo sapiens
ttatcaagtacatctgtggctttttctctttgtaagccaattttaattttatttaatcttatagtatttattgtttttcaaaaatcccttcagattttctgttctcaacatctgaaatctctacaagatacaaatttaatatatgcacaaagcatcctgtatttacaaataacactgccaaataatggaaagtccattatttgtaatgtttccatacactacaaagatattgagagagatatcattgtcatgtatcgcagtttgccaagttcccttctcagtgtctttcaaatatcatcttatttcttttatttaactacacaagtgtcttcagttagattgtaggaatacaaaagcaggtcaattcaaattttaagactgatgattctcaaagttgaaactcatgaatkctgataggaggtgggtctggaagattttctcagttaactatggctgtatatattttacaaacacaggatttagtggattaaagagtagcaattttattatttttcatgattctgtgaggattctgtgttctgcagtaaactaagtggcttggctggaatgtccataatggctcattcacacagctggttgttggtgcagacagttagtgcagagtctcaactggggctgtcaaatgaaacacctctgtccttaactgc

SEQ ID NO: 201068 - DNA, 547 bp, Homo sapiens
catattataagctaactaccaaaagtcaaggacaaaggaaatattctaaaagcatcaataaaaaaagaagcaactaacatataaaggagctatgatacattttgcagcagacttctcagcagaaactttataggctagaagagaatggaatggcataatcaaaatgtgaagggaaaaaaaaaactttttagtaaaatactgtatccagcaaagcaaggttatctttcaagcatgaaggagaaataaagactacctctagacaaacaaaagctgtgaaaattcataaacactagacctgttttaaaattaacgctaaagagaattcttcaatcagaataaaaagacgttaatatacaayaagaaatcatttggttgtataaaatgcactgataaaagccagtagagagacaatacagaatactctaacactgtaattgcaatggataaaccaaagatatctttcgttcaaagactaaaaggctaacctatcaaaaacaataataactacaacaatttgttgagagatagacaataaaccaaaatgtag

SEQ ID NO: 201069 - DNA, 591 bp, Homo sapiens
atattacaactgacaccacagaaatacaaaagatcattcaaggctactatgaacagstttatgcacataaactagaaaacctagaagagatggataaattcctggaaggatacaaccttccttaacttaaatcaggaagaattagatactctgaacagaccaataacaagcagtgacattgaaatggtaataaaaaaattaccaacaaataaaagtcaaggaccagttggattcacagcggaattctaccagaaattcaaagaagtattggtaccaactctattgacactattccacaagatagagaaagagggaaccctccttaaatcattctatgaagccagtattatccaatacaaaaaccaggaaaggacataaccaaaaaagaaaactatagaccaatatctctgatgaatatagatgctaaaattgttaacaaaattctagctaaccaaatccaacaacatatccaaaggtaagccaccatgatcaagtgggtttcataccagggatgcagggatagtttaacatacacaagtcaattaatgtgatacatcacatacacagaatcaaaaacaaaaatcacatgat

SEQ ID NO: 201070 - DNA, 591 bp, Homo sapiens
atattacaactgacaccacagaaatacaaaagatcattcaaggctactatgaacaggtttatgcacataaactagaaaacctagaagagatggataaattcctggaaggatacaaccttccttaacttaaatcaggaagaattagatactctgaacagaccrataacaagcagtgacattgaaatggtaataaaaaaattaccaacaaataaaagtcaaggaccagttggattcacagcggaattctaccagaaattcaaagaagtattggtaccaactctattgacactattccacaagatagagaaagagggaaccctccttaaatcattctatgaagccagtattatccaatacaaaaaccaggaaaggacataaccaaaaaagaaaactatagaccaatatctctgatgaatatagatgctaaaattgttaacaaaattctagctaaccaaatccaacaacatatccaaaggtaagccaccatgatcaagtgggtttcataccagggatgcagggatagtttaacatacacaagtcaattaatgtgatacatcacatacacagaatcaaaaacaaaaatcacatgat

SEQ ID NO: 201071 - DNA, 655 bp, Homo sapiens
agaagtattggtaccaactctattgacactattccacaagatagagaaagagggaaccctccttaaatcattctatgaagccagtattatccaatacaaaaaccaggaaaggacataaccaaaaaagaaaactatagaccaatatctctgatgaatatagatgctaaaattgttaacaaaattctagctaaccaaatccaacaacatatccaaaggtaagccaccatgatcaagtgggtttcataccagggatgcagggatagtttaacatacacaagtcaattaatgtgatacatcacatacacagaatcaaaaacaaaaatcacatgatyatctcaatagatgcagaaaaagcaccttacaaaatccagcatccccttatgattaaaactctcagcaaaattagcatacaagggacataaatcaatgtaatgtaagtcatcttagacaagcccacagccaacataatactgcatggggaaaagttaaaagcattctctctaaaaactggaacaagacaaagatgcccactcttacctctcctccaaattggtaaggagaaagtcaaactgtcactgtttgctgaagatatgattgtttacctagaaaaccctaaagactcctccagaaagctctagaactgataaaagaattc

SEQ ID NO: 201072 - DNA, 655 bp, Homo sapiens
agaagtattggtaccaactctattgacactattccacaagatagagaaagagggaaccctccttaaatcattctatgaagccagtattatccaatacaaaaaccaggaaaggacataaccaaaaaagaaaactatagaccaatatctctgatgaatatagatgctaaaattgttaacaaaattctagctaaccaaatccaacaacatatccaaaggtaagccaccatgatcaagtgggtttcataccagggatgcagggatagtttaacatacacaagtcaattaatgtgatacatcacatacacagaatcaaaaacaaaaatcacatgatcatctcaatagatgcagaaaaagcaccttacaaaatccagcatccccttatgattaaaactctcagcaaaattagcatacaagggacataaatcaatgtaatgtmagtcatcttagacaagcccacagccaacataatactgcatggggaaaagttaaaagcattctctctaaaaactggaacaagacaaagatgcccactcttacctctcctccaaattggtaaggagaaagtcaaactgtcactgtttgctgaagatatgattgtttacctagaaaaccctaaagactcctccagaaagctctagaactgataaaagaattc

SEQ ID NO: 201073 - DNA, 523 bp, Homo sapiens
atattaaaggctgggtacagtggctcacacctgtaatcccagcattttgggaggccgaggtgggtagatcacctgaggtcaggagttcgagaccagcctgatcaatatgatgaaaccccgtctctactaaaaataaaaaaaaattaaccaggcatggtggcacgcactgtaattccagctacttgggaggctgagacaggagaattgcttgaatcgggaggcagaggctgctgtgagccgagatcatgccattacactcccgcctgagcaacaaaagcaaaactccgtctcaaaaaaaaaaaaaaaaaaagaatggtgtgggatattttgtcaaaaatattgttgagagcttttttattttgaattttatttaagatggtaagcaaaaggcttagcacaataggtaattatgaaatactcttgttctaccaccaraactattttttttacattgtataaaaaggacattccagtttctcaacaataaattgtgttgctccatgtcaccttctgtttaaatcaa

SEQ ID NO: 201074 - DNA, 523 bp, Homo sapiens
gagtaacgggtaatgggtatggtatttcttttgtggtgatgtgaattatctcaagtcagatgagtgaaaacactaaaaataatcctcttgttgcatacatttaaatggggaattttgtagtatatagtttayatattgataaagctattattttttacatgtcaataatgttaaggttgagaaactttttttttaattctaaactggaagtttggagatgacacttttgcagaagtggcagtttagctaagacttgaattataaatctactcatagacctgcgtattaaaacagaataaaaagtaagaaagaaaaaatgaaggaagtaaggaacagaaggagggagagagggagaaaggaaaaaaggaaggaaggaagaaaagaagaaaggaaggaagaaaggaacagatatagagaaaggcaggaagagaggaagatagggatagaaaagagtagaaaaaatacattgagaacaataaagctaagagtgtttttgttttttgctttgtttattcgttagttt

SEQ ID NO: 201075 - DNA, 523 bp, Homo sapiens
gagtaacgggtaatgggtatggtatttcttttgtggtgatgtgaattatctcaagtcagatgagtgaaaacactaaaaataatcctcttgttgcatacatttaaatggggaattttgtagtatatagtttacatattgataaagctattattttttamatgtcaataatgttaaggttgagaaactttttttttaattctaaactggaagtttggagatgacacttttgcagaagtggcagtttagctaagacttgaattataaatctactcatagacctgcgtattaaaacagaataaaaagtaagaaagaaaaaatgaaggaagtaaggaacagaaggagggagagagggagaaaggaaaaaaggaaggaaggaagaaaagaagaaaggaaggaagaaaggaacagatatagagaaaggcaggaagagaggaagatagggatagaaaagagtagaaaaaatacattgagaacaataaagctaagagtgtttttgttttttgctttgtttattcgttagttt

SEQ ID NO: 201076 - DNA, 523 bp, Homo sapiens
gagtaacgggtaatgggtatggtatttcttttgtggtgatgtgaattatctcaagtcagatgagtgaaaacactaaaaataatcctcttgttgcatacatttaaatggggaattttgtagtatatagtttacatattgataaagctattattttttacatgtcaataatgttaaggttgagaaactttttttttaattctaaactggaagtttggagatgacayttttgcagaagtggcagtttagctaagacttgaattataaatctactcatagacctgcgtattaaaacagaataaaaagtaagaaagaaaaaatgaaggaagtaaggaacagaaggagggagagagggagaaaggaaaaaaggaaggaaggaagaaaagaagaaaggaaggaagaaaggaacagatatagagaaaggcaggaagagaggaagatagggatagaaaagagtagaaaaaatacattgagaacaataaagctaagagtgtttttgttttttgctttgtttattcgttagttt

SEQ ID NO: 201077 - DNA, 633 bp, Homo sapiens
taattagtcaatgttttggacttcctagatttataatacctcaccaagaaatgaattaaaagtctgaaagaaagagctttaattatattaatccaggggatgcaagacaccatgactgatcaagggaagaattttgttagaagagatcattggtgccccttgactaatagtaccttgcatacattgacatcaagtgggatttagaggtggattagaatgtgaattaaatgaattcttaaagcttttcaaaagatacttaaattaagatcaagtttttagaactcatttcttgttttgtttccttttatttatttttttccggaagtgggggaaaatggttgttttcaataaaattaatgtggtagcccccaagcaaaatatgttcgtatttgaaccctagccagtatcccatagtgaacagttattcttcccacattttaaaagttttatgaatgwgaggggagggaacatggagtgcccctcctattaaaatactaatttaaaataatatactgattttcttcttcctcctcagtctggggtaaacagccagttgtggctctattgtctagggtcttgtctaaagatgccatgttcttaggtttatgttctttttttagtgaaaaatataat

SEQ ID NO: 201078 - DNA, 557 bp, Homo sapiens
tctgcacattcatctctgcaggacagtatatttggaaagccatttattttagggtcaggagctcatggaatcggagaagatggtagatggaaaatctaatgtcattatgccatacctctggaatcaccccatagtagacataaatttaccttccaaacaaggcaaaagctgtactgtcacccagatctccctastcttctggacagtgctgagtacacactgacgaattcttcttgcctaatcctctctctaaccccacccttttatagctctgagcagaatacctcatttctaacacattctctattcagatttgtcaacaccattgcctaagcctaaaccatcttcctacattctagccacaccttgattcaatttctagacccagggttttatcctgccccttaaggtaacgtctttaggtaactaatctcattcagtgtcagtaggttttactcacttaactaagaggacaacaatttttccgagtttaggaagcaatttccattttgcttttctccgtgcataccacttggccacataggatcagttttaca

SEQ ID NO: 201079 - DNA, 557 bp, Homo sapiens
tctgcacattcatctctgcaggacagtatatttggaaagccatttattttagggtcaggagctcatggaatcggagaagatggtagatggaaaatctaatgtcattatgccatacctctggaatcaccccatagtagacataaatttaccttccaaacaaggcaaaagctgtactgtcacccagatctccctactsttctggacagtgctgagtacacactgacgaattcttcttgcctaatcctctctctaaccccacccttttatagctctgagcagaatacctcatttctaacacattctctattcagatttgtcaacaccattgcctaagcctaaaccatcttcctacattctagccacaccttgattcaatttctagacccagggttttatcctgccccttaaggtaacgtctttaggtaactaatctcattcagtgtcagtaggttttactcacttaactaagaggacaacaatttttccgagtttaggaagcaatttccattttgcttttctccgtgcataccacttggccacataggatcagttttaca

SEQ ID NO: 201080 - DNA, 557 bp, Homo sapiens
tctgcacattcatctctgcaggacagtatatttggaaagccatttattttagggtcaggagctcatggaatcggagaagatggtagatggaaaatctaatgtcattatgccatacctctggaatcaccccatagtagacataaatttaccttccaaacaaggcaaaagctgtactgtcacccagatctccctactcttctggacagtgctgagtacacactgacgaattcttcttgcctaatcctctctctaaccccacccttttatagctctgagcagaatacctcatttctaacacrttctctattcagatttgtcaacaccattgcctaagcctaaaccatcttcctacattctagccacaccttgattcaatttctagacccagggttttatcctgccccttaaggtaacgtctttaggtaactaatctcattcagtgtcagtaggttttactcacttaactaagaggacaacaatttttccgagtttaggaagcaatttccattttgcttttctccgtgcataccacttggccacataggatcagttttaca

SEQ ID NO: 201081 - DNA, 564 bp, Homo sapiens
ataattatttctagtcatagtatataattaaatgtagtcatagtatgtaactattttatatatttttaattgtattaaatataatcatttaataaatactcagttaaatataatttaataaatattaaattgaataatcaatttaatattgtattatgaaataatttatcataaatttaataaatttaataaatcgtttaataattatatatatttaattcatttgctaatatttattgctgtcttcattgaatgtgtaaggaaagtattacctccccttctttttctggaaaggattgtgtagaactcatgttaatttttctttaaacatttgttagaattttccagtgaaatcatctgggcctggagagttcttttttatgargtttttaattatgaattcaatgtccttgataactgtaacgctattcaaattatatcatgttgtatgagttgtgggagtgtttacttttctaggagttggtccattttaagttatcaaatgtatgtgtgtagaattgtttgttgtattcccttattttcctattgatctgatattgttag

SEQ ID NO: 201082 - DNA, 577 bp, Homo sapiens
gaggagggggacatatttttcttttaaccaatctccactggatttttgagatggtattaagaatacagctatttagtttggtattttacaggtccaagattctgattaatttcatactttgtaaaaggttacaaacttaggtcttagaattgaataacaacaatatatacttactgacatattaagacaatctcttgctttcagctcaagatgctaatttacataatctgaatgtgtgaaaaatgctaatttaatttagtttgaaaaatgttggaagaaatcatctttgaatataacactgggttcatatctctagcaatgaatatgggcctttggaactaatcttttattatggctaatctcactgaagcatgaacaaaatgatgagtttatttaatgcagggcttcattgcaatagactgtttgacttgtaacaggaggtgacacatcayaagctgagaaatctcttacttgagattaagaaaatcctaccacacaatcttgagcaagaaacttgggcttatacactcaggtaacaatggtgtatgcactaccataaaccaatgccatgacaagt

SEQ ID NO: 201083 - DNA, 578 bp, Homo sapiens
ctattcagggaaagatggtcagttctagtgctgagatatagtctaagatgcaggacctggatgtttttctcagattctttgattctccagggggaatcagaagatgaaaatcaaaccttagccctgtacatttcagaagcaaggaaaggactagtgagaacaccagctctctccactgctctgatcctaggtgtagtcactccatacctgttaactgagtaacagaaggatgcctcctaaaactgcgaaccattttatagagaagatatgtctattagaatttttcaccacagcaatggattatgggtttttttctgtgtttctattcatgcctcttccatgcattagacgagaagcaaaggcagaactattagacttcaaataaatttggcataatggttcaaaccattccaagtgaaaaggaaaaaatcaagatgaatcaaccaattaaagccatagttgaagtttattagtaaaatgtaaaggtatatcaaaaatgaatagagaggaaaatcttaattcaatgacaatatttcttatcctcagttatrcttgatactttcatgctacaagaaaag

SEQ ID NO: 201084 - DNA, 613 bp, Homo sapiens
tttgacaaatttcatagaaacttgtgacttgttggccctagaagagtcaatgttgtcttatgtagaatttcatttgagacattcaggatataaatttttttttctaagtttattggtagttgagaatcagttccattttatggcctacttttaaggtacttacacaataaaaagagatattagttaactttaacatcaaaatattgaaatctgatcccttgccttacaaactaagttagggctcatattttccaattacctctttcttcaaaagaactcttctatgaaagagtacatacaaatggaggtattattattattttattattattactttttgagacggggtttcgttcttgtcacccaggctggagtgcaatgatgctatgtcggttcactgcaacctccgcctcccaggttcaagggattcttttgcctcagcctcccaagtagctgggattacaggcacatgccaccatgcccagctaatttttgtatttttagtagaaacggggtttcaccrtgttggccaggctggtcttgaactcccgcctcggcctcccaaagtgctgggattacaggcatgagccactgcgcccggcctgttatttaa

SEQ ID NO: 201085 - DNA, 243 bp, Homo sapiens
tatttctaaatccattgcatttcctagcccctcsgtatggggaaagcaaattagctcagggattcccagcagctgaatttagctagagagctgcttaaggctctccccagcagatgttttatccacttagaagttgtagaacgttataggacctccctgctttttaatcctaaaaacaaacatcaacatatttgagatctgaagattccctgattcagaatgagaaattgccatgaccaccaa

SEQ ID NO: 201086 - DNA, 576 bp, Homo sapiens
gaacatctaaatttacataaagcgtatgttgaaaggtgatttttccactttacaaaaaagatccatcataagattctttaaacaggcttcccaggtacatgtaaaawaagattttattgattaaagccatatgtttgcacagaattttttaggaaaatatcttttatataaagtaaggttgacctctaagcaatttccttaaggcacctagcccagaattgccaactctcaaatttctaaggtaacagataatgggaggcctggaatgcagtgcatatttgaaactctagaatataaagtagtaattttagccattcagggttcgtgacttttctcacaaaaatagctaatgggaagataaacctcctcaattcctctttctatatctcagtaaaagtaagagtggctgtgaaatgatccccacaaaggctgctacagaaaggaaaacaaaggcttggaaagtcaccaagttgaatctttccccctcactctctcccccggtccactactgccactactgataattaagttgtcttattgcaaaatgaaaaagaattcagtgtgttaataaataaa

SEQ ID NO: 201087 - DNA, 478 bp, Homo sapiens
cattattcaagtatctccaattttataaatcttaaaatatttttaatgtacaagaatatttttaaagggtattattgcctaaggcattaatttatatttctggaattgtgatttatcaatttaacaagtacatcaattttaataaacaagttttaaaaaagtaaaattaaattatggtataattactgtggaacatattcagttgaagaatatttcagtttttctcagctcattttcacgtgcaattaaaaaaatctgtggtctaaaaactaaagattttgaacattttcatatcaaagaaaataattgtttatrgaaaaatgctaatttttaaagcatcccctctttatcatgtccatatgacatactttctaaatgtatattataccataataaccattttcatctttcaaaccaaaaactttcctgtttcttctagtaacaataatctttacaacacctctccaaagtatcactg

SEQ ID NO: 201088 - DNA, 478 bp, Homo sapiens
cattattcaagtatctccaattttataaatcttaaaatatttttaatgtacaagaatatttttaaagggtattattgcctaaggcattaatttatatttctggaattgtgatttatcaatttaacaagtacatcaattttaataaacaagttttaaaaaagtaaaattaaattatggtataattactgtggaacatattcagttgaagaatatttcagtttttctcagctcattttcacgtgcaattaaaaaaatctgtggtctaaaaactaaagattttgaacattttcatatcaaagaaaataattgtttatggaaaaatgctaatttttaaagcatcccctctttatcatgtccatatgacatactttctaaatgtatattayaccataataaccattttcatctttcaaaccaaaaactttcctgtttcttctagtaacaataatctttacaacacctctccaaagtatcactg

SEQ ID NO: 201089 - DNA, 478 bp, Homo sapiens
cattattcaagtatctccaattttataaatcttaaaatatttttaatgtacaagaatatttttaaagggtattattgcctaaggcattaatttatatttctggaattgtgatttatcaatttaacaagtacatcaattttaataaacaagttttaaaaaagtaaaattaaattatggtataattactgtggaacatattcagttgaagaatatttcagtttttctcagctcattttcacgtgcaattaaaaaaatctgtggtctaaaaactaaagattttgaacattttcatatcaaagaaaataattgtttatggaaaaatgctaatttttaaagcatcccctctttatcatgtccatatgacatactttctaaatgtatattatrccataataaccattttcatctttcaaaccaaaaactttcctgtttcttctagtaacaataatctttacaacacctctccaaagtatcactg

SEQ ID NO: 201090 - DNA, 536 bp, Homo sapiens
ttcttgagcttctctttgttggagatttttttattactgattctatgtaattactagttatagatctgttcaatttttatttagtcattacttagtcttggtagattgtatatttctaaaaatttatttcttctgggttatctaatttgttggagaataattattcatgctagtctcttataatcctttttatttctgtagagtaagttgtaatgtctatcatttctgaatttatttatttaaggcttctctatttttcttagttcagctaaggcattcttaaatttttttatgtttttaaaaattcaacttttggttttattattttttttcaatttttcttttagtctctattttacttatgtaagtctaatctttattttcttccttctgctaaatttgtgtttagttttttaaatktaatttgccattttatatatttttttcttttcttcctgttttctttttggagacagggtctcactttgttgcccagactggattgcagtggcatgatcaaagctcactagaaccta

SEQ ID NO: 201091 - DNA, 382 bp, Homo sapiens
gagtaacagcgaatgggaaacacattatcactttagtttcagctaaaccagtgccagtaacctccatgtctaagcatttgtgaaaacakattattatacaccccaacccaaaaggctataatcacctatattcgtaccactccaactcaacagcaaagttgaaaaacttccagataccacgcagagatgctaaagtccttaaaatgaaacttctcttctctggataaagtaaaatcccaaagtaaccaaagtccattgctcttctctcttttactgtcttattttgtccatctctaaaagatttttgctcagatatctgggtggtccagattccttctacagcatttgcatcatgggttactttcactgaaatgggtgtagc

SEQ ID NO: 201092 - DNA, 382 bp, Homo sapiens
gagtaacagcgaatgggaaacacattatcactttagtttcagctaaaccagtgccagtaacctccatgtctaagcatttgtgaaaacagattattayacaccccaacccaaaaggctataatcacctatattcgtaccactccaactcaacagcaaagttgaaaaacttccagataccacgcagagatgctaaagtccttaaaatgaaacttctcttctctggataaagtaaaatcccaaagtaaccaaagtccattgctcttctctcttttactgtcttattttgtccatctctaaaagatttttgctcagatatctgggtggtccagattccttctacagcatttgcatcatgggttactttcactgaaatgggtgtagc

SEQ ID NO: 201093 - DNA, 608 bp, Homo sapiens
tataggaaaacttggcaaattttttttaccagtgtttcctccaagattaaaatatattatggaaatggagtgcaatgataaacttctaaggactttccataaagcaaacaattaggctggagtgcagtggcgcaatcttggctcacagcaacctccactgcccgsgttcaagtgattctcctgcctaagcctcccgagtagctgggattacaggcgtgcaccgccacacctggctaatttttgtattttcagtagagacagggtttcaccatgttggccaggctagtctccaacccctaacctcaggtgatctgcctgcctcggcctcccaaattgctgggattacaggcgtgaaccaccatgcccggcctgttgcatattttttatcaggtgaaagaatacattttttgcaatttccagggcactctggcaaatgtcaatagtagttttaagtgtaaaatatgtcttgaaattttattttgctttttgtatatatataaaatcagatttttagaaaggcaaaaatttttaaaagatatcaaaggaaatttggacatttaagatatgattatgggagcctgagaaacaatatttgtttacctatttaa

SEQ ID NO: 201094 - DNA, 469 bp, Homo sapiens
agtactaataacatactcattcaacaaaaatgctggagagccaaaacactattctacatttacctttggaaacaacctcactacaagacggggagaaaagatatatcaaccaaaagtttaatacaatgttttaaattatacaaaggaaatatatataaaatgctgtaagtgcatcaaataggaagaaggcagtaagactacaaatagcaatgttattagtagatcwttctcaactttaaatgccatactaataactttgggcaatgaagaaatatcaaaaggtttgttttccaacgggacaaatctcttttagccatgtgagttctcacactgatacaagcatgacaagtcatctttagtcaggaggaatgctatccaagacttcagaattaatccccacaatcccatccaaaagctatcatgtatccagactctcaacctgtcccctaattctggcttcctgctgctc

SEQ ID NO: 201095 - DNA, 519 bp, Homo sapiens
gccaaatcactgatgtagtaaacaccatgtcctcaaagtgtgaggttgtgggccacctgcatcagaatcacccccaaaacttggtgaaaatgttaaaatggccaggccccacaaaggacgctctggaacagaaccttttggagaagaatttaggaayctgcatgtttagtaagcacccaagtaaattcttggcctgttatacttggggaagcacaatataaatacttcatcctcactgggacatgccgaaacctgaacacatttgtatttcactgtttctagttactagccagactattttaaaagcaactataaagtataaatcaagcaaaatattctgcagtgttcccaggcattattaatgtcacagaactcccaaagcaagttattcaaatatctattttaaaacataccatgtaatcttataattatttctttatgtgtctctgccatgagattgtgagcacagtaagaatagggcaggcagcatattcatctccggggctacacaccctaaca

SEQ ID NO: 201096 - DNA, 561 bp, Homo sapiens
taaatttaattgtaactattaaaatccacattaaaattcatatataaggaagtatatattgttaatatcgtctcactggttaatgatacagtttttctttttccaaagagatactgaaatttttaaagtagtatccaactgatatttaataattcacataatgaagggatgatgtctaataccagttacaagtagaaacagtagttgtactggttataaatatgagttagacttcttgtttttaaaatccaactcagtcacacactagcaaattaaacaacttctttaagaatagttttcttttctgcaaaacaactcctacaccagaaagctattgtaaaataaaattagataatacaaacttcttagaatgcactaaatatgacttattataccacattaaaatttttgtaaatataagyaagcttattatacatattttcatttatttgccgtaatttcaataacactgtatgtggaaaactgactgtatttcaaggcggtggtcacatgcatcttgagtttttttttatcttctgcagaaataatgtggttgttttt

SEQ ID NO: 201097 - DNA, 492 bp, Homo sapiens
atatggctatagcataataataaaaaaagacacactgaagagggtagaaggaacagctttatattacctgtgtcatcttttccccaatcccaggcaacacggcacacagagagataccattcccttaggagaaagagaggaaagtgaacatcgaactttgccttggtccccaacactgagactaccacagaaaaacccagcaccaggcagaccctcatcgtccctaaatgcagtcttataccctggactgagccccagtgtcaggtgggaacccatmgtccccgtgaaatggattcaatctctggcctgtaccacagctggctgactacaatggccttggatctcagaaagacttcggcagcaggcaggcctcagcagctgtagactttggctgtgccacatggtatgccagcctcagcagccagacaattccaactcagcattgtgccaaccacagcagttctgggcttagggtactccctagcactgcaa

SEQ ID NO: 201098 - DNA, 492 bp, Homo sapiens
atatggctatagcataataataaaaaaagacacactgaagagggtagaaggaacagctttatattacctgtgtcatcttttccccaatcccaggcaacacggcacacagagagataccattcccttaggagaaagagaggaaagtgaacatcgaactttgccttggtccccaacactgagactaccacagaaaaacccagcaccaggcagaccctcatcgtccctaaatgcagtcttataccctggactgagccccagtgtcaggtgggaacccatagtccccgtgaaatggattcaatctctggcctgtaccacagctggctgactacaatggccttggatctcagaaagacttcggcagcaggcaggcctcagcagctgtagactttggctgtgccacatgstatgccagcctcagcagccagacaattccaactcagcattgtgccaaccacagcagttctgggcttagggtactccctagcactgcaa

SEQ ID NO: 201099 - DNA, 456 bp, Homo sapiens
tctgaagtcacccccagtatctagtagtgttcctaacacatagtaagaactcaacagatatttgtttattgaatgaatgagtgaattaatgaacaaaaaaagtctttaccagtgargtgggtgtaagagagggcatgaaaggtcacacctctgcagtatgcagggttatgtgtgaatctgcttggacagttagcctgaatgacaaaggggctgagtgtgagggaaagagtggcctggccatggcattgtgtgtagttgctgatcatggtcttacacaccagatggcacaagtcattagcaactcaacttctgaattaacactctggacaccagcagggtgcattctccaacacgctattacttgcttatgtcaatggtgtcactcaagtgtgggttataccagcattttacagtggcttaaaaacactgtctagcagatggagaattctacaaagt

SEQ ID NO: 201100 - DNA, 473 bp, Homo sapiens
aagctctgaagtcacccccagtatctagtagtgttcctaacacatagtaagaactcaacagatatttgtttattgaatgaatgagtgaattaatgaacaaaaaaagtctttaccagtgaagtgggtgtaagagagggcatgaaaggtcacacctctgcagtatgcagggttatgtgtgaatctgcttggacagttagcctgaatgacaaaggggctgagtgtgagggaaagagtggcctggccatggcattgtgtrtagttgctgatcatggtcttacacaccagatggcacaagtcattagcaactcaacttctgaattaacactctggacaccagcagggtgcattctccaacacgctattacttgcttatgtcaatggtgtcactcaagtgtgggttataccagcattttacagtggcttaaaaacactgtctagcagatggagaattctacaaagttgagaaagcatct

SEQ ID NO: 201101 - DNA, 592 bp, Homo sapiens
ttcatgtaacaacgtaatcaagatcatgagttctgacaccagaagaaacaggtttttttttgttaacttaaatcctacttttagtcacttagtagttataaggtcctggacattaaaaacaaacaaacaaacaaacaaacaaacaarcaaacaaaaaaccagcaaaaaaccacccagaactcttttaccctcttttctcataaaatgaaggaataaaacccacctagcagcaatgttgtgctgattaagtaagataacatgctctttatattgtgtcaggagcacagaatgaagtaagaattattagccaattctcttggccctggaccttccacaggccattgcatgaacttcaatcagtacatatgcaagatggtaataggactgtatctgtattttttgtggcaggtagagaaaattgcagacagctaataataccagcatctattttcttttaaaagtacattactttaaaaggctcattattctttgtgttgaaaaaatagtttctacttttaagtgaattcctactattttttagagtaatattttggaagcatctcagttctatattgtgggaagcaaatacaaa

SEQ ID NO: 201102 - DNA, 451 bp, Homo sapiens
tgagccacctaatttgagtgaaagataactggaacagatgttgtcaagcacagtggttaagaatatgggacccaagtgtcaagactgggttgatgtgagtcctggctctgccgtaattatgcatgtaaatttacacagttccttaacccttctgtgtcattttcttctctatggtgggggtgataccattacctatatcatggggtggtccttaggacaacatatgattatactgcatataaataatataacatacagtaagattctatccccacaacaccatcatcatcatcattactattaccatcaatgctactrctactgctgttgttacttcttgtcagcttttagtagagagagagagacctttgaactgccttcatgaaaaagcccagtggaaaaaagaaaatggccacttggtacagtgcttagaatgatgccttgtacattg

SEQ ID NO: 201103 - DNA, 479 bp, Homo sapiens
ggaggttagaaacccaatcattcaagctgggccttagtacatggaaattctttactgatttggcaaagtgagaaaaccttgaagggctttcaagcaagtggagtgacgtagtttratttactttttataatactatttttgctctcttatattaaatgagtaataatcatgatataatggttgcttcatagcaagggcatcattctaagcaatttaaacatattaagttacttaatcttcatagcaaccctataattaattctgttttacagataaggtttataattactctttttattgcttactcagaaaattaaatttgagccttcttgtgctttagaacacacagaaaaaaaaagactttcaccaaacacaaaatagttacttatgaaacctcagctgccatgcccaaatatactattttgggcattaatatcctaattatttcagaccattgatggattactaaaaattgacaa

SEQ ID NO: 201104 - DNA, 479 bp, Homo sapiens
ggaggttagaaacccaatcattcaagctgggccttagtacatggaaattctttactgatttggcaaagtgagaaaaccttgaagggctttcaagcaagtggagtgacgtagtttaatttactttttataatactatttttgctctcttatattaaatgagtaataatcatgatataatggttgcttcatagcaagggcatcattctaagcaatttaaacatattaagttacttaatcttcatagcaaccctataattaattctgttttacagataaggtttataattactctttttattgcttactcagaaaattaaatttgagccttcttgtgctttagaacacacagaaaaaaaaagactttcaccaaacacaaaatagttacttatgaaacctcagctrccatgcccaaatatactattttgggcattaatatcctaattatttcagaccattgatggattactaaaaattgacaa

SEQ ID NO: 201105 - DNA, 577 bp, Homo sapiens
tttcaccaaacacaaaatagttacttatgaaacctcagctgccatgcccaaatatactattttgggcattaatatcctaattatttcagaccattgatggattactaaaaattgacaaactgggtagaaactgattatttttctggaaacacagatgaatgtagacagtcatactaataatcacaracaatagacaccatgtcaatactaccaatatagcagattatgagaaattagagttatttcagagaggacccagttattttttctgcttgcctatccccccctgattctccccagccccatgtacttttgatctgccacattcaccttcaccctcccaagtaaaacagctccttcttaatactctgagacacaatatgcaaagagctatggcatcatctataacagttttgaccaggtctgaagattttccccacaaaagacacaaaaccaagcatcattctaagattctaaagtattgaagacatgtattcagaccaacactcttacacaaatgttcacagcagcactattcataatccccaaagggtggaaacagcccaaatgcccacca

SEQ ID NO: 201106 - DNA, 577 bp, Homo sapiens
tttcaccaaacacaaaatagttacttatgaaacctcagctgccatgcccaaatatactattttgggcattaatatcctaattatttcagaccattgatggattactaaaaattgacaaactgggtagaaactgattatttttctggaaacacagatgaatgtagacagtcatactaataatcacagacaatagacaccatgtcaatactaccaatatagcagattatgagaaattagagttatttcagagaggacccagttattttttctgcttgcctatycccccctgattctccccagccccatgtacttttgatctgccacattcaccttcaccctcccaagtaaaacagctccttcttaatactctgagacacaatatgcaaagagctatggcatcatctataacagttttgaccaggtctgaagattttccccacaaaagacacaaaaccaagcatcattctaagattctaaagtattgaagacatgtattcagaccaacactcttacacaaatgttcacagcagcactattcataatccccaaagggtggaaacagcccaaatgcccacca

SEQ ID NO: 201107 - DNA, 645 bp, Homo sapiens
tgtccataccatctcaattctaatcctttaattccttttagcaaataagagtgtgaagaatgaaaaaaagagataaacctcaagcacagaggttgtggacaaaaataagttctcatgagaaatagacatttgtcttttttattaaacagctgctgagagtctgccgggcaatgcacaattgctttgcttcaccaaagcagatattcatggcttgcatgttgtggataaatggaaagattgtggggatctgactgccatttcctgagaccctcgtttatattcttatttaactatcygtgcatgattaagaacaaacatatttttgtacctctttccacatgcctatatacagatataggtgtagacacagatatggatgatatagatgtaagatgtagatcaaatacattttatatatgagttcttatatacatacagaaattgtatatattctaaaatatttatcagattgtatgatgaatcaataccagtagaaaataaattccaatttcctatgtgctttatttagtctttgtggatctgtagggtaagaaacttgactcaaactggtttaaacaaaaagaaaatttgtttgtgcatgtaactaaaatgtctatgggattacttcagtcacagtatgattca

SEQ ID NO: 201108 - DNA, 645 bp, Homo sapiens
tgtccataccatctcaattctaatcctttaattccttttagcaaataagagtgtgaagaatgaaaaaaagagataaacctcaagcacagaggttgtggacaaaaataagttctcatgagaaatagacatttgtcttttttattaaacagctgctgagagtctgccgggcaatgcacaattgctttgcttcaccaaagcagatattcatggcttgcatgttgtggataaatggaaagattgtggggatctgactgccatttcctgagaccctcgtttatattcttatttaactatctgtgcatgattaagaacaaacatatttttgtacctctttccacatgcctatatacagatataggtgtagacacagatatggatgatatagwtgtaagatgtagatcaaatacattttatatatgagttcttatatacatacagaaattgtatatattctaaaatatttatcagattgtatgatgaatcaataccagtagaaaataaattccaatttcctatgtgctttatttagtctttgtggatctgtagggtaagaaacttgactcaaactggtttaaacaaaaagaaaatttgtttgtgcatgtaactaaaatgtctatgggattacttcagtcacagtatgattca

SEQ ID NO: 201109 - DNA, 497 bp, Homo sapiens
tggttttgaaccttaagtgacaatctaagttgtgcaaaaattaactttacttctacaaaactctttgattttttgactcattggtcccctctgagagaagagttaattcagttttttttgaggattttttcagtccagtctagagattttcatgargctacttctgggtttaaactcattaccattcagaagatcatacaagccatcttgagattttcttcttccctctaattcagtcctgattttaaatgcctcaggactaagacaatttctgcaatgccactgaggagccaaatccagatcttggtcctttgctagagtttttaaatatgtaatttgtcttgtatgaatcttgagtgtgctacactttctatgctggcacttgaccttcatggcttatggccattgacttttagctgctctgccctctgagatgttcaagattttgccctagctttgataatcaggtccttaggttattctccaccctccaggtc

SEQ ID NO: 201110 - DNA, 474 bp, Homo sapiens
gtgacccttggccagagccttgagggctccacagggacattccaggcaaagggaagagtatatgcayggcatgatattatgaccaggtggcgtacagtgaaaattttgctctggcggcagtaagacatggaggatgcaaagaagccagatatgaggctgaagaggtgagactggaacaagttgtgaataccttatatactatcttaaggagtttaaactctactctgttgactagaaaggcaggagcaatctttaaaagagtgagagccacgatgaacttgggtatttagagacatggctcttttgttcataaaaagtatagggatggagaagcttgtttgagggaaataatgttaaatacccattggtcttgcaagtgatcattatcatcaaaattccattatctaaattaacgtattgggctaagtgcagtggttcccgtctttcgtcccagctacatgggaggctgaggca

SEQ ID NO: 201111 - DNA, 474 bp, Homo sapiens
gtgacccttggccagagccttgagggctccacagggacattccaggcaaagggaagagtatatgcatggcatgatattatgaccaggtggcgtacagtgaaaattttgctctggcggcagtaagacatggaggatgcaaagaagccagatatgaggctgaagaggtgagactggaacaagttgtgaataccttatatactatcttaaggagtttaaactctactctgttgactagaaaggcaggagcaatctttaaaagagtgagagccacgatgaacttgggtatttagagacatggctcttttgttcataaaaagtatagggatggagaagcttgtttgagggaaataatgttaaatacccattggtcttgcaagtgatcattatcatcaaaattccattatctaaattaacgtattgggctargtgcagtggttcccgtctttcgtcccagctacatgggaggctgaggca

SEQ ID NO: 201112 - DNA, 496 bp, Homo sapiens
gggtatagatctttgattccagattattctctgagaaataaagggtgactaccagttttggaggctaygcaactggtcgtggtattgacatcatttaataacacttgaaaaatactatgggacatgtgtgtgtgcgtgtttggttgaagaaattctcttttggcaatattaaatttgagatggctgttggccatctaaatggagaaatcaagttgtatatatacaataagtatatatctacacatacatacattacctatacctatacttatatctatctgagggagatgtctctcaggaaatgtttttgggactaatcaacatagagattttctgttgttgttgttgttaaatccataggactggttagatcacctagtatattagtcagggtatgctaggttctgctgcagaaacaaacaaatcttggaaattgtagtgacttaaccaagtaagatttatttcttgctcactcagagacagatgcaaatgtttc

SEQ ID NO: 201113 - DNA, 412 bp, Homo sapiens
aggaactgatgtttccacaactatatatatatatatatatatatatcttatcttttttgaacagtgaaggatgtaggactggatgtctttccagttacatctatcagccttttaaactagctctgctgtttcaagtgacgttgaacttcacttttccagtagatggcattgtagtctgtccagtggagaagagcttccttgaaccaataagacttaatttttttttcttctgagcagcttccttgataatgtcccccctccctcttgcattaaatactagcttgaggttataaataasaatcttgttttcgctagttacctgtaactctcaaaagatttgacttaagaaaaagaaaaaaaaagaaacagtagataatttaatatccctatatcaaatgaaaaaaatatagac

SEQ ID NO: 201114 - DNA, 697 bp, Homo sapiens
tcaaaattcctcttgttattgttttctagttttattccatcatgatcagagaagatacttgatattatttcaattttttgaatcgttaaagacttgttttgtggagtaacatattgtctatccttgagactgatccatgtgccaaagagaagaaggtgtattctgcagctgttggatgagatgttctgtaaatatctattaggtccatttagtccatagtctaggaaaagtctaagtcttctttgttgattttctatttgaccgatcttccaatgctgcaagtggggtgtcaaagtctccagctattactatattggggtatatcactttctttagctttaataatatttgcttaatatatatgggtattctagtgtttattgcatgtatatttacaattgttatatcctcttgctgaattgtttcttttctcatgacataatgaacttctttgtctattactatagtttttctcttgaagtytattttgtctgatataagtattactatacctactcttttatggttcccatttgcattaaacatctttttctataccttattttcagtctgtgtgtgtctttaaagatgaagtgtgctttttgcaggcaacagattgttgggtcttattttttatccattcagccactctaattatttgattggagagtttagtccatttacattcaatgttatt

SEQ ID NO: 201115 - DNA, 567 bp, Homo sapiens
agatctaatcctctatgtcccacatgctttcttggccccatatgcgctgaggaagtgcctattctctgcctttgtaggcgtgggatggctatatgtggagacgtgtgccgctggcattagctgcctctgtccagagcctgctgagccaggctatgggaactgcatgtgccccaccctcaacaccctgaatttctgaaggtrgatttcataaccccagctacagtagttggtgcaaattttagagtcataaaaacatccttacagtccactgaatcaagcagcgtagttgacccttgtgaatggggttagggcatctcctggacagtgtctcaccctattaccaccactctgaccctcctctgcaggctaggattttgataaaagagattccagccttattcccagatacagatcacttaaagcagtcggtcttcatgttccccttagcccattgcagcactgaggggaatattcctgcatgtataaaaggcactccatgcctggtatacattcagcaccatccggatgtaattggaatggctctcttctaatctggtttgggctctg

SEQ ID NO: 201116 - DNA, 568 bp, Homo sapiens
ttttttttccccacagcaaataaggtttatggattgcaatgaggagtctgtcgcattaaaataagtctttttacagtattttyccatttaagcctcacatggacagcatgctggattgggcccggaaaggcaaactcactagtttttcaatttagtttgttaatagcctgcctttcataaaagcatcaggcacaatcacaccaatccctaaatcaataggatgatgcagcaatgcctcacaggaatgatatttttgaaataaatatataccattcagccaggcccgtttgacatcaaatttatatactcaataagaaagcacaattaatggtcccgaactgtgttttccttcacctatttcacatttcaagaagcacaggatttcttaagaaaaaaaataataaggaaagaaaaagagaaaaaaacattccattcataaatgggatgaaggtattaaaaagcaatgccagcttgttggtgcctccccagaacctgtttatcttgcctccaacctcatttctctcttcatcctggtctttgctctgatgttactctttacagaggaatt

SEQ ID NO: 201117 - DNA, 568 bp, Homo sapiens
tagtgtcaagtttgtgaaaggaaacatcaggggagacatttatatactgaagctttctcaagtaagagcagcctgaacagcagctgataggtaaatcgtgctatatccagggtgcttaagggtaacagraatgttgagtctgagtcagagaagatacgtgagggtaaaaataatcaatatgtgccaatatttgagggactaagggtgtaaagtgattagacataccctgcactgtgagaaagcatggattaaactgatggtcaaaattttagaaacaatatgaccagtaaagctttcccacaactactacaaggcagtgaattctgagccacatattttgtgttagtaaaaactggtgaccttctgatggcattgtggtgggaaatttttctgcattgtgtaggaagctggattagataatttgtaggttttcttccaaatattagattctatatttttatgtttatttttctgcaggcatgctgagaaattgacatggcaatcaatgagagtttttgtttgaataaatatttcgaagtcaagcccatgttactcaggaattctattg

SEQ ID NO: 201118 - DNA, 568 bp, Homo sapiens
tagtgtcaagtttgtgaaaggaaacatcaggggagacatttatatactgaagctttctcaagtaagagcagcctgaacagcagctgataggtaaatcgtgctatatccagggtgcttaagggtaacagaaatgttgagtctgagtcagagaagatacgtgagggtaaaaataatcaatatgtgccaatatttgagggactaagggtgtaaagtgattagacataccctgcactgtgagaaagcatggattaaactgatggtcaaaattttagaaacaatatgaccagtaaagctttcccacaactactacaaggcagtgaattctgagccacatattttgtgttagtaaaaactggtgaccttctgatggcattgyggtgggaaatttttctgcattgtgtaggaagctggattagataatttgtaggttttcttccaaatattagattctatatttttatgtttatttttctgcaggcatgctgagaaattgacatggcaatcaatgagagtttttgtttgaataaatatttcgaagtcaagcccatgttactcaggaattctattg

SEQ ID NO: 201119 - DNA, 592 bp, Homo sapiens
aagtcttttgcctatttttctattggtttaactatctcttttttatctacgtacattattatattttgggtgagccctttgtaasttatatgtattgcaaatatttattcacattatgtagcttgacatttccatttcttaaggtatcttggtaaggtaaagttcttaggtttaatgtaggtgactttattaataattttctgtatgtttagagctttttgtatcttgttcagaaatttggcatcctgaggtcacgcagagctcttatttttttttttctaaaatatgtttgaacagattttcttatgctatgtcttatgatatttcttatgatgttttccaaaagcatcattgttccgtcctgcatatttagacctacagcccacaaggaagtgatttatgttaatggtatttattttaatttttgagggttttttatgtgtggatatgtaatttttctagtgatgtttattgaaattactatttttcatcttgctctatcatgttactttgtcaaaaaacaaaacttcacatgctcatgggtcttttctttctgagcatattgtattgcctgttcctacactaataccac

SEQ ID NO: 201120 - DNA, 554 bp, Homo sapiens
cccacattgtagcaaaagtgtgatgtcacagcataggttcccagaaaagcagactctggacaaaggcttctaggtgattatgctgcttgctgagtgtgagtccagagaacagaagtaaggaatcatgaggaatagacgacatggaaagaaagtcaaataaagggaaacattaccagctggccactgctgtaggtaactggttgctctattttatgaagatgtatttcaggaccatttctctggggccaaagaggagaaagaactttctacttgtttctgtctttcaatggtcatagttcacctcatgagttgttaactgccttggtcttttggaatatgcatgccyagactgcaagctgagtgggttcctatggcttcccacatggtgccaacagagacactccttggtgggaggcaagaaacgaaatcagttgctcaggtggtactggcaggaagtttcatagagctagcagaactgatcattgcagcagcagctgaaaaaggagatagatgagggtgagagattctgaaatgatgaataagaagcacccaat

SEQ ID NO: 201121 - DNA, 566 bp, Homo sapiens
aacagagataccatttaaaatgtcttctttgctaagcttaattatttctagcttttcatttaaagtgagagatgtgtgactcttccttttacwagaacatttaaatgccactgtagagttattaatcagcctcatttcaatattgttatctcttaggggataaggatgcccaagaagagagagaaaaatagggaaattggccagatggtggagcagtcaaaacacatataacatttatcaattaagtttgttgtcttaaatgggaagttgatagtaacccaaaacacttacaatggtaacatcaaagatcactgataacagatcaccataaagatatcataataattttaaaagtttgaaatatttagagaattacaaaaatgtgacataaagataagtgagcacatgctgtaggaaaatagcacctatagacttgtttgacacagaatgaacacatattttcaatttgtagaaaatgtaatatctgcaaagcacaataaagtgaagctcaataaaatgaggtgtggttgtacgtggatggccacctaataatcagctgccctgga

SEQ ID NO: 201122 - DNA, 566 bp, Homo sapiens
aacagagataccatttaaaatgtcttctttgctaagcttaattatttctagcttttcatttaaagtgagagatgtgtgactcttccttttacaagaacatttaaatgccactgtagagttattaatcagcctcatttcaatattgttatctcttaggggataaggatgcccaagaagagagagaaaaatagggaaattggccagatggtggagcagtcaaaacacatataacatttatcaattaagtttgttgtcttaaatgggaagttgatagtaacccaaaacacttacaatggtaacatcaaagatcactgataacagatcaccataaagatatcataataattttaaaagtttgaaatatttagagaattacaaaaatgtgacataaagataagtgagcacatgctgtaggaaaatagcacctatagacttgtttgacacagaatgaacacatattttcaatttgtagaaaatgtaatatctgcaaagcacaataaagtgaagctcaataaaatgaggtgtgkttgtacgtggatggccacctaataatcagctgccctgga

SEQ ID NO: 201123 - DNA, 485 bp, Homo sapiens
gacattatgattgtccttatattatatatacatgggtagatgaaagctatcaatagatagggaggcaaacagagattatagaaataaaaatggctgctcaggtattaggaaagtatgtgtaygtccccccctcccccttttttcaattttcgttttatgttgttttaatattatttcagtgataaatacatatatcttcttgtctttgtaactctgagccctgagagaaaacagcaccatgagaagcagtattataccaagaatgtggtggtttttaaggaatcatttgataaaaagaggaatcccagttggtaaggaacaatgctgagggcttctcaggagaaaaggtctgaatagggacagagagatggtcatatatggagaagaggcaatcaccctcctctgccaatgtgaaaaatggattcatgagaactcctgggctgggtgaccagagtcactcatctctgagctcctgccaggtcatc

SEQ ID NO: 201124 - DNA, 485 bp, Homo sapiens
gacattatgattgtccttatattatatatacatgggtagatgaaagctatcaatagatagggaggcaaacagagattatagaaataaaaatggctgctcaggtattaggaaagtatgtgtacgtccccccctcccccttttttcaattttcgttttatgttgttttaatattatttcagtgataaatacatatatcttcttgtctttgtaactctgagccctgagagaaaacagcaccatgagaagcagtattataccaagaatgtggtggtttttaaggaatcatttgataaaaagaggaatcccagttggtaaggaacaatgctgagggcttctcaggagaaaaggtctgaatagggamagagagatggtcatatatggagaagaggcaatcaccctcctctgccaatgtgaaaaatggattcatgagaactcctgggctgggtgaccagagtcactcatctctgagctcctgccaggtcatc

SEQ ID NO: 201125 - DNA, 485 bp, Homo sapiens
gacattatgattgtccttatattatatatacatgggtagatgaaagctatcaatagatagggaggcaaacagagattatagaaataaaaatggctgctcaggtattaggaaagtatgtgtacgtccccccctcccccttttttcaattttcgttttatgttgttttaatattatttcagtgataaatacatatatcttcttgtctttgtaactctgagccctgagagaaaacagcaccatgagaagcagtattataccaagaatgtggtggtttttaaggaatcatttgataaaaagaggaatcccagttggtaaggaacaatgctgagggcttctcaggagaaaaggtctgaatagggacagagagatggtcatatatggagaagaggcaatcaccctcctctgccaatgtgaaaaatggattcatgagaactcctgggctgggtgaccagagtcactcrtctctgagctcctgccaggtcatc

SEQ ID NO: 201126 - DNA, 574 bp, Homo sapiens
acgctgctggcgttgaagatggaggaagggaccaagagctgagaaatgcaggtggcctctagaagcaggaagaggcaaggagacagagtytccctaaaatgaggaatgcagccctgttgccccttgattatttgaatcattttaagccactaaattgccaaaagattccttcccttaaaagtcttccagattctacccaccctcttgcagtaatgagctccccacctatctctgagccccatttggaggcagggttgttcctgctttcacatgtcctccatcactcttgtctccctcagtgcctggcacgggcccaacgtagagcatgttcttggtaaatgtctgtggaaccaaagcccccaagggaaagctgatgatgcctttcagaaatccagctgcatgattacagttctttgggctccttctgtagtagctctgccagaaaagggaacaaggttagtttctcctgattttttcccagcgaacctccagtgggattagagatggcggctgcttccctgagtttccctttgccggccgtgggatccctgctctggggcctccgtgttgtgaa

SEQ ID NO: 201127 - DNA, 587 bp, Homo sapiens
caacatctggctggctagaggcaggctggaaaatactcaatctaaatagatggaggtgacgttgtgcagaaggaaagaaacatcccgagggagtgtccagtgggttttaatggccgtgtctagagaggcactcctgctctgtacaagggctggcttcttccctggatctaggggttgcccctgccttttagaagacagatgcacagccccagagcctagttgcctcccctgaccccctccaagccttccatagaggaaaggggcctcccatagcactggctgatgctcagagccaagagtttgctgcccagggagtaccttgagctagtgctgggtgtcagacttgactttccaactacttccagtgcaattcaaggtgttgattttgactgctggaactgtctcttccttctcagccctttctcaaggctgcctgtgtgcttgttcttattaaccaagcccagaagccagggatctggaagcctggcagtatttccaggaaagtagcttatttctctcasttgcttctccctgctgagcttagaacggcccagctttggacctcttgaaacatcagggcaaatttt

SEQ ID NO: 201128 - DNA, 633 bp, Homo sapiens
caatagtgctgggctctgaatgcaatctgaaataaaaattgttttcctgaatgtatttatcaaaatactgagtgcttaccaaatactggtgcttactgtactagttgacccgtacaatcagtttaagtaagctaacttaaatttatgacttttgacttattcctgatctattcacaggccgcttggaatgttgggccatctgtccttttgacatgaattttccctgtaatgggggtagagctggtaactgttggatcatctgattattggagacagaagtcctgtcacttgcccctgctgttaggaggtgggcttcctgaatggctttctgtatacatgaagaatttcaagaccttccgttaaggtggtcagagctaagtttcagcgtttacaagaggtctcttggctgacttgctataacttacagcaacctgatgtttggacaccttttcctttttttgtttttagtaaatatgatgagaaaaaagactyctcatgtgttttgttttattttgtgaattacttctattcttaccactcaaaaaaatgtttaaataagtaattgcgaaaaaatagggggttttgccaggcacagttggctcatgcctgtaattccagcactttggaaggatt

SEQ ID NO: 201129 - DNA, 633 bp, Homo sapiens
caatagtgctgggctctgaatgcaatctgaaataaaaattgttttcctgaatgtatttatcaaaatactgagtgcttaccaaatactggtgcttactgtactagttgacccgtacaatcagtttaagtaagctaacttaaatttatgacttttgacttattcctgatctattcacaggccgcttggaatgttgggccatctgtccttttgacatgaattttccctgtaatgggggtagagctggtaactgttggatcatctgattattggagacagaagtcctgtcacttgcccctgctgttaggaggtgggcttcctgaatggctttctgtatacatgaagaatttcaagaccttccgttaaggtggtcagagctaagtttcagcgtttacaagaggtctcttggctgacttgctataacttacagcaacctgatgtttggacaccttttcctttttttgtttttagtaaatatgatgagaaaaaagacttctcatstgttttgttttattttgtgaattacttctattcttaccactcaaaaaaatgtttaaataagtaattgcgaaaaaatagggggttttgccaggcacagttggctcatgcctgtaattccagcactttggaaggatt

SEQ ID NO: 201130 - DNA, 541 bp, Homo sapiens
  misc_feature (1)...(541): n = A,T,C or G
cttactgtacgcacacacacaaaacccaacaagaaaaggggcaggaggagactttgggaagtggtggatatgattatggccttgacagtggtgatggtttcataggtgtacatctaaccccaaactcactgagatgtatacaatgaatatgtacagrtttctatacgtcagacatatctaaatgaagtggttaaagatcaacattattatattttagaaacagcttctaccacatannanaacatcaggacatgagaaagtctttcctcatttagcacctagacaacagagcccaaacttaacatctggaatattctaaagaaaatgtactgcatttctttttcttccttctgtgggaacacctgtgcctattgcttgactgaacaatgaaattaggtttataggttttattttgtttatagatgattttacagccccactcatcattaatactgtctccatttgaattcacagactcaaaaaaccttcccactggccttttcttcataaattcactttagaagcaggttgttggatttca

SEQ ID NO: 201131 - DNA, 602 bp, Homo sapiens
tggggtgatggcaatgttctatattttgttttgagtggtgttatacctatgtaaataattaaagttcatcaagctatatacttaagatctgtgtatttgattcttcaattgtgaaaaacaagatgtttcacgaggaactattttaaaaacaaagccaacacaagtaacatataactattcagtaaaaagaagataactrgaatgtcaatagacctacctaatatatatttcaaagatttttttttcaagtatttaagtacaagtaagtagaaaaattcaggcttgtgggttaatatactggagagaaacaaagagaaaagagtaataaccatttcagtcactctgaatttgaaatagattgcttcacaatctagaggattttaagacgtgaaataactgaaagaaacaaaggtgaaaaagatcaaacacaggatgcagaactaacagctgtgacttagttaatgcatatgctgaataaaaacaaactcaacaaagcactgggaagccggcagcttccaagtaattaactaagcagaaacacatgcaatgtgttatcagccctatctcatattgaaagcaaggactccttcgttacaatggat

SEQ ID NO: 201132 - DNA, 602 bp, Homo sapiens
tggggtgatggcaatgttctatattttgttttgagtggtgttatacctatgtaaataattaaagttcatcaagctatatacttaagatctgtgtatttgattcttcaattgtgaaaaacaagatgtttcacgaggaactattttaaaaacaaagccaacacaagtaacatataactattcagtaaaaagaagataactagaatgtcaatagacctacctaatatatatttcaaagatttttttttcaagtatttaagtacaagtaagtagaaaaattcaggcttgtgggttaatatactggagagaaacaaagagaaaagagtaataaccatttcagtcactctgaatttgaaatagattgyttcacaatctagaggattttaagacgtgaaataactgaaagaaacaaaggtgaaaaagatcaaacacaggatgcagaactaacagctgtgacttagttaatgcatatgctgaataaaaacaaactcaacaaagcactgggaagccggcagcttccaagtaattaactaagcagaaacacatgcaatgtgttatcagccctatctcatattgaaagcaaggactccttcgttacaatggat

SEQ ID NO: 201133 - DNA, 480 bp, Homo sapiens
gtgaacccgggaagcagagcttggagtgagccgagattgcaccactgcactccagcctgggtgacakagcgagagtccgtctcaaataaaaagaataaaaaagaaaaaaaaagaagagatgagttgtacttctgggaataggttataaaaaaagactgtggcttccgtcttgtgtgtgtcctccttctcagatctcttgcactgaggaaagcaagtaaccacattgtgaacaaccttatgcaaaggcctacgtggcatggtaaggagctgaggccctcatttcaacagcccaccagaaactgaaccttgttaacagccacgagttagcttggaagcaaatccttcagccccagtcaagccttgaaaagactgcagttctagccaacagcttgcttacagcctcccgggaaatcttgagtcagaggcatcccgctaagtccctcctagtttcctgaccctgtgagataattaatgtttgtt

SEQ ID NO: 201134 - DNA, 560 bp, Homo sapiens
tgtataaaaagaaaacaaaattgcctttgtaaaagattaaatttttctatttaggaaaaaaagtcagccacattgcatttctaaaattactttccttgaggctatgatcaaatgctactttcatctataaaaagaacagaccacaaggctatagtcactttaaaattctctgcatgcaagaggccacatctgtgtgctaaagagtagaakgattgactagcagcttcaagccaataagaactttggtcttatctacaccagagaagttctagcaaagagtcaaaaactcgaagagttagaggacatctaaaagtccaagatctcaattcaaacataaaaagcagtgcaatgaacagatggttgggagagtgtgctctctcccacctttcctttacttttgtttcctcctctttctcaacccatggcagggagatggtcttttagcataataattcaccagaggtatgctgtaattggtgagcaatattagtaggagaaatgtttccttgtcttataaattctctactctgaagaatctcaaggatttatgagaaatgcag

SEQ ID NO: 201135 - DNA, 608 bp, Homo sapiens
actacatataacagattaagggttaataactgtgatctataaagtgataaaatagtataaaattgggcaatttatatgaatagcaattcagagaaaagcaaatctaaattatcaacaactatttgaaaaggagcttgaactaatagtagctgaggaagtactaattcaaataaaaatgtgatatctattttgcactatcttcactggaagaattaaaatgtagaagaataaagattatattagctatctatttctgtgtaacaaattaccccaaaacttaaaaccgcaaatgtttattatcttgcagttttcatggctgagggtctaggtatggctctgctgactcagggtctcgaaggctgcaattaacgtgtcarttgggcctatggtctcatctgaggcttgactgggagaaattgacttcaaagaccactcacatggttgttggcagcattcagctcccacaggactgttgggttgagggcctcagtttcccactggctgttaatccaaggcctccctcagttccttgtcccatgggcctctccacggaacacaaagtgctccatcaaaatgagtgaaccagacagcaggagagagctaataaa

SEQ ID NO: 201136 - DNA, 587 bp, Homo sapiens
aggaagctgcatcatttgtattacgtccttgttctggaggctggaaatctgcagggtactggcatggtcaggttctggtgagagctctcttcctggcttgttgaaggctgtcatcaccctgcttaccaaacctcttctttgtacatgcacagagagagggagtgagtcttagatttttgccacaggtctaggtaaaacactgcagagagagaagaaactttctttcagcttacagttacgttttctttcctttaagctttcatcaacacctttcttatagcttttaaggcttccacaaatccatccttccttggcccttttggcttgacaggcactggctttggggctcttccagcttctgtctgctgcccaatctcggtgctaatgccacrtattttaagtttttgttttggcagcaccccatatccaactatcaaaatctcttctggttattgtcactgcataacaaaccactccaaagcttagtgagtgaaaacaacagtcatttgttttgcttttaaatctgcaatttggggagggcttggcagggatagcttgtctctgttccatgtggtgtcaacggggga

SEQ ID NO: 201137 - DNA, 590 bp, Homo sapiens
taaagagggaagcatttcaggtcactttggtccaatattggaattatttgtttttgttaacttttattttaggttcaaggttacatgtgcagttttgttatatagataatttgtgtgtcacaggggtttggagtacaaattattttgtcatccaggtagtgaacttaatatccaattggtagtttttcagttctcctcctcctcctacactccatcctcaagtatgacccagtatctgttgttcccttctttgtgtccacgtgtcctcaatgtttagcagccacatataagtaagaatatgtggtaattggttttctgttcctgtgttagtttgcttaggagaatggcctccagctccatctatgttgctgcaaaagacatgatctcaccacattttctttatccagtctaccattgataggcatttatattggttccatgtctttgctattgtgagtagtgctgcagtgaacatacacacgcataggtctttatggtagaacaatttatattcctttggatatatacccaataatggaattactgsgtgaaatggtagctccattttaagttctgggagaaattgccca

SEQ ID NO: 201138 - DNA, 575 bp, Homo sapiens
tacaggcacacgccaccatgccctgctcatttttgtatttttagtagagacagcatttcaccatgttggccaggctggtcttgaactccagacctcagctgatcggcccatctcagcctcccaaagtgctgggattacaggtgtgagctamtacgcccaacttgttgatggcttctttacagaaacagtaagcatgatagaacaagagaaagataaatggttcaagggttcgagtctaggtgaacattctcctctttgtcatcttcttattggtgaactacattccacttcttttgacttcttgttgacttctgatctagatcatctaggtctttttttgaggatttgtacaaaggtggttcctatttagttttacctgacatttggcatgttttcagttgcatttgtatgattcattacagagattattcttgggatttcaccatttccaatttcacctggggtatgcaaatttctacacagtagtgccagaaataaaaatcaaagctcatttgtatttgaaatggtatcatctctttcctcaggtggtagattcacaaactatattttttccc

SEQ ID NO: 201139 - DNA, 575 bp, Homo sapiens
tacaggcacacgccaccatgccctgctcatttttgtatttttagtagagacagcatttcaccatgttggccaggctggtcttgaactccagacctcagctgatcggcccatctcagcctcccaaagtgctgggattacaggtgtgagctaatacgcccaacttgttgatggcttctttacagaaacagtaagcatgatagaacaagagaaagataaatggttcaagggttcgagtctaggtgaacattctcctctttgtcatcttcttattggtgaactacattccacttcttttgacttcttgttgacttctgatctagatcatctaggtctttttttgaggatttgtacaaaggtggttcctatttagttttacctgacatttggcatgttttcagttgcatttrtatgattcattacagagattattcttgggatttcaccatttccaatttcacctggggtatgcaaatttctacacagtagtgccagaaataaaaatcaaagctcatttgtatttgaaatggtatcatctctttcctcaggtggtagattcacaaactatattttttccc

SEQ ID NO: 201140 - DNA, 225 bp, Homo sapiens
catgcatgacaccaagaggcaggcttccctccacccacactcccattttattatttaatagaaacatacagcatatccagcatttagcattttttagatagagtaataattatgcaatgcmtgtaaatggtgctttacagtaccatgttttagaaatagtaatggtagtttatcaatcccacctgttccgaggtgatgggaaaaattttaacatggcaaaagttc

SEQ ID NO: 201141 - DNA, 563 bp, Homo sapiens
tcttaagatttaaagacgtatacatcattctaaagtagtgctattattgaaatccattatagcttcaatctgtgctaattatatagttagagaagatagtaatatagaaaataagaaacacaatgctctagatataagctatgcaaatcaaaaacttagttctattaactgaatggatgtctctgatatgtatctcctttcaacccccacacttcaacacttatttaagtcatacaaatttcagcattggtaatttcctattcagaagaccctgcaggcagtcatacatgatgagaagccacaattttctggtcaagacaggaaaaataaaatgaataaccttcaccaaactctataaaagatacacatttgtcaacttgcagtgcacatgctctggagaatatatttatgtctttggcgcttatctttcttgaaatgatgttcaggaaaataattttttaaaaaacctttgatraactccttaatccctatcttctcaatgcaatatattcttaatcttctgtaagtgatagctttcacttttgaatctcttacttgtgggc

SEQ ID NO: 201142 - DNA, 470 bp, Homo sapiens
ccatcattagctggaataagttcattctgaagcagctagctaccatggcccaccaccaaaatgagtttactctgtttctattcataactctacattgtgrtgcacagtccttggtggattctccttattggtccacctacattatatgtagtatggaaactctaactgtaagaatttagcaattttttaacttctatagtgcatgaaggagtttagcgtcccaacaagaaccataaagaaagacattttctaaatattgaagtgaagttcatatgattagcaccaaaaaattacaagtattcagtaaacatgcataatttttttttctgctaaagaatcctataaagtcataactaggggttatagagataaagagcaaagtacttttcttgttatcacacaccactcagcacaatgcttctgacagcagagtctccagcagacaccagctatgtgtcctataattcagt

SEQ ID NO: 201143 - DNA, 458 bp, Homo sapiens
taatgctccaaatataaaaatatatatatatatatacacacacatgcctgaaaaatgataaagatatttaataattaagtttgtggtatccatatttacctgacattgaagatgtcacaaatttggcagaaatakatttttttcattttcctgtttgttgacagtgttgatggtaatacttaattattctattagcaaagtaattaattaaaacctagctaatctgggctctatgctatgaaatggtattaaatacagcataatatttggtcctaaacaccaaagttcttatcatcaggttgtggaagcaaagtataaatacaatgaacccaaatccaaatggaaaatcatcaggtagtatctggaccattataatgctgttttcccaaaaattgaactggacatgtggagatagggacaggtgtttggaagcagaactgaagattacaaagaaatgt

SEQ ID NO: 201144 - DNA, 579 bp, Homo sapiens
gcaactggagcctcagatgatggctcccttttaccaaggacccttggataggcctctgagaaagatctgactgcgttttccccaaaacagtgcctcctagcagcatgaagccgttaagcgtggtcatcatccctatcctaatggcagtttcctgtacctcttcagagggaggattgatggcagcgcagcccacctgcagtggctgctgcgaagacaccatctgcattggggaagcaattgctggggttgcacactccatggagccggcaagagctgggaacaggagggggccctgtccccttctgagctggcagggctggagaccccagacccccacccaggtgtggctgcagccacccagctgtsgctgtggatccatgcatccctgcactctcagaggcctgggaatccagctgcccccgcaggctcagaagttcctactcccactgcctggcctctcctcactttcggtgcccgatccaatttcagaccaaagttgaggcccctcctggatgatgtcacaacccggacaggtgtgcatgcacttgaggcagtgctggcacaccagccccctgctgc

SEQ ID NO: 201145 - DNA, 628 bp, Homo sapiens
cgcgtgcaccaccatgtttggctaatttttgtacttttggtagagatggggtttcaccatgttggttggccaggctggtctcgacctcctgacctcaggtgatccacctgcctcagcctcccaaagtgctgggaatagtcatgarccaccatccctggccaatacattttaatgggaaacaacattaagtcattgtttcagccacttaccttgaaagcagtttattaattgtgttgtaaaatagaaagatgattcagataattcctgctttcaagtagtttgcaaagtatatgcatgtgttaggagaaaggggtgtgtaggtaggaatagcgtgaggcagtgaaccactaatggtctatatacttcaagaactttgaaattctgatttatttggaagtgtattgttaaaaaatacagattgtgaacagtaaaaactattaaattacaatgttttaagacacatatttttgttcctggtataaaggcataataagcaatatatataactgtggttttctttttaaacttttagaatgctaagctacagtcattaaactaacaaaaaattttaagtaatttcatgtatactgaaaataggggctggcaactcttttaatatatacttttc

SEQ ID NO: 201146 - DNA, 237 bp, Homo sapiens
gaattcctttttttactggtagacacttaggttgttttctaatctttttctaataaagtagagttttttaaagcttagtagagtttctaaaatatatgtactactctaacacttttytcccgttgagaaatagtgctcttttttaacttacaaacaaaagtttcatttaatacacttttttctttaattacatctttattttatttttttttttgtcctgcaatttcggttttcaga

SEQ ID NO: 201147 - DNA, 465 bp, Homo sapiens
attgttacatcatcaaccacccaaaactcattatcttagcaaacaaattatttattcacatgaaatctgtggattcccagagagtctacttatacaggctatgcttggatagtggttctgcttcaagttgtgggtctggttgggcttaactggaacgggtctactttaggtcattctgtggaggtagtagctatctagtcatgatggttaattttatgtgtmaaccacttctgggccatgggatgcacaattatttggtcaaacattgtgagtgtgtctgtgagggtatttttggagaacattaacatttaaatgcataaaccaattacagtggagtaccctccttaacatgtgtgggtctcatccaattagttgaaggcctgattagaacatgaaggctgattctctcacaagtaagagggaactcctcttgcctgcccgccttgagctgacaattgtcttttt

SEQ ID NO: 201148 - DNA, 540 bp, Homo sapiens
agaacatttaaagcattgacccaggaaatccaatataatctaccaagatttccagaagggaagagcctagaaaacwgaaagaaagccattattaaatgattaacatttaatacaagaatatttctgcctcttttccctaaaattttattttggccttgtgagacactgggcagggaactcatccatgccatggcagccttctcacttaccaaaactgtgagttaataaatggctgctgcttaaagctgctaaattcatagtaacttgtttatagaaatagaaaagtaatacactatctaaattaatgcttataattattgtagttttgttctgagacaacacttaaatgttaagaacttttaatcacataaaatataatttatatttaaataaattcaatgatatgtttaattaaggagttgtaataatgacaccatatttacttttaaatgaaagcataatcaacgcatgagcagtttgaaaatttgcctgtgtttaaagaggttttgtgtaataatagaaaaagcactaaaatagtca

SEQ ID NO: 201149 - DNA, 540 bp, Homo sapiens
agaacatttaaagcattgacccaggaaatccaatataatctaccaagatttccagaagggaagagcctagaaaactgaaagaaagccattattaaatgattaacatttaatacaagaatatttctgcctcttttccctaaaattttattttggccttgtgagacactgggcagggaactcatccatgccatggcagccttctcacttaccaaaactgtgagttaataaatggctgctgcttaaagctgctaaattcatagtaacttgtttatagaaatagaaaagtaatacactatctaaattaatgcttataattattgtagttttgttctgagacaacacttaaatgttaagaacttttaatcacataaaatataatttatatttaaataaattcaatgatatgtttaattaaggagttgtaataatgrcaccatatttacttttaaatgaaagcataatcaacgcatgagcagtttgaaaatttgcctgtgtttaaagaggttttgtgtaataatagaaaaagcactaaaatagtca

SEQ ID NO: 201150 - DNA, 488 bp, Homo sapiens
tgatatatagggatttcttataggaatttgagctcacatgatggtgggggatgattaaatagcctatataaggcttccatgttggcatctggtgctggaggttgaagtcagcagaacaggaatttgggaagggtacatgggtgtgaagtgtggagaacaaggagagcctgaaacaggcaagaacggactagaacttgcaccagtatctcaccccctccaggctatcaacctcaatgattcaaatgaacttcaggataaattaggacctttgtcatggagatccacatgtacatagttcaggagttgaagaartcaaaggaggatgtggtagttcttgaaggagctataggctcaactgttgttccttgctaacaagatgagctagccaatgagaacaaaactgtgtgaatcacaagggtacctgcatcatagttcccttgaaccaactttccacatgtgaaaataatatatctgttactcctctctgc

SEQ ID NO: 201151 - DNA, 366 bp, Homo sapiens
aatctaacgttctctcagatgttctaaaaactgcatacactgtaagatttcaacttacctgcatgcctaaaccaattacttaattacacattctaatttgkagtttcaagttgtcattttattaggccaaattctcttaagcttcacaataatatatttatatacatatacatatataaccagaattatagatatatacaaacatatatataattattactatattactataattttgattctttggaaactttttcttcttaattctaaatcttccagggttagtgatctatcccagtaaactcaggttgcccaccctataaagcagacagttatcatccagttcattgatgttacttaaaacca

SEQ ID NO: 201152 - DNA, 588 bp, Homo sapiens
gtgacacacagttgctgccatggcaagcctccttctgtggaaagcctgctcaaggaattgaagaggcaaattctccaacagaaatgaactctgtgcatactggctgcagccatagtcagcactgaacttttacatgcagagaaagttggcagcactgctgtggagagtataatatttatcttctccaatgggctgtgaacttctagaggggagagtctgcttggttctgtgtcattcccggtgckcagtctgcatttttgccaaacatttgagagaaggattgaaaaaaaggagaaaaaaattatatcatctttatcttcttggccatacctaagggcacggagaaaggtacaattggaatgttctccttcagatccaatcgatgtaaatcttttgtatgcattaaataaccaatgataaagactttaaatccaccccttccagacccaagcactagtcccccaagcagcaaattcatatgcccacaagttcacatcttttacataaaataacaaccaataaataattgaactttaaatcattcactctggagatttaaaatgaatctttgggccattcacacagctc

SEQ ID NO: 201153 - DNA, 487 bp, Homo sapiens
ttgaagataaagtggggtgatgcctaatatattgctcaataaatatttttttaatgratttgtaaacaaaacttccagaaagaattatgggtattgattatatgctaatcatagtagtcagcatgtataagaaggtaaaaactacatatattttaggaccaggcagctcttattcattctggcagtgacatggaagtgagaaaggccagctgacctaaagagatcaaacttttgaccttgccctctttaatccaggaccctaaaccactgtggtaactagacaattgtgatatatgaatactttgaaaaccttaaaaatgaagaacattgagtctttcatgaaaatactcctgatcacagtgtttgcattacaaactgaaatccagtggaataaaccctggtgggcctatgtggtaaaactatcatatttttcctaatgactgtgcaaactcattataaaatcataattttgaggtttcatacccat

SEQ ID NO: 201154 - DNA, 506 bp, Homo sapiens
gaaaaaatagtcttccaataaatcaaagttattgatagcctaagtctcactaaaattaataattttattttttgaaaaaaaaccacaaaagctaatattaaatgaagaaaagggaaaaaggatgggaaaaagaagaaaggaggagaataagatactctgagctgtagataagtcttggtaagctaatttatttccagtctcatamaatacaaatggtccccaacttaaaatgatttaacatttttcagctttatgataggcttatcaggacataacctgatgcatttcaacttatgatattttcaacttacaaataaatgtatggaggtgtaagcccaacataaagaacatctgtagacctcatcagttacgttttccagagagtggaagaaaaggtcagagtcatgaaatgacatcaactgataactagagacaatgacttttccctagatgtttctagtaagaaacaaattaataaacacaactaatagatgcatgcacatgta

SEQ ID NO: 201155 - DNA, 506 bp, Homo sapiens
gaaaaaatagtcttccaataaatcaaagttattgatagcctaagtctcactaaaattaataattttattttttgaaaaaaaaccacaaaagctaatattaaatgaagaaaagggaaaaaggatgggaaaaagaagaaaggaggagaataagatactctgagctgtagataagtcttggtaagctaatttatttccagtctcatacaatacaaatggtccccaacttaaaatgatttaacatttttcagctttatgataggcttatcaggacataacctgatgcatttcaacttatgatattttcaacttacaaataaatgtatggaggtgtaagcccawcataaagaacatctgtagacctcatcagttacgttttccagagagtggaagaaaaggtcagagtcatgaaatgacatcaactgataactagagacaatgacttttccctagatgtttctagtaagaaacaaattaataaacacaactaatagatgcatgcacatgta

SEQ ID NO: 201156 - DNA, 425 bp, Homo sapiens
gaattcttttgggtatgaacttcctgtgggatatgccataaagtgaaggggaaactgaggaatgatcttgccagttaataaacatgaatttaaaaaattaatacatatgaatacaaatacatttaaaaattcattgtcaaccttgagtcacccagataagtggtaaatgattgctaagcacaaatgtggagtttctgcctttaatacgcagctagtcctctgcactcaattctctggctttccaaacagtcagtcaaaaacaatagattggattccagttaacctaattcttcartctgcttggtgtcagtttgaggttgacgatagtgagactataggtaagcttatcaccaaaacattgtactatggggagtatagctgagaagccatcattctgcgctctgagatctagtcacttgtcaatt

SEQ ID NO: 201157 - DNA, 425 bp, Homo sapiens
gaattcttttgggtatgaacttcctgtgggatatgccataaagtgaaggggaaactgaggaatgatcttgccagttaataaacatgaatttaaaaaattaatacatatgaatacaaatacatttaaaaattcattgtcaaccttgagtcacccagataagtggtaaatgattgctaagcacaaatgtggagtttctgcctttaatacgcagctagtcctctgcactcaattctctggctttccaaacagtcagtcaaaaacaatagattggattccagttaacctaattcttcagtctgcttggtgtcagtttgaggtkgacgatagtgagactataggtaagcttatcaccaaaacattgtactatggggagtatagctgagaagccatcattctgcgctctgagatctagtcacttgtcaatt

SEQ ID NO: 201158 - DNA, 466 bp, Homo sapiens
agcattggaaacaatcaccatgaacttacaatgtgaaatgttgaataatggatataaaatagagactactaaaatagtaggaaaaatagagtcataaagtgaaaaactgggttttttaaaatggattttagaaacaaaatgaaataaattaatgacaaagttatgttttgcaacccaaatgagcttagctagctcacatctctttccacagtagccaattatctttactttgcaacacttccatctagttgaattggtcaactcagttattagtcagtgatctgagagagagaaaactttcctggggggattaytgttctattcctatggattcatggctgttttgatacttaactttagtcagataccaaagaacatctggtgtttcataaaatgtcaccttcgaatagaaatttggcaatcacgtgctgagttctggaaaatgacatactgtctaaccagaatc

SEQ ID NO: 201159 - DNA, 407 bp, Homo sapiens
tcacaaaatgtctgaaatctgggttttcatgtgaaatttctcatccaggatgagaagggagaaaacatgtatcttggctagatctgctaaggaaaaccagagacatacagtcgttaaagcagtaaaagcagattttaytcaggaactattgcagtgggtgccagggggaggaagacctcagcatagaactgggctcagttccgaatacagcatggacaagcagggatccagccaaagaagggtgggtatcagtgaatgggaaattactaagaagagacatcaggggttggggggattctggttgaacctacctttttaggatttttgctgaaggcaggccaggtgatcagacatcacctgggggatggtgggaatgaaaaatttggtcagatgtagaggcaatcaga

SEQ ID NO: 201160 - DNA, 534 bp, Homo sapiens
ttatcattcccactttacaaatagagaaaaccaagacttagtaccatcaggtagcttgccctatggaaggagaagaaccttgaaagtacaagcaaagaagataagcaaatctgtgtttgggaatttccagattctcagtaaaacaggaagcaagttcatctgaaaaaagatggscaacttaatctcttaaccagagatttttttttttccagtgattctttaagagactggagacattttggaataggtttttttaaaaaaaatatattaccagccctagtttaaatggttctttgcaaagctgtatacttaacagagaacaattcatttgcatttttggcatctttttttctgaaacatatggatggtctgatgcaactcaccaacagctggaactgggaagggtttgcaaatacactgggatgggaatgaggagaagagattcagaaggacagagatttagggcccaaacattgtattctaccaaagcagtcagatacaaacaaccccatcattccttcaaggacctgtgca

SEQ ID NO: 201161 - DNA, 534 bp, Homo sapiens
ttatcattcccactttacaaatagagaaaaccaagacttagtaccatcaggtagcttgccctatggaaggagaagaaccttgaaagtacaagcaaagaagataagcaaatctgtgtttgggaatttccagattctcagtaaaacaggaagcaagttcatctgaaaaaagatgggcaacttaatctcttaaccagagatttttttttttccagtgattctttaagagactggagacattttggaataggtttttttwaaaaaaatatattaccagccctagtttaaatggttctttgcaaagctgtatacttaacagagaacaattcatttgcatttttggcatctttttttctgaaacatatggatggtctgatgcaactcaccaacagctggaactgggaagggtttgcaaatacactgggatgggaatgaggagaagagattcagaaggacagagatttagggcccaaacattgtattctaccaaagcagtcagatacaaacaaccccatcattccttcaaggacctgtgca

SEQ ID NO: 201162 - DNA, 534 bp, Homo sapiens
ttatcattcccactttacaaatagagaaaaccaagacttagtaccatcaggtagcttgccctatggaaggagaagaaccttgaaagtacaagcaaagaagataagcaaatctgtgtttgggaatttccagattctcagtaaaacaggaagcaagttcatctgaaaaaagatgggcaacttaatctcttaaccagagatttttttttttccagtgattctttaagagactggagacattttggaataggtttttttaaaaaaaatatattaccagccctagtttaaatggttctttgyaaagctgtatacttaacagagaacaattcatttgcatttttggcatctttttttctgaaacatatggatggtctgatgcaactcaccaacagctggaactgggaagggtttgcaaatacactgggatgggaatgaggagaagagattcagaaggacagagatttagggcccaaacattgtattctaccaaagcagtcagatacaaacaaccccatcattccttcaaggacctgtgca

SEQ ID NO: 201163 - DNA, 534 bp, Homo sapiens
ttatcattcccactttacaaatagagaaaaccaagacttagtaccatcaggtagcttgccctatggaaggagaagaaccttgaaagtacaagcaaagaagataagcaaatctgtgtttgggaatttccagattctcagtaaaacaggaagcaagttcatctgaaaaaagatgggcaacttaatctcttaaccagagatttttttttttccagtgattctttaagagactggagacattttggaataggtttttttaaaaaaaatatattaccagccctagtttaaatggttctttgcaaagctgtatacttaacagagaacaattcatttgcatttttggcatctttttttctgaaacatatggatggtctgatrcaactcaccaacagctggaactgggaagggtttgcaaatacactgggatgggaatgaggagaagagattcagaaggacagagatttagggcccaaacattgtattctaccaaagcagtcagatacaaacaaccccatcattccttcaaggacctgtgca

SEQ ID NO: 201164 - DNA, 330 bp, Homo sapiens
catttatgctgcaggtaccactgtagggaaacaaattagaccagtagtcaccagacttttctataagggcaaaatagcaaatacttcaactttgcaagccatacaatcttagttgcaactgttgaactctaccagtgtagtatgaaattagccacagaggttctgtaagtaaatgggcatggatgtgctccaattagactttatttacaaaaccaggcaataggccagaattggcccaagggccttagtttgcgcttttcctrtattagaccatccctagtcatcaatacctaattaagataagattattatacaacaatccagactgtt

SEQ ID NO: 201165 - DNA, 524 bp, Homo sapiens
tttaacttttattataaagggaacatgtgcagatttgttacatgggtaaattgcatgatgctgaggcttgcagtcccaatgataccatcactcaggccataaacatcgtacccaacaggtgcagaaccccatttctgattggcttaaactgagacaggatttcattagtccayataaatgaagagtttagggctataggcatgactggatccagatgctcaaacgatgacattaagaatttctctctctccttccctcagctgttttcctctgggtggtctttagtcttaggtagcctttctcctcatggaggcaagctggttgctaccagtaactcatggcttgcattctgcagtggagtaactccaatgggaatagctttcccttccctggggtttcagcctaaattttgtggctgactcttattgagtcatttgagtcagatatccacccatgaaccagtccatggcccaggaaatgcagtgtcaagaacgaccacctgtcaattcaggggtggggtcacc

SEQ ID NO: 201166 - DNA, 446 bp, Homo sapiens
tagctttcaggctcagtgtgacagggaaaatagaacatggaggactgaaagccagtttgctgaaactaatcttgtggccctaacctagctgcaaagaaagttagaaaatgaaaaaaaaaatacataaaatattttataagcattagtgtgtctgcctcaaaaaagattgtagattytggttaaagtgcttaaaatatagactctatttgaatatctagaaattgcttgattctctagtttacctggcctatgtggacacttctacaactaatttaaacttagcttgagtttaaattaactcaagtgaacatggtgtaacataatttaatttgcattgtgaaaggcaaatatgaccttggcttagaggagggaaatagaagaaagtagtaatctcctctgagagagaaacctgcaaataagcagtattttaaccagtataaattaaa

SEQ ID NO: 201167 - DNA, 511 bp, Homo sapiens
  misc_feature (1)...(511): n = A,T,C or G
tcttaagccagtttctcttccctgataagtgagggagaagttgagatttctgggccccagatttatagcattctttccctgctaaaaatgttttaagcctaaatgcatgcctattattacatacaagttttacatgaacaaaactgcaaaagagaaaccatgttgacctaaggaaacttctgcagcagagtgttgaatgggattcttcctggtgttcaggaattggagacataaatwttggtggaacattcataccctccagggcttattaaaaggtgtccaacctagccctactatccccagtcatcattccaatgactttcctcaccagttgtatatgagaagaaaacagcgaaaggagaggcgagggactggttagaaagaaaaagaaacccctcagggttcccaaggcattagcctgagaaaagagattgctgtagcttttctttaccccacctgtggtgcttcctgctgctttccaccaagaaaataacctttagagattnnnnnn

SEQ ID NO: 201168 - DNA, 585 bp, Homo sapiens
ggaatgaggcttcctgagaatcagctcctttcctgtcttgacactccatgctcaagttcacagtccaggagatatttacgtagagacattatgtagcgagaacgtggagcttggatactatttcttctgttttttccttccagaaaaaggtttaatttctttctaagttaattaaatcataaatggtaaaagtcaacactgacccagaaattaaattttgctaggctcccagaagatacgtaggttgggagaaagtaaaattataatcacactttgggatgctcagacactgtmctgcctctcagaccagaatgcttggtccagaattcccaatgtttatttaagaccagtttgtgtgtgtttgtgagctggagggtgaaggtgggcagactgctaggacaacagacagtaggatagacagtgggaaggaagcaaggtgctagggaacaagttttggagagagagctcctaattcttctccaagctccatcataaatttgccaacctgtgttatgtaagccaccaagctttccaacttctccaagtcctgaaaagtggaatccaaggtcccttctacctcaacaa

SEQ ID NO: 201169 - DNA, 568 bp, Homo sapiens
ccctgtctccatccccaattcccagaataaggaacgctttaatcaggaaagagactgattataggccagcaaagttcagtctttaccgatttctgcagagaatggcacttgctggaacacagccactaggcagcaagacagagcaaactagaagttagctgattgggaatttggtcccagccctcactgatcgttgtgcgactgtgggtaggtcattcctttttgggtcacagctgattaactcagtcctgtagctagtcaggcagtcattttattcatctgccaggcatttacccagagcccactctgtatttgccgctgtaatgtacaagtagcacctacgtaagtaggtgccagggatccagagataagcaaaataacacacatccctgcccttatggagcttacagcctagtaggcaaacaccaaatcacataagtacctgtaaattaatggtgatatatgttagtaagggaaaggaaaggtgcatcattataaggagagacaggagaaattcacaaatctggagarcagagcagagttgctgcaaagctgaaggatgaaggat

SEQ ID NO: 201170 - DNA, 567 bp, Homo sapiens
ttgtaggcacttgggtttggggtccctgaattatgcacaaaaattcctatgaaaatcaggtgacttgtaagtgtttgtctttcccggtgtcagacgtcttaaatggctcaatttcttgcctataactaccgatgttcagatttatttaagtgctcatgtattcgttgaagaacaaaccacatgttttccaattttagcaaactgttactcattgtaataaaaaggaccccagcttaaataaatgatttcagtttgatcatcatattctcatggttctgtgtcatctttaggtgcatacatatatactctatttgttatggaccattcaagttgaaaatataaagggaggatacatatttatagcccaaatttatctgttccaaactaaatgcaggataatctgacccattcaaagccttcagcttcccagatctcatagtgacttgttttgactactggmtgagccagtttgcagattggtgtgtcaccataaaacttctattggaacattcttcagtttgcaaatgcaagtcatcttgagaccaaacaaatggtcttatttatagg

SEQ ID NO: 201171 - DNA, 512 bp, Homo sapiens
cagaattctgtgaaatttttcatgtacatatgattctcattaactttaaagagctgtcaaggtatgttggggacatccatccccccaaaaaaatctgtttcagcctgaatcagatttctcccttaacaacctctgtgacacacagaggtgacgtgagagtcccatcatcacaaagataatgggggagccaggatgacaactcaggtcttctctttcaattcttgtcctattcaccacaacaatatctaaaagcaatttgctggcatacccagaaaatactgcattatttttaaattctttccattttttcttctccyctatttaagtgatcacatttagaagcactttatcaatatcataaagaaaaaaacacactccctttgaaacaaccccaatgccatcagagctgcaggaggaaagttcaaggccaccagtgctggtccaattcagaggaagctaaaatgtctcaggttgctgaaggaaaggatgtcaatccaagcggtggcaattgg

SEQ ID NO: 201172 - DNA, 396 bp, Homo sapiens
catttcttgtaactatacaaataaaggagcaatggaattgattctacaaagatctgctggaatacatttcctttatacttttcctttcccccatgccatctccaacaacaaatcaaagtacagctgagaagaacatcagtggatgttacaatcagagaggccaaggctgttgggggaaaattcattctccttgtctcagaataggacacccattttcasccccctgccaacacccaaacttttacatgagaatagggtcccttttataagacctggcagatgctactgtaactaagtgaccaaacttagcaacactgattttggtacaaccaattatcatgcgatcacaaccagatacatgccagcaccacctgggctgtattcttacccaaatgg

SEQ ID NO: 201173 - DNA, 414 bp, Homo sapiens
tcacatcattcatttcttgtaactatacaaataaaggagcaatggaattgattctacaaagatctgctggaatacatttcctttatacttttcctttcccccatgccatctccaacaacaaatcaaagtacagctgagaagaacatcagtggatgttacaatcagagaggccaaggctgttgggggaaaattcattctccttgtctcagaataggacacccattttcagccccctgccaacacccaaacttttacatgagaatagggtcccttttataagacctggcagatgctactgtaactmagtgaccaaacttagcaacactgattttggtacaaccaattatcatgcgatcacaaccagatacatgccagcaccacctgggctgtattcttacccaaatggtctaacag

SEQ ID NO: 201174 - DNA, 437 bp, Homo sapiens
cctgggcctcccaaagtgctgtgattatagatgtgagccaccacgcctggcccaccctgggttttgacaaccaaaaatgtctccttacattgtcaaatgttccctcaggggttgagcagggggatagcaatcactgtgtagaggcagttagaataatattacacctgctgtgatttaagtgagctcaggccctggggaccagggctgaatcctggagggagcagcctccaggccaaggcctgaatctaattgaggttttttttgattgctaaaaccaggtttcttttaaagtctggcaacctctacagtgcttaaaatgagagggtttatttgaatcatgattctgtgatactagagctggaagggaccctaaaacccaatgtcttcaacsccttcctggttcagagaggaaagtaggagcgacagggctagaattc

SEQ ID NO: 201175 - DNA, 468 bp, Homo sapiens
ttctttttgctcatgtgtgctttggttattctgggtattttgtagatccattaaaattttaagattttaaataaaaaatttctttaaaattttggtattttgatagagattgcattgaatctgtagattgttttgggtagtatagatattttaacaatattacttttttcaatccatgaacatgaaatattttttgtttttttatgtcttcttcaattactttcatcaatgttgtatagttttcattgtagagattgtttagttctccagtcacatttattgctaaatattttttatatttgtarctattgtaaatgggattcctttcttgatttctttttcagattgttcactgtgggcatatagaaatgctactgatttgttgtatgttgattttatattctaattctttactgagttggtttatcagtactaacagtttttttggtggagtctttagatttttta

SEQ ID NO: 201176 - DNA, 468 bp, Homo sapiens
ttctttttgctcatgtgtgctttggttattctgggtattttgtagatccattaaaattttaagattttaaataaaaaatttctttaaaattttggtattttgatagagattgcattgaatctgtagattgttttgggtagtatagatattttaacaatattacttttttcaatccatgaacatgaaatattttttgtttttttatgtcttcttcaattactttcatcaatgttgtatagttttcattgtagagattgtttagttctccagtcacatttattgctaaatattttttatatttgtaactattgtaaatgggattcctttcttgatttctttttcagattgttcactgtgggcmtatagaaatgctactgatttgttgtatgttgattttatattctaattctttactgagttggtttatcagtactaacagtttttttggtggagtctttagatttttta

SEQ ID NO: 201177 - DNA, 631 bp, Homo sapiens
acatcttggcacatatatctctttccaaaatgtttgattatttccatagaataagttattagatgatgaactagaaatatacactttaaaaagtatatcctgatttctttatgcagtcccttattaattaccatttaatgctaattattaataaagacaatagcaaggggatatttatgatttaaacatgccagtaactcttctaagtgctttagcataggagttcataygatgcttacaatcacccagcaaggctgaatctattatcatcccgtgtcctatgtgagaaaccttgaatcacaggaagacgaagcagcttgcccaggattgttccgcttataaatatcagattccaattcaggaacatggctacagcatatttgctgtttatttggtttgatgttataagtgatactgcagttaatatgcttgagtttcaatctttaggcaccctcagtagcagctatgtggcatgacttttaatttttatagaatggaagattctagaagtgtaaatgttctcccacagcattattcacattttagtggaaatgatggagatatctgaatgtctccttaacaggttccccaagtagatgcaacataaagggatgatggaaataagcaagaa

SEQ ID NO: 201178 - DNA, 591 bp, Homo sapiens
ctttcatgtgattggttttctctccctattctgtctgttcttactctacagttgatggaactctgctcatttgaaaggatttgctaaatggctagagtttctgggtctgaaaggaagacgtttgctgcctgggtggttataagagtctgaacttcctcagctgtagtgtcacagatgcagggaggcaggcacacagagaaacacttctcttcattaataaaggagattaaccttaacatttcttggcagctgttcagcaggcggcttgttatcacgacaagcattttttttaaagactcacaatgataaacaatatgtcacaacagctgtcaaagtgtgttttatgcagtgactttccatacgtagcttaggggggttttttttagaattgtccctgtgactaaccatgtcctgttggctgaaggcagctatagagggtgatatggtttggctgtgtctccacccaaatctcatcttgaattgtagctcccataattcccatgtgttgtgggagggacctggtgggagwtaattgaatcatggagtcagtttccccctactcttcttgtggtagtaagtctcacaagatct

SEQ ID NO: 201179 - DNA, 575 bp, Homo sapiens
ccaggtgtgctggttattctctgtttccaccccatccacttgtaactcctgttcaccacaccttgtgcccaggaactgactcctccagacctcatcacccagctcctctaccagccgtgataaaggactgtggtcagtgttggtcagtgggaggcaccagcaggggtttggaaggtagaaagaaaaagactggagggtttctttccacttgttttctgctttggcaacatggttctggcaacggcggcatccattcagagccacagcccctctcacatagcccctctgccatggaagtagctttcraggggctccagcaacactatatcctcctcttggtccttcagatccaaggatgataacagctttctgatgataccagtttctgggttcctcaacacccttcttactcttcttaaccctgtaaatattcccttcaaacccacgaatactttctttatgaaattttatcccataaacccatttgagaggaatcttatttcctgctagggccactattgattcacccttcttgagtgcttgaatttaattctgtgggcaataggcacaaataa

SEQ ID NO: 201180 - DNA, 609 bp, Homo sapiens
tgtgtttgctgtcttggtagcttgtttatatttttctgcagcccttatgacaatttaaaatcatatttatgtgtgaattggtttcatgtccttctttctctcctagccatggaaacagagatcatgtctattttatttctcaccatacaggcagtacatatagtggctaaagtcatggggttctggaggctgggtgaaaattccagctctgccccttactaactattaactattgacagctgtgttactcaaccatttrgcttccgtttctttacttctacagtgacgtcataacagaaaatacctcacatgtttttcattcagaacaagaagaaaaggcacataaagcacttagaataaatttctatatcaacccactctgttggcattgttagtgtcttataaccctgatcatttcaatatctgcacttaggacccactgtgtaaatatctgttggatgaatggatgcatgctacctcctatgatgacagtctattatgacagggccttgtctttggtcataaggtaaaaatgtggtgggtcagtagacgcctggttactctgcaagtttcccagctccaagagtattatcactagcatgtcagtat

SEQ ID NO: 201181 - DNA, 567 bp, Homo sapiens
aattggcattcttcgtggaaggggcatggatttaaattgtcgtgagttcaaataccaatcccacctagcacttactatacaggcgaatgtagataagtgatataactcttataagtttttatttttttgtcattttggaaagtgggaaaattraatatctatccatatattaagtgagtatagctaagttcataacccaggcagtgttaaatacgtgctattttgccttctccttcccaaaagagatcctctctgcactgagtggagcttgtggggtcctctctttgaggaattgaaggcaaagaaacctcagcctgtaatcaagtagttataactctccctatgaaattcaagattgagggtttcaactcatccaaatcaccttgcaccacctatctttggacaaatgatagtcttggaagaacaaatgtgtttcaggacactaaaaagacttaatctatgattgaaaaaatactagcccactcagtacaaaacctttgtaagacttcactggaaaattttaacaatgtaatttgtgacagggggttgctgcctttagaggagagg

SEQ ID NO: 201182 - DNA, 302 bp, Homo sapiens
ccttgtacttccttgtctcctagctacctgttctgtaaacaaccttcctgcctttgccatgcccagacaagtccagatatgccttcccgcctagtaacagacwcttttcccacctagtaacggactcttcacctaatagaccctattcaattttaaaccttagccaatcgagttagcttagattgtgaggtccaaccccagccaatggggaaaggacacagaagtgctaggaactgcattagagataaaaacccctttcctaccctgctcggtgtgctcttgcgataatgactggcgcaagc

SEQ ID NO: 201183 - DNA, 302 bp, Homo sapiens
ccttgtacttccttgtctcctagctacctgttctgtaaacaaccttcctgcctttgccatgcccagacaagtccagatatgccttcccgcctagtaacagactcttttcccacctagtaacggactctycacctaatagaccctattcaattttaaaccttagccaatcgagttagcttagattgtgaggtccaaccccagccaatggggaaaggacacagaagtgctaggaactgcattagagataaaaacccctttcctaccctgctcggtgtgctcttgcgataatgactggcgcaagc

SEQ ID NO: 201184 - DNA, 486 bp, Homo sapiens
agtcatcattaatcaatgccaagcgaaaaaaatcttaagatgttttaaatttgtgatgccagtgtgattcagaaatttggaaaaatggatttcaaagtaatgctgtgagcagataggtcattgtataaacataactaatggttcattcattcattcctacaataatgattcagtgtcagatttgggtgttgaaaatacagcagagaacaaacacaacagaaggtccatatttgcggagcctacattttgtgggggaagagagatgataaacaaaatgaatgagttaagtagatagcacgttagatcatccaaaatgctatggggggraaaaaccctgggaatagggagatggcatgtgaagtggaagaaggttatgattttcaatagagtgatcagagaaagcctcattgagaagacacactaaggaggccatgtggctggaggggactgagttagggggtgaatagtaggtgagaccagaggggg

SEQ ID NO: 201185 - DNA, 488 bp, Homo sapiens
ttagtcatcattaatcaatgccaagcgaaaaaaatcttaagatgttttaaatttgtgatgccagtgtgattcagaaatttggaaaaatggatttcaaagtaatgctgtgagcagataggtcattgtataaacataactaatggttcattcattcattcctacaataatgattcagtgtcagatttgggtgttgaaaatacagcagagaacaaacacaacagaaggtccatatttgcggagcctacattttgtgggggaagagagatgataaacaaaatgaatgagttaagtagatagcacgttagatcatccaaaatgctatggggggaaaaaaccctgggaatagggagatggcatgtgaagtggaagaaggttatgattttcaatagagtgatcagagaaagcctcattgagaagacacrctaaggaggccatgtggctggaggggactgagttagggggtgaatagtaggtgagaccagaggggg

SEQ ID NO: 201186 - DNA, 411 bp, Homo sapiens
atctacagaaggggatgcccagttattctctctccccctactctcgaaactcactcattaattcatgtatttatcaaaatggcatgtcaataccctgagcagccactcaggacaggactcctgcattgctacaataccgatcccccagcctctcctctgcccctcaacctgccttagctgctgtcattttatctacactggacaggacctgtccatttcctgtcttccttccaattatgtttgtccatgtctggacctggctggttgttccctgcagccccttgctggttaccttactctgacagtgatgcagccagaggcactaaagggttagcccaagggccccagccctgcatttggcccatgaaggggcttacgatcctcrttttctgggtttgggtgatgttagag

SEQ ID NO: 201187 - DNA, 553 bp, Homo sapiens
tctgctgcaagtttgcaggagtttgctggagtttgctgtggaggtccactctagaccctgtttgccggggtatcaccagcggaggctgcagaacagcaaagattgctgcctgttccttcctctggaagctttgtcccagaggggcacattattttgtgatggaatatgaaatatttctttgcttgaaatatggagcaaacaaattgactaagtctagttcratgagtttcattttcctaatagtcaggcacattttctaattatgcattgtatttgccagattttaagactagacaggatttcacacaaatggcaaggctgtactttattacaagctcaagttctggggtatatctttatgtagtttgctgaaaccaagtggcatgcctaaataattttattccccctgattcttttataagtaaaggtttctaatacaatgtgtctgcttaaattaagatgttggcactagaatagagtcaattccattgagacagtatccctttaagcaaatatctatagggtattgccagcacaaaaatccattttacag

SEQ ID NO: 201188 - DNA, 569 bp, Homo sapiens
atctactggtcagtagcaaaatagggcaattatcattaacaatagtttatggtataattcaaaatagctagaggagtggatttacagtgttcccaacacaaagaaatgatctgcatttgaggtgatggacatcccaattatcctgatgtgatcattacacattatatgcttatgtcaaaatatcacatgtatcctataaatatgtacaactattgtacactcataaaaattaaaaataagaaaaaatttaaaacaataagttaaacctaaatgtactgtattattcaaaattctgccaaagtatcaacccatgaaaaatggaaatacatgtctacgtaaaggtttgtattgaaatgtttatagagatattatttggaacagcctaaaattggaaatgttcttaatatcccaagaacaggaaatgtctacctacaatgtgatacatccatacaatggcgtactactcagcaataaaactgaacaaagtactcctacgtgctataacacaaataacttcaaaaatattatgcagagtraaagaatccggtcacaaaagactacatgtgtta

SEQ ID NO: 201189 - DNA, 633 bp, Homo sapiens
catcccataaagaattactgttattgtgagtcctcacaactcctgactgttcattatagcctgttctctctggagcataaaaatcaccatgctaattgacttgtggtgaagtttaattgacaaataggtgacttttaaaaattgttctgggccgtttgccaggtgctcgtaagtctgtgatagtgcctcagtgacttgatactgagttatgcttcctgcaggtagctctttatttactattgtaaggagatgctcttaaacaattttgtcttgtcaattctgttttcagaattctctcatggtttgttcctcattgtcttttgaagacaatctaaacccattaatagggtattcagagactgataacctcaccaaaaaccagtttccyttccttcctagacacacagctggatacatttccctgccttctttaaaatttgcagtgaccatgtgactgagttccagccaatggaagaaaagcagaagtgatgtgtgtcattttggagtgaggcttttaagaagggactgaggccccttcacgctatttttctttttgtctgccagatatggaagacaatgaggccttaaggcaggagttgcccaagctttttctgaaaagaatcagatggtaaa

SEQ ID NO: 201190 - DNA, 406 bp, Homo sapiens
gtgaatacatcctttattcttggtgaggaaagtgtgttagaatgatgcagagtcagtttacttgcatctgctcattcggtttcacagggagtcaaataggttagttcaatcattattataaccaagtgccaaggagttaattggagaatggtcagtgcagttcagaccagtcatcttaatgagcaaaataattgggcattgtcagcactctaatcctgctgttaaagactagctcttggcttcattgggcatgtttcttccaatgcagcaggccactctgctcggcatccctgcctgtgccctgccctcattaagaccatstgtcctttaggaaccagtgtcctaaacagagggggaaggatgtccagaatgtcttttttttctctctctctttcaggcagaattc

SEQ ID NO: 201191 - DNA, 521 bp, Homo sapiens
tggcacagacatggccttatccccaggaacgccctcccagtttccaagctggaccctcatattctccttttctacaggaatcatttccagggtcgctagctcttaatgcaatcatttgttcattcattcagtcagtcagttgatctgccaatacatactaattgttgaatggctatcatatcccttatacttaccttgagaagctcagaggcttttgcaggaggtgttagaacccataggatgggacctcacccccatcctaaaatgactctctttgaagacaattcctatttggaggcaagygatctgcttagtctttgtgcagtttattgtgttcagagagggaacacatgaggagaaatattccctttcctaattgccaaatttaagacaggtgcttcctggcctgctcaaatattaaactcactctgtacatgggcacttacaaccgacaacaggcaggctgtgcctctgcagctctgaatctgtgcccagggccctgacagacagcagctggttca

SEQ ID NO: 201192 - DNA, 426 bp, Homo sapiens
aagggcagtggtgagaaagaaagaaaaaaacccctgctgattatgtatgcaaaagtcgcagcacggtgctagagtgctaggcacatcatcagtgcataataaagrtgtgcttactctccccggggatgagattaaatcctgggtgcaaagcaagtcttgatttccatgctcgaagcacaaattacaaggatggtttttcaggattgttttggggatttgcccaaatgttgctcaaccaaatttcaaacgagggtggtctctttgacacaggctacttttcagatttcctgctcccctgcactccagcaccctgagtcagcagtcactttttgacaggaggcccagcaggtgctttctgagctgtcatgattaccttccagtgaaaacacactacgcttcttgctgccagtttggaagtgcaggcaa

SEQ ID NO: 201193 - DNA, 418 bp, Homo sapiens
agaaagaaagaaaaaaacccctgctgattatgtatgcaaaagtcgcagcacggtgctagagtgctaggcacatcatcagtgcataataaaggtgtgcttactctccccggggatgagattaaatcctgggtgcaaagcaagtcttgatttccatgctckaagcacaaattacaaggatggtttttcaggattgttttggggatttgcccaaatgttgctcaaccaaatttcaaacgagggtggtctctttgacacaggctacttttcagatttcctgctcccctgcactccagcaccctgagtcagcagtcactttttgacaggaggcccagcaggtgctttctgagctgtcatgattaccttccagtgaaaacacactacgcttcttgctgccagtttggaagtgcaggcaacctcc

SEQ ID NO: 201194 - DNA, 426 bp, Homo sapiens
aagggcagtggtgagaaagaaagaaaaaaacccctgctgattatgtatgcaaaagtcgcagcacggtgctagagtgctaggcacatcatcagtgcataataaaggtgtgcttactctccccggggatgagattaaatcctgggtgcaaagcaagtcttgatttccatgctcgaagcacaaattacaaggatggtttttcaggattgttttggggatttgcccaaatgttgctcaaccaaatttcaaacgagggtggtctctttgacacaggctacytttcagatttcctgctcccctgcactccagcaccctgagtcagcagtcactttttgacaggaggcccagcaggtgctttctgagctgtcatgattaccttccagtgaaaacacactacgcttcttgctgccagtttggaagtgcaggcaa

SEQ ID NO: 201195 - DNA, 365 bp, Homo sapiens
ctacaggatgggagaaaatattaataaactctgcatgtaacagaattctaatatccagaatctacaaggracataaatcaacaagcaaaaacaaataatctcatttaaaaatgggcaaaggatatgaacagattcttctcaaaagaagatgtaaaattggccaacaaaaatatgaaaaaaatgcccaacatcattaatcatcagaaaaattcaaatcaaaaccacaaagaaatatcatctcataccagtcagaatggcaattattaaaaaatcaaaaataacagatgctggcaaggctatggagagaaaggaatatactgttagtgggaatgcaaactagttcagccactatggaaagcagtttg

SEQ ID NO: 201196 - DNA, 365 bp, Homo sapiens
ctacaggatgggagaaaatattaataaactctgcatgtaacagaattctaatatccagaatctacaaggaacataaatcaacaagcaaaaacaaataatctcatttaaaaatgggcaaaggatatgaacagattcttctcaaaagaagatgtaaaattggccaacaaaaatatgaaaaaaatgcccaacatcattaatcatcagaaaaattcaaatcaaaaccacaaagaaatatcatctcataccagtcagaatgrcaattattaaaaaatcaaaaataacagatgctggcaaggctatggagagaaaggaatatactgttagtgggaatgcaaactagttcagccactatggaaagcagtttg

SEQ ID NO: 201197 - DNA, 575 bp, Homo sapiens
cttgtaataattctgtgcccctgtttaactgtgatttagaagattataacagccgtatttcatatttgactccttacatatcaaagacaaaggtttttgtttctgctccaaaagagagcaaaattgaaaaggaaaactcacttcagtcttgatcartcaagtgtctttaacttaagaagaaacttgctaatcagcatggcacccatagcaaacagctgccttactagtgaaaaaggtacactgatggaacagctaaaatagcgatgtggctcctaatgcttaacagaacgatcctaatcctgctggtcgttatcattacagattttatagttgcctttttaactgcttctgagcacagtttgaaaatatatgttaattgccattgactatttaaaatagtttttactgaaatcagtccataagattaagacaagccctaataagtaatattttcctttggaatggaggtgagaaaggtaaatttcataacaccagtattaatcttggtttaattctaataggatgccacgtcaactgcatgttgtgattaataaaagcattttattcttaaaaaa

SEQ ID NO: 201198 - DNA, 575 bp, Homo sapiens
cttgtaataattctgtgcccctgtttaactgtgatttagaagattataacagccgtatttcatatttgactccttacatatcaaagacaaaggtttttgtttctgctccaaaagagagcaaaattgaaaaggaaaactcacttcagtcttgatcaatcaagtgtctttaacttaagaagaaacttgctaatcagcatggcacccatagcaaacagctgccttactagtgaaaaaggtacactgatggaacagctaaaatagcgatgtggctcctaatgyttaacagaacgatcctaatcctgctggtcgttatcattacagattttatagttgcctttttaactgcttctgagcacagtttgaaaatatatgttaattgccattgactatttaaaatagtttttactgaaatcagtccataagattaagacaagccctaataagtaatattttcctttggaatggaggtgagaaaggtaaatttcataacaccagtattaatcttggtttaattctaataggatgccacgtcaactgcatgttgtgattaataaaagcattttattcttaaaaaa

SEQ ID NO: 201199 - DNA, 425 bp, Homo sapiens
ccatgtctttcctattgtgaatagtgcttcaatgaacatacaagtgcatttgtctttttggtagaacaatttattttcctctgggtatagacccagtaaggggattgctgggtagaatggtagttctgttttaagttcttcgagaaatctcaaaactactttccaygctagatgcactaatttacattcccactaacagtgtataagtgtttccttttctctgcaacttccccaacatctgttattttttgacattttagtaatggccattctgactagtatgagttggtatctcattgtagtttttgattcactctaatgaatagtgatgtactttttaatatatttgttggtcacatgtatgccttcttttgagaagtgtctattcatgtcttctgcccattttaatggggttacttggtttt

SEQ ID NO: 201200 - DNA, 574 bp, Homo sapiens
aggtttatgttatttataaattgcccagtctgtggaattctgctatagcatcacacaagggactaaggcagggtgtttctggaagagactagtatttgaattagcagactgagtaaagatctgccttccccaataaggctgagtatcatctgttctttcgagggcctgcataggaaaaaagggtggaagaaaggtrggttctctctctcttcttgggctgggacatctgtcttctcctgtccttggacatcagaactcctgattctagggcctttggactcaggctgagttttgttactggctctcctggttctccagcttgcagacagcagatggtagaacttcttagcctccataatcacgtgagccaattcccatcatatttatgttatatatatatatatatatatatatatatatatacacacacacacacacacacacatatatatcttattggttttgtttttctgaagaactctgtctaatacactttgatagaaaccatatagccagtctgaaggatggaaatggaatggtgccctacttggcctcttgtagcaagatcttgatg

SEQ ID NO: 201201 - DNA, 540 bp, Homo sapiens
ctaaggcaactgtgtaaatagaggcaattctgaaaacttggactgtcaaagaaattgggcaagtctggctgggcgcagtggctcatgcctataatcccagcactttgggaggttgaggcaggcagatcacctgaggtcaggagttcgagaccagcctggccaacatggtgaaaccccatctctactaaaaatacaaaaattagccaagcatggtggtgggcacctgtaccagctactcgggaggctgaggcaggggaatcacttgaacccaggaggcagaggttgcagtgagccgaggtcatgccactgcactccagcctgggtgacagagcaagactctatctcaaaaacaaaaacaaacaaacaaacaaacaaaaaaagaaattgggcaaggccaaaagtccagttgaggctggaamtgatatatcgcaccagctgtgttctgaccttctctagtgtctgatacctatttccaatatccagtggctgttctactgtttaggggctgagaagaaggggtaggattgtggtaagtgattt

SEQ ID NO: 201202 - DNA, 605 bp, Homo sapiens
aatctgatgtggagatagctcattcaagctccccagtcacctctcatctgttccactagaaaatcagtgaatcaattaagatatactgagtccccactttgtatcacactttactcggcactgaggtgatacaagaagcaaaaaacattttctatgagttcaagcagcttatgatctgccgagtaagaacagatgtaaacttctaaattagactktaaaatatgctataaggcattggtttaaaagtgagcaacagtcccaccttctcacccctcccagcccattactacccttcccagcctctggtaatcattcttctactctctatgtccctgagttcaattgttttgatttttagatcccataaatatgagaacatgtgatgcttgtctttctgtgactggcttatttcacttaacataatgatttccagttccatccatgttattgcttatttcacattgcatgtctgtatcaaaacatctcatatatcccataaataatatacctactatgaacccacaaaaattaaaaataaaaataaaattttaaaaaatgggcagtatgggttaggataggcagagaaagcttctgaggttaaatcc

SEQ ID NO: 201203 - DNA, 533 bp, Homo sapiens
aagcttgctcatacagctcctatttggtctagaagatctaagatggcctcactcatacctggcccctcagctacgatggttagaatacagagccttcctttgatgtgatctctcgggcaggatagcctagactttatrtggccctggcttcacggtgagcaaaaatttaaattgcaaggcttcttaatgcatgggctttgaggtcacataacattgcctcccccatttgattggtaaaagcaagtcacagggctagttcatattcattcacatggaaggagactgatacggtttggatttgtgtccctgcccaaatctcatgtcgaattgtaatctccagtattggaggaagggcctagtgcgaggtgattggatcatgggggctgatttcccctttgctgtttttgtgacagtgagtgagttttcatgagatctgatcgtttaaaggtgtgtagcacttcccccttctctctcttcctcctgctctggccatgtgaagacatgcctgcttgcttcccctttgccttccaccg

SEQ ID NO: 201204 - DNA, 533 bp, Homo sapiens
aagcttgctcatacagctcctatttggtctagaagatctaagatggcctcactcatacctggcccctcagctacgatggttagaatacagagccttcctttgatgtgatctctcgggcaggatagcctagactttatatggccctggcttcacggtgagcaaaaatttaaattgcaaggcttcttaatgcatgggctttgaggtcacataacattgcctcccccatttgattggtaaaagcaagtcacagggctagttcatattcattcacatggaaggagactgatacggtttggatttgtgtccctgcccaaatctcatgtcgaattgtaatctccagtattggaggaagggcctagtgsgaggtgattggatcatgggggctgatttcccctttgctgtttttgtgacagtgagtgagttttcatgagatctgatcgtttaaaggtgtgtagcacttcccccttctctctcttcctcctgctctggccatgtgaagacatgcctgcttgcttcccctttgccttccaccg

SEQ ID NO: 201205 - DNA, 441 bp, Homo sapiens
gaaaatgaacaatgtataatcattgtcctgtaatattgaaattatcttgagaacatgtagttttctgcaactttctcttttggaaaatggcactagagtgagagctgcctatatttggcaaaaagattggatagagatatatggcttatttttgtctaatatsgatgtcctgttaaaactgtagaatttagtatgcatggctttcttaggcagctcaggagttttatgaaataggatttttttttttgtctctttagagtaattcctgctttccattcctcacttgtcgaactggctcccccagctcccagtgtttgtcgttgggatctcctaaatccttatcttcttcttggaagatgccaaagcgctataccgtcaagctcaacttcagactaggaagtggttttatatgtgcatatttattcttgctctatagcccta

SEQ ID NO: 201206 - DNA, 411 bp, Homo sapiens
tgccaatgagcaaagtgagccaaatggaaattttactgaactggagccaggacccttggttgcagctgatggcaaaccatctgtttttttgtttgtttgtttttccccaaataagctgtaaatctgaggttttatatgaagactcacttttaaaatgttagcatctaatttgaatttttcaaaagcaggtctcaggcaggcttcagtttggtggacaccaacttgtgacttctgatctcaagcgagggagtcggagaggacctttccatgttaactgttaaayggtttgggcaggaattgcctgataaattaattcctagaaatagttatgtgtgaactttgacctgggagttgatttctacattgagatgtaattaattttcagtaagtatgttagtgataatttggggg

SEQ ID NO: 201207 - DNA, 551 bp, Homo sapiens
agctataataatgagctccagggggaccttgctactgcctttgaagtaacacatttctctgaatgtctttgaaatttctcttcgtacattgtttgtttctggtttactctgtcttcttgtagaggggggtctgacagttgttgcagggagggggaggtccaggatgacagctcaggaatgtgtaaattgaacaaaacaaaaacacaaacaaaacaaaataagaaagaaagagaggaagaaaaaaaagacttccccacccactgccagagcaggaatgtaagcactttcactggagttgctgaagcatcttgcaggctgcagrcagagaatgacagccaaggacagatgcagctgggatgcctgaagctgtcacagaggaagtggcctgctggagacaggttctagggagagcagagggacaagcccaggggaggagcagagaggcagagcaggagagggactctgccctctactccactccccaggattttaaaagcataagaatcctgaggctgaaatagtttaggctccccacatgccaagcagagaat

SEQ ID NO: 201208 - DNA, 551 bp, Homo sapiens
agctataataatgagctccagggggaccttgctactgcctttgaagtaacacatttctctgaatgtctttgaaatttctcttcgtacattgtttgtttctggtttactctgtcttcttgtagaggggggtctgacagttgttgcagggagggggaggtccaggatgacagctcaggaatgtgtaaattgaacaaaacaaaaacacaaacaaaacaaaataagaaagaaagagaggaagaaaaaaaagacttccccacccactgccagagcaggaatgtaagcactttcactggagttgctgaagcatcttgcaggctgcaggcagagratgacagccaaggacagatgcagctgggatgcctgaagctgtcacagaggaagtggcctgctggagacaggttctagggagagcagagggacaagcccaggggaggagcagagaggcagagcaggagagggactctgccctctactccactccccaggattttaaaagcataagaatcctgaggctgaaatagtttaggctccccacatgccaagcagagaat

SEQ ID NO: 201209 - DNA, 319 bp, Homo sapiens
gatttctgggaagcaggacagaaaacagccggggtcttatgcaaactggagcaagacactgaattattatttagtagtaatttctccctctttttaccttactctatctccagctgccaagagcccatttagcattcttactggrtaagataattgggaactagttttcctccaaaatatgctgatcagtcacagtcacaaggaggagggtatgttcccagaccaaagaagagggttttaaaataatttatctggcaacactctgagagagtaatatgttggttttcagagacctatagggctaagaagatgtaactgg

SEQ ID NO: 201210 - DNA, 322 bp, Homo sapiens
actgtataggaaacagctgcagtatttattggggcctggtaaggcctcattaccatcccacctcctcacagggggtattgcctccaaatggagtgcagtggacggagtaattgactctgctgccctggcacctggtgtttctgccaaatgcctaaggtcagtgctgcaaaaaaaaacccaaaaaccaaaaccaaamcaaaacaaaacaaaaaaaccggatggaaggaggcctccagtgagagtggggagtggagctgagagatgatcagaagggatttcatttgtttgtatttttcttccctcacataaggaatgtttattg

SEQ ID NO: 201211 - DNA, 322 bp, Homo sapiens
actgtataggaaacagctgcagtatttattggggcctggtaaggcctcattaccatcccacctcctcacagggggtattgcctccaaatggagtgcagtggacggagtaattgactctgctgccctggcacctggtgtttctgccaaatgcctaaggtcagtgctgcaaaaaaaaacccaaaaaccaaaaccaaaccaaaacaaaacaaaaaaaccggatggaaggaggcctccagtgagagtggggagtggagcygagagatgatcagaagggatttcatttgtttgtatttttcttccctcacataaggaatgtttattg

SEQ ID NO: 201212 - DNA, 422 bp, Homo sapiens
atgtataccatttgtacttctgaaagtaagcccaataaccatgtagtattgtttttatatattgctgtactttgttaatgttcatgaaaattattttttatttactgtyttcatttctacatctatttgtctttattatctggcagtttctctgtgatgtgtctgggtaaaatattcttcctttttttcccttcctttccttcttcttccctgtctctttcttcctctctttctctctctctttccctcttttgtctctcttttctcctgcttgagttcaatggagttctttagtgtgtcaatttatgtcattcataaattatgcaagcccattacatgggtgagtatgagttgacttctaattcattctaacgtgagagttctatcaagcctggaacttagggagagtttcctgttacttt

SEQ ID NO: 201213 - DNA, 453 bp, Homo sapiens
  misc_feature (1)...(453): n = A,T,C or G
tctgttaacgatgtataccatttgtacttctgaaagtaagcccaataaccatgtagtattgtttttatatattgctgtactttgttaatgttcatgaaaattattttttatttactgtcttcatttctacatctatttgtctttattatctggcagtttctctgtgatgtgtctrggtaaaatattcttcctttttttcccttcctttccttcttcttccctgtctctttcttcctctctttctctctctctttccctcttttgtctctcttttctcctgcttgagttcaatggagttctttagtgtgtcaatttatgtcattcataaattatgcaagcccattacatgggtgagtatgagttgacttctaattcattctaacgtgagagttctatcaagcctggaacttagggagagtttcctgttactttttcttactntgcagcctttta

SEQ ID NO: 201214 - DNA, 444 bp, Homo sapiens
  misc_feature (1)...(444): n = A,T,C or G
gtacttctgaaagtaagcccaataaccatgtagtattgtttttatatattgctgtactttgttaatgttcatgaaaattattttttatttactgtcttcatttctacatctatttgtctttattatctggcagtttctctgtgatgtgtctgggtaaaatattcttcctttttttcccttcctttccttcttcttccctgtctctttcttcctctctttctctctctctttccctcttttgtctctcttttctcctgcttgagttcaatggagttctttagtgtgtcaatttatgtcattcataaattatgcaagcccattacatgggtgagtatgagttgacttctaattcattctaacrtgagagttctatcaagcctggaacttagggagagtttcctgttactttttcttactntgcagccttttacccctgtatgtcat

SEQ ID NO: 201215 - DNA, 564 bp, Homo sapiens
tctacaactgctttttgactttgttgcctcccacttataagaatctgggtgattacattgggccactagataacccaggataatcattcrtctcaagacccctcagttaatcacatctgtaaagtccctttttccatggaaggtaaatattcacagatcctagggatgaggacatgggcatctttgtgaggcccttgttctgtctgcaacactatgcaagtgagcttatgatctagggaagttggacattgagtgaaaaataacaaaatctcttctcttcaattcattataaaaggttggtaagtgatattgaaaattattctttatgtagctgagttttaactacttaaacaaataaaaatattgagcagagatggaaaaattaatacgtttgttggtaattcttcccactcataggtatttgcagccactgtattctaggtactgctctagtgatgcttagtctattgagggttacagagactggttacagagtttgaacataccattgtaggagacagtcaaggaacctaaagaagacagcacacgcacctatagcattgt

SEQ ID NO: 201216 - DNA, 509 bp, Homo sapiens
  misc_feature (1)...(509): n = A,T,C or G
tcttttatgacctatttgatttcaccctctatctgtgttcttttcaagtcaagtgcgcaagtatcactggagtctattatgtatattcagccattntagaaattagatacctatagctggccggtgctatgctaaacacttcacctatttaattactttacagttaaatacaaatatatgtcttcaattaccaataaatttatataggcaggaaaaaatcatgcaaactcaggttctctgtaaattcagagggtgaaatgaaacatcatgggttattgtcaaaaggaaaggcctcaggaggaaagcaaggtttgggttgaatttaggaagctgttataactacttataccaggcttcttcctaatcactccaaaggattacatttatgaggaaagctgtgtctgcttttatgatgcttagagtctctttgagaaatgtttaaaacttgaattggctgaaaactgrtagagagcacctcaaaacaaagaatggtatctataaaagaattc

SEQ ID NO: 201217 - DNA, 454 bp, Homo sapiens
cataggatggagactctgccagcgccagacttatcctgccttcactcaataccagtctgacagtcctgagtatgtcctttacgacgttccagaactcatggaagtccaaaatggggtttgtcttgaacatgtggggattagtggtggtgagatacccctacccttatatgtagaagtaactagaaataccaagattcctgagctgagacgttgggtattcatcctatgtttccactgaatatttcagatcctctaaagaactattcttttttacccttggatttctcataaggggcttcaaagcctcaagtatacttaaccctttgctgtcccctccttcccaatccctgctactcctggagattttgtatccacatgaaatctcagatgccatttcscccagaaagctctggctttcccccagatgtctggctattgctctagaatagaagtc

SEQ ID NO: 201218 - DNA, 622 bp, Homo sapiens
aagcttcaaaaccaggtaaaattatgaatctcatacagatataacattaacccacattaaagattttattcaatattcattgattaaataaggaaaccaggcaaatgttgtaacccagatccatggagaagtcaaaaaagcacaaatatgtataaagtattaaaatgaatattcaaatgagcagcaaaactagctttttttttgggaaagaagagcaggatttatttacatgtctatagacaagtattattttgcatttctaacagttatccacaacttacagaattgtagaatagcgcccacagaatcagaatcagataacccaaaaggatgtactctggataatgaacaattctcattgaagcacaaatttttcctttagaacttggtgaattgttgttttgtattgttttatatgattgttggtcaggtgcagtgcaagaggtaagacaggagaggctcaggaaaacaaatttcactatattcacaggtcctagagacaggaagcatcgcacaccttgatggaccacatgggaaagacactagggaggcagaagagaggagcragggggaagccgatggccagagcctccatgggggtttctgtgggaaaggcaggatg

SEQ ID NO: 201219 - DNA, 603 bp, Homo sapiens
aatcctctgctagcttgggagcacagtagtcttgtcttcatgaagctcactgcctagtgaaagataaactccggttctccctgtgggagggaggcaggtcctgcagtataataacagataatgggaaccagccttagtacaggcatgtgagatgagacagggtgattaatcttgttcccaattaacttggaacccagaaataaccaagtcatggccacttgtaatgatgactgtctttaagamtatctggaatatggacaaaggtagattctgttgggaagtcaaaccaaacacctgtgtaattcttactctttgttttgcaacaaaactgccctatgctggtaagattcaactactgtatgtaaagaagtcttatgataatactgatatcgataaacaaatgtattgggagatagagttaaaacctccttgggacatcatagctatggaaaatgactggcctgagcaggttagataatgcaggccagataatctagctaaccatcactttctatgttaaacagctctgcacaagctaaacataaggtacaaatatcagtagattaaggagaaaaatgaataatcaaattagtgcaagaacaa

SEQ ID NO: 201220 - DNA, 547 bp, Homo sapiens
tgtgcctgggcatttcacaaggggacactcttatctgttcatgctgggttttcagaacaattgtggaaaagcagacattgatgaactagagctatagcaagctgtcaagtgatgtctttttttaattttccgaatttagaagaaccacctatctatccgttctgtggtggccaaaagagaatggcagtcgaataagctgagttctaaacttggcataatcattccaaagccaagtagaagtttaggtgaatcccttaaggtaggaattcagtttcctcacctgacatatatgaaagttgatatctaagatccactctggctcttaaatcccacaagtctatgggatcctagaaaattttaasggtatgcagaacctcatcataaagagggattatttgagctgagagctataataaagaaaaaaagtgctatcattttgcacgttaacactaaaaacaagatttgacaagtaatcatggattggtaaactagaactgtcagagagagacagctaataagttttaaagaggcgttacttaaagacctt

SEQ ID NO: 201221 - DNA, 501 bp, Homo sapiens
aacacaccaacatggcacatatatacctatgtaaaaacctgcacgttgtgcacgtgtaccctagaacttaaagtataataaaaaataacagtgrgttatgagataatatctacaaacctcatggtaatctcaaatcaaaagaacatacagcaagtacacaaaaaataaaaaccaaaaagttgaaacataccagcagagaaaatcactttcactaaaattaagacaagaagcaatgaaagaagatagtaccagaaaacaaatcataatatgtcaggagtaagtccttactcatcattaataacattgaatgtaaatggactaaacactccaatcaaaagacattgggagaggctgaatgaattaaaaaacaagaccccattgtccattgcctagaagaaacatacttcacctataaagatacaaatagactgaacataaagagatagaaaaagatattccgtgcaaatgaaaaccaaaaaagaggaggaatagctgtagtta

SEQ ID NO: 201222 - DNA, 571 bp, Homo sapiens
tagatcttttgcatattttttaattgagttgtttgttttcttattgttgagttttcagagttctttgtatattttagataactgttayttatcaggaatgtgttttgctaatattttctcccattctggggcttgtctgttcattctctaagtgtctttcatagcacaaaatgttttaattttaataaagttcaatttatcacaagtttttagattacaataataaaagcatgatcaaaagcacatttaatcaggcttctgatcatgctttcattattggtaatctgaaaacttgccatcaaatccgaggtcacatagattgtcttttgtggttctttcttgctattgtatagtttcatatttaacattttggtctatcatctacttggagttatttttggtgtaagttttaagatctatgtctaaatgtttttgtgtatagacaattgttctagcaccatttgttgaaaaaaactatcctttttccaatgaattgcaagttaacctcctcttaaaatgtatgttttattgtgttgtggtcagataacaatttgtagttgatatattttaa

SEQ ID NO: 201223 - DNA, 571 bp, Homo sapiens
tagatcttttgcatattttttaattgagttgtttgttttcttattgttgagttttcagagttctttgtatattttagataactgttacttatcaggaatgtgttttgctaatattttctcccattctggggcttgtctgttcattctctaagtgtctttcatagcacaaaatgttttaattttaataaagttcaatttatcacaagtttttagattacaataataaaagcatgatcaaaagcacatttaatcaggcttctgatcatgctttcattattggtaatctgaaaacttgccatcaaatccgaggtcacatagattgtcttttgtggttctttcttgctwttgtatagtttcatatttaacattttggtctatcatctacttggagttatttttggtgtaagttttaagatctatgtctaaatgtttttgtgtatagacaattgttctagcaccatttgttgaaaaaaactatcctttttccaatgaattgcaagttaacctcctcttaaaatgtatgttttattgtgttgtggtcagataacaatttgtagttgatatattttaa

SEQ ID NO: 201224 - DNA, 571 bp, Homo sapiens
tagatcttttgcatattttttaattgagttgtttgttttcttattgttgagttttcagagttctttgtatattttagataactgttacttatcaggaatgtgttttgctaatattttctcccattctggggcttgtctgttcattctctaagtgtctttcatagcacaaaatgttttaattttaataaagttcaatttatcacaagtttttagattacaataataaaagcatgatcaaaagcacatttaatcaggcttctgatcatgctttcattattggtaatctgaaaacttgccatcaaatccgaggtcacatagattgtcttttgtggttctttcttgctattgtatagtttcatatttaacattttggtctatcatctacttggagttatttttggtgtaagttttaagatctatgtctaaatgtttttgtgtatagacaattgttctagcaccatttgttgaaaaaaactatcctttttccaatgaattgcaagttaacctcctyttaaaatgtatgttttattgtgttgtggtcagataacaatttgtagttgatatattttaa

SEQ ID NO: 201225 - DNA, 605 bp, Homo sapiens
ttatttattaccaaaagccccagattatttctttaaatcacagttggctaattggatttaacactaaagattgttttttttaattatttttcaaactagcatgtaaacatacctgaagtgaatccaaggacaaatccaacaccttaatgttaatgatatagttttgcacaatttagacataggctgttgaatagtttatcttgatggcatatagtcaaaacctgatctacacaatgcaatactatccagacctagagggatttaaaaaaatcatattttaagtcatttattttaaaaaattttttttatttgggaataattctagatgtgcaaaaacattttacaaatagagttccagcttcccctaaagttaatatcttacatagctgttgtaactttgttgaaattgagagatgaattctggtaccttgttatytactaaactctagattctatgttaactctttattctgattctgctaattttctattaatgtcctttttgctgtcctaggattcaatccaggataccacactgcatttaattatcatgtctcttcactcttctttggtctgggcagttttttagactttccttgttttcc

SEQ ID NO: 201226 - DNA, 441 bp, Homo sapiens
accgtgctactggatctcctctctccagctctaaaagtggttggatagaaagcaaagaaaattatctggctggcwtattattttccctgaacaaaaatcaggattctgctaataaaggaatggagtggtcatgggcattaggtaggcaactagcagcctctgcctcacagaggcatagaatgagattgcagatgggagagatgaaaggaagaatgtgcagatcttgaaaactgatttctatcttccacattcttccaacctcagcttaagtacatttcctccaaaaagacttactcaacctacaactctccaattaaattaaaggctcttatcagtagccctatggcaactggcataattaattaccagttaattcattgaggtacagcattcagaacacccagggaagatggggctccctcctatggagagcagcagatc

SEQ ID NO: 201227 - DNA, 441 bp, Homo sapiens
accgtgctactggatctcctctctccagctctaaaagtggttggatagaaagcaaagaaaattatctggctggctyattattttccctgaacaaaaatcaggattctgctaataaaggaatggagtggtcatgggcattaggtaggcaactagcagcctctgcctcacagaggcatagaatgagattgcagatgggagagatgaaaggaagaatgtgcagatcttgaaaactgatttctatcttccacattcttccaacctcagcttaagtacatttcctccaaaaagacttactcaacctacaactctccaattaaattaaaggctcttatcagtagccctatggcaactggcataattaattaccagttaattcattgaggtacagcattcagaacacccagggaagatggggctccctcctatggagagcagcagatc

SEQ ID NO: 201228 - DNA, 450 bp, Homo sapiens
gagccagggcctggagtcagaaacctaaggaatctacctgtactttattctactgcgtctgaattggcacccaagctgcaagacaaggcccttcccactcttcctttccctttccacaggctaaggagtatctccccatggccactcccaccccaggcccatggcaagyactgcctgactaccactcacgttcactcaaagcccaagggctcttctgtcagcttgtggtgaatgatgccagtcctgggtcttacccttcaggacagtgggctcccctctgacctagggcaggtccagaaatgctgtccaagagccaaggcctggaagcagagaccccaagagccagcttggtgctctaccccactgtggccgaactggtacctcaactgcaagataaagtcccttttacacttccctctccttttctcaagcagaaggagattctcccaa

SEQ ID NO: 201229 - DNA, 450 bp, Homo sapiens
gagccagggcctggagtcagaaacctaaggaatctacctgtactttattctactgcgtctgaattggcacccaagctgcaagacaaggcccttcccactcttcctttccctttccacaggctaaggagtatctccccatggccactcccaccccaggcccatggcaagcactgcctgactaccactcacgttcactcaaagcccaagggctcttctgtcagctkgtggtgaatgatgccagtcctgggtcttacccttcaggacagtgggctcccctctgacctagggcaggtccagaaatgctgtccaagagccaaggcctggaagcagagaccccaagagccagcttggtgctctaccccactgtggccgaactggtacctcaactgcaagataaagtcccttttacacttccctctccttttctcaagcagaaggagattctcccaa

SEQ ID NO: 201230 - DNA, 567 bp, Homo sapiens
accatgacatcatctgccccttctcttcagagcccaagcccactctctcgttgagcacaacattaccttggctttggtgtgttgcctcccttgtccatgatgctagtttcatatttcataccactttacaaattgtagcatcctccttcttgtccatgtgctacgcttttctggtttcttttctccttatcaaccaccctgtaaaatattcagttgaaagtttttctaatgctccaaacttcaggccgctcccatgtgcagcaattgtaattggtgccatggagtcatctctaatcaattcaaatggacattcagccaagtgtctgccacatgccagggactatcctgggataggggaaataagcttatgagttatacttgatccctgtctatgggaagctctttgtctaaagaaggaagataagacagaagagacaccatgttacgatagaacatattaaagactacaggggaaggaactgaaaaagagctgtggcatattgggggaggtgcaaaccaactcagttggktgcaatgagagaaggtttcacagaattagtaacagca

SEQ ID NO: 201231 - DNA, 421 bp, Homo sapiens
aacctccctttcaaacctgatcgtccacgatatgctaggctcagtgatggaagctcaatacttgctcatgcttcacagcctttggtttcctttgcttgggatgttctttcccagatatttgcataactgcttccctcaggacttcgttcaggactcagttcaaatgccagttccttaaaaatgccttcttagaacttcctaaattagtgccacttctctacttgtattactttccggagcatcactctgttttgtgttgttttgttttktttttatttttgtagtgcccataaccttctgaacctatctttttcttacaaccactttattgtttatcctctgcattctctcattcatccacatctgtctgacttctgcagtgttctcagacacagtatctggtacacagttaagccatcaa

SEQ ID NO: 201232 - DNA, 421 bp, Homo sapiens
aacctccctttcaaacctgatcgtccacgatatgctaggctcagtgatggaagctcaatacttgctcatgcttcacagcctttggtttcctttgcttgggatgttctttcccagatatttgcataactgcttccctcaggacttcgttcaggactcagttcaaatgccagttccttaaaaatgccttcttagaacttcctaaattagtgccacttctctacttgtattactttccggagcatcactctgttttgtgttgttttgttttgtttttatttttgtagtgcccataaccttctraacctatctttttcttacaaccactttattgtttatcctctgcattctctcattcatccacatctgtctgacttctgcagtgttctcagacacagtatctggtacacagttaagccatcaa

SEQ ID NO: 201233 - DNA, 482 bp, Homo sapiens
atattggtgcagagggaggacacctctattcacgttatgattttccttttgtctccagtacgtttgtagctcaacatagcatttcttaatttaaatgtttgatattttgttcatcatagatttttgcaatactttttgtttctaacaatatttcattgagtgttatctgtcttgagtcttgctttttatgtaccctcaaaaagtggttccaaggagagtgaggtaccctagaccttgccctgtctactcctcacatttctctctatacccaatatagatatattgatatagaagaccaatggtttccctaaccctttgtagggaaaccctgccttctaggaaaggggaactgggttttaagtcaatgataygataaccataactcccacatatacagcatttgctgtgagcaaagttctaacagtagtaacaccactgctcctcaatgagggaaacaactcagtgaggcagaacatcaagtt

SEQ ID NO: 201234 - DNA, 410 bp, Homo sapiens
ggtcacctacattgggtgggatatgtctcctttctcagctagagtcccactccatgcaggcacagagatcccagacgagccctcagatttgtagaaaacatgctcacccatccaaacccaaagaatggattcagaggcacaaagaacagagaaagtgagacttttaatagcagtcttgcaagatcaagtgtctggtaggcaggcacacctggggtagctacagcaggtaatttatctcctagcatgcaatttatctcctagcatgcaagtccctcccctagttcctaatgggtcgagtactatggtgttacaatcttcccagatgtcgcctgagttttattatcccccttataaggttatacctaagtcccccttccccrttaagttttgatttcccaataatgaaactt

SEQ ID NO: 201235 - DNA, 458 bp, Homo sapiens
ctggtccagtgtctttagtggttggaggctttttattatagaatcaattttggaactaattattggtctattcaaggtttctatttcttcctggcaaaaccttggggagattctgtttccaggaatttagctatttcttttagatttctagtttgtatgcattcaggtgttcatactagtctctgggtttttttttttttcaatgtatttcctgtggggccagtgatttctgattgtgtttatatgtatcttctttccttttttaaattaaactagctaattgtatataaatcttatttattctttcaaaraaccaaattttggttttgtttatattttgggtggattttttgcatcttaattgcatttagttcatctctagttatttattttcttctgctaccttcatagttggtttgctcttgtttttctagttcctctaggtgtgatgttaggtt

SEQ ID NO: 201236 - DNA, 342 bp, Homo sapiens
ttttgcatcttaattgcatttagttcatctctagttatttattttcttctgctascttcatagttggtttgctcttgtttttctagttcctctaggtgtgatgttaggttgttagtttgaaatctttctaatttgttgatgtgggtattgagtgctataaactttcctcttaataaacttaagtttattattattaactgcttaataaagcagttaactgttttaactgtgtcccaaagattctgatctttgtttttattagtttcaaaaaatttcttgatttatactgtaattttattatttacccaaaagtcattcatgacccagttgtttaatttttat

SEQ ID NO: 201237 - DNA, 342 bp, Homo sapiens
ttttgcatcttaattgcatttagttcatctctagttatttattttcttctgctaccttcatagttggtttgctcttgtttttctagttcctctaggtgtgatgttaggttgttagtttgaaatctttctaatttgttgatgtgggtattgagtgctataaactttcctcttaataaacttaagtttattattattaactgcttaataaagcagttaactgttttaactstgtcccaaagattctgatctttgtttttattagtttcaaaaaatttcttgatttatactgtaattttattatttacccaaaagtcattcatgacccagttgtttaatttttat

SEQ ID NO: 201238 - DNA, 547 bp, Homo sapiens
aaatcttctgttatctctatgcagcataatatctgggaatatttttcataaaaaaattaaatatcctcatacaattaaatacattgaaaagagcatttccatagctgtttcaattaattgtggatattctttaatctcacatcaaaattcaatgcatgctaaattcttaaagattcattgcagygtggaatctgcaactcttatcaatgaacttttgtactttgtttcaataaaatccattggtctatcttgcactttgaatccatctttcactcaagtgtgattttgtaacattgtgcattggatatggggaatatattggttcactgaattatgtcaaccttctaaatatacagtgaaaaattccactgtatacttatgagaatgaaaaaggcaaatagcatgctaatattattatgagtacagttctgacattgcagattctgctctagatagtagtctagtggttaagaaagcaggatctggtgccaaacttcagagtttgactcaggattcaagagccagactgctagctctgtccaacccc

SEQ ID NO: 201239 - DNA, 526 bp, Homo sapiens
ttgaagggcattgttatgttgtttatttgaagtctttctacttttttgatataggtttctgtttgctataaactttcctcttaaaatcacttttgctctatcccataggtwttgatatgttgtatttccactttcatttgtctcaaaaaattttatatttcatttttaatttatttattgacacatttattgttcaggagcatgttatttaatctttatgaatttgtacagtttccaacattccttctgttattgatttttggttttattccattgtggtcagaacagatacttgacataattccaatgtttaaagaatttgagctgggtgtggcagctcatgcttgtaatcccagcccagtaattcaggactgccatgagccataatcatgccactgtgctccagcctggacaacagagtgagacctcatctcaaacgaaataaaacaaaacaaacgaacaaaaaaaaccaaatgtaataggacttattttgtgactgaacatctgatctgtcttggagtatgtt

SEQ ID NO: 201240 - DNA, 526 bp, Homo sapiens
ttgaagggcattgttatgttgtttatttgaagtctttctacttttttgatataggtttctgtttgctataaactttcctcttaaaatcacttttgctctatcccataggtattgatatgttgtatttccactttcatttgtctcaaaraattttatatttcatttttaatttatttattgacacatttattgttcaggagcatgttatttaatctttatgaatttgtacagtttccaacattccttctgttattgatttttggttttattccattgtggtcagaacagatacttgacataattccaatgtttaaagaatttgagctgggtgtggcagctcatgcttgtaatcccagcccagtaattcaggactgccatgagccataatcatgccactgtgctccagcctggacaacagagtgagacctcatctcaaacgaaataaaacaaaacaaacgaacaaaaaaaaccaaatgtaataggacttattttgtgactgaacatctgatctgtcttggagtatgtt

SEQ ID NO: 201241 - DNA, 390 bp, Homo sapiens
acctggagcattgttcaactacaaattgctgggcccatcctcagagtttcccatgcaatatgcttagggtagagccaaaaatattgtatttctaagtatttcaaatataatattaatgctgctgctctgaggaccactcttgaaaaccattgtcttagtaaatgaaatctactgtttgttggggaaataattttggaaatttaaacagtaaatttattctgtgtatgcatgtccatatataaagtgattatttaaaagatgtgtaaaattaataatatgtaatttgctatgtarttacaaaggtaagatttacgtttacataaataaaaattatgtaaatacaaatatgcaggaggtttaacatccatgtaacacttttaattacatgtt

SEQ ID NO: 201242 - DNA, 210 bp, Homo sapiens
tttgcacttcttgttggtttgctagattrattggttgtttttgtacagtatatatcaattctgtgtaatctgccataattatagcaatcaaaatttgttcactcagatcccaagatttgtttagaactaaacaagtatggttatacaaattttacttctctgaccaaaatgttctttcagtgtaccctccttagcctttgggttttgcca

SEQ ID NO: 201243 - DNA, 210 bp, Homo sapiens
tttgcacttcttgttggtttgctagattarttggttgtttttgtacagtatatatcaattctgtgtaatctgccataattatagcaatcaaaatttgttcactcagatcccaagatttgtttagaactaaacaagtatggttatacaaattttacttctctgaccaaaatgttctttcagtgtaccctccttagcctttgggttttgcca

SEQ ID NO: 201244 - DNA, 581 bp, Homo sapiens
acctcacagtgtcatgaaccaacataatacaatggtgaatttatatagatacagatacagatatatgtatatagatagatagatatagtatctagcatatcactagaacatggaaaacagggaagtgctacatggtgaagcaaaaaaaaaaaattaagcaaatgcaagaaaattagggctktatgttctacaatacatattaagagttttcttgaaaactgtaggctttaaaatgaaaaatcttccctgaaaaatgaaagactttaacctggaagtgacattatcagctttgtatttcagaagtcttgagcaattttgtagaaaaaatagactcttttcattacatgtttaagactttagtaaattttttaacattcattattttaaatcactgacacatacttgaataactcacattcctaaatatatacataaaatgtcagtagatctgattcagccaaaattctttaaatcagcaaataattcactttgcatatagacactatacaaaaagaatttgttatttatcgacatttaaggacaatggcaaacttgtgtgtctttaatcacaacttaaacat

SEQ ID NO: 201245 - DNA, 581 bp, Homo sapiens
acctcacagtgtcatgaaccaacataatacaatggtgaatttatatagatacagatacagatatatgtatatagatagatagatatagtatctagcatatcactagaacatggaaaacagggaagtgctacatggtgaagcaaaaaaaaaaaattaagcaaatgcaagaaaattagggctgtatgttctacaatacatattaagagttttcttgaaaactgtaggctttaaaatgaaaaatcttccctgaaaaatgaaagactttaacctggaagtgacattatcagctttgtatttcagaagtcttgagcaattttgtagaaaaaatagactcttttcattacatgtttaagactttagtaaattttttaacattcattattttaaatcactgacacatactygaataactcacattcctaaatatatacataaaatgtcagtagatctgattcagccaaaattctttaaatcagcaaataattcactttgcatatagacactatacaaaaagaatttgttatttatcgacatttaaggacaatggcaaacttgtgtgtctttaatcacaacttaaacat

SEQ ID NO: 201246 - DNA, 385 bp, Homo sapiens
ttccatttgtaagcaatcatttctaaatatgcttctcgatgtatttaaatgataattgatagaagttccgtatgttcccccaaatacttcagttgctcttttacattctttattcttgtgttcttggagatgcaactcactttctactccatgtatcaaggtcaatttgacccagatagcataaatgagttcaagcttttaaaatcatatcaactatagccatggggacaaaaatcatgaaaatattgtattgaaatcactctcaattttcttttcaacatcacagaatgtgtgaagattcagaaaactagtaaaaagcraattgtgtcccaattttcaagaaaagaaaatattgacttgtagaaattacacacagaaacactca

SEQ ID NO: 201247 - DNA, 572 bp, Homo sapiens
ttcgcgcccctcctggctgagtagccgcaaggccccctgggagtcgaagccttctgcgttgctatggcgccgggggcgggkcggacgcctgggcccactcggcggtttggcgggagggaggggctttgcgcaggccccgctcccgccccgcctccatgcggcccgccccgattgcgctgtggctgcgcctggtcttggccctggcccttgtccgcccccgggctgtggggtgggccccggtccgagcccccatctatgtcagcagctgggccgtccaggtgtcccagggtaaccgggaggtcgagcgcctggcacgcaaattcggcttcgtcaacctggggccggtgggtgggaccgggatagacgggaagtgggggcttggaggggactgaacaaccctagaccccgacaagggggagggagcccacaaggtcttctaaatatcaagagtcccagcccacccctgcctcagccaagctcagcttctgggactcccagagagcacctgctggggaaggacaaagaagggggctgttaccggccctcgggggcttcagcaggggagccgggtc

SEQ ID NO: 201248 - DNA, 572 bp, Homo sapiens
ttcgcgcccctcctggctgagtagccgcaaggccccctgggagtcgaagccttctgcgttgctatggcgccgggggcggggcggacgcctgggcccactcggcggtttggcgggagggaggggmtttgcgcaggccccgctcccgccccgcctccatgcggcccgccccgattgcgctgtggctgcgcctggtcttggccctggcccttgtccgcccccgggctgtggggtgggccccggtccgagcccccatctatgtcagcagctgggccgtccaggtgtcccagggtaaccgggaggtcgagcgcctggcacgcaaattcggcttcgtcaacctggggccggtgggtgggaccgggatagacgggaagtgggggcttggaggggactgaacaaccctagaccccgacaagggggagggagcccacaaggtcttctaaatatcaagagtcccagcccacccctgcctcagccaagctcagcttctgggactcccagagagcacctgctggggaaggacaaagaagggggctgttaccggccctcgggggcttcagcaggggagccgggtc

SEQ ID NO: 201249 - DNA, 535 bp, Homo sapiens
gcaaatgatttttatgagtcactttaagtagtcttatttctaaatggttctttctcaaaattaaacccctatcaaaggcctcttgtctaagttttaggattgtacacctatcttsccacttatatctcatgtggatgtctgacaggcattttgaattcagcatttccaaaatcaaactcctcatatggcacctaaaccagcttctgctgcaggctttcccattcagtgaatagtaatgccaaccttacaattgttcaggactgaagcactggtgtcaggtggattctcaggcctgcaattcccagggagccttaggctcttatgtgtgcatcctctggggctttttaaagtgatgattaaaaaggttccatttggaggctggcagcatgcagagctccatgaactcatatccactgataaaagcataactagtagaaactattaaaaaaaaaaaaaaaccaaagcatctaaaaccttggaaattgtcctaaggaacaatttagctaaagaagaattacccaagaataatttattc

SEQ ID NO: 201250 - DNA, 535 bp, Homo sapiens
gcaaatgatttttatgagtcactttaagtagtcttatttctaaatggttctttctcaaaattaaacccctatcaaaggcctcttgtctaagttttaggattgtacacctatcttcccacttatatctcatgtggatgtctgacaggcattttgaattcagcatttccaaaatmaaactcctcatatggcacctaaaccagcttctgctgcaggctttcccattcagtgaatagtaatgccaaccttacaattgttcaggactgaagcactggtgtcaggtggattctcaggcctgcaattcccagggagccttaggctcttatgtgtgcatcctctggggctttttaaagtgatgattaaaaaggttccatttggaggctggcagcatgcagagctccatgaactcatatccactgataaaagcataactagtagaaactattaaaaaaaaaaaaaaaccaaagcatctaaaaccttggaaattgtcctaaggaacaatttagctaaagaagaattacccaagaataatttattc

SEQ ID NO: 201251 - DNA, 535 bp, Homo sapiens
gcaaatgatttttatgagtcactttaagtagtcttatttctaaatggttctttctcaaaattaaacccctatcaaaggcctcttgtctaagttttaggattgtacacctatcttcccacttatatctcatgtggatgtctgacaggcattttgaattcagcatttccaaaatcaaactcctcatatggcacctaaaccagcttctgctgcaggctttcccattcagtgaatagtaatgccaaccttacaattgttcaggactgaagcactggtgtcaggtggattctcaggcctgcaattcccagggagccttargctcttatgtgtgcatcctctggggctttttaaagtgatgattaaaaaggttccatttggaggctggcagcatgcagagctccatgaactcatatccactgataaaagcataactagtagaaactattaaaaaaaaaaaaaaaccaaagcatctaaaaccttggaaattgtcctaaggaacaatttagctaaagaagaattacccaagaataatttattc

SEQ ID NO: 201252 - DNA, 389 bp, Homo sapiens
agaatgtaatgtaaatgttacrtaatgatttttacactattgtttagggaatagtgacaagaaaaaagtctgtacatactcagtgcatctacaagcatccattatttttccaactattttttgacctgtggttggttgaatccacagatggagaatccacccacttggaaggcctgcaagattgcagtgccctctgcccctggagttaagggaggtggtaggaagtaagaggcaggttaggcacagcaataaggatagaaggagaggtgagtcttttctgggtaacaactttcaattttcactgtgtagcttgaaaactctcaggggtcattctacctctggcaaatgtacaaattcacagactctcaaggtgctcattactgtaaaac

SEQ ID NO: 201253 - DNA, 557 bp, Homo sapiens
tgctccttcttcatgctgtttctgctgatggatttwggtagctcacaagtgaattctttaatggagcagttcaggcagcctatctcatgtgttgttataatacagcccacatctcagcacgggaagcagcggagtggggattcattcaaatgtacggctgggaagcccaggttccttctctttcagttggggaatattaatgagatgggattttagggaacaggtgaagtctgctcccatgtaagctgatttataataactatttcttatttactgattataaatactggattaggtacctgtatgattaagagaaagaaccatatttcttattggtttttgatctggcacatttaaaaattgaagaaagggtcaaaattaaaaaagaaaaggaagcttgtgagttatcgattgatgaattatcaaaatgaaagctgagacatccttagatcctggaaagtgcccaaaggtttgagctcaggttgtgacctggaaggctgaagaccctggagctggcacagtgctgtgaccctctgccatcccctcccgtaaaggtg

SEQ ID NO: 201254 - DNA, 557 bp, Homo sapiens
tgctccttcttcatgctgtttctgctgatggattttggtagctcacaagtgaattctttaatggagcagttcaggcagcctatctcatgtgttgttataatacagcccacatctcagcacgggaagcagcggagtggggattcattcaaatgtacggctgggaagcccaggttccttctctttcagttggggaatattaatgagatgggattttagggaacaggtgaagtctgctccyatgtaagctgatttataataactatttcttatttactgattataaatactggattaggtacctgtatgattaagagaaagaaccatatttcttattggtttttgatctggcacatttaaaaattgaagaaagggtcaaaattaaaaaagaaaaggaagcttgtgagttatcgattgatgaattatcaaaatgaaagctgagacatccttagatcctggaaagtgcccaaaggtttgagctcaggttgtgacctggaaggctgaagaccctggagctggcacagtgctgtgaccctctgccatcccctcccgtaaaggtg

SEQ ID NO: 201255 - DNA, 557 bp, Homo sapiens
tgctccttcttcatgctgtttctgctgatggattttggtagctcacaagtgaattctttaatggagcagttcaggcagcctatctcatgtgttgttataatacagcccacatctcagcacgggaagcagcggagtggggattcattcaaatgtacggctgggaagcccaggttccttctctttcagttggggaatattaatgagatgggattttagggaacaggtgaagtctgctcccatgtaagctgatttataataactatttcttatttactgattataaatactggattaggtacctgtatgattaagagaaagaaccatatttcttattggtttttgatctggcacatttaaaaattgaagaaagggtcaaaattaaaaaagaaaaggaagcttgtgagttatcgattgatgaattatcaaaatgaaagctgagacatcctwagatcctggaaagtgcccaaaggtttgagctcaggttgtgacctggaaggctgaagaccctggagctggcacagtgctgtgaccctctgccatcccctcccgtaaaggtg

SEQ ID NO: 201256 - DNA, 612 bp, Homo sapiens
gtgtgggttttcatgaaaaaatgtggtatttagtagaatgctatagttacaatattattttcttkgtgaaagaataaaaacaatacaagtaaaaagtatgtaaatatgtcccagaagaatggggtggagctgtggatgcccggtggatcttgaccacatatttcattggccttgacttggcttaggaacttctttacatggcccaaggtgctctatgaagctaattgttcatcagttattacacaactatgagttgcctctgtgtgtaaatatacacatatctgttacctaaccagaattttggtggagtgcatttcagattttcactttgacctctcctactcctgaagagaaatgtctcttttctgctcaattataattttaatccagattcttcctccccttcctcttctttttctgtcttcccccttctttaaatttctccccttcttcctcctccctcatcttccttttctttgtcttgggttctcatatggaatcgtaatatctcactcagatgagtaatttcttatatcagggactacgtcctcattccaaaggactctcctacccatcatcacgtgtctcccttccctcttgcagtctgttctt

SEQ ID NO: 201257 - DNA, 511 bp, Homo sapiens
atcccatcagtgttcctgggtcggagcagtggttctcagctttgtcccctgccccactcgggacatctgacaacacctggaaacattttttgattgtcacacctgggagaagggctaccactgacatccagtggggagagtccaggtatgccactaaacatcctacaacacacgaaagccyctgccacaaataactattcagtccaaaatgtcaacagggctgtggctgagaaaatctggcttagaaagagcttccttgttatgggatccagagccctcttgtataggttaaaattgttaggtgagaataggatgtctgggccgcaggttagcactgagaaagccctgcagtagaaagatacagagtttttaccctttgcttttttgtatcattatgtccagagaaaagaaagctatgcgtgggctattgtagaggacttcaatgatctttctaaggaaattacacaaactaaagattgtatactactattacctaattacttgaacacaa

SEQ ID NO: 201258 - DNA, 511 bp, Homo sapiens
atcccatcagtgttcctgggtcggagcagtggttctcagctttgtcccctgccccactcgggacatctgacaacacctggaaacattttttgattgtcacacctgggagaagggctaccactgacatccagtggggagagtccaggtatgccactaaacatcctacaacacacgaaagcccctgccacaaataactattcagtccaaaatgtcaacagggctgtggctgagaaaatctggcttagaaagagcttccttgttatgggatccagagccctcttgtataggttaaaattgttaggtgagaataggatgtctgggccgcaggttagcactgagaaagccctgcagtrgaaagatacagagtttttaccctttgcttttttgtatcattatgtccagagaaaagaaagctatgcgtgggctattgtagaggacttcaatgatctttctaaggaaattacacaaactaaagattgtatactactattacctaattacttgaacacaa

SEQ ID NO: 201259 - DNA, 511 bp, Homo sapiens
atcccatcagtgttcctgggtcggagcagtggttctcagctttgtcccctgccccactcgggacatctgacaacacctggaaacattttttgattgtcacacctgggagaagggctaccactgacatccagtggggagagtccaggtatgccactaaacatcctacaacacacgaaagcccctgccacaaataactattcagtccaaaatgtcaacagggctgtggctgagaaaatctggcttagaaagagcttccttgttatgggatccagagccctcttgtataggttaaaattgttaggtgagaataggatgtctgggccgcaggttagcactgagaaagccctgcagtagaaagatacagagtttttaccctttgcttttttgtatcattatgtccagagaaaagaaagctatgcgtgggctattgtagaggacttcaatgatctttctaaggaaattacacaaactaaagattgtatactactrttacctaattacttgaacacaa

SEQ ID NO: 201260 - DNA, 582 bp, Homo sapiens
accaacagaacttgcctattgttaagacaggcattgtgctagaggctttccatacgctatctcacttaatcattacaacagcatgtttgatgagtaatagtcacattttatagattaggaaaattaggtcataaagggttcagtccattggttcattcaccatatattttattctggatcatgtactctactagatattgagcagtcaaatagcaataataacaatagctaacattttattgagaacttactgtgtgccaaacactgttccaagcatttgacattcattgtcttgtttattccactgaacaaccttgtgaaggtwgttatcatcatccctattttatgcatgaggaaattaaggcacagaaccatttagaaatgtgcttaagggcaggtggctgggaagtggtgaagacagagtggcttcaggggccaggactctgacatgataccatgctgccaagcttctctctggaagttcagggtagcttgcctcaggtcacacaacagcagtccaggctggttcacctgacccaaagcaagctctttcctcagcatcataatgcaattgcacatagt

SEQ ID NO: 201261 - DNA, 582 bp, Homo sapiens
accaacagaacttgcctattgttaagacaggcattgtgctagaggctttccatacgctatctcacttaatcattacaacagcatgtttgatgagtaatagtcacattttatagattaggaaaattaggtcataaagggttcagtccattggttcattcaccatatattttattctggatcatgtactctactagatattgagcagtcaaatagcaataataacaatagctaacattttattgagaacttactgtgtgccaaacactgttccaagcatttgacattcattgtcttgtttattccactgaacaaccttgtgaaggtagttatcatcatccctattttatgcatgaggaaattaaggcacagaaccatttagaaatgtgcttaagggcaggtggctgggaagtggtgaagacagagtggcttcaggggccaggactctgacatgataccatgctgccaagcttctctctggaagttcagggtagcttgcctcaggtcacacaacagcagtmcaggctggttcacctgacccaaagcaagctctttcctcagcatcataatgcaattgcacatagt

SEQ ID NO: 201262 - DNA, 558 bp, Homo sapiens
ggtccttcattgtatttattctgactacgagacaaaaacacatccccataaacacctcccagaggccacacattagtgtggtttatactgtgtgccatgacatacagaaatgggtttcatttctgtttttagggagaaaacttcctgcttgtcctggcacagaaccccttgcagcaggacacactgttggccagcataggaacttgactcttgcatgtcttttcttttgaactgccaacagctcttactaaccttattttggtaacagctcccttcttttgtttcagaactgaccctcctctattccacatgagtctgttaggatcccctaactctggccagagggtcactgcccctgagctgcagtgatgagctcatggatcgggaatgccattctagtaagagcaatcagacccttctgggagaagagtctggcactagaagagaaaagcttactttttattgagagtgaatgatgtaaactggaacctgtctgtgatcatactcataccctcctctcyacaatccctaaagtcacagggaagaagctcatctctt

SEQ ID NO: 201263 - DNA, 317 bp, Homo sapiens
gttattttatcttggcatttattgtaacacagaagcaattgtccattgttttaaaaaatcagaaaagcacttctggtcaagatagcatttgtgtaratacacatttgtgtcacccattctgccataaacacgtagtagctatagataatttttttttaatggagcatgtaaaaagggtataactgagctcacaaatgagatagtcagttttgcagaccagaaacagaagagaaacatacagcagttagtgggcaagactttggcttctgggtgtaactaagctaatctggctccaaggaaacaggaactgaatacgc

SEQ ID NO: 201264 - DNA, 366 bp, Homo sapiens
gagccatatcaaaagagagtagttggaagaactagaatttgaaagatgctaagaagccacatgagacaccagtaaatggacaccttgaggcagaagctggaagtgagcaagaccaagaggtcgagcagaaagtagagagagtggaaagtcagcagtagtagtagacatagactccgtctctcaaaagcaacaacaaaagcaaaggcaccagaaaatcaataayaaaacttgttgctgagacctggaatcatgtaatgccctgaacaaacttccagatctccgctgggcaggcttttcaactgatgttgactttctgtgctttttaaatagctaagtaccactacagtaaacacccatcaccttgga

SEQ ID NO: 201265 - DNA, 548 bp, Homo sapiens
atttaaaatcaatacagaaggacttytcacaaatactgcctccatatggctccttttccaaatgagttctttgagctttcaacagtgaaagttcttccacattcattatatttaaagtgtctttgctatccaagattaactcttatttgtaaaaaaaaaaaaaaaaaaaaaaaggctgcctcctcatagaagccttgtccatttttattatactcaaaaggttggtcaaaaattatctgagtgagagcctggtgatgattaatgacatccctcttttgatcatatttatacaatttctctccaataggaattttctcaagcctaataccaaggagtaatttctcacgtacattaaatgcatcaggcttctttctggaacagttcttttgatcaataattaaacgcaaagtatctttcaaactcatttcacacaagtcacatattttattaggaaatgttcttgaagaaacagggtttgtacccaaattggaagtttttcttactctattaccactttctatgcttactgttttgtttttggtgaacac

SEQ ID NO: 201266 - DNA, 548 bp, Homo sapiens
atttaaaatcaatacagaaggacttttcacaaatactgcctccatatggctccttttccaaatgagttctttgagctttcaacagtgaaagttcttccacattcattatatttaaagtgtctytgctatccaagattaactcttatttgtaaaaaaaaaaaaaaaaaaaaaaaggctgcctcctcatagaagccttgtccatttttattatactcaaaaggttggtcaaaaattatctgagtgagagcctggtgatgattaatgacatccctcttttgatcatatttatacaatttctctccaataggaattttctcaagcctaataccaaggagtaatttctcacgtacattaaatgcatcaggcttctttctggaacagttcttttgatcaataattaaacgcaaagtatctttcaaactcatttcacacaagtcacatattttattaggaaatgttcttgaagaaacagggtttgtacccaaattggaagtttttcttactctattaccactttctatgcttactgttttgtttttggtgaacac

SEQ ID NO: 201267 - DNA, 646 bp, Homo sapiens
tatttggcagcttcagaattttgacatatctgctacaatccacacttgtaaaatagatggctgaggsctgggtactgagactatactaattctgccgtagtggtgtttgcctccagaaataacagaagcagaagtgaggcattcatctcactaaccatctcaaagctttcactagtgattccaattagtagaatccaaatatctagaactctattgcaagatagcctggaaaatactgtttgactttctgaccctctgctgtacaggcagacacacaaaaaggcgggaagggatgttatgtttgaatgaattgtgtttactacagtgggttatctctgctcttcagtggctcttctggatccccttctctaaatagatttattgcccacctctttggaatgacagaggatagtcctgtttggctctgggaaggatgactcataatcaggctattatttatcacagattgcatcatagcctcttccaacttgttgccacaaatttagtaatggctaagggtagataaatcgcactccatgacactggaccattgcacagatttgcttgcagtccacaccatagatggcatggcggccaccttgtagatctctttttggggcagagatcaaaatcagaaagaataaaa

SEQ ID NO: 201268 - DNA, 179 bp, Homo sapiens
catgctgccattattattcaaatkagtgattccctctgtcagattttgctattttgaaagacgtcataagcccctaaaaggtgaattgattttaatttattataactggtcaaggatgtattcaacacatacaagaggagaatgtttccgtatcagaaactaccatgtttaaatttttt

SEQ ID NO: 201269 - DNA, 622 bp, Homo sapiens
tttgccctggttgacattatccttttcttgcttttgcaatgacttcatcattgatactgaagtaaaaatagtggagataaaactaacaataatccctttgacttttagctggtgcatttcctagtaatttccaaaacttgaaagtcacagtttgggtaaatgttaaaacaatatgtatttccatargctgtaatacaattctttgtaaatggcaaaagcacatttgccttttaatcagaaaacaacttgctgaatccagacaacatggccttctccaagatgcttgacatgaacaacaataataaaattcagtggtatttgatattttgcagatgttcttagattgaaaatggtagctttacacatatttgcacatgatcattataaagctatattggtcaatgtagaagaatagaatatatttaatgggtttttaggttgatttataacttttaagtatttagacatatggtatgcaggcttacatttgatttcctgtcccgagccccacaaatgctagggacatgaatttctgaataaactattactgtagttacagacaaatgtggttcatcttgttaaagggaacattttgcaagcatctagatttcttacatcaggg

SEQ ID NO: 201270 - DNA, 622 bp, Homo sapiens
tttgccctggttgacattatccttttcttgcttttgcaatgacttcatcattgatactgaagtaaaaatagtggagataaaactaacaataatccctttgacttttagctggtgcatttcctagtaatttccaaaacttgaaagtcacagtttgggtaaatgttaaaacaatatgtatttccataagctgtaatacaattctttgtaaatggcaaaagcacatttgccttttaatcagaaaacaacttgctgaatccagacaacatggccttctccaagatgcttgacatgaacaacaataataaaattcagtggtatttgatattttgcagatgttcttagattgaaaatggtagctttacacatatytgcacatgatcattataaagctatattggtcaatgtagaagaatagaatatatttaatgggtttttaggttgatttataacttttaagtatttagacatatggtatgcaggcttacatttgatttcctgtcccgagccccacaaatgctagggacatgaatttctgaataaactattactgtagttacagacaaatgtggttcatcttgttaaagggaacattttgcaagcatctagatttcttacatcaggg

SEQ ID NO: 201271 - DNA, 622 bp, Homo sapiens
tttgccctggttgacattatccttttcttgcttttgcaatgacttcatcattgatactgaagtaaaaatagtggagataaaactaacaataatccctttgacttttagctggtgcatttcctagtaatttccaaaacttgaaagtcacagtttgggtaaatgttaaaacaatatgtatttccataagctgtaatacaattctttgtaaatggcaaaagcacatttgccttttaatcagaaaacaacttgctgaatccagacaacatggccttctccaagatgcttgacatgaacaacaataataaaattcagtggtatttgatattttgcagatgttcttagattgaaaatggtagctttacacatatttgcacatgatcattataaagctatattggtcaatgtagaagaatagaatatatttaatgggtttttaggttgatttataacttttaagtatttagacatatggtatgcaggcttacatttgatttcctgtcccgagccccacaratgctagggacatgaatttctgaataaactattactgtagttacagacaaatgtggttcatcttgttaaagggaacattttgcaagcatctagatttcttacatcaggg

SEQ ID NO: 201272 - DNA, 292 bp, Homo sapiens
cagtgtgtaagtagtgacgtacktgggctttacgtaaagaaattgtgccattttttcaagccagatatagcttctgtatcaacaaatggaacacaaatctttagtctaggacttagagtgggggaaaaagggaaaaaacaactataacacttaaatgaagtctttgtatcttaggtttgttgaccagagtattatatatatctaatgctactaaaattatgatgttatcgaattctcaagttaattcataagtggtggttatctgtagtaatcatagagaaaggaactatta

SEQ ID NO: 201273 - DNA, 292 bp, Homo sapiens
cagtgtgtaagtagtgacgtacttgggctttacgtaaagaaattgtgccattttttcaagccagatatagcttctgtatcaacaaatggaacacaaatctttagtctaggacttagagtgggggaaaaagggaaaaaacaactataacacttaaatgaartctttgtatcttaggtttgttgaccagagtattatatatatctaatgctactaaaattatgatgttatcgaattctcaagttaattcataagtggtggttatctgtagtaatcatagagaaaggaactatta

SEQ ID NO: 201274 - DNA, 292 bp, Homo sapiens
cagtgtgtaagtagtgacgtacttgggctttacgtaaagaaattgtgccattttttcaagccagatatagcttctgtatcaacaaatggaacacaaatctttagtctaggacttagagtgggggaaaaagggaaaaaacaactataacacttaaatgaagtctttgtatcttaggtttgttgaccagagtattatatatatctaatgctactaaaattatgatgttatcgaatwctcaagttaattcataagtggtggttatctgtagtaatcatagagaaaggaactatta

SEQ ID NO: 201275 - DNA, 292 bp, Homo sapiens
cagtgtgtaagtagtgacgtacttgggctttacgtaaagaaattgtgccattttttcaagccagatatagcttctgtatcaacaaatggaacacaaatctttagtctaggacttagagtgggggaaaaagggaaaaaacaactataacacttaaatgaagtctttgtatcttaggtttgttgaccagagtattatatatatctaatgctactaaaattatgatgttatcgaattytcaagttaattcataagtggtggttatctgtagtaatcatagagaaaggaactatta

SEQ ID NO: 201276 - DNA, 562 bp, Homo sapiens
gaaatatgaaatttgatgtttcttgcggaaatgtagtaaaacagacactcatctgaaaaggttacttccctcctagtgtaagcatttgaggactcaaacatggaccagttttccatgaaaataatttgctttaaattattcaaagtgcctgaaagggaaaactatattattacataggcctatcacgtagaaaaatacaaaatccacaaagtggacatctgagtactgcctttctaggtttacagcttgaaatgtcagaaataatagcacttgaaaagatatgaatttagaatggtgtgatgtagccaaagtgaaaagtatcacttacatgcttaccaacaacctgcaggtttgagataaaaaggaatcctgtttcaattccatgaaagatggtgtgcctactatacatcaygtaaatgaatttctaaaaacttatatgcttagaagttatttcatgattgctaaccctcagaaagaagatgaccacaggagtcagataattctaaatcataagggagttgagggaaatgacatttgttgaatgaaatgggtaaggaaagga

SEQ ID NO: 201277 - DNA, 576 bp, Homo sapiens
tagctaacttaaatataggtcaatgagattatctaatgcaagaaacagaaggaaaaagaaataaagacaaatggacagactcagagatatcatcaagcatagcaaaatatgtataatggaagtcccaaagggagagggarcagaagagaaatggggcataaaaatatgtgaagaacaatacaaaacatacttaaaaacttccaaaatttgacaaagaatattaacttgcacatccaaaaagatctatgactcccaagtaggataaactcaaagagattcacatttttaaaaaattataattaaacaatcaaaagaaaatgacaaagaaagaatctgaaaacaaaaagagaggagcaactcatcatgtgcaaaagagtctgaataatttttcactgatttttcattagaaaccatggaaaccagaggcagtgagatgacatttttaaagttttgaaagtaaatgactatcaacgaataatttcataaccaacaaaactatacttcaaaaatgaaaaagaagtgaaaatattctcacttattctctgaaaccaaaactgacagaatctcttactagca

SEQ ID NO: 201278 - DNA, 447 bp, Homo sapiens
ataaattctatatatcagtaattacattaaatgtatatagattaaaaactccatttaaaatagagtttgcagatgggtttagaaaaaacataatccaactatctgttttattcagcagacacactttatattcaaagacacaaacagtttgaatacaaatgactgaataagataaatcattcaaacagtaatcaaaagagacctggtcataataacacacaaaacaaacttcaagagataaattgtgattagtgagaaagagcattttacaattatagaaaggattaatacatcaagaaaacataacaataagcacatatgcatctrtcaagagaatcccaaaatacatgaaggaagaaataaagtaggcaatataaaacttccctccaccaatacacacataatccctacaatagatggctttactgatacattctaccaaatgtt

SEQ ID NO: 201279 - DNA, 544 bp, Homo sapiens
gcataccatttttaatccaggcatacaaagtcaggcattctttggcaacttggcagcatgaccactcaggaattttattcttgaggcagagattgggggggcctgctctagagtgggataagggcctccacaacsagagctatggaaagcacatccagagcggacactgaaattgtgctttcccttgtcacaagcctggggcaggaggagtgctgctacagctgcagtttcttctggatggtgagatttgcagccaaggccagcctagtgacctggaattggtctgtgtgtgccatttctagatgtctccatctgctctaccaagataatagtgcagtgaggtcctctgctcaaaccccaggcaaaaattcaggcatttggcgcagccgctttcctggactagcagccttagccactcaactcttcatgaacatagattgtggtgcagagcagccccctacactttatggcaaggcagatctccaggcattaggagcatctgttcactgggttcagagcctaacctgctccacccttcctgtac

SEQ ID NO: 201280 - DNA, 544 bp, Homo sapiens
gcataccatttttaatccaggcatacaaagtcaggcattctttggcaacttggcagcatgaccactcaggaattttattcttgaggcagagattgggggggcctgctctagagtgggataagggcctccacaaccagagctatggaaagcacatccagagcggacactgaaattgtgctttcccttgtcacaagcctggggcaggaggagtgctgctacagctgcagtttcttctggrtggtgagatttgcagccaaggccagcctagtgacctggaattggtctgtgtgtgccatttctagatgtctccatctgctctaccaagataatagtgcagtgaggtcctctgctcaaaccccaggcaaaaattcaggcatttggcgcagccgctttcctggactagcagccttagccactcaactcttcatgaacatagattgtggtgcagagcagccccctacactttatggcaaggcagatctccaggcattaggagcatctgttcactgggttcagagcctaacctgctccacccttcctgtac

SEQ ID NO: 201281 - DNA, 544 bp, Homo sapiens
gcataccatttttaatccaggcatacaaagtcaggcattctttggcaacttggcagcatgaccactcaggaattttattcttgaggcagagattgggggggcctgctctagagtgggataagggcctccacaaccagagctatggaaagcacatccagagcggacactgaaattgtgctttcccttgtcacaagcctggggcaggaggagtgctgctacagctgcagtttcttctggatggtgagatttgcagccaaggccagcctagtgacctggaattggtctgtgtgtgccatttctagatgtctccatctgctctaccaagataatagtgcagtgaggtcytctgctcaaaccccaggcaaaaattcaggcatttggcgcagccgctttcctggactagcagccttagccactcaactcttcatgaacatagattgtggtgcagagcagccccctacactttatggcaaggcagatctccaggcattaggagcatctgttcactgggttcagagcctaacctgctccacccttcctgtac

SEQ ID NO: 201282 - DNA, 403 bp, Homo sapiens
gagatcttggtgcagttggtttccctactcctaattcaggaaggtgggtgttctcaatgcctggagaamttcccacaatcctgttgtattagtctgttctcaggctgctaataaagacatacttgggactgggtaatttataaaggaaagaggtttaattgactcacagatccacatggctggggaggcctcacaatcatggtggaaagcaaaggagaagcaaacacgtcttacatggcagcaggcaagaaagagtgtgtgcaggggaactcccctttatcaagccatcagacctcatgagtcatgagacttatttactatcacaagaacagcatgggaaagacccacctccatgattcaattacctcccactgggttcctcccacaacacatggggattgtg

SEQ ID NO: 201283 - DNA, 390 bp, Homo sapiens
cagttggtttccctactcctaattcaggaaggtgggtgttctcaatgcctggagaacttcccacaatcctgttgtattagtctgttctcaggctgctaataaagacatacttgggactgggtaatttataaaggwaagaggtttaattgactcacagatccacatggctggggaggcctcacaatcatggtggaaagcaaaggagaagcaaacacgtcttacatggcagcaggcaagaaagagtgtgtgcaggggaactcccctttatcaagccatcagacctcatgagtcatgagacttatttactatcacaagaacagcatgggaaagacccacctccatgattcaattacctcccactgggttcctcccacaacacatggggattgt

SEQ ID NO: 201284 - DNA, 395 bp, Homo sapiens
ggtgcagttggtttccctactcctaattcaggaaggtgggtgttctcaatgcctggagaacttcccacaatcctgttgtattagtctgttctcaggctgctaataaagacatacttgggactgggtaatttataaaggaaagaggtttaattgactcacagatccacatggctggggaggcctcacaatcatggtggaaagcaaaggagaagcaaacacrtcttacatggcagcaggcaagaaagagtgtgtgcaggggaactcccctttatcaagccatcagacctcatgagtcatgagacttatttactatcacaagaacagcatgggaaagacccacctccatgattcaattacctcccactgggttcctcccacaacacatggggattgtg

SEQ ID NO: 201285 - DNA, 403 bp, Homo sapiens
gagatcttggtgcagttggtttccctactcctaattcaggaaggtgggtgttctcaatgcctggagaacttcccacaatcctgttgtattagtctgttctcaggctgctaataaagacatacttgggactgggtaatttataaaggaaagaggtttaattgactcacagatccacatggctggggaggcctcacaatcatggtggaaagcaaaggagaagcaaacacgtcttacrtggcagcaggcaagaaagagtgtgtgcaggggaactcccctttatcaagccatcagacctcatgagtcatgagacttatttactatcacaagaacagcatgggaaagacccacctccatgattcaattacctcccactgggttcctcccacaacacatggggattgtg

SEQ ID NO: 201286 - DNA, 403 bp, Homo sapiens
gagatcttggtgcagttggtttccctactcctaattcaggaaggtgggtgttctcaatgcctggagaacttcccacaatcctgttgtattagtctgttctcaggctgctaataaagacatacttgggactgggtaatttataaaggaaagaggtttaattgactcacagatccacatggctggggaggcctcacaatcatggtggaaagcaaaggagaagcaaacacgtcttacatggcagcaggcaagaaagagtgtgtgcaggggaactcccctttatcaarccatcagacctcatgagtcatgagacttatttactatcacaagaacagcatgggaaagacccacctccatgattcaattacctcccactgggttcctcccacaacacatggggattgtg

SEQ ID NO: 201287 - DNA, 407 bp, Homo sapiens
catgtttgctgacttccaaatatactatcaggtgacggtaaccaaaatagcatggtactggtgccagaacagcatggtactggtacaaaaacagacacatagaccaatggaacggaacagagaacccagaaataaagctgcacacctacagatatctgatctttaacaaagttaagaaaaataaccaacagggaaaagactactccgtattcaataaayggtgtgggctagttgggtagccatatgtagaagaataaaactcaaccccaccattcaccatataaaaaaattaactgaggttggattaaagatttaaacacaagacctcaaactacaagaatcctaggaaacgccattctggacactggccttgggaaataatttatgactaagtcctcaaaagcaat

SEQ ID NO: 201288 - DNA, 407 bp, Homo sapiens
catgtttgctgacttccaaatatactatcaggtgacggtaaccaaaatagcatggtactggtgccagaacagcatggtactggtacaaaaacagacacatagaccaatggaacggaacagagaacccagaaataaagctgcacacctacagatatctgatctttaacaaagttaagaaaaataaccaacagggaaaagactactccgtattcaataaatrgtgtgggctagttgggtagccatatgtagaagaataaaactcaaccccaccattcaccatataaaaaaattaactgaggttggattaaagatttaaacacaagacctcaaactacaagaatcctaggaaacgccattctggacactggccttgggaaataatttatgactaagtcctcaaaagcaat

SEQ ID NO: 201289 - DNA, 407 bp, Homo sapiens
catgtttgctgacttccaaatatactatcaggtgacggtaaccaaaatagcatggtactggtgccagaacagcatggtactggtacaaaaacagacacatagaccaatggaacggaacagagaacccagaaataaagctgcacacctacagatatctgatctttaacaaagttaagaaaaataaccaacagggaaaagactactccgtattcaataaatggtgtgggctagttgggtagccatatgtagaagaataaaactcaaccccaccwttcaccatataaaaaaattaactgaggttggattaaagatttaaacacaagacctcaaactacaagaatcctaggaaacgccattctggacactggccttgggaaataatttatgactaagtcctcaaaagcaat

SEQ ID NO: 201290 - DNA, 354 bp, Homo sapiens
  misc_feature (1)...(354): n = A,T,C or G
ttggagctaaatattaggtactcataaacataaagatggcaacaatagacactgggtacagctagcaggtggagtgaaggaggagtagaggcaagggttgaaaaacctgcttttgtgtactatgtttagtaccttggtaaatgggatcacttataccccaaaccttagcatcagacaatatatccaagtaacaaagcagcacatatgccccatgaatctaaaataaatattgraaaaaactctgatattccttataaatacaaagcaaagaaaaaaaatcctcagtcaaatactagcaaactaaacccaataannnnnnnnnnnnnnnnnnnnnnnnnnnnnnnnnnnnnnnnn

SEQ ID NO: 201291 - DNA, 354 bp, Homo sapiens
  misc_feature (1)...(354): n = A,T,C or G
ttggagctaaatattaggtactcataaacataaagatggcaacaatagacactgggtacagctagcaggtggagtgaaggaggagtagaggcaagggttgaaaaacctgcttttgtgtactatgtttagtaccttggtaaatgggatcacttataccccaaaccttagcatcagacaatatatccaagtaacaaagcagcacatatgccccatgaatctaaaataaatattggaaaaaaytctgatattccttataaatacaaagcaaagaaaaaaaatcctcagtcaaatactagcaaactaaacccaataannnnnnnnnnnnnnnnnnnnnnnnnnnnnnnnnnnnnnnnn

SEQ ID NO: 201292 - DNA, 354 bp, Homo sapiens
  misc_feature (1)...(354): n = A,T,C or G
ttggagctaaatattaggtactcataaacataaagatggcaacaatagacactgggtacagctagcaggtggagtgaaggaggagtagaggcaagggttgaaaaacctgcttttgtgtactatgtttagtaccttggtaaatgggatcacttataccccaaaccttagcatcagacaatatatccaagtaacaaagcagcacatatgccccatgaatctaaaataaatattggaaaaaactytgatattccttataaatacaaagcaaagaaaaaaaatcctcagtcaaatactagcaaactaaacccaataannnnnnnnnnnnnnnnnnnnnnnnnnnnnnnnnnnnnnnnn

SEQ ID NO: 201293 - DNA, 323 bp, Homo sapiens
cagagatggcttaagacatttgcaattccttcaaagatggcataagaaatttggattttcaaactttagttttctcatcttagagtttgargtaattttatttgtcagctgccagaaaataaaaagaacacataaggtagcagactaatatctacattgacctactgtagagccagaaggacccatttatttagcaagagacttctttactgtgtctagttcaggttcccggaaagatgggacaattcgtagtaacactcattccttctgctaagggtcatgagataggtttagacatatggtcccattttgatgatgtttta

SEQ ID NO: 201294 - DNA, 323 bp, Homo sapiens
cagagatggcttaagacatttgcaattccttcaaagatggcataagaaatttggattttcaaactttagttttctcatcttagagtttgaagtaattttatttgtcagctgccagaaaataaaaagwacacataaggtagcagactaatatctacattgacctactgtagagccagaaggacccatttatttagcaagagacttctttactgtgtctagttcaggttcccggaaagatgggacaattcgtagtaacactcattccttctgctaagggtcatgagataggtttagacatatggtcccattttgatgatgtttta

SEQ ID NO: 201295 - DNA, 431 bp, Homo sapiens
ttccttcaaagatggcataagaaatttggattttcaaactttagttttctcatcttagagtttgaagtaattttatttgtcagctgccagaaaataaaaagaacacataaggtagcagactaatatctacattgacctaytgtagagccagaaggacccatttatttagcaagagacttctttactgtgtctagttcaggttcccggaaagatgggacaattcgtagtaacactcattccttctgctaagggtcatgagataggtttagacatatggtcccattttgatgatgttttaaactttgtttattttacataccctgtgatagagccaatcaatgtaggggcctaaacgtcggtatagcctgtaattttgacagatgcccagattgtggtattgacaaataggacagatgtcccgaggggcatat

SEQ ID NO: 201296 - DNA, 323 bp, Homo sapiens
cagagatggcttaagacatttgcaattccttcaaagatggcataagaaatttggattttcaaactttagttttctcatcttagagtttgaagtaattttatttgtcagctgccagaaaataaaaagaacacataaggtagcagactaatatctacattgacctactgtagarccagaaggacccatttatttagcaagagacttctttactgtgtctagttcaggttcccggaaagatgggacaattcgtagtaacactcattccttctgctaagggtcatgagataggtttagacatatggtcccattttgatgatgtttta

SEQ ID NO: 201297 - DNA, 631 bp, Homo sapiens
gtgtcaggtctcctattccatttataagtggaaagcatgtttttgttccacacaatactgagtagaagcttcaaagtacagatgtgctcaggaacaaatgcaygcttgttacttttaaatcacttgtatatattctaatgttctttgtcctcttggagtctccaactcagattaatattttattacagcagttactgtttttaaaatggacagcctgacttaacctcaatttgttaacagtgatttcaatgaaatatctttgaataattaatattatgtattcacggtatgtaaaagactagttagctaggttaactttgcttcgcaaaaatgaagtgattgaagtcaatgtacatgatgagctatatttcttgaatgcctttatacttctatttgttgatttgttggaaagaaacctgaacatttattaaggtttcactatatggctaaagaattgtatacttttcaaccacagtgcactcttttttttgttattaaagaagaagcctcaatttaactaaaaatggagatttgcttgttagatgattgtttttaagaataattgtgttttgtttctacatgcagaagctaattttaaatacttattgaattaaaaagaaaaaagtatgca

SEQ ID NO: 201298 - DNA, 631 bp, Homo sapiens
gtgtcaggtctcctattccatttataagtggaaagcatgtttttgttccacacaatactgagtagaagcttcaaagtacagatgtgctcaggaacaaatgcacgcttgttacttttaaatcacttgtatatattctaatgttctttgtcctcttggagtctccaactcagattaatattttattacagcagttactgtttttaaaatggacagcctgacttaacctcaatttgttaacagtgatttcaatgaaatatctttgaataattaatattatgtattcacggtatgtaaaagactagttagctaggttaactttgcttcrcaaaaatgaagtgattgaagtcaatgtacatgatgagctatatttcttgaatgcctttatacttctatttgttgatttgttggaaagaaacctgaacatttattaaggtttcactatatggctaaagaattgtatacttttcaaccacagtgcactcttttttttgttattaaagaagaagcctcaatttaactaaaaatggagatttgcttgttagatgattgtttttaagaataattgtgttttgtttctacatgcagaagctaattttaaatacttattgaattaaaaagaaaaaagtatgca

SEQ ID NO: 201299 - DNA, 631 bp, Homo sapiens
gtgtcaggtctcctattccatttataagtggaaagcatgtttttgttccacacaatactgagtagaagcttcaaagtacagatgtgctcaggaacaaatgcacgcttgttacttttaaatcacttgtatatattctaatgttctttgtcctcttggagtctccaactcagattaatattttattacagcagttactgtttttaaaatggacagcctgacttaacctcaatttgttaacagtgatttcaatgaaatatctttgaataattaatattatgtattcacggtatgtaaaagactagttagctaggttaactttgcttcgcaaaaatgaagtgattgaagtcaatgtacatgatgagctatatttcttgaatgcctttatacttctatttgttgatttgttggaaagaaacctgaacatttattaaggtttcactatatggctaaagaattgtatacttttcaaccacagtgcactcttttttttgttattaaagaagaagcctcaatttaactaaaaatggagatttgcttgttagatgaytgtttttaagaataattgtgttttgtttctacatgcagaagctaattttaaatacttattgaattaaaaagaaaaaagtatgca

SEQ ID NO: 201300 - DNA, 491 bp, Homo sapiens
aacagtgtgaatggcattccatttatccatcaccatctgtggctgaaaggaagaaggcgtttatcttttagcttaagtcaagtgaggaggrgaatttcaggagaacacacacacacacacacacacacacacacacacacacacacaaactcacccatataaccatacaacaaaacaaaacaaagcctttgagaccttgatttaagcgcaggatttcaggagatacgagtatgttgtagcttactgaacaaggatacagcgatctatgtgttttacaatgacaaagcaaaagcatgaatttcccaaggactagatttaagaacatgctaggcttgtgttattgtaaaagggatcttgatcaagactaccatcaagagagaaaatgcagctgcagcaagagcaagagacaaggtgaagtccaatggctcacttcaaaaaatagtggccaaaggaccccagaaagaatataagagtaaccttcactgtcatcc

SEQ ID NO: 201301 - DNA, 491 bp, Homo sapiens
aacagtgtgaatggcattccatttatccatcaccatctgtggctgaaaggaagaaggcgtttatcttttagcttaagtcaagtgaggaggggaatttcaggagaayacacacacacacacacacacacacacacacacacacacacaaactcacccatataaccatacaacaaaacaaaacaaagcctttgagaccttgatttaagcgcaggatttcaggagatacgagtatgttgtagcttactgaacaaggatacagcgatctatgtgttttacaatgacaaagcaaaagcatgaatttcccaaggactagatttaagaacatgctaggcttgtgttattgtaaaagggatcttgatcaagactaccatcaagagagaaaatgcagctgcagcaagagcaagagacaaggtgaagtccaatggctcacttcaaaaaatagtggccaaaggaccccagaaagaatataagagtaaccttcactgtcatcc

SEQ ID NO: 201302 - DNA, 491 bp, Homo sapiens
aacagtgtgaatggcattccatttatccatcaccatctgtggctgaaaggaagaaggcgtttatcttttagcttaagtcaagtgaggaggggaatttcaggagaacamacacacacacacacacacacacacacacacacacacacaaactcacccatataaccatacaacaaaacaaaacaaagcctttgagaccttgatttaagcgcaggatttcaggagatacgagtatgttgtagcttactgaacaaggatacagcgatctatgtgttttacaatgacaaagcaaaagcatgaatttcccaaggactagatttaagaacatgctaggcttgtgttattgtaaaagggatcttgatcaagactaccatcaagagagaaaatgcagctgcagcaagagcaagagacaaggtgaagtccaatggctcacttcaaaaaatagtggccaaaggaccccagaaagaatataagagtaaccttcactgtcatcc

SEQ ID NO: 201303 - DNA, 491 bp, Homo sapiens
aacagtgtgaatggcattccatttatccatcaccatctgtggctgaaaggaagaaggcgtttatcttttagcttaagtcaagtgaggaggggaatttcaggagaacacacacacacacacacacacacacacacacacacacacacaaactcacccatataaccatacaacaaaacaaaacaaagcctttgagaccttgatttaagcgcaggatttcaggagatacgagtatgttgtagcttactgaacaaggatacagcgatctatgtgttttacaatgacaaagcaaaagcatgratttcccaaggactagatttaagaacatgctaggcttgtgttattgtaaaagggatcttgatcaagactaccatcaagagagaaaatgcagctgcagcaagagcaagagacaaggtgaagtccaatggctcacttcaaaaaatagtggccaaaggaccccagaaagaatataagagtaaccttcactgtcatcc

SEQ ID NO: 201304 - DNA, 464 bp, Homo sapiens
tatacatagaccaaatgtatgtattgccttgcccaaaggcaaatgtgtctctttttcagggagagagggacatgacagtgtggccaggcaacctccatccatacagtcttccaggctgactgaggcacttccatcactgcaatcttcaacattcctcagtcatctggttatcctggaacctgtgaactagaagtagaaagagcatgaggaacatttgcaggacttttttgtcctgcaaattttatayattaaagtgtgtaacatagtgttttgatatacatatgcatagttaaaacactactgtcaagacaattaacatatcgttcatctcatattgttaacttttttgtggcatacactattaccaggtagagtcctcatgctctatattagatcctaaatacagttatcctaagtaattgcaattttataccctttgtcctatatcttcttatctccaaccc

SEQ ID NO: 201305 - DNA, 464 bp, Homo sapiens
tatacatagaccaaatgtatgtattgccttgcccaaaggcaaatgtgtctctttttcagggagagagggacatgacagtgtggccaggcaacctccatccatacagtcttccaggctgactgaggcacttccatcactgcaatcttcaacattcctcagtcatctggttatcctggaacctgtgaactagaagtagaaagagcatgaggaacatttgcaggacttttttgtcctgcaaattttatacattaaagtgtgtaacatagtgttttgatatacatatgcatagttaaaacactactgtcaagacaattaacatatcgttcatctcatrttgttaacttttttgtggcatacactattaccaggtagagtcctcatgctctatattagatcctaaatacagttatcctaagtaattgcaattttataccctttgtcctatatcttcttatctccaaccc

SEQ ID NO: 201306 - DNA, 267 bp, Homo sapiens
acttttttgtcctgcaaattttatacattaaagtgtgtaacatagtgttttgatatacatatgcatagttaaaacactactgtcaagacaattaacatatcgttcatctcatattgttaacttttttgtggcatacactattaccaggtagagtcctcatgctstatattagatcctaaatacagttatcctaagtaattgcaattttataccctttgtcctatatcttcttatctccaacccactttgtctctggtaactgctgtt

SEQ ID NO: 201307 - DNA, 464 bp, Homo sapiens
tatacatagaccaaatgtatgtattgccttgcccaaaggcaaatgtgtctctttttcagggagagagggacatgacagtgtggccaggcaacctccatccatacagtcttccaggctgactgaggcacttccatcactgcaatcttcaacattcctcagtcatctggttatcctggaacctgtgaactagaagtagaaagagcatgaggaacatttgcaggacttttttgtcctgcaaattttatacattaaagtgtgtaacatagtgttttgatatacatatgcatagttaaaacactactgtcaagacaattaacatatcgttcatctcatattgttaacttttttgtggcatacactattaccaggtagagtcctcatgctctatattagatcctaaatacagttatcctaagtaattgcaattttataccctttgtcctrtatcttcttatctccaaccc

SEQ ID NO: 201308 - DNA, 434 bp, Homo sapiens
accttatgaatataaatgcaagatttctaaacaaaatattagcaaactacatccagcaatatatagaaaagaactgattattttccatgaccaaggatttgtcctgggaatacaagcttgttttaacattcaaaaataagtcagggtaaaataccatctcaatacaataaaggacaaaaaaatacatgatagatacagaaaaagcatttgacaaaatcacacactatttaaaacaaaaaagtaaaaaaaaaaaaaaagacccaggaagctrgttatagaaggaaactagctcaaccaaataaaggttatttacaaaagccccaagccttatttacaaaagccccaagccaacattatacttaatagtgaagactgaatgatttacctctaagttcaggacagatggatattctcacagtgactgtgcaacattg

SEQ ID NO: 201309 - DNA, 422 bp, Homo sapiens
agggggaatattacttagcaaaatgcatgtttgctttgccaaagcctgaaacttttttctttttaagcaaattgaaaayctcaaagatttcaacattttttattacttatcccagcaaaatcattcagaccacttatttttaaaattaaacagtcactaatttatttcacttttatgcagttaagataggaagtggaggtcaattggaaaatagaattacaggaataggaccatcatgaaatgatttttttaatttattaccattcagagcatctatacttgtttgtcacacattcagaagaatggaagaaaggagggtagagaatgagtcatatgcattgaaaattattattcagttttaaaatgagtgcccaaaactatagacactgtacgaccctgaatttgaatattttacatttcat

SEQ ID NO: 201310 - DNA, 422 bp, Homo sapiens
agggggaatattacttagcaaaatgcatgtttgctttgccaaagcctgaaacttttttctttttaagcaaattgaaaacctcaaagatttcaacattttttattacttatcccagcaaaatcattcagaccrcttatttttaaaattaaacagtcactaatttatttcacttttatgcagttaagataggaagtggaggtcaattggaaaatagaattacaggaataggaccatcatgaaatgatttttttaatttattaccattcagagcatctatacttgtttgtcacacattcagaagaatggaagaaaggagggtagagaatgagtcatatgcattgaaaattattattcagttttaaaatgagtgcccaaaactatagacactgtacgaccctgaatttgaatattttacatttcat

SEQ ID NO: 201311 - DNA, 422 bp, Homo sapiens
agggggaatattacttagcaaaatgcatgtttgctttgccaaagcctgaaacttttttctttttaagcaaattgaaaacctcaaagatttcaacattttttattacttatcccagcaaaatcattcagaccacttatttttaaaattaaayagtcactaatttatttcacttttatgcagttaagataggaagtggaggtcaattggaaaatagaattacaggaataggaccatcatgaaatgatttttttaatttattaccattcagagcatctatacttgtttgtcacacattcagaagaatggaagaaaggagggtagagaatgagtcatatgcattgaaaattattattcagttttaaaatgagtgcccaaaactatagacactgtacgaccctgaatttgaatattttacatttcat

SEQ ID NO: 201312 - DNA, 422 bp, Homo sapiens
agggggaatattacttagcaaaatgcatgtttgctttgccaaagcctgaaacttttttctttttaagcaaattgaaaacctcaaagatttcaacattttttattacttatcccagcaaaatcattcagaccacttatttttaaaattaaacagtcactratttatttcacttttatgcagttaagataggaagtggaggtcaattggaaaatagaattacaggaataggaccatcatgaaatgatttttttaatttattaccattcagagcatctatacttgtttgtcacacattcagaagaatggaagaaaggagggtagagaatgagtcatatgcattgaaaattattattcagttttaaaatgagtgcccaaaactatagacactgtacgaccctgaatttgaatattttacatttcat

SEQ ID NO: 201313 - DNA, 541 bp, Homo sapiens
tggctgtgtccccacccaaatctcatcttaaattataactcccacaattcccacatgtcctgggaggaaccgggtgggaggtgattgaattatgggggtggatctttcctacgctgttctcaagacagtgaatgagtctcatgatatttgatagttttaaaaatgttaagtttctctgcacaagctctctttttgcctgctgccatccacgtaagatgtgacttgcacctccttgtcttctgccatgattgtgaggcttccccagccatgtggaactgtgagttctccattatacctctttcctttgtatattgccyagtcttcagtatgtctttatcaacagcatgagactagactaacacattctcattttgtgcgtttcagagaaaaaataataaggcaagaaattccatttttgaaaattattattgcttaaactttagacaaatgggaattgactgtgtttgtttaccctaacatggactaggtgctggcaaattacaactgcagttttgtttctgcagcctcaaatttaatcttt

SEQ ID NO: 201314 - DNA, 541 bp, Homo sapiens
tggctgtgtccccacccaaatctcatcttaaattataactcccacaattcccacatgtcctgggaggaaccgggtgggaggtgattgaattatgggggtggatctttcctacgctgttctcaagacagtgaatgagtctcatgatatttgatagttttaaaaatgttaagtttctctgcacaagctctctttttgcctgctgccatccacgtaagatgtgacttgcacctccttgtcttctgccatgattgtgaggcttccccagccatgtggaactgtgagttctccattatacctctttcctttgtatattgcctagtcttcagtatgtctttatcarcagcatgagactagactaacacattctcattttgtgcgtttcagagaaaaaataataaggcaagaaattccatttttgaaaattattattgcttaaactttagacaaatgggaattgactgtgtttgtttaccctaacatggactaggtgctggcaaattacaactgcagttttgtttctgcagcctcaaatttaatcttt

SEQ ID NO: 201315 - DNA, 522 bp, Homo sapiens
ttaatcagctatctgggcatcctgtgatccagtcaagttaacaaaattaactttcacaaatacactaattgtcaatgtggcacttatattcatctccttacatayttaaatactatgatataaagccaatatatcttatgttacatgataagagaataggagaaagaagaaaacaacggtattatatacacaatatatacacaatcaaaaatgcatttataacaaaatggggagatcatatttatgacaatcaaaattatcattgctgtaactggtcatgtagtcatagctagtatttataactactttattcaactaaccattctgtattccctttgtcttcaggaagcacctcagctggtagtggttttttgtcttttgtggttacccaattttttattcctgaagggctgtgatcactaacaaccttgtcctcattgggctgttgtttcctattaaccttaatcacagggcatggtaatactaaggaaaactataagggatcacccacactctaaatgt

SEQ ID NO: 201316 - DNA, 522 bp, Homo sapiens
ttaatcagctatctgggcatcctgtgatccagtcaagttaacaaaattaactttcacaaatacactaattgtcaatgtggcacttatattcatctccttacatacttaaatactatgatataaagccaatatatcttatgttacatgataagagaataggagaaagaagaaaacaayggtattatatacacaatatatacacaatcaaaaatgcatttataacaaaatggggagatcatatttatgacaatcaaaattatcattgctgtaactggtcatgtagtcatagctagtatttataactactttattcaactaaccattctgtattccctttgtcttcaggaagcacctcagctggtagtggttttttgtcttttgtggttacccaattttttattcctgaagggctgtgatcactaacaaccttgtcctcattgggctgttgtttcctattaaccttaatcacagggcatggtaatactaaggaaaactataagggatcacccacactctaaatgt

SEQ ID NO: 201317 - DNA, 522 bp, Homo sapiens
ttaatcagctatctgggcatcctgtgatccagtcaagttaacaaaattaactttcacaaatacactaattgtcaatgtggcacttatattcatctccttacatacttaaatactatgatataaagccaatatatcttatgttacatgataagagaataggagaaagaagaaaacaacggtattatatacacaatatatacacaatcaaaaatgcatttataacaaaatggggagatcatatttatgacaatcaaaattatcattgctgtaactggtcatgtagtcatagctagtatttataacyactttattcaactaaccattctgtattccctttgtcttcaggaagcacctcagctggtagtggttttttgtcttttgtggttacccaattttttattcctgaagggctgtgatcactaacaaccttgtcctcattgggctgttgtttcctattaaccttaatcacagggcatggtaatactaaggaaaactataagggatcacccacactctaaatgt

SEQ ID NO: 201318 - DNA, 383 bp, Homo sapiens
ttttggctcctctcaagttaattgtacaagctctttattattattattattttcagagacagggtctcactctgtcacccaggctasagtgaaacctggatgcaatcagagtggtgcaattatagctcactgcagcctcaaactcctgggctcaaaagatcctcccacttcagcctcctgagtagctgagaccacaagtgtgcgccatcacaccctaattgtttttatttttatttttagtagagacaaggtcttgctatgttgcccaggctggtctcaaactccttggctcaagtgatcatcccatgtcagtctcccaagtgctgagattacagcataagccactattcctggcccctatcttttaatttaaaaaaaaaaaa

SEQ ID NO: 201319 - DNA, 571 bp, Homo sapiens
  misc_feature (1)...(571): n = A,T,C or G
nnnnnaatacatatatatcattaaaattttggcccagatgtgtattattgtcacttaaacagaaagcattttttcatattattaaatattctttaacagcattawtattattattattatttgagacagggccttgttctgttgtccaggctggagtgctgtggtacaatctctgctcactgcagtctcaacctcctaggctcaagcgatcctcctacctcagcctcccaagtggctgggtctacaggtgcatgtcaccatacctggctaattttatgtatttttgatagagttggccacgttggccaggctggtcttgaactcctgtgctcaagtgatccacccacgtcggcctcccaaagtgctgggattacaggcgtgaaccaccacacctggcctttacagcatcattttaaagtggctgtctcatatttcattatataccttttcaatttatttgttgatttggcccctatgttaaactaggtatttccaattttctacttttataaacaaggctacaatgaacatataaatatctgaatcttcacacatatcaatacttttttcc

SEQ ID NO: 201320 - DNA, 579 bp, Homo sapiens
tctcattgtctatctcccatctgacaatggagatgacagtcagcaggatgtctgccaagtgtggccttgagcacaggctaaggtcagcagggtgggggagatggcggggggggggtttggcacctgggggctgagttgggagtgcctgaagcaagaggggcgcgagtggctgtggaatacccaggccaaatgctgaccctataaatatttattgtgataaaataaagataaggcctggaatgagaagcaggagcgaatgaaggaatccacactgctcggttccattttcagccatgctgtgtgaattyagcctgtgtgtccatctctcaggaccgggttggtttgtgtggggttcactagctggtaccattccttcccttcccaaatggactttgctctttgcaaacagaagaacgggcaaggcatttatggctgggagacatttccttgctgtttgggcgtattctcttttcagcttcaagctgcccaacctgccctgtgttgaagggagggctgaagggtggctgatggctgaattagggcccgtggcttgaggagaaggttgcagagggtcaagaa

SEQ ID NO: 201321 - DNA, 579 bp, Homo sapiens
tctcattgtctatctcccatctgacaatggagatgacagtcagcaggatgtctgccaagtgtggccttgagcacaggctaaggtcagcagggtgggggagatggcggggggggggtttggcacctgggggctgagttgggagtgcctgaagcaagaggggcgcgagtggctgtggaatacccaggccaaatgctgaccctataaatatttattgtgataaaataaagataaggcctggaatgagaagcaggagcgaatgaaggaatccacactgctcggttccattttcagccatgctgtgtgaattcagcctgtgtgtccatctctcaggaccgggttggtttgtgtggggttcmctagctggtaccattccttcccttcccaaatggactttgctctttgcaaacagaagaacgggcaaggcatttatggctgggagacatttccttgctgtttgggcgtattctcttttcagcttcaagctgcccaacctgccctgtgttgaagggagggctgaagggtggctgatggctgaattagggcccgtggcttgaggagaaggttgcagagggtcaagaa

SEQ ID NO: 201322 - DNA, 454 bp, Homo sapiens
ccgaaactctaggggtagggcccagccatctgtgctccaacaaaccctccagtgattgtgatacacgctccagttggagagttactaatctagtggaaaatgacacaagtataagcaaataactacmatacacggacacatccctgaagaagtgacatcatgggcagggcttgaaggaagaacaagtgttctcaggtgggcatgagccacatgaggagagattggcacctacaaagccccggaagcatgaaagggaagcgaatgttgagggaaccacaagtgatttggcagggctagaggagagggctaaagagccaggtggggagtgtgggaggtgaggctgggaaggggggcgggagcgagactatgatgccctttacgtgcccagatagggaatttagattttatcctgtaagtgacgggtaacatgcaaagtttttaatggagaataata

SEQ ID NO: 201323 - DNA, 548 bp, Homo sapiens
gaggcaggaagatcagttggaaagcttctacaataatggaagtgagagtccatgtgggcctgaactcaggccatggctatggagatatcgagaagtgggtgggttgagagatatttgggaggagaattgacaggacccatgggggaggcatgagagcgggaaaggttgagggtatctccgagggctctgctttgctggtatttctagaaaagatggaaccggcacagagaagcaatgacttcaagtctggacacaatgaattgagggagctcagaagaaagctctgggctggtagctgaagcagaaatcaattatgcctgtgttgtttgtctccsaatgtttatcatgcatgcattcatttcaggaaatactggattgctatcatgcaccagaaaggttctaggagggagtgaaaaacacaatagccagaatctgctcccaggacttacacagcagtggggggaccagaaatacataaccaaacagatacataaacaaacgtgtttcaggtagtgccaggtgctgtgaagaaaagtaagagtaagagt

SEQ ID NO: 201324 - DNA, 601 bp, Homo sapiens
aatgacttcaagtctggacacaatgaattgagggagctcagaagaaagctctgggctggtagctgaagcagaaatcaattatgcctgtgttgtttgtctccgaatgtttatcatgcatgcattcatttcaggaaatactggattgctatcakgcaccagaaaggttctaggagggagtgaaaaacacaatagccagaatctgctcccaggacttacacagcagtggggggaccagaaatacataaccaaacagatacataaacaaacgtgtttcaggtagtgccaggtgctgtgaagaaaagtaagagtaagagtgtggaggggtgggggaattcaggcagagcagtcaggcatggcctctctgaggaggtgacatgggctaatcgagaagtcggaaccaggtgtgtggaaatgggaggacagtgctcccaggcagggggaacagcaagcgccaaggctctgaggtgggaatgggtttgacatgatggtgggaaggaaagatggcagcacagccagccagtcatgggacacgaggtcagagaggtggacaggtacgtttctagggactggtgagatgccgtaatacatgtgaaagtgttta

SEQ ID NO: 201325 - DNA, 512 bp, Homo sapiens
tttgtctccgaatgtttatcatgcatgcattcatttcaggaaatactggattgctatcatgcaccagaaaggttctaggagggagtgaaaaacacaatagccagaatctgctcccaggacttacacagcagtggkgggaccagaaatacataaccaaacagatacataaacaaacgtgtttcaggtagtgccaggtgctgtgaagaaaagtaagagtaagagtgtggaggggtgggggaattcaggcagagcagtcaggcatggcctctctgaggaggtgacatgggctaatcgagaagtcggaaccaggtgtgtggaaatgggaggacagtgctcccaggcagggggaacagcaagcgccaaggctctgaggtgggaatgggtttgacatgatggtgggaaggaaagatggcagcacagccagccagtcatgggacacgaggtcagagaggtggacaggtacgtttctagggactggtgagatgccgtaatacatgtgaaagtgtttagtg

SEQ ID NO: 201326 - DNA, 392 bp, Homo sapiens
tgaattctggggaggggagacaaagggaggaatcagaggtgaagcttakaatttccagcttgagttgacagaggtcaggagtatggcaaggggagtgcatattagggggagtacagggttagtggggaaacactgcagttgaggttcccgggggacattcaggagatgctgtctaacagacaactggatatacaggatagagtttgaagagagaggcctgggctggaaaagggtcatcgtgtgggggtagaacgacccagaagagtgcgagggaaaagacaggagtataccccaggcagcaccagtgtcaaggaagggacagaggaacagaggccaggctggagagtaagaccgagaggttgcagaggtgggcagcaccaggaccagggtag

SEQ ID NO: 201327 - DNA, 563 bp, Homo sapiens
cactatggtcattatcttgtcaaaactgtggtggatttgaagagctagtgatgaagaatggaggtttcctgtcctagaaataaccaaaggcccaggcttggaggtggcagaaaaagtggcacttaaggtaacaaatgtttgttgagacctgtactaccatttcacacatagcatctatcacttttaatactcgcctccaaatctgaggaccaaggtggtactctctccatttgacagataagaaaatagattgaaagaagctaagtcacacacccaagttcacgcagcaagaaggcccagatgatttttcttaaactttattcaattctaacacaaccagtaaaatgacagatcaagaaatgaaaaacaggtctgtaatgctttaagcctacgctctttctagaaccactcaatattgtctccagggctgactcaattcctagaaagtgaattgggcttctgaagagactacaagtaaggtttaggggaaataaamatagttgagccatttgggtcctgcacaaagatgcccagctgaggaattgaaggaactgaggaattta

SEQ ID NO: 201328 - DNA, 508 bp, Homo sapiens
gacattcaattttttaaaatgcaagccattgtgtgaaagactttgcttaaaggaaaagcattacagtatgttttgggcactttctagaaaagaaaaaatattaaaaaaagataacatacgccacgttcagcaggaaacctcttccaatcaacagtgatatgaacaaacaaaaccccatcactggrcacggcacactgctccctgaacacattcctgtgtccatcctcatgttgatatcagaaattcaatttgaggagcttatgaatgttgatgtaaaatgatgagtactggttattagtgagacacaacagctacttctgaatcgttttcataatcttgaattctcatgtctgaattaccaactgatcaaaccaccaaaccctggcacaaaatggggaaaccaacaaatgcaacttagtatcagaatgcctactttttggaagaaattttaaagcccaatgaaaacccttggccaagcagctggtaaagataaagtaagaactaaggc

SEQ ID NO: 201329 - DNA, 504 bp, Homo sapiens
gagagaccgaattatcgagtaaaccaccataatttgggcagatcttcagagagaaaatgctgagggtggatggagaagtgatgcaggaaccaaggcagaagagggatggagctgggaatcctgtgtaggatacctgaatgccagggctagttccagctccaattgcttctgagaaaggrgtgagtgagggaactgagggacagctcagttttgctgcagacctctggaatcctagctacaggggactctgtatccccatggacatggacttctagtgggggatctccctagagagcgtgcagagacaggccattggacggcatggagcctgggagcttttgtacactaggctctccagcagagagtgaggacagaggcccatcccccagggctcgccattcccctccaggaggtgcagaccgcagctgacctctaagccaggagaaggggggccagcttcaccacaggactgggggcatctgctctgcaagctcttctgcccgc

SEQ ID NO: 201330 - DNA, 504 bp, Homo sapiens
gagagaccgaattatcgagtaaaccaccataatttgggcagatcttcagagagaaaatgctgagggtggatggagaagtgatgcaggaaccaaggcagaagagggatggagctgggaatcctgtgtaggatacctgaatgccagggctagttccagctccaattgcttctgagaaaggggtgagtgagggaactgagggacagctcarttttgctgcagacctctggaatcctagctacaggggactctgtatccccatggacatggacttctagtgggggatctccctagagagcgtgcagagacaggccattggacggcatggagcctgggagcttttgtacactaggctctccagcagagagtgaggacagaggcccatcccccagggctcgccattcccctccaggaggtgcagaccgcagctgacctctaagccaggagaaggggggccagcttcaccacaggactgggggcatctgctctgcaagctcttctgcccgc

SEQ ID NO: 201331 - DNA, 574 bp, Homo sapiens
ccgttattatccccattttccaggtgagtaaactgactttccctgaacctgattcatctaatactaaccctgtcaaattaaatcccagggtaaccagccttcagctcgaatcacacattgattctctcatctgtgttaactgtcttttctcctttacagcttctgaatctgttcttattttttgcttgctctaggaaattttataatttctctcactttctaccattattatgatctctattcaggcaaacttgcaatgaaaattctttttccctctgctttttaactctgtcctccattctttcaggctcttgggtaactgttatagaactgagttagaggagacatcttgttttaaccctgtgctgaacgactctcagggcacctgctccctcataccttgagacattgcagctttcccctctttcactggtgaaggtctctgttccctcctgtctgcccatcacattctgacttctttgccattttktagcccagcctctgccttatctacccctgcattctgcaaaagctaccctttcctcccattcatccaggtgctcttccaaactca

SEQ ID NO: 201332 - DNA, 303 bp, Homo sapiens
gcagaaataggttaccggaattcattgagacaaactaacaaaactaaacaggtaasttactttcaatctgcttgattaaggtggtgatagtctttatttcctagttggttatttaatctttcaaaatatttttagtcatgcccatttggaagagtcccagttaaccttctaaatagcccagattgtgatgtgaagacagatgattcagttgtaccttgttttatgaaaaggtatgttgagttttaatttttaaaatttgttgtccgtatgggaagattaatggcagaatggtcttaaagtctt

SEQ ID NO: 201333 - DNA, 554 bp, Homo sapiens
acctatggccacataggatggaatagctattgaagacaagcctttgacagactggctgctgcattgcactattgtggtgcaaataagaaacagagaaaacttgagtggaaggattgcttcctatwgcactgaagagcttacagaaatagtgttcgctcttattttaaattcttggcttagggcaaggaaaaagttgcagacagcttctatgacccgccctgaccccctgcccaagagacccttttatatatcttagctgcagacttaaaatgccttaaaacaagatttaaagtttgctcctttggattgcagaattacaacttgatttcacagcctcagtggtctcctgtgtgaaatttgtggcattgatcatgaaaggatgggacctaaagaaacagaatggggatatttgggtagatttggatgaacctgagaacatgaatctttaaattgctttgaatatgcctgttcataaaagcagtctgtcttccctatcagatgacattagtcctttgttgcttgagatactataatgacctcaaccaaggtagtta

SEQ ID NO: 201334 - DNA, 554 bp, Homo sapiens
acctatggccacataggatggaatagctattgaagacaagcctttgacagactggctgctgcattgcactattgtggtgcaaataagaaacagagaaaacttgagtggaaggattgcttcctattgcactgaagagcttacagaaatagtgttygctcttattttaaattcttggcttagggcaaggaaaaagttgcagacagcttctatgacccgccctgaccccctgcccaagagacccttttatatatcttagctgcagacttaaaatgccttaaaacaagatttaaagtttgctcctttggattgcagaattacaacttgatttcacagcctcagtggtctcctgtgtgaaatttgtggcattgatcatgaaaggatgggacctaaagaaacagaatggggatatttgggtagatttggatgaacctgagaacatgaatctttaaattgctttgaatatgcctgttcataaaagcagtctgtcttccctatcagatgacattagtcctttgttgcttgagatactataatgacctcaaccaaggtagtta

SEQ ID NO: 201335 - DNA, 554 bp, Homo sapiens
acctatggccacataggatggaatagctattgaagacaagcctttgacagactggctgctgcattgcactattgtggtgcaaataagaaacagagaaaacttgagtggaaggattgcttcctattgcactgaagagcttacagaaatagtgttcgctcttattttaaattcttggcttagggcaaggaaaaagttgcagacagcttctatgacccgccctgaccccctgcccaagagacccttttatatatcttagctgcagacttaaaatgccttaaaacaagatttaaagtttgctcctttggattgcagaattacaacttgatttcacagcctcagtggtytcctgtgtgaaatttgtggcattgatcatgaaaggatgggacctaaagaaacagaatggggatatttgggtagatttggatgaacctgagaacatgaatctttaaattgctttgaatatgcctgttcataaaagcagtctgtcttccctatcagatgacattagtcctttgttgcttgagatactataatgacctcaaccaaggtagtta

SEQ ID NO: 201336 - DNA, 603 bp, Homo sapiens
ggtagttaccttccaaggggatgctgatcccctttatgcctgccttctcccctttcagtgccatcagagctgcaaagagaattagatcgcagcatgccccaggagaacaaatasaaaatctatcctgggaggaggcagttagaatgataggatttggctaattttcatttgcaggaatgtgtaggaataggttctcagggtgttaaggcagggagaaacatttctttagaatgaactgaaattattgatatagttcttatatattaccaaaaattcttattttgaggacatagctaaacagtgaggagcagctttactggtttttcagttgttcaactgaaacagggactcagtggcagcctatattaaactcagatatatgttagaaactctttggaataatgtggaggagagactccagagacttaatggagttaggagtgttggagaaggtctaccatgtgtgacccacttgactagcccctctctatgtttgagatatctattggtaagttccaccagcatccttggaaaattctgtagtggttactttctatagattgggatcatgacggagggaggaagctgtccctaaaatgagtc

SEQ ID NO: 201337 - DNA, 470 bp, Homo sapiens
tagctgttctggcattgaaagttatttaacttttcttagcctcgttttccccacttaaatacctaccatctcaggttattatyggagtaaagtaagataatttttgcatagtgtttggcacgtattaagcactcagtaaacagtagcagctatttatttataattcttattcagtagtttctggtttggtaactgatcaaaatatgccaatttcaagtaaatcctattacataatgttgtattttgggctggaattaaaatgaattaactgccatatagctgttgttactaatcattatatacttttctgggcactagcaaattctccacaacattttcaaaggaaatcctaaaggctagattgacacagccattttttaaattgcatatgtataaagaatttgtttcctaagagactcattaaaattctgtatgaacccagagaactgactagtaatgctaggaaaata

SEQ ID NO: 201338 - DNA, 587 bp, Homo sapiens
cgggatatagctatatttgccagagtgtggattattctaataatgttcatgaagtcagggtaagtacattaaaaatactcttaatcagtaaaagtggtttgatttttataggccycagtctgtgaaaatatagaatgtacttttttttaagagacagtttctttaacattcatttagagacagtttcttgctctgtcccccagaccgaagtgcagtggtatgatcatagctcactgcagcctcaaactcctgggctcaattgatccttctgcctcagcctcccaagtagctgggactacgggtgtaccccaccatgcctagatatttttttactttttgtagagacagggtcttgctatgttgcccagtctggtcttgaactcccagccgcaagggatcctcttgcctcagcctcccaaagtgctgagattacaggtgtgagccaccacacctggcaaaatgtactttaatatgatagtgaaattatactagattgttatgagtcagtaaaactatgcttttttaaaaagtacttaatttaaaatttgtttttgtatctcaaaaatgttttttattttgcagcatga

SEQ ID NO: 201339 - DNA, 587 bp, Homo sapiens
cgggatatagctatatttgccagagtgtggattattctaataatgttcatgaagtcagggtaagtacattaaaaatactcttaatcagtaaaagtggtttgatttttataggcctcagtctgtgaaaatatagaatgtacttttttttaagagacagtttctttaacattcatttagagacagtttcttgctctgtcccccagacygaagtgcagtggtatgatcatagctcactgcagcctcaaactcctgggctcaattgatccttctgcctcagcctcccaagtagctgggactacgggtgtaccccaccatgcctagatatttttttactttttgtagagacagggtcttgctatgttgcccagtctggtcttgaactcccagccgcaagggatcctcttgcctcagcctcccaaagtgctgagattacaggtgtgagccaccacacctggcaaaatgtactttaatatgatagtgaaattatactagattgttatgagtcagtaaaactatgcttttttaaaaagtacttaatttaaaatttgtttttgtatctcaaaaatgttttttattttgcagcatga

SEQ ID NO: 201340 - DNA, 587 bp, Homo sapiens
cgggatatagctatatttgccagagtgtggattattctaataatgttcatgaagtcagggtaagtacattaaaaatactcttaatcagtaaaagtggtttgatttttataggcctcagtctgtgaaaatatagaatgtacttttttttaagagacagtttctttaacattcatttagagacagtttcttgctctgtcccccagaccgaagtgcagtggtatgatcatagctcactgcagcctcaaactcctgggctcarttgatccttctgcctcagcctcccaagtagctgggactacgggtgtaccccaccatgcctagatatttttttactttttgtagagacagggtcttgctatgttgcccagtctggtcttgaactcccagccgcaagggatcctcttgcctcagcctcccaaagtgctgagattacaggtgtgagccaccacacctggcaaaatgtactttaatatgatagtgaaattatactagattgttatgagtcagtaaaactatgcttttttaaaaagtacttaatttaaaatttgtttttgtatctcaaaaatgttttttattttgcagcatga

SEQ ID NO: 201341 - DNA, 587 bp, Homo sapiens
cgggatatagctatatttgccagagtgtggattattctaataatgttcatgaagtcagggtaagtacattaaaaatactcttaatcagtaaaagtggtttgatttttataggcctcagtctgtgaaaatatagaatgtacttttttttaagagacagtttctttaacattcatttagagacagtttcttgctctgtcccccagaccgaagtgcagtggtatgatcatagctcactgcagcctcaaactcctgggctcaattgatccttctgcctcagcctcccaagtagctgggactacgggtgtaccccaccatgcctagatatttttttactttttgtagagacagggtcttgctatgttgcccagtctggtcttgaactcccagccgcaagggatcctcttgcctcagcctcccaaagtgctgagattacaggtgtgagccaycacacctggcaaaatgtactttaatatgatagtgaaattatactagattgttatgagtcagtaaaactatgcttttttaaaaagtacttaatttaaaatttgtttttgtatctcaaaaatgttttttattttgcagcatga

SEQ ID NO: 201342 - DNA, 527 bp, Homo sapiens
tgggcttggagaattagaaagggccaaatcaggcagggcctttggtaarcacagcttcctatgtaagttactaggaaagctatgaatggttgtaagcaggggcctatcatgatccgcgaaactaagatgacatgtgatgagagctttccttcccattttttaatagcacccccaccctgtgggccattcttgaggaacttaaaataatttccttagatctggacctgagaaaaggtagagtggcactactcagaagctgccacaaagcttaccctttacactaatgtgtgatgtatctaccttgactcaaatgtctcaactcctgcctactctaggggactttagatgggacacttcctgaaacactggagtggctttggtctcctcctgtctgctgaaaaatttcttaaatgagactaaatctccagttactgcttctcctaggaagtttatgaaggtcaaacttctgttgtcctgcctttctccttagaaacaacctaatattgagaaatttggcaaacgtgatt

SEQ ID NO: 201343 - DNA, 550 bp, Homo sapiens
tgcagataattatatcagatggcacttttgtaaacttaagagccacagagcacttggtcatcctttaaaaattcaatttgttttcttatttttttgctcaagtcctgtggataatgtcacctgtaaatgmtttaacattattaacgtaagtattttcatttgttaagccacttattattctgaattaggcatatattagcacaccgaaatgagtagtgtaacagtctatcttttttcactttagatgtttttttcgtcttcattatcaggacattttgcctgttaacaaacgaaggtactattgttttattttctattagaatatatattttaaaatcatgtgggtttggatttcagaaaggagatgggaggaaacacatggccttttaaagccaaggtccacattaactttctcgcttgatccttcagtattcccctgcccaaagacctgcagctctagccaactgggataactcactgacccttaagtaaaatgtgtacatgtccacctttatgtttctcatcccaccattccccttgcctttaccca

SEQ ID NO: 201344 - DNA, 654 bp, Homo sapiens
tttgggtggttaatatctaattgagtataagcccttacacctccccataccaaggcagccattgagcacatcttctatctgttgcctagtacttggctaagtgaaaatcctttttcatttacataactttttcattcacatgtagaattcagcaagttaataactgtatatttgcaatagcaggtgactgttcccctaattttgttgtatcatatattccaacgatttaaaataaaatttacaacacgtggctgtcttaaatgtaaacaagcttgcaatcaatttggtttaatgaaattaaagccctataatakgactaaagagaagaaagcttttggttctttcctgaatttgtaatggaaacaactgttttggtctaaagagataatgaaaaacatgattgtgccaaaactctaggaaaagatttattcggtattagtcaacaaagtagaaaattctgattatctggggaagattatagagactgcattttaaagtggtgtggtttttcaggtactttatattgctcttgtgtgttaaggtgtggaataggatcaatcactttttcaatgaaaggaagatttaagcatagatgctgagccaacttctctgagcttttagtagaatgctaattaacagagatggtaatctaaa

SEQ ID NO: 201345 - DNA, 442 bp, Homo sapiens
gatggcctcaccattgcctctgtgagctagatttagaggagttctgctgctgttactcagattttatgtaaaatgtcttaaaaaaataagttctcccactacagactttcactatgtaattgcgaaactccaagagttattctatttcactctcttttattcagcttcttctctaatgctctttcctttcctctgctattacaaataaaatttcctatacaaatcagctagcaaatatttattgaacatttattacaygtcacaaaaagtgttttacatcatcttgttcattcctaacacactcctaagttaggtactattattagctctagtttaccaatgagaaaacgaaggcataaaaagagtaattaatactagagcgcatattcaaatgctagctttccaacaccacaacccttacgtttaagcactctcaatagtg

SEQ ID NO: 201346 - DNA, 457 bp, Homo sapiens
agttacatcagattgtacttaacacgtaagattttctaataagactggaatggaaagaaggaaaccttggttcagtaaccaatcatttgtgctcctttgtcaaatcawttaatatttttgaatgacagctttaagtgggattgtgtgagctttaaatagagttgtggtaagaaggaggaaaaaacaatctcttgggctttttctagctctaaaacactttaattctgtcatttatagctttgtttttaaaagcaagtcagatggtttaatatttatagattcatacactatattcaagaaagtattagagacttgtgcaagattccatgacaagtcagcagctgtgttgagataagaaatttacgctggatcctaaaatctgtcatcctgcctagcgttccttctactgaaactctctgccttgatagtaatacttctagttactataatctaattg

SEQ ID NO: 201347 - DNA, 539 bp, Homo sapiens
gaattcctccttctgccatatatatatatatatgactgtatatactattagttgcaagaaatgtgtgatctttataattaaaatcaataaatattgaactttagtgtggtgcatcatatccctcataagggtttaaggccttttaaagcctttgtgcttcaagtctaagtccctaaccagccacatcagtatcacttgggaacttgttagacatgcagaatcttaacccaatctacagactccgaaatttgcatttcagcaagatccccctgattcaagacacgctttaaagtttgaggatcactgatctaagagacccagataatcttttgggtcttgccttggtgaagatactttccaaggctcaggcatcacaatctaaattaaagcttttgcaggatagtcaagaagaccattgctaaattttggagccacttcaggactttgctraaaattacagagatcatttactttgtggctgagaaatgtcgtcctataccaaaagataggattaagatatgagtttaagtaacctggaa

SEQ ID NO: 201348 - DNA, 557 bp, Homo sapiens
cagtatccccacttattcgcagggtataccttccaagtcccccaggggayacctgaaaccatggatgcaccaaaccttctatattactatgtttcttcctatacatatgttcttcctatgataaagtttaatttataagttaggtacagtaagaagtcaacaataactgacaataaaactagaacaattataacaagatactgtaataaaagttacacgaatgtggtctgtctctcaaaatacctacttgtattgtattcacctattttcagaccacaagtaaccacaggtaactacaaccacagaaagcaaaactgctgataaggggagactactagattccagttacttgctgttatcttatacaaatcatttaacttctctgaacctcagttggtatgtgtgtgtgtgtctttgtgtgtgttttcccaatgagtgtgacaataccaattagtcagctttattttaacaaagtaaaaaaaaaagtatttgaaatgactgacatgatattactaaaaacttagtactgcttagcaatgtaacatttatcacaaaaa

SEQ ID NO: 201349 - DNA, 557 bp, Homo sapiens
cagtatccccacttattcgcagggtataccttccaagtcccccaggggacacctgaaaccatggatgcaccaaaccttctatattactatgtttcttcctatacatatgttcttcctatgataaagtttaatttataagttaggtacagtaagaagtcaacaataactgacaataaaactagaacaattataacaagatactgtaataaaagttacacgaatgtggtctgtctctcaaaatacctacttgtattgtattcacctattttcagaccacaagtaaccacaggtaactacaaccacagaaagcaaaactgctgataaggggagactactagattccagttacttgctgttatcttatacaaatcatttaacttctctgaacctcagttggtatgtgtgtgtgtgtctttgtgtgtgttttcccaatgagtgtgacaataccaattagtcagctttattttaacaaagtaaaaaaaaaagtatttgaaatgactgacatgatattactaaaaacttastactgcttagcaatgtaacatttatcacaaaaa

SEQ ID NO: 201350 - DNA, 584 bp, Homo sapiens
ctttccaacaatattatgtgtatatacatatacatatatgtatatacacacacacacatccataagcaaagtacattttgaaatttgtcttaaaaccaaatatttttgcaattattatttttaatcagtacaaatccatctttatttttaatgaattattttatcgtaatttatttaatcatatacctactgataggcatttaaatcacttgatttttttcagtctagcatgggagttaccaattgttttgtttttatatctcccaccgtggaaatccatgygtatcatcaattcacttcaattaaattaaaactaatttggatatatctattggaatgtttttatttaataataatctgagcataaatattttatatcaagtattatttttatcaaatattttatatcaagtatttttatattttatatcaaatattaccatattaaaatataatacaaatcagtctccactctaacatttatttgactgtaattatatatacaaaatgctaagaaatgaattgagtatctcattttatatttttatggaacctagcaataggctctgtataattgtgtcatc

SEQ ID NO: 201351 - DNA, 495 bp, Homo sapiens
ccttagggttgtctcaggtaggcaaagccactagtcctattgctgccctgcttcccattagaaataatgctattgtttgtttatttttggtattattgggccttatggggttatagacagtgaccctcagaggagcaatggtgaccaacatacatttttgttttgatatacaaaayattttgtttttatgtacaagtttttgatatacaaaagaaaactactcctaaaagaataggtagctctccagggagtcaggagtagttagttgcagggtcggatttctttccaatcaaccacagacaaaagtgagcccagttagggcacaaatagaggccatatgtggtgtaacatctgttctctgctgccaaggtggatctatagaggtattttccccaaattccaatggcagtggtcagacagctcctattttccagaaggggggatacttccgtcttcctaaatcaggcagttgctttttctttgcatgtattggcc

SEQ ID NO: 201352 - DNA, 495 bp, Homo sapiens
ccttagggttgtctcaggtaggcaaagccactagtcctattgctgccctgcttcccattagaaataatgctattgtttgtttatttttggtattattgggccttatggggttatagacagtgaccctcagaggagcaatggtgaccaacatacatttttgttttgatatacaaaacattttgtttttatgtacaagtttttgatatacaaaagaaaactactcctaaaagaataggtagctctccagggagtcaggagtagttagttgcagggtcggatttctttccaatcaaccacagacaaaagtgagcccagttarggcacaaatagaggccatatgtggtgtaacatctgttctctgctgccaaggtggatctatagaggtattttccccaaattccaatggcagtggtcagacagctcctattttccagaaggggggatacttccgtcttcctaaatcaggcagttgctttttctttgcatgtattggcc

SEQ ID NO: 201353 - DNA, 495 bp, Homo sapiens
ccttagggttgtctcaggtaggcaaagccactagtcctattgctgccctgcttcccattagaaataatgctattgtttgtttatttttggtattattgggccttatggggttatagacagtgaccctcagaggagcaatggtgaccaacatacatttttgttttgatatacaaaacattttgtttttatgtacaagtttttgatatacaaaagaaaactactcctaaaagaataggtagctctccagggagtcaggagtagttagttgcagggtcggatttctttccaatcaaccacagacaaaagtgagcccagttagggcacaaatagaggccatatgtggtgtaacrtctgttctctgctgccaaggtggatctatagaggtattttccccaaattccaatggcagtggtcagacagctcctattttccagaaggggggatacttccgtcttcctaaatcaggcagttgctttttctttgcatgtattggcc

SEQ ID NO: 201354 - DNA, 574 bp, Homo sapiens
caccaaatctgctggcacctaagtcttggacttcccagtccccagaactatgcgacataaattactgttgcttataagctacccagattatggtattttgttataacagccccaaaaagacaaagacaaatattaaaaactcaacataatgtgaactttatatttttagcagttctagaacttcaggtgtataatatgtaactttattattacatcttattataatttctgcctttgattacctagcctagcataaagcttcaatctgcttataaattcagattttcctgtgatttcttattctggtttcagaaaaagcatatgtaacattgaggtatgaagggtggcattcagatgatcctcgttcattttatttgtgatatcttggggtratataacctgtcatacactgcctcaacatgaatattaaacatggactgctactagagcaggtattgaaagttatggtctcaccgatggacttgattcccacctcagctatgagacattctcaatcaacagatatttcccataaatcatcctattgtccttatcataggcttcccactctgat

SEQ ID NO: 201355 - DNA, 574 bp, Homo sapiens
caccaaatctgctggcacctaagtcttggacttcccagtccccagaactatgcgacataaattactgttgcttataagctacccagattatggtattttgttataacagccccaaaaagacaaagacaaatattaaaaactcaacataatgtgaactttatatttttagcagttctagaacttcaggtgtataatatgtaactttattattacatcttattataatttctgcctttgattacctagcctagcataaagcttcaatctgcttataaattcagattttcctgtgatttcttattctggtttcagaaaaagcatatgtaacattgaggtatgaagggtggcattcagatgatcctcgttcattttatttgtgatatcttggggtgatataacctgtcatacactgcctcaacatgaatattaaacatggactgctactagagcaggtattgaaagttatggtctcaccratggacttgattcccacctcagctatgagacattctcaatcaacagatatttcccataaatcatcctattgtccttatcataggcttcccactctgat

SEQ ID NO: 201356 - DNA, 574 bp, Homo sapiens
caccaaatctgctggcacctaagtcttggacttcccagtccccagaactatgcgacataaattactgttgcttataagctacccagattatggtattttgttataacagccccaaaaagacaaagacaaatattaaaaactcaacataatgtgaactttatatttttagcagttctagaacttcaggtgtataatatgtaactttattattacatcttattataatttctgcctttgattacctagcctagcataaagcttcaatctgcttataaattcagattttcctgtgatttcttattctggtttcagaaaaagcatatgtaacattgaggtatgaagggtggcattcagatgatcctcgttcattttatttgtgatatcttggggtgatataacctgtcatacactgcctcaacatgaatattaaacatggactgctactagagcaggtattgaaagttatggtctcaccgatggacttgattcccacctcagctatgagacattctcaatcaacagatatttccsataaatcatcctattgtccttatcataggcttcccactctgat

SEQ ID NO: 201357 - DNA, 334 bp, Homo sapiens
cgagcctctttgttttgcttttttttcccccaaagtgtcctcagttctctatttctgcccatcagccaagtccaactgctgaaaatgtgactcagaacgctaagaatgagtatttgctgtcctaaatggtcacagaaatcctgctgcggctcaccacttaacatgtgccttatgctcacatttatttcaggtaaaaaaaattgccatcaaagactcactttttgaaaactggggaaaaatatattactttttaaaagtaccayatttcctattgtcagattcctatagttggttcataaccaaccaataaacaactgtaattgttaagcattat

SEQ ID NO: 201358 - DNA, 589 bp, Homo sapiens
attaatgagcttgccatagcgctaaataagtacagcaatcacataggaaacaattaagcaaaatgccacagaatattataaagtgataaatgagttcatgcatactttatttaagatgcctaaagaaataaaaagtaataatcacagatactatttactggtcactaagcactgtactgggtactttatggaatgacataacttaatccttattataagcctttccagtagattatattattacccccactttaaggatccgaatacttaaggccatawcctcaagatcctagagctcggtcagaatgagcccccaaaagaaaataaggctacagtttgactttgaaggataaatacaaaaaaaattatcataagagtacttgaattattatttatacattctttttttaacataatcttttcttaaggagtctaagcagagaaaatagctctttacttttgcaaatagaattgtaagaatctatggactttaaaattgaaaagtctgggaagactagttatggttagggtaaaatggaaataaagagaaatagcaattaggtagatcaaaaaggagatgcatacagta

SEQ ID NO: 201359 - DNA, 541 bp, Homo sapiens
tcaacagctaccagaaatcttatggtttattgtacttattagtttttcaggtttttgtctaaatgccagtaaaacatgcttgaactcaggggtgttatatatgcctgtatgttatacacgtctatatttttcttcatataaagaacatttagaaattcacctctttcctaaaactatggtagcctctctctaagcttgtgactgtgtatgaaatctatatatgaatgaaatttaaatatrtttatatataaatatgtatatttattactttctaaaattaaactttatattttcataaatgtgtgtgtatgtgtcagtgtctgtgtatgtgtaactgtgtgcatttctatttttttctagtggtttttcatagaagataggtctaaatgctgtttctaaaaaacgctgaaaatgaaagctaattgccttagcaatattagaccatcaaaatagaaagcactacagaacatttttaaaagttttagcccaatttgttaaattgcttaatcattacacggaacaaagagtttttctgtataat

SEQ ID NO: 201360 - DNA, 591 bp, Homo sapiens
gtatctgcagtccatgttggccactaactgctacataattactttcaatttcctccaggcatgactaggtataaacatatatttacatgattaatccacattttaaaatgacttgcacttgtgcatatacatagtactttgaataatgtatattttaaattggacctcacaaatcttgtattaaagtaggtagagagtagagtcacactttttttgatgaaatgagtcacagagaagttacatgacaaagataaaatcacagggttggaaagaactttgaaaggtcatttttcaataatctcaccttaamagtgaccccttttcaaacaaagcataaacaatttatttgtggcttattttacccatgagctggccaatacttcctggcctagaaaaatatctccactctccccattcctgttcttaatggtcttctcttctcaatttgtaaatattctccagtaaaagacaccaggtgtggagatgggtcacttaatttcaagttctgagtgtcttgtggttttaaacaagtctcttaacctctctaagactgattcctcatttataacagggaggaggtggattatgtaa

SEQ ID NO: 201361 - DNA, 542 bp, Homo sapiens
aagatgaacaaacagaataagaaaaagtcaagatcttggctgacatcatcccactagcaagaggcagagtcattatttgaacttggttgtatgtgacttaaaagcatgtgtttcccagttaatcttgtgctgcataataaatctcccctaaacatagtggcttaaagcaacagcaatcattttaattttatctctcaaggktttggaggctggctggactcaggtaagcagcattcactcagagtctctcatgtggtttcaatcagaagggctgggttggaatcacccagaagatgtcctcactcccaggcctggcagttgaggctggggctgtcagccagaatgccttacagtatattggaaatagcagcaccaaataaattactgcatccttttacttaccccacactgggctgcattctttttattttactttatcaactactctcaatatatcaagaggcttttggctaatgtctctattttcacagcaccctaaaattattctaatagtgaacctggtagacctagactttgaaccc

SEQ ID NO: 201362 - DNA, 542 bp, Homo sapiens
aagatgaacaaacagaataagaaaaagtcaagatcttggctgacatcatcccactagcaagaggcagagtcattatttgaacttggttgtatgtgacttaaaagcatgtgtttcccagttaatcttgtgctgcataataaatctcccctaaacatagtggcttaaagcaacagcaatcattttaattttatctctcaagggtttggaggctggctggactcaggtaagcagcattcactcagagtctctcatgtggtttcaatcagaagggctgggttggaatcacccagaagatgtcctcactcccaggcctggcagttgaggctggggctgtcagccagaatgccttacagtatattggaaatagcagcaccaaataaattactgcatccttttacttaccccacaytgggctgcattctttttattttactttatcaactactctcaatatatcaagaggcttttggctaatgtctctattttcacagcaccctaaaattattctaatagtgaacctggtagacctagactttgaaccc

SEQ ID NO: 201363 - DNA, 582 bp, Homo sapiens
aagacatagatttttaagtgctaattatagtgatccacaaataatttcaaaggaaagatgggagaataatcaagtaacaatgagttaaaaagtgagtgacagacgaagaagtggaaaccataattgtagactatttttccccagactggtagtggtagataatagctgctggaagagctcacagatttgaggagtctcatgagyggatgttccataaagaaaagaattttgtactgtttttctatacttgtatcaccagaaccaagaagaatgcctggaacataaataggtactcaataaatatttgttgaataatgggatgagtaactagatggctggatgaatcaacaaattaaaagtatgttatgcctttaagacatctgattggtgtcctactggatatatgtttgcttatttataacccaaaataaattttagcatgctatattttgagtaagtgcaaatatttttaagttgttaatattaagtagaataatatccacaggattcttgatttgatgcctctcttgaagcagtcaccacccccagaggaaaccttttaagccttttaaaccttggagc

SEQ ID NO: 201364 - DNA, 608 bp, Homo sapiens
gatggtcatatatgggttttattgtgtggaggcacataccttgtatacctaattcaytgagagtttttaatcatgaagggatattgaattttgtcaaatttttttgtctgcatctattgaggtgatcatatgctttttgcctttcttttaatgtgatatatcacatttattgatttccatatgttgaaccatccttgccttcctagaatgtctcctacttgatcataataaatgatctttttaatatgctggtgaattttatttgatagtgtcttcttgaggatttttacgtctatgttcataaggaatattggcctgtaattttattttttgttgtgtccttgtcacaacaaaatgtttagaaatcagggtaatgctggcctactaaaatgagtttggaagtatgctcttctcttcatttttctggaatagtttgaggaaaagcggcatcagttcttctttgcatgtttgatagaatttggcaatgaagacagcaggtgctggtcttttctaaaaagccaaattaaatgctacatttatgttaaaattctgtggtatgtaatttaagaagaaaaaagcaactaagtaaagaatccagggttcattaa

SEQ ID NO: 201365 - DNA, 608 bp, Homo sapiens
gatggtcatatatgggttttattgtgtggaggcacataccttgtatacctaattcattgagagtttttaatsatgaagggatattgaattttgtcaaatttttttgtctgcatctattgaggtgatcatatgctttttgcctttcttttaatgtgatatatcacatttattgatttccatatgttgaaccatccttgccttcctagaatgtctcctacttgatcataataaatgatctttttaatatgctggtgaattttatttgatagtgtcttcttgaggatttttacgtctatgttcataaggaatattggcctgtaattttattttttgttgtgtccttgtcacaacaaaatgtttagaaatcagggtaatgctggcctactaaaatgagtttggaagtatgctcttctcttcatttttctggaatagtttgaggaaaagcggcatcagttcttctttgcatgtttgatagaatttggcaatgaagacagcaggtgctggtcttttctaaaaagccaaattaaatgctacatttatgttaaaattctgtggtatgtaatttaagaagaaaaaagcaactaagtaaagaatccagggttcattaa

SEQ ID NO: 201366 - DNA, 608 bp, Homo sapiens
gatggtcatatatgggttttattgtgtggaggcacataccttgtatacctaattcattgagagtttttaatcatgaagggatattgaattttgtcaaatttttttgtctgcatctattgaggtgatcatatgctttttgcctttcttttaatgtgatatatcacatttattgatttccatatgttgaaccatccttgccttcctagaatgtctcctacttgatcataataaatkatctttttaatatgctggtgaattttatttgatagtgtcttcttgaggatttttacgtctatgttcataaggaatattggcctgtaattttattttttgttgtgtccttgtcacaacaaaatgtttagaaatcagggtaatgctggcctactaaaatgagtttggaagtatgctcttctcttcatttttctggaatagtttgaggaaaagcggcatcagttcttctttgcatgtttgatagaatttggcaatgaagacagcaggtgctggtcttttctaaaaagccaaattaaatgctacatttatgttaaaattctgtggtatgtaatttaagaagaaaaaagcaactaagtaaagaatccagggttcattaa

SEQ ID NO: 201367 - DNA, 483 bp, Homo sapiens
ccatgtgaggggacaaaattctcttgcctcttccagcttctggaagttgctggtaattctttgctcatgggctgcataactctcatctctgcctccttcattacatgaacttctttcctctgtctgagtctgtgccttcacatgatcttttataaggacaccagtcattggacttacagcacaccctaatycagtatgaccttaccttaacttgattagttctgcaaagactctgtttccaaataagttcagtttcacaaatatgaggcagggttaaggatttaaacatatccttttggagaacgcaagttaacccacaacaaccacaggtactagagtgtactctatcaatctacactattcactctgcaatcatactcctccttctaaaaataaaatatttgtattggaggacaatgggtctggaaaagtatgattcttttactccacaatgtgctttgcttcatttctcagcaaacttcc

SEQ ID NO: 201368 - DNA, 483 bp, Homo sapiens
ccatgtgaggggacaaaattctcttgcctcttccagcttctggaagttgctggtaattctttgctcatgggctgcataactctcatctctgcctccttcattacatgaacttctttcctctgtctgagtctgtgccttcacatgatcttttataaggacaccagtcattggacttacagcacaccctaattcagtatgaccttaccttaacttgattagttctgcaaagactctgtttccaaataagttcagtttcacaaatatgaggyagggttaaggatttaaacatatccttttggagaacgcaagttaacccacaacaaccacaggtactagagtgtactctatcaatctacactattcactctgcaatcatactcctccttctaaaaataaaatatttgtattggaggacaatgggtctggaaaagtatgattcttttactccacaatgtgctttgcttcatttctcagcaaacttcc

SEQ ID NO: 201369 - DNA, 483 bp, Homo sapiens
ccatgtgaggggacaaaattctcttgcctcttccagcttctggaagttgctggtaattctttgctcatgggctgcataactctcatctctgcctccttcattacatgaacttctttcctctgtctgagtctgtgccttcacatgatcttttataaggacaccagtcattggacttacagcacaccctaattcagtatgaccttaccttaacttgattagttctgcaaagactctgtttccaaataagttcagtttcacaaatatgaggcagggttaaggatttaaacatatcsttttggagaacgcaagttaacccacaacaaccacaggtactagagtgtactctatcaatctacactattcactctgcaatcatactcctccttctaaaaataaaatatttgtattggaggacaatgggtctggaaaagtatgattcttttactccacaatgtgctttgcttcatttctcagcaaacttcc

SEQ ID NO: 201370 - DNA, 599 bp, Homo sapiens
aatttgtgtggaatacctgtatctgtctattgactcatatctcacatgcaacaataaaataagaaattaaacactaaaattatacatatttatagaacaaactgaaaactgtagatccctacatatttgttatcttcctcacccccaaaacttccccacataaataagtagttttcaatgaatataactattttatttactaggattttccaattatttattataccagtaaacgtaaggattgctgaatgtggaaatatttgattcttatgctgaagctacacacacctgtattcctgtaagtcttaaggcttcagtctagttattctgtagtaaaaaaaaaaatggttaagakaacatttctggatattttaaacccagagatcaatgtaaaaacttatgatagttttaaatagaaattttgttaaagtaaacacaaagttattaattgggtgaaacgtagtttgaaaagttgggttgtgatcactactaaggaaagaaagaaggcaggtgagttagcataatcttcttgtaaacatcttaataactgaaccttgtagtagtagacaaatgatacttgctagaaggctagtgcttat

SEQ ID NO: 201371 - DNA, 521 bp, Homo sapiens
taaaaaatgagctaccatttctttaaaagtctgctgagtttaatatgatcgggacagggtaggatggattgccagacatgctggaaatcctaccataagataatgtcgtccaaagataatttcatctctccacagtgcaacacagtatttccatgttatttcttgaagataataacaataaatccctcaaaatatcaacgcagtatgtcttggagcatttaacaccaaaacttcttaaagaataccagtaaaaatttaaaaagtcactatctatgcgtgcttgttagcatggaaagatcaatagggattaatagctttctctggtcaagcacacataaacactcatctaggtttgcagtaattgctcactactacaaagactgtttatgaatacaactgcaccagccaaaagagtgcataaaaattacatgtataaatatatacatataatagagayagagagagagaaagagaacatttgttcacttctttattaagtaattattaatttagcaaacatg

SEQ ID NO: 201372 - DNA, 570 bp, Homo sapiens
gcttggcccatggtttcagagggtgcaagccccaaactttggcagcttccatgtggttgagcctgtgggtgtacagaagtcaagaattgaggtttgggaacctcggcctagcatttcagaagatgtatggaaatgcatggatgtccaggaggaagtttgctgcaggggtggggctttcatggataacctccactagggcagtgcagaaggaaaatgtggggtcagagcccccatacggagtccctactgggcaccacctagtggagcagtgagaygaggaccatcaacctccagaacccagagtggtagatccaccaacagcttgcgctgtgcacctggaaaaactgtagacactcaatgccaccctttgaaagcatcagggagagtggctgtaccctgcaatgccacaggggcgaagctgtccaagcccaaggaaacctgcttcttgcatcagtgtgacctgaatgtgagacatgaagtcaaaggagatcattttggagttttaagatctgactgccctgctggattttagacttgcatggggcctatagcccctttgttttggccaat

SEQ ID NO: 201373 - DNA, 547 bp, Homo sapiens
tcataaagttggctgtgcataacaacccttcttgatctaatggaagggttatgtgactagacctgaggaagctctgaaggcacaagtaagttacttgaaggtctcgaatgctcctagttcctctatgctgttttaactcttgctatgctgttttaactctcatagcttgtacctgtagtttcatggcaagttctctatgatcaactgacagaagagaagacttgagcctcgtttacagatggctgtgcattatatgcaggcaccaccttaaagtagacaggtgcagcactatagaccctctctgggacacctttgaaagatggytataaaaggaaatcctcttagtgagcagaatttttagtaatgtacctagttgttcattttccttaggaggagaaatgaccagacatgcaattttataccaacttatgggctattccagtgatttagctgaatgggtgtggacttggaagaaacattattcaaaaattgacaataaggtaattttggagataggtaagtggatagatatttctgagtgggttta

SEQ ID NO: 201374 - DNA, 547 bp, Homo sapiens
tcataaagttggctgtgcataacaacccttcttgatctaatggaagggttatgtgactagacctgaggaagctctgaaggcacaagtaagttacttgaaggtctcgaatgctcctagttcctctatgctgttttaactcttgctatgctgttttaactctcatagcttgtacctgtagtttcatggcaagttctctatgatcaactgacagaagagaagacttgagcctcgtttacagatggctgtgcattatatgcaggcaccaccttaaagtagacaggtgcagcactatagaccctctctgggacacctttgaaagatggttataaaaggaaatcctcttagtgagcagaatttttagtaatgtacctagttgttcattttccttaggaggagaaatgaccagacatgcaattttataccaacttatgggctattccartgatttagctgaatgggtgtggacttggaagaaacattattcaaaaattgacaataaggtaattttggagataggtaagtggatagatatttctgagtgggttta

SEQ ID NO: 201375 - DNA, 392 bp, Homo sapiens
taggtttattagctagttacctggtggcaggtagattacattggattatttccatcacagaaggaacagtgttttgtttacatgagartagacccttactctgattacaaatttgcattccctgcatgcagagcttctaccaaaaaatactacctgtagacctacagaatgcttaatccaccaacctgatattctatacagcattgtttctgatcaagaaactgatatcacagcaaaagaagtgaacaatggatccatgtccatccattcattggtcttaccgtgttccttaccttcctgaaacagctgccttgttaagaggtcaaatggccttttgaagattcagttacagtgctagctaaatagcaataccttacagggttggaataagg

SEQ ID NO: 201376 - DNA, 405 bp, Homo sapiens
ggaacataaatgacctgagggagctgaraaacagagcatgagaactttgttatgcaaacacaagtatcaatagcctaatcgactaagcagaagagagaatatcagagcttgaagactatcttgctgaaataaaacagacagacaagattagagaaaaaagaatgaaaagaaacaaaacctctaagaattatggaactatgtaaaaagactgaacctatgactgattggagtagctgaaagagatgggagaaaggaaccaagttggaaaacacacttcaggatatcatccaggataacttcttcaacttagcaagacaagccaatattcaaattcaagaaatccagagaatcccaataagacacttcataaaaagatctaccccaagacacataaacatcttattc

SEQ ID NO: 201377 - DNA, 405 bp, Homo sapiens
ggaacataaatgacctgagggagctgaaaaacagagcatgagaactttgttatgcaaacacaagtatcaatagcctaatcgacyaagcagaagagagaatatcagagcttgaagactatcttgctgaaataaaacagacagacaagattagagaaaaaagaatgaaaagaaacaaaacctctaagaattatggaactatgtaaaaagactgaacctatgactgattggagtagctgaaagagatgggagaaaggaaccaagttggaaaacacacttcaggatatcatccaggataacttcttcaacttagcaagacaagccaatattcaaattcaagaaatccagagaatcccaataagacacttcataaaaagatctaccccaagacacataaacatcttattc

SEQ ID NO: 201378 - DNA, 584 bp, Homo sapiens
tggagaaaaagttgttgaggtcaatggtcagatatttatacgacctgaaagagtatgttccaatatgattaacaagatattaagtggttttgttttattaaaataatgtcacaaaaaataattaaaatgaatatagtgccctaaatagccaaggaaatcatgaacaaaaggacaacaaagggagaagtgttatatgatctgatttcaagctataccacgaagctacagtaattaaaacagcagggtgctggcatagaagtagacacatttattaataacacaaaatagagagtccaaaaatgaacccatatatgtgtgatcaattgatttttgacaaaggtgccaagaatacatcatggaaaaaaaatagtgtcttcaagaagttgttctggaaaagctggataatcacatacagaagaatgaaattggactcatctcacaccacawacaaaaatcaactcaaattgaattcaagatttaaatataggaccagaaaccataaacgattaagagaaaatgaaggaaaaaaaaactacgtgacattggtgagggcaatgattttttggatttgatccccaaagtat

SEQ ID NO: 201379 - DNA, 584 bp, Homo sapiens
tggagaaaaagttgttgaggtcaatggtcagatatttatacgacctgaaagagtatgttccaatatgattaacaagatattaagtggttttgttttattaaaataatgtcacaaaaaataattaaaatgaatatagtgccctaaatagccaaggaaatcatgaacaaaaggacaacaaagggagaagtgttatatgatctgatttcaagctataccacgaagctacagtaattaaaacagcagggtgctggcatagaagtagacacatttattaataacacaaaatagagagtccaaaaatgaacccatatatgtgtgatcaattgatttttgacaaaggtgccaagaatacatcatggaaaaaaaatagtgtcttcaagaagttgttctggaaaagctggataatcacatacagaagaatgaaattggactcatctcacaccacatacaaaaatcaactcaaattgaattcaagatttaaatataggaccagaaaccataaacgattaagagaaaatgaaggaaaaaaaaactaygtgacattggtgagggcaatgattttttggatttgatccccaaagtat

SEQ ID NO: 201380 - DNA, 578 bp, Homo sapiens
ttaacaagttaccaaaaacttagcagcttaatacaccacatatttattatttcacagtttccattttattgatgtagtacaaaaaaaagtactacattaatgcaagatgttaatagtaggtgaaatttggcagtggggaggagggatgaggcgtatatggaaactctgtactttacattcaattcttatgtactgttaaactgttcaaaaaatagtctattaattacaaaagaaaaaaagaaaaacaaaatcaaagttaggattagtacccaggccattctattttaatgttatttttccctcaccaaattttgttgagattcaatttgtgtccatagcctaacatgtgagttaatttgaaataagttgtattatcatattctkcctttgcctatataaaagatacgttcccaaccttattaattgtataattcagatcccttctactgtttattatgtttggccaatttcccccctggattgagagaactgaggtaaaatctgtaattttgctaccctaatattctgcttgtatttcttaacattttggctgcagtattttgatgctacatgacttg

SEQ ID NO: 201381 - DNA, 578 bp, Homo sapiens
ttaacaagttaccaaaaacttagcagcttaatacaccacatatttattatttcacagtttccattttattgatgtagtacaaaaaaaagtactacattaatgcaagatgttaatagtaggtgaaatttggcagtggggaggagggatgaggcgtatatggaaactctgtactttacattcaattcttatgtactgttaaactgttcaaaaaatagtctattaattacaaaagaaaaaaagaaaaacaaaatcaaagttaggattagtacccaggccattctattttaatgttatttttccctcaccaaattttgttgagattcaatttgtgtccatagcctaacatgtgagttaatttgaaataagttgtattatcatattctgcctttgcctatataaragatacgttcccaaccttattaattgtataattcagatcccttctactgtttattatgtttggccaatttcccccctggattgagagaactgaggtaaaatctgtaattttgctaccctaatattctgcttgtatttcttaacattttggctgcagtattttgatgctacatgacttg

SEQ ID NO: 201382 - DNA, 536 bp, Homo sapiens
agattgcagctctctattagtccactttcatgctgctgataaagacatacccaagactgggtaatttataaaaagaaaaagaggtttaatgggctcacagttccatgtagctggcggggggtggactcacaatcacggaggcaggggaaaggcccttcttacatrgtagctgtaagagagagaatgagaaccaagtgaaaggagtttcaccttataaaaccatcaggtcttgtgagacttattcaccaccaggagaacagtatggtggaatcagctcccatgattcaattatcccaaactgagtccctcccacaaatcatgggaatgatgggagctacaattcaagatgagatttgggtgggggcacagtcacgccatatcaagctccctcccacagccttataagatcctgacttcaggaccgtattgtgctgtatccagattcctggcctatgaaaactgtgaaataataaacgtgtgatttattaagctgctaagtttttggtaacttgttaaacagcatacaagctaatata

SEQ ID NO: 201383 - DNA, 513 bp, Homo sapiens
gagatttgggtgggggcacagtcacgccatatcaagctccctcccacagccttataagatcctgacttcaggaccgtattgtgctgtatccagattcctggcctrtgaaaactgtgaaataataaacgtgtgatttattaagctgctaagtttttggtaacttgttaaacagcatacaagctaatatataaaatgacgaataactcaattaataatgagcaaaagatctgagcagacacctcaccaaagatgatatacagatgacaaataagcatttgaaaagatgctccaaacatatgttcccagggaagtgcaaattcagacagcaatgacataccatttacacatcaattagaataatgaaaatctgaagcattgataatatcaaataccggtgaggatgtgcagcaacacaaactgtcatcccatgcaaaatggtacagccactttggagagattttggcagtttcctacaaattaaacgtattcttacgatatgaatcagcatgtgtg

SEQ ID NO: 201384 - DNA, 537 bp, Homo sapiens
caaacaaccattaaaaccataaatcatttgatataaaaccatatgcaataaatggaaaaatartcaattttaaagatggcataatgtatacatagaaaaaaacagaaaaatcagtagtaatagaaagcaaaaattagctgaaacaaacacctgtagggactataagatttatttttatgaatcaatttatgtttaattcacgagaaattcatataaagctcaaagagctagggacattaaaagaaaaggaatataatcaccaatcaggctagagttgaagctgagacaaaattgaacttaaagctgaaaccattctttgagataaaatctttcaattaatatgaggcatatagagaattctacattttcgtacctaataacatattcaaagataccaaaaacaaaaaaacagatgatagggagaacttaataaatctaccaatgcatggagaggtttcattctaactattaagagatctaaaattaaatttactgaatatatggaagatatgaacaatacagttactaagtttgctc

SEQ ID NO: 201385 - DNA, 532 bp, Homo sapiens
aaagttctcatcgtatagcattagaaccctccatgaagcagctcttcaatttactcatctatttcccgccattcttgattaaacctctactcgtgtcaaatgggtttacctctcctcatctaaaatttgttcatgccattccagttcctggatacgcccttccttttcctttctgcctttccaaatcctcccccattcctygaggttgggtcaaatctcactcccagcttgaaatgatcactctccacagaataccctgagacattatttttatataattaattttgagcactcagcaaacactgtcccatgacattttccctagtgttttgagttgctgcctaactttcatatgcatacctctcatcatatgtcctgtgtggtgaactcctcacagatctcacagatggttgattcatattctaacttccttccaaagccttttgcatgagccttgcactaagaaggtattcaataatattggacttaattaacagaagagaaagcaactgaaaaggaagacaaactagcg

SEQ ID NO: 201386 - DNA, 542 bp, Homo sapiens
gaaaaattcttcagttactaaaatataaaatattttcaatgaaactatgataactaggtgcctgggaatggattacttttgtagcaggtatgattctcagtstacaaattaaggtatgcaagcaatactaaatctctttattttctagaaatcaattaaatttgactaatctctccaggctcatgagaaaatataatctgagtcattgtcggagcctcccctcccttctcaaggtcatgtcagtgcccagcatattctgcagtgtgaaggtgtctatggagactcgttgttttcgtctgttccacaggtttccacgaacacttccgttgtccatgatcttaagggcttttcaggactgctgacattttgatgcttccaagccacacctaagacaggggactctcttgtaagatggcttaggggtgttgtttgcctagatactgcatgcagctctttctctatgggttcttgttagggaggagaccacccctcatattgtcttatgcccaatttctgcctccaaacaaagaagaagtaaaaac

SEQ ID NO: 201387 - DNA, 562 bp, Homo sapiens
ttagagattactcaagtggtcatgaacggaatgctggtagaagtatggacagtraaggacattctgatgaggttgtagatgaaaatgaggaacaaacattggaaactggaggaaaggccacccatgttacaaagtagcaaagaacttagctgaattatgttcatgtcctaggattttatggaaaaggcagaacttaaatgtgatgaactaggatatttggcagaagaaatctcgaagctgagaagtattttaggatgctaagtggcttctcttaattgcttatagtaaaatgtgagaagagagaaacaatttaaagatggaatttacaattaaaggaaaagcagaacataaacattcagaaaatctcagtctgccacgtaaagaataagaaaacatgtttaggaaagaaaatcatgggtgtggccaagtgaccatttgataaggaaattagtagggatagaaggaatccaggtgctattcatcaagacaacaagagaatggccccgaaggcattttggagatctttagaggccgccatgcccaccacaggcccagagtgcta

SEQ ID NO: 201388 - DNA, 414 bp, Homo sapiens
tctcctcatggaggtcttttaaggatcaatttgcaaacttaaactgaatttctgtgtatttgatagggaccaaaagaaagttcttgtgaattagtctgaattttaggctcttcagaatttaatttaaaaaaattatattgttattcccccttgtaaaaattagtaagagtttgaaatgcaactagatttcacttctcagagtgtgatttctcttttgtgagcttaaagagacagagcttaacaaagactcaagcctatgacytacaggccaagagggaataggccaagagggaatataactttcaggtagaggccacccacaactaggctgcagacccccctccccactgtatgagttggggggggcagggggtaggggagctgttgtgaatcaccaagtctcttttgtgtaaa

SEQ ID NO: 201389 - DNA, 406 bp, Homo sapiens
cctgcttctcccaaaaacctctaaatggaataatctttagttctgtgtcaaattcctatttttcttcctccttctttatacagtatcttaagggaaatactacaaaatgtcgcagaaggtgctggatggatatctaaagttcaaaaaggaagagaaccacacgagctggagattcaggaagcatcagtagaagtcaatggccattaataaaaacattttttattaaaatattgaatctgaatagaaacctcctgtacttcatttcttaaatccmttgagggtagtaactgcatcttctccattgatatagcccctgccaagcacagtgcctgaaggcaggtccacagacattggctgaataaacgagtgctctgttcccagtccgtactttctctgtgtcataaaa

SEQ ID NO: 201390 - DNA, 499 bp, Homo sapiens
acagtggctcatgcctgtaatcccagcactctgggaggctgaggtgggaggaacacttgagcccaggagttcggggttacagtgagttatgattgtgccaccatactgtagcttgggtgacagcgaaaccctgtctctaaaaatacatggagaggccaggcgyggtggctcacgcctgtaatcctagcactttgggaggccaacgcgggcagatcacttaaggtcaggatatcaagactagcctggccaacatagtgaaaccccatcgctactaaaaatacaaaaattagccgggtgtggtgacgagcaactggggaggttgaggtgggagtatcccttgaacccacgagacggaggttgcactgcacttcagtttgggtgacagagcaagactctctctctcaaaaaaaaagaaatacatatagatatagatagatgtatagatagatagatatatagagagagaccaatcctgtctctaaaaaaatatatatatgtt

SEQ ID NO: 201391 - DNA, 418 bp, Homo sapiens
ggattcgagctgaccggggaagtcccggagcctgcggaggcgccaccgcggagtccctggtagaccagggagggaaggatcccggagcccaaaatcccagaacgcgacgctcagctggtggagtctgggggcargggaggtaacgccgagctggggtaccctcaaggacctgcaggcttccgaaggttctggggtcctcctccgtaacccaagacctggaggccagtgggggagtatcggaggtggcccaggatcccgaaatctgcgggaatgtcccctgcggtgagacaagcgtacgaatctgaggacctctccccaagtaaccagtgaccagaggccagtaggggcgcggccgaggtgacccaagtgcccaagtcgccaagaacccgcccctgatgaccatagtggggatctgggg

SEQ ID NO: 201392 - DNA, 560 bp, Homo sapiens
tctacatcatggtgagttgtataattacttaattatatattacaatgtaataatagtataaataaagtgcacagtaaatgtaatgcgcttgaaccatcctgaaaccattgcacccaacccccaccttctgtctgtgaaaaaattgtcttccacgtaacttgtctctggcgccaaaaacgttgggggccgctgttatagaacactaacatgtattcctcatatctagttgcaatcttgtrtccattagcagacctctctctctgcccttcccagcctctagaaaccactactctactctgcacttccataagatcggtaagatcagctcttttagcttcttcatatgagtgataacatgcaatattagtctttctgtgtttggcttattttacttaatataatgtcttccaggctcatccatgctgttacaaatgacaggatttcattctttttcttgccaaaagtattccatcgtatatatacatatacgtaaatacatatatatatacacacacatatatatacacgatggaatacatatatatatgtatgtacgtata

SEQ ID NO: 201393 - DNA, 560 bp, Homo sapiens
tctacatcatggtgagttgtataattacttaattatatattacaatgtaataatagtataaataaagtgcacagtaaatgtaatgcgcttgaaccatcctgaaaccattgcacccaacccccaccttctgtctgtgaaaaaattgtcttccacgtaacttgtctctggcgccaaaaacgttgggggccgctgttatagaacactaacatgtattcctcatatctagttgcaatcttgtatccattagcagacctctctctctgcccttcccagcctctagaaaccactactctactctgcacttccataagatcggtaagatcagctcttttagcttcttcatatgagtgakaacatgcaatattagtctttctgtgtttggcttattttacttaatataatgtcttccaggctcatccatgctgttacaaatgacaggatttcattctttttcttgccaaaagtattccatcgtatatatacatatacgtaaatacatatatatatacacacacatatatatacacgatggaatacatatatatatgtatgtacgtata

SEQ ID NO: 201394 - DNA, 481 bp, Homo sapiens
gaattcctcctttccaatttggatgccttttatttccttctcttgcttaattgstctggctaggacttgaagtactatgttgaataacagtggtgaaagtgagcatccttatcttgttccagatcttagaggaaaggctttcaacatttccccattcggtataaaattagtactaatatgttagctgtgggtttgtcatatatgacctttattgttttgaggtatgttcattttatacctagtttgttgagagtttttatcatgaattaatgttgtattttatcaagcatttttctccatctattagaatgatcgtatggttttgtccttcattctgatgatgtatcacatttagtgatcttcatatgttgaaatatccttgcaacttgatcatggtatgtaatctttttgatatgctgttagattcagtttgctagtattttgctgagaaattttgcaactatgttcatcaggaattttg

SEQ ID NO: 201395 - DNA, 601 bp, Homo sapiens
ctctcatcgttctccagtgacctccaggcagagcactctaaggtcygtcacccttatcttccctggacagttggtgtatgtaaatgtgattaccagaatcttttgcaaggatgaagttccaacgctccagcatgagaatttccaacactcctttagagtctaggaataaacaaacccaattaaattcacagccaccaccagagggcacagtgagactcatgcaggagtaaaggatgttgaatagagactgcaaaaacttactcttgaaatgcatttatttatttatttatttatttatttatttatttatttatttttatgttcatagctggttcacatagtcttagaaacaggcaaagtttgaatctaaaaactgcagagtgaaatactgtagctttggtcattattcgtgacttcttcattacctttattccaaattcagtagaattctcttataattagactcatgccacaccactgcagttgtgccctggggacctaatcccagcctttcatagatgtgcaggcagagtgttcacaagaagttcccagccttgttctcacaaacatgaatgctaaggaggactcctttataattaag

SEQ ID NO: 201396 - DNA, 554 bp, Homo sapiens
gagtggatgttcattgagaacctactgtatgccacctactgtgtgccascctggcaccttataaatattatcaccattcttatgataaaactgcgagacagatattttcccctttatttaacaaatacgaaaactgatgctcagaaatattaaatgatgtgcttaaagacacacagccagcaagtgatggaaccatgaaaccatttctaggtgtgtttggccataaaccaggtgatttttcattacttacactttttccactttttgatgtttcagtttctgtacattctttgtaataaaattcactcctgtctttctgcttattcaggcttggctaactgttgtcacaatctcaaactctcagaggttgaataagataaaaacctttcttgtttatgcataagtccaatgcaagtcagacaggggcctttgctccaggcagtcattcaggcacccagtttccttccatcttttggagctgccatcttcagaatgtggctttcagggtctccatggatcagaaaggagagtcatatgagagatttgtatgtgcc

SEQ ID NO: 201397 - DNA, 584 bp, Homo sapiens
ataagataaaaacctttcttgtttatgcataagtccaatgcaagtcagacaggggcctttgctccaggcagtcattcaggcacccagtttccttccatcttttggagctgccatcttcagaatgtggctttcagggtctccatggatcagaaaggagagtcatatgagagatttgtatgtgccaggcctggaagtggcacacatcactttccatttgtctgaactaggtaatccagtcctaacctaatggcaaatagattgggaaataacgttgagccctgggtccgggaagaagaagagaaaatggatattsatgaacctatccctctccacatccctatctcatgagattgtggtaaagataaaataaaatagtatctgtcagagtactttaccaacaagagagatgtgatagtttaagcctggagggaaggagctgtcagagagagattgcagatggggatatacatgaacagcgattatcatggcccagtaaagagcttgatctatgtcctgggttgaggaataaggaaaaagagactagagaagcgtcactcatctccccaaatttatgtaagcctttc

SEQ ID NO: 201398 - DNA, 528 bp, Homo sapiens
caacaaataccctactatccagctctgtattcgcctcccctctttgggctactaccctcaatattcactttatgttcagcagttcttgctagggtttgtaactcttttcttatctagacagtttcaccctgaaacaggattttgcatctgcacttgagcttgctgagacctgcctctggctctcagtctggagagaatgagaggtggtgaaggttagcttttcttgaggaggacgggcatcaccttgggaagccactgcttcaggtgagattattatactgtacawccagcaagtagagtctagtcttctctggcaaaggtgaaggtgtcacatctttggggaaggagggcttacaggaatttggagtttctagatgctcagcttcatccacctaattgtctccatcccaagtctgagatttctacattttccctatcaggaccctaacttgacatagcatacttgccaaggctatgcatttcatcttcatggcagctccaaaacccttagaatcagattctgaacct

SEQ ID NO: 201399 - DNA, 457 bp, Homo sapiens
attaacattatatttacaagattgtcctgttcgcatactaactactgcttgatttttcagtactactttggtgtatagaaaaagaaacaaagcattacatgtacatttttgtaaagacacatcactcataaatatgtaaatacggtacttgcagaaaatgtgatctgatgttacacagagaattcctgtatcaacataactagtttatgtttgctttggggagtgacattgaaggattagatgatggtacaaaattttttattgttgagcatggttcatttttacttttgaatagtagttttacttccatgcatactgcacatatcatgtgtttatgtgtaaatatataaartactgttattttacaaatatatgaaatttttcttataaatatgcaactgttattaaccacttaataggtgattgttaacaaatttatcattgtttaaattaataa

SEQ ID NO: 201400 - DNA, 504 bp, Homo sapiens
agaaatggggaaatacaagttctgtcccttgctttggacaaactctgagtggagtagctgttgaagtgagaacttcacttttagagtttttcatcttgaatatcttggcaaaaaagacaagctagggctytgagaaaaaaaaaaagctatactattcaaatgcctagcatgagaaactgttgcatagttctcactcaatgtattgatagagctcattgccctaatgagcgtttttattgttaagaacatttatttacaattattaatataattgatgtttcctaatggtagaatttagacttagaaatgtccattacttttgagctcacagatcagcttatatgcttcttccatataagcatgaatccttcctataaatacagatgggagagtcaccctttaatacagtaatctgttgtgctttattgttacattaaaataacttctaacattaccagtactaaaaccctttacctttaaaagaagaaacttctttaagattaa

SEQ ID NO: 201401 - DNA, 446 bp, Homo sapiens
gctgattttctagccctttttataagggccactggggtaaaaaataaatatatcatgtactgaacatctgtggttctgtcacaaagcaccactcatatcaactttcaagctatatcttaggctacacatgacaccctttaaaaagggatcttaacaaaaagtatagattaggaattcataggtctttatttccaaagaaaggcaaaggatacaagaaggccttctctgtaccttgggcaacactaatggcatyttttttccaattgttttagtgtagtcttttgagttgaaaaaccatatgtgcactctaggtaaaattctgaaaatgaatattttatatgcaagatgttaactgaagaaagacttgccaagtgcccaaaccattgactcagtaagttgccataattgtgagttagcatttaagggcacatgttcactagcaattc

SEQ ID NO: 201402 - DNA, 600 bp, Homo sapiens
  misc_feature (1)...(600): n = A,T,C or G
ggacaaaattactatacaggttttagttatactgcagttcaaatggtgccttccaaattatagtaattttttttgtaaaatcctaagtgctgtaaaattaagtaactattagttcattagtacttttcaatggtgtaaagcagtgactttcaaacttcaatgtgcattagaatctagaggttatcttattggtcacttttttcattacgttttcactacaaatgtttcttttgtcttatttctaaacccttgcttgagggaaatatgtaaatctgtaagaacaattcaattaatataatatccttgcaagacttggaaacagtttcattgctgctaaatattttatttcagtgttayaaaccaggagccacccagttacattatgttccacttccttgcacagcttgatcttttcatctgaactcataactcatagaccacaaatacttacatcctgattggacatctcccagtatggtctctctccataagacatcacctcccagagaacaatcccataactccatacatcgctggctgacgtgaacttgcggtaggctatagcttctggtgatgtccacctgattnnnnnnnnnnnnn

SEQ ID NO: 201403 - DNA, 600 bp, Homo sapiens
  misc_feature (1)...(600): n = A,T,C or G
ggacaaaattactatacaggttttagttatactgcagttcaaatggtgccttccaaattatagtaattttttttgtaaaatcctaagtgctgtaaaattaagtaactattagttcattagtacttttcaatggtgtaaagcagtgactttcaaacttcaatgtgcattagaatctagaggttatcttattggtcacttttttcattacgttttcactacaaatgtttcttttgtcttatttctaaacccttgcttgagggaaatatgtaaatctgtaagaacaattcaattaatataatatccttgcaagacttggaaacagtttcattgctgctaaatattttatttcagtgttataaaccaggagccacccagttacattatgttccacttccttgcacagcttgatcttttcatctgaactcataactcatagaccacaaatacttacatcctgattggacatctcccagtatggtctctctccataagacatcacctcccagagaacaatcccataactccatacatcgctggctgacgtgaayttgcggtaggctatagcttctggtgatgtccacctgattnnnnnnnnnnnnn

SEQ ID NO: 201404 - DNA, 176 bp, Homo sapiens
gataagaagcacacaggttatggagaaaatcatgaaagattcaacccttgatcccagcctagtgtggatttcaggtaacaagcagtacacagtgacataacacaattcttggttttcatgaytgcaagtcatagccaggtatcaagtgagaaattcagtttcatttgcaaggccta

SEQ ID NO: 201405 - DNA, 574 bp, Homo sapiens
agggtcaaccttgagaattccaaaacaaaaaacaattcaaacaaaaagattattattattatttgtattaattttactaactcaaaaatgaaccaatctgaaagctaaaatacagcacctagggtaatttccagaaagaggagaccttaagctgytttatatccccaggaaaactagaggccactatagcttccagctcctttagaataaatgtcccaaagagattataatagcctaaatctaatcgaataagggggttcagagtttgcagtcattctaaaggaaaacagtcacatgtatataattttctcaagaattcaaaaaaagtttaatatgctttcctaaacttgtattactagccaagctgttcaaggagaaaaatttgccatggacagagctgtcaaaaaagttaaatcaccaaaaaattggtatttttctacaactgtcctatatatacatatataaatatgtatcccacctcccactctcccttttttttgttttatgacacagggtgtctcactctgtcacccaggctggaatataatggtgcaatcacggctcattgcagcct

SEQ ID NO: 201406 - DNA, 496 bp, Homo sapiens
ccaatctgaaagctaaaatacagcacctagggtaatttccagaaagaggagaccttaagctgctttatatccccaggaaaactagaggccactatagcttccagctcctttagaataaatgtcccaaagagattataatagcctaaatctaatcgaataagggggttcagagtttgcagtcattctaaaggaaaacagtcacatgtatataattttctcaagaattcaaaaaaagtttaatatgctttcctaaacttgtattactagccaagctgttcaaggagaaaaatttgccatggacagagctgtcaaaaaagttaaatcaccaaaaaattggtatttttctacaactgtcctatatatacatatataaatatgtatcccacctcccactctcccttttttttgttttatgacacagggtgtctcactctgtcacccaggctggaatataatggtgcaatcacrgctcattgcagccttgacttttccaagc

SEQ ID NO: 201407 - DNA, 631 bp, Homo sapiens
ggaaggtgccaagtcaaagaagcacgaatgacctgaagcactgctaatgaaggaaataagcagaattttaaaacctaattggaatctttagcagtaattgagaagatactgtatccacaaaatacaaaacagattactatgcaaaagacaattctaggaggtaaaaataagacctctaaaccaaaaaagaaaacaaaacaaaacaccagttgcagaagggccaggacacaatggacatgactcagcaaaacattaaggtggctcacatctgtaatcccagcactttgagagatcaaggcaggcagatcacaaggtcagcagatcgagaccatcctggctaacatggtgaaaccctatctctactaataatacaaaatttagctgggcatggtggtacatgcctgtagtcccagctactcaggaggctgaggcaggagtatcatttgaacctgagaggtgraggttgcagtgatccaagatagcaccactgcactccagcctgggtgacagagtgagactctgtttcaaaaaaaaaaaaaaaagtaaaacccccacactttacagttacacagaaaatcatactaactatcagaaagaactaagaatcagataggcatcagacttttcatct

SEQ ID NO: 201408 - DNA, 557 bp, Homo sapiens
tttggctcatcatagtccacaaaccatatyggtaaagaaaatgaagaggattcctgtttaacacagagacacctatgttaaacattacatacagactaacccaaatatgcaattaaaccacaccactaaatggcaagatgaccatggatttaaacaaaatgtatgggggaaaaggcaacacattaaattcatgtgaggagctggacttctgaaacagccattctccttgcatagcactgtctgctgctacagctcatagaagtcaacaattttcttcaacactggtaggcagcctctaaatggccctgatcaccctcacctcctgccattcacacccttgtaaaattccacccctggacctagtgactcacttctaacaaagagaatacagcaaaagtaataacatcacttctgagatgaggctacaaggagactacgatgcctgctttggtcacccttctcctgctctttccattgctccctctgatggaagccagttgccatgtgatgaggtgccctatggagaggcccacatggcaaggtattgtaaaaggcct

SEQ ID NO: 201409 - DNA, 508 bp, Homo sapiens
tgatgtcagatttggctcatcatagtccacaaaccatattggtraagaaaatgaagaggattcctgtttaacacagagacacctatgttaaacattacatacagactaacccaaatatgcaattaaaccacaccactaaatggcaagatgaccatggatttaaacaaaatgtatgggggaaaaggcaacacattaaattcatgtgaggagctggacttctgaaacagccattctccttgcatagcactgtctgctgctacagctcatagaagtcaacaattttcttcaacactggtaggcagcctctaaatggccctgatcaccctcacctcctgccattcacacccttgtaaaattccacccctggacctagtgactcacttctaacaaagagaatacagcaaaagtaataacatcacttctgagatgaggctacaaggagactacgatgcctgctttggtcacccttctcctgctctttccattgctccctctgatggaagccagt

SEQ ID NO: 201410 - DNA, 508 bp, Homo sapiens
tgatgtcagatttggctcatcatagtccacaaaccatattggtaaagaaaatgaagaggattcctgtttaacmcagagacacctatgttaaacattacatacagactaacccaaatatgcaattaaaccacaccactaaatggcaagatgaccatggatttaaacaaaatgtatgggggaaaaggcaacacattaaattcatgtgaggagctggacttctgaaacagccattctccttgcatagcactgtctgctgctacagctcatagaagtcaacaattttcttcaacactggtaggcagcctctaaatggccctgatcaccctcacctcctgccattcacacccttgtaaaattccacccctggacctagtgactcacttctaacaaagagaatacagcaaaagtaataacatcacttctgagatgaggctacaaggagactacgatgcctgctttggtcacccttctcctgctctttccattgctccctctgatggaagccagt

SEQ ID NO: 201411 - DNA, 545 bp, Homo sapiens
tagtccacaaaccatattggtaaagaaaatgaagaggattcctgtttaacacagagacacctatgttaaacattacatacagactaacccaaatatgcaattaaaccacaccactaaatggcaagatgaccatggatttaaacaaaatgtatgggggaaaaggcaacacrttaaattcatgtgaggagctggacttctgaaacagccattctccttgcatagcactgtctgctgctacagctcatagaagtcaacaattttcttcaacactggtaggcagcctctaaatggccctgatcaccctcacctcctgccattcacacccttgtaaaattccacccctggacctagtgactcacttctaacaaagagaatacagcaaaagtaataacatcacttctgagatgaggctacaaggagactacgatgcctgctttggtcacccttctcctgctctttccattgctccctctgatggaagccagttgccatgtgatgaggtgccctatggagaggcccacatggcaaggtattgtaaaaggcct

SEQ ID NO: 201412 - DNA, 508 bp, Homo sapiens
tgatgtcagatttggctcatcatagtccacaaaccatattggtaaagaaaatgaagaggattcctgtttaacacagagacacctatgttaaacattacatacagactaacccaaatatgcaattaaaccacaccactaaatggcaagatgaccatggatttaaacaaaatgtatgggggaaaaggcaacacattaaaytcatgtgaggagctggacttctgaaacagccattctccttgcatagcactgtctgctgctacagctcatagaagtcaacaattttcttcaacactggtaggcagcctctaaatggccctgatcaccctcacctcctgccattcacacccttgtaaaattccacccctggacctagtgactcacttctaacaaagagaatacagcaaaagtaataacatcacttctgagatgaggctacaaggagactacgatgcctgctttggtcacccttctcctgctctttccattgctccctctgatggaagccagt

SEQ ID NO: 201413 - DNA, 508 bp, Homo sapiens
tgatgtcagatttggctcatcatagtccacaaaccatattggtaaagaaaatgaagaggattcctgtttaacacagagacacctatgttaaacattacatacagactaacccaaatatgcaattaaaccacaccactaaatggcaagatgaccatggatttaaacaaaatgtatgggggaaaaggcaacacattaaatycatgtgaggagctggacttctgaaacagccattctccttgcatagcactgtctgctgctacagctcatagaagtcaacaattttcttcaacactggtaggcagcctctaaatggccctgatcaccctcacctcctgccattcacacccttgtaaaattccacccctggacctagtgactcacttctaacaaagagaatacagcaaaagtaataacatcacttctgagatgaggctacaaggagactacgatgcctgctttggtcacccttctcctgctctttccattgctccctctgatggaagccagt

SEQ ID NO: 201414 - DNA, 543 bp, Homo sapiens
gtccacaaaccatattggtaaagaaaatgaagaggattcctgtttaacacagagacacctatgttaaacattacatacagactaacccaaatatgcaattaaaccacaccactaaatggcaagatgaccatggatttaaacaaaatgtatgggggaaaaggcaacacattaaattcatgtgaggagctggacttctgaracagccattctccttgcatagcactgtctgctgctacagctcatagaagtcaacaattttcttcaacactggtaggcagcctctaaatggccctgatcaccctcacctcctgccattcacacccttgtaaaattccacccctggacctagtgactcacttctaacaaagagaatacagcaaaagtaataacatcacttctgagatgaggctacaaggagactacgatgcctgctttggtcacccttctcctgctctttccattgctccctctgatggaagccagttgccatgtgatgaggtgccctatggagaggcccacatggcaaggtattgtaaaaggcct

SEQ ID NO: 201415 - DNA, 545 bp, Homo sapiens
tagtccacaaaccatattggtaaagaaaatgaagaggattcctgtttaacacagagacacctatgttaaacattacatacagactaacccaaatatgcaattaaaccacaccactaaatggcaagatgaccatggatttaaacaaaatgtatgggggaaaaggcaacacattaaattcatgtgaggagctggacttctgaaacagccattctccttgcatagcactgtctgctgctacagctcatagaagtcaacaattttcttcaacactggtaggcagcctctaaatggccctgatcaccctcacctcctgccattcacacccttgtaaaattccacccctggacctagtgactcacttctaacaaagagaatacagcaaaagtaataacatcacttctgagatgaggctacaaggagactacgatgcctgcyttggtcacccttctcctgctctttccattgctccctctgatggaagccagttgccatgtgatgaggtgccctatggagaggcccacatggcaaggtattgtaaaaggcct

SEQ ID NO: 201416 - DNA, 546 bp, Homo sapiens
gccttttacaataccttgtcacgtgggcctctccatagggcacctcatcacatggcaactggcttccatcagagggagcaatggaaagagcaggagaagggtgaccaaggcaggcatcgtagyctccttgtagcctcacctcagaagcgatgttacttttgctgtattctctttgttagaagtgagtcactaggtccaggggtggaattttacaagggtgtgaatggcaggaggtgagggtgatcagggccatttaaaggctgcctaccagtgttgaagaaagttgttgacttctatgagctgtagcagcagacagtgctatgcaaggagaatggctgtctcagaagtccagctcctcacatgggtttaaacgtgttgccttttccccctgatacattttgtttaaatccatggtcatcttgccatttagtggtgtggtttaattgcatatttgggttagtctgtatgtaaacatttaacataggtgtctctgggttaaacaggaatcctattcatcttcttcaccgatatggtctgtggactctg

SEQ ID NO: 201417 - DNA, 546 bp, Homo sapiens
gccttttacaataccttgtcacgtgggcctctccatagggcacctcatcacatggcaactggcttccatcagagggagcaatggaaagagcaggagaagggtgaccaaggcaggcatcgtagtctccttgtagcctcacctcagaagcgatgttacttttgctgtattctctttgttagaagtgagtcactaggtccaggggtggaattttacaagggtgtgaatggcaggaggtgagggtgatcagggccrtttaaaggctgcctaccagtgttgaagaaagttgttgacttctatgagctgtagcagcagacagtgctatgcaaggagaatggctgtctcagaagtccagctcctcacatgggtttaaacgtgttgccttttccccctgatacattttgtttaaatccatggtcatcttgccatttagtggtgtggtttaattgcatatttgggttagtctgtatgtaaacatttaacataggtgtctctgggttaaacaggaatcctattcatcttcttcaccgatatggtctgtggactctg

SEQ ID NO: 201418 - DNA, 550 bp, Homo sapiens
cttgtcacgtgggcctctccatagggcacctcatcacatggcaactggcttccatcagagggagcaatggaaagagcaggagaagggtgaccaaggcaggcatcgtagtctccttgtagcctcacctcagaagcgatgttacttttgctgtattctctttgttagaagtgagtcactaggtccaggggtggaattttacaagggtgtgaatggcaggaggtgagggtgatcagggccatttaraggctgcctaccagtgttgaagaaagttgttgacttctatgagctgtagcagcagacagtgctatgcaaggagaatggctgtctcagaagtccagctcctcacatgggtttaaacgtgttgccttttccccctgatacattttgtttaaatccatggtcatcttgccatttagtggtgtggtttaattgcatatttgggttagtctgtatgtaaacatttaacataggtgtctctgggttaaacaggaatcctattcatcttcttcaccgatatggtctgtggactctgatgagccaaatctgacat

SEQ ID NO: 201419 - DNA, 548 bp, Homo sapiens
gccttttacaataccttgtcacgtgggcctctccatagggcacctcatcacatggcaactggcttccatcagagggagcaatggaaagagcaggagaagggtgaccaaggcaggcatcgtagtctccttgtagcctcacctcagaagcgatgttacttttgctgtattctctttgttagaagtgagtcactaggtccaggggtggaattttacaagggtgtgaatggcaggaggtgagggtgatcagggccatttaaaggctgcctaccagtgttgaagaaarttgttgacttctatgagctgtagcagcagacagtgctatgcaaggagaatggctgtctcagaagtccagctcctcacatgggtttaaacgtgttgccttttccccctgatacattttgtttaaatccatggtcatcttgccatttagtggtgtggtttaattgcatatttgggttagtctgtatgtaaacatttaacataggtgtctctgggttaaacaggaatcctattcatcttcttcaccgatatggtctgtggactctgat

SEQ ID NO: 201420 - DNA, 548 bp, Homo sapiens
gccttttacaataccttgtcacgtgggcctctccatagggcacctcatcacatggcaactggcttccatcagagggagcaatggaaagagcaggagaagggtgaccaaggcaggcatcgtagtctccttgtagcctcacctcagaagcgatgttacttttgctgtattctctttgttagaagtgagtcactaggtccaggggtggaattttacaagggtgtgaatggcaggaggtgagggtgatcagggccatttaaaggctgcctaccagtgttgaagaaagttgttgacttctatgagctgtagcagcagacagtgctatgcaaggagaatggctgtctcagaagtccagctcctcacatgggtttaaacgtgttgccttttccccctgatacattttgtttaaatccatggtcatcttgccatttagtggtgtggtttaattgcatatttgggttagtctgtatgtaaacatttaacataggtgtctctsggttaaacaggaatcctattcatcttcttcaccgatatggtctgtggactctgat

SEQ ID NO: 201421 - DNA, 497 bp, Homo sapiens
caatgtatttttaagagtgtaaaggaatcctgaccccaaaacttggagaactgctgccttcccctccactttcttgcttccctagaatttcttccttggaagaaacatccttttgccattctatattaacttacatagttccactgaggcaagttttgctacctccctcccatctttccacctctctytcaacacaaagcctgaccaaaggattctaccagcccaccccatttccagtgattagctgtcaggtgggctaagccaaacaaatctgggttttccctgagactagacctctctttctgggagagatggaatcacagggacaaggttggccaccttggggtagtgagaattcatcctgcctaaacagggagaattcaaacaagtttctagaaagccaaactactttctagaaagtcaaagataattatattttttgccatgactgtaagaatgcccatttcattgcacactttctaacatttttaccaatc

SEQ ID NO: 201422 - DNA, 590 bp, Homo sapiens
ggttaatgcaacataagctttcgcttgagtgttttgtaagtttcttttccctccccagcccgccrcatcactcagctggctcacgttgaacttgaggcagactaaaacctcctgatctttttttatgtgaattgcagtccagccaggttgctctcatcctgttcttgtgcaactgatttttggaaactacattcaagacattagatttattgatgctacatttcatctggttgcttttgacccagcattcttgactgtcgagatcatcttgaaccttaattctctcatcccctccagctttgagtcatctgcaaatttaatgcatatgctttccatatcttcagatcacgggcttaaaaaagctattttacagataaaaataaagatagagatataggccactagatagatcaagagggatcttgtatgccaggctgagcagtggggattttatcttgtgggaagcaggggctcttgatcctcaatcagtttttaagccttttctgaacatacccactacagacgctcgtatgttgtccctggatctcagagtgttttcactgatgacaacaagagttcacccctcagcc

SEQ ID NO: 201423 - DNA, 460 bp, Homo sapiens
tgagatgctgaggatctggggtgacatcagcaggtgatacagggcagaatcagggccttcctccatcacctactgttcagagaggagcagccaagggtcttcaagccaaaggggctgcctgaacaaacagacatgtagaactcaaagcaggtggarggttaaaaggtgttgctgctttctgcaaagcccactgttaacatctcctccaaggccaagagcaattctgtagcaggaaggtgcagaggcctcccaagacagtctcctggaaagtaaccactcacgtggcatctcatgggaggaaaagttaacagaaaaggaatctcacaggaggtgaagggcacaggctttgcttcttcagaccccagggacagggtgccccttttgctatgagtcgagcagcagaaacatctttgctgcagccctgacaagctgctctgtttatgagtcactagggagtcac

SEQ ID NO: 201424 - DNA, 578 bp, Homo sapiens
aagtccatgcccaactaagagcaggtgatgtttgccaccttgaatgataatgatctgtctccctgctctcccccatggagagctctctgaaaacaggcccatgtcttctttgtgcccccatcactcagtacctgtcttggtttgtcttgggtgagtggatgacgagaatgaatgaatgaagggccagagagcacagtggttgggagagcaggctctggagtctgacagacatgtgtccaaacagaagctctgcaacgaactgtgtacatgacttagggtgagtcatttgcccaaaatgggcgtcagtatcctcgtcaatgctctggaagtactcgtagtcactcctccataaagctactgcaagaactcagtagaagcatgcaygtaagatggctttgcacagagtgggcacccggcaagcattccacaaacacaggctcttggggttgtcattaatcattgtagatattcccattaagaggacgggcaagtggagggtccaaggacatctggggagctcgtccatgggagatgcatgcctccttatctcagctcacttctttcacttcccaagctca

SEQ ID NO: 201425 - DNA, 462 bp, Homo sapiens
tggggatgtccacttaggacagggggtttagtttgggaagcctgggtggggttcccattcatatgaggtccagggcgggtggggtcaggcaggctgatgtaaccaacccccagtggggagccagcctgggacccagattcgggccagccttcccctggcacacagccccagtggggacccagctcaagggacaggctaggaggctttggctccccctgccccccacctcgcacgcgttgtccacgctcctcccaccaagcctctccaggcccccactgttgcccatctcatctctcccacaggaataagccctccatctcctttcctcccagtaagctttaaaggtccatcagaaattgctttaagacccattaggcaaccaccccaaaattggcccagtaaaaacaggtttgcctgctttagaaaccaggccacccmaccctgcacatggctcttccctca

SEQ ID NO: 201426 - DNA, 578 bp, Homo sapiens
  misc_feature (1)...(578): n = A,T,C or G
nnnnnnnnnnnnnntaagcttgtatagggcatctagcctatagtatcacttcacagacataacaactaaatatggtgaaagtcttcccaagttattccaagtaatataacaacagacaaaaacaatgtttatttaaatggacataatatttacatgattttgggaaaagttgagatcacttcaccttagatgataaaataaaagacaatccaaagaagtggaaatagacttaggtmttggagtatgtataaaatttaattaaggtaaagagaggaaagtggactattcagatggaagaaatgtaaggataaaagtaggttgtgagaaacttcaaggtgtttagaggatcacaaacagaccagtttaaacagaactaattttcaattcatgagaattataggaaataagcctgaaaagttatgttggcaccagattgtagaaagcattgaatgttaaataaggaatctgaaccaaagctcaagttatttagtttgttcaaaagttgagcagtgttacactgaaagcatgttcatatgttcaaaaagtgttaaacagtattcattttaaaatatgagtgg

SEQ ID NO: 201427 - DNA, 555 bp, Homo sapiens
tactcagcgacatttgcctttagttcaaattaatacccaggcatgaaagccatgctgagcaagtcgtgtggttgcactgatcccatctgtgaaaaaggagaactacaagctctggaatcctggttaatcttcaagatgatacatttgtaaatatttggtgtttaattagctaactttgttggtatagattacagaaagtttattttcagtccaatttgaaatgctacacattttgtgtgatggagtttagtatctattctattttattactcaactcgagtatccacacttcgtgggagatgataaggttgattgagtgaggaaaaattggctggacactagaggttttaaagtattcaagatctctgaatatacaataactgttgcactaagaggatttttggaagaaggacattgctggatgtaaatgtaaagaattattactgtatctgggawcgtttatctgaattagttcattacatattattttggcttgggtatatgtacacaatgaaacaaattgaaaaactatacatagatcttacacaaaaatta

SEQ ID NO: 201428 - DNA, 574 bp, Homo sapiens
taagaactgtcaaaacatgaaattcatgtggtagtcgtggaactttcattttccttttatggcatgtaaactttaaaaagtgattatggtctcacgtttcagcagaattcatggtggtttgtgacttggtacatataataaatatctgcttgtgttcttaataaaataacacgttaagagaaagaagtttgtgggtggaataaagtatttattaggtctgcttttccccttgaagtctgctgtcagtatggtagtggccttcagtgatgtcttcagctaactgacagggaaacagacatcattcaagaactgagaaaagtgtctttcactggctgtcaagaccatttgcacaattagcatctgctaaaatgctggaagagattgtccagaacctrtcattctaatgtttcatcaacccattcaacactcagaacatattataccttgaagctataaaaatatttaaatcatcaaattgtcaaaatgaaattgaaaaaagtaagtgatttgtaaaaggccatgtatttaatttaacccaggccatttttttaaaaactcagagcaatgacttata

SEQ ID NO: 201429 - DNA, 605 bp, Homo sapiens
tttgcattggatttagggctcactctaatcctgcatggtctcccatctagcacgatatctgcaaatatctcatttccaagtaaagtcatgttcacgagtactggggctaaaatataacattttggggaacaaaattaaactcacgacacttctataactctaatactgttcaatcaaagttatatgaatggaaattgaaaatacaaggcatatctcacattttcaatcatcaaagaaggatttggttatatttattttttctacttaataataacagaaaagcagattgctgcatttaccactgcactgagtatcagaacatatagattttagttccatcattgtcttatgtgaatttgagcaagtaatgagactaccacagttgtagaaattataaataatacatttcttgaacaatatgcaataatacatgtaaactagaaagacaaaaaaaagagtttgtgatcatcctaagtgcaaaggaaagtgttctggttgttgtgaatggagcaacctttsgcctaggcattacaaaatttaataacttatctagggtcagcaccacaaataagctgtgagaaagtggttgagtcaaacttttagaa

SEQ ID NO: 201430 - DNA, 574 bp, Homo sapiens
ggaaggtatttagcattatattaatgggaccaaaaattgcaatgaaagcaaagcatcaccagtgagactatattagaggagaaagyaagcatgttctgaagatggtcacaaaaaattctaagatgcaaagccaaaaaaattacatattatatttcacatcccaaattatgggtcagccacatttttcaatatattcagcagaggttttgcaatttgattcagcacaaaatattatatattccactaatcaaatgtgtagaagtcatgacccaaacttgaatgaacctactcccattatcagattcttgggaagaaacaaaagtgctaaagttgaattgcttttcaggtgcaatttcaaagatgtgaaaggccaaatttcgtcttccctgatatttcatctgaacagtctcaagcaagagaggttttgtactataactcaaagatttggtctttgccatttcaatccatgcttttccaaatataacatactacaaaactatggaccttaattttaacatcatcttctaattttaaagaaatatatgtattgttttatttatttctactagcattt

SEQ ID NO: 201431 - DNA, 581 bp, Homo sapiens
caatgttccatgtttgaaaaatttgtgagctccccagaaagtcatcacataccatttctcatttttctgaagcatgaactggaatcataaaagcagcaagataaatgagggggaaaaacatagttaatatatttgtgagaccaaccaggggaacaagatatcacctaacacaatcaaagccaggggatctctttgaagtaaggactgtgaaggaagctgtcttaattggtcaccaaattggtttgggtaacttgcagcgggtcttgacaggcaacaaattaggaatttagttttataagaggaggcagcagtacctaagctctgacaagtctctcatttgggaaaggtgaagcctcatagttccatatgtgcttccctatttggagcacatgayaaccagcaagtgggtgatagagacaaggtctgactaccatgggaatgggagattgcaataaccaaggacactatcaaacccattattcctccatcctagatacaatagagtaagccaaatgctcatgaagaattaagaatgatacacagacatagagaaagaaccaatggaacagtccaggcaggtg

SEQ ID NO: 201432 - DNA, 650 bp, Homo sapiens
ccccgtgttagtaaatctactgaaacagaagcaaagatttttgttttttgtcttttttttcttttttttttctgtagctgggaagcatgccattgctgaagcatttataactcagcttctgcctctttggttaattaccrcagggtaaaacttaccattgataacaagaagcaggctttttctgattaacagaaggcatagagaaagcaaattgaggcttatccttcttgtacaacagtatagcaaaacagcaatccttaaaccttcaatgtgcactgtacaggtgggtccactagatgttgtggcccatgataggtcttcagatgtttggtgggcacccacacaggcaccttattgtcacctggagagacacaagcaaatccccttccccatataattatctttcctttttcccagctctttgtatgtgcatccttccaccatacatcttgtctagcctttttgttttccttttgtcctgtcaggtgttgttcagctgcagtcatgggttgatatttttgtaaattttaaaaatttaatgttaataaagctaaatgcaattgcatatgcagtgtcttatattcctgatcccctcccttttgctttcatattttagtttttaaagtacgattagctctttccactattgc

SEQ ID NO: 201433 - DNA, 522 bp, Homo sapiens
tggcagctggcttccttctaagaaagagagagagaaagaatgccccaaacagaagccatggactttcattctagtgtcagaggtggcatcccaccacttttgccatgttctattcattaaaactaaataactaaattgagttcatactcatgaggagaggactacaaaggtgaataccaggaggtgaggatcacttgggactgttttagaggctacctgagaatacaattgarcaatactttagaattcagaaggaataaatttgtccaagccagcattctatacccaaactaattgctatagaacaactggattttctatttgcaaggtctcaaattttatcttttacgcactttttctgtgtcatacattgtacacattccccagcttctggaaatattgtttgctgactgcttacagttatgtccttctttgggattactcttgactgaaggaggcatgtccccacctccaggacagccttcatccagggactgatcaaggagaaagggtacaaatact

SEQ ID NO: 201434 - DNA, 632 bp, Homo sapiens
agatgacatgtgctacggtttcatttatatgaagttctagaactggcagacctaacctatggtgatagaaaccaaatcaccagttgccttatgttgccgcaatgttgactggaaaggggcatgagagaagtttatgaggtgaaataaacgttttgtgtttggattaagatgtgtgtcacatgggtgtataactttaattgtgtatatttcattctatacatttaattcctcataaaataaaataaaataaactgaagagaagtaactaagagtacaatgtctttatgctactccaaagagaaagtttacctccaaaagagaagcatgagaggtttgctttgagctataacaaaaataaggtttctgaagaaagaagatatatcagacagaaaatggtttctctaggaattraaaaagcagaaatagatttaaaaaattgttcttgtgaattcagtgcatagcaaagtattatcgtttttagtgccaagtctcttttcccctaaaacctggatatgctgtattctttaaaccaatttcaagaaataagtgaaaaatctcataggaagaaagaaaggaaaatctctctttgagtatacactaaaacctgaatgtacaaatggtacctaacagtg

SEQ ID NO: 201435 - DNA, 477 bp, Homo sapiens
cgctgggcctccaaaacatggtaattgaagccaaaacatggtaattgaagctatcacatcctcccacacctgcaaattagattttcacttgargaaagagtgtttacatgtgaaaaagttggaaaataagtgatcatcagggacaacttttgatgttgctgctactctgacttgtgactgttggtcaaattttgaaatttatgtcttccatcaaatttgcaaaaatgcaaacttggcaaaaacatatatctctaaaataacattctgaaaaaatgtatgatagaaatgataaccaaagaaaatatcttggaaagggaagaatgaaagtaatatagccatgtgttacatagcaatgttttggtcaatgagggaccacatatatgaaagtgttccacagaattataatactgcatttttactgtaccttttatatgtttagctgtatgtagatataaaaataccattgtattacaactg

SEQ ID NO: 201436 - DNA, 498 bp, Homo sapiens
tgttttttttttcttgctaatttatctgagttccctgtagattttggatatcagtcctttgtcagatgtatagactgtgaagactttctcccactctgtgtgttgtctacttactcactctgctgactgttatatttgctgtgcaaaagctctttagtttaattaagtccaacctatttatctttgtttttgtttttaataaaatatatactctaagtaggtttttaaaatatatttcttcacttaatattttaaggcaagacaagtatatcataccaccaaatgcattttaaagyaccactttaaatatctatatagaattatcttgtttcattttactgattccccatttttctactgtagataacactctgatgaacatctttatagacaaatacttggtaaaatttcacttctgttccagaaatgtattatgttgaaatacgtgaagacataaggcaaagcaataggcaactgtatatataatatttttaatta

SEQ ID NO: 201437 - DNA, 498 bp, Homo sapiens
tgttttttttttcttgctaatttatctgagttccctgtagattttggatatcagtcctttgtcagatgtatagactgtgaagactttctcccactctgtgtgttgtctacttactcactctgctgactgttatatttgctgtgcaaaagctctttagtttaattaagtccaacctatttatctttgtttttgtttttaataaaatatatactctaagtaggtttttaaaatatatttcttcacttaatattttaaggcaagacaagtatatcataccaccaaatgcattttaaagcaccactttaaatatctatatagaattatcttgtttcattttactgattccccatttttctactgtarataacactctgatgaacatctttatagacaaatacttggtaaaatttcacttctgttccagaaatgtattatgttgaaatacgtgaagacataaggcaaagcaataggcaactgtatatataatatttttaatta

SEQ ID NO: 201438 - DNA, 603 bp, Homo sapiens
ctgggtcaaatggtatttctagttctagatccctgaggaatccccacactgtcttccacgatggttgaaccagtttacagtcccaccaacagtgtaaaagtgttcctatttctccacatcctctccagcacctgttgtttcttgactttttaatgatcgccattctaactggtgtgagatggtatctcattgtggttttgatttgcatttctctgatggccatataataaaaaaaaagaaaaaaagatttatttacactaacaacaaaccatttttaaaaaaagaaatcaatacaattcacaatagcatttaaacatgaaatactttggagtaaaccgaaacaaagaaatgaaaaatctgtatatgaaaaggtataaaayatttatgaaaaaaatagtagacacaaataaatggaaaaacatctcacatttatggattggaagaattaatattgctaaaaagcccataccactcaaaaagaaccacagatttaatgtagtccctatcaaaaattcgaaaacaattctaaaattcatctggcaccatgaagagtaaatagccaaaacatcttaagcaaaaagaacaaatttggaggcattatac

SEQ ID NO: 201439 - DNA, 603 bp, Homo sapiens
ctgggtcaaatggtatttctagttctagatccctgaggaatccccacactgtcttccacgatggttgaaccagtttacagtcccaccaacagtgtaaaagtgttcctatttctccacatcctctccagcacctgttgtttcttgactttttaatgatcgccattctaactggtgtgagatggtatctcattgtggttttgatttgcatttctctgatggccatataataaaaaaaaagaaaaaaagatttatttacactaacaacaaaccatttttaaaaaaagaaatcaatacaattcacaatagcatttaaacatgaaatactttggagtaaaccgaaacaaagaaatgaaaaatctgtatatgaaaaggtataaaacatttatgaaaaaaatagtagacacaaataaatggaaaaacatctcayatttatggattggaagaattaatattgctaaaaagcccataccactcaaaaagaaccacagatttaatgtagtccctatcaaaaattcgaaaacaattctaaaattcatctggcaccatgaagagtaaatagccaaaacatcttaagcaaaaagaacaaatttggaggcattatac

SEQ ID NO: 201440 - DNA, 626 bp, Homo sapiens
ccaaaagacttagtcatgcaatagtagtgggagactgcaacagtccactgacagcattagaaagatcatcaaggcagaaaactaacaaagaaattttggacttaagctctacacttgaccaactgggtctaatagacatctataggatattccatccaacaaacacaggatatacattcttctcatccacacatggaacatattcttagattaaccacatgcttagtcatamaggaagtcccaataaattcaaaaataaaataaaatcataccaagcatactctcagaccacagtacaataaaggtggaaatcaacacccagaagttctctcaaaactacacaaaaacatggaaaattttaaaacttgctcctaaataactcttgttgaacaatgaaattaaggcagaaataaaaattaaattatttgaaatcaatgaaattatagaaacagcttaccaaaatctttgggatttggctaaagcactgttaaaggaaagtttgtagcactaaatgccttcatcaaaaagttagaaagatctcaaattaacaatttcacactgcacctcgagacactagaaaaaaattaaaaacaaaccacaagctatcagaagataagaaataacta

SEQ ID NO: 201441 - DNA, 564 bp, Homo sapiens
actacctaataaaataactagttgaaaaagattaaacacaggcattccctccgagattaagggatgattttcggagatagtaaagtctaaatccttacatgaaaaaaataaaccattagctgacctcaaaacagaatatcagcatatatggacacccattcacatttaccaaccatatatatatatatgcagtcaaaggattaccacaattgagctaattaatgtatcatcacctcatagttacgtgtgtgtgtgtgtctrtgtctgttgagaacacttaagatctatcctcttagcaaattatagtaaacaatatgatattattaactataatcaccatgatgtactttagaactctataacttactgattctgaataattaaaagtttaaatcctttggcaaacatctccccatttcctcctccccatccccctccagcaaccttcattctattttctgcttctatgagttcaactacttaagattctttatatgagtgggatcctgcagcatttgtcatcctgtgcctgatttctttcactcagcatttcttccagattca

SEQ ID NO: 201442 - DNA, 602 bp, Homo sapiens
ttcaaaactgcttcacatgtctacctataatttttattacttaacctgctgcacttgctgttatctcttgtataatattaaatagaagtggtgatagcaagttattcttgcgtggttcactgtctcagatggattaaattcagttttttaccattaagtttaacatattttgtgggaactctttatcagtataagcaagttcctttcctccacagtttgctaagagtttgtattacagatgctgaaatggtgaagagttttatggtatacgttgaaatggtttcatgatttgttttctgctgataatatagtgaattgtattatgtagtattatttcttgatgttggacmaaactagcactcatggaataactcaaatgttcatattttatatatattatgaaattcaatttactattatttgaagtagaatttgtgttaataatgggagattagtctgaaatttttgcttcttttcacgttattgtcagcttttgacatcaaattcatgctggacacataaaatgggttggaaagtgttgtcttttttaatgtgtgtataatatgttttttaaaatgtgtctatatgtatatatattctga

SEQ ID NO: 201443 - DNA, 549 bp, Homo sapiens
gtgttcttaattgtgagatgggaagatagcagacgttgcatcttgctttgatgtccagcttgccactctatgcctaaatggggcatttagttcatttacactcagggtcagttttgatatgtgaacatttgatcctgccattgtgctgttggctggttgttatgtagacctgactgtatggttattttttcatgtcaatggtgtgtataattaattgygttttcatagtggcatctcccttcaattctgtcagtttttgcttcatgtattttgggactctattgttaggtgcatatttgtttagagttgttatatattattgatggatttactgctttatctttagtctttatttccagtaacaatttttaccctgaagtctattttgtctgataatagtttagccattttagctctctgttggtaactttttgcatggaatatcttttcccatccttttactttcagcttatttgtactttgaatctaaaaagcctatcctgatagacaatacatatttgaatcttggtgttttttagtccagtccgt

SEQ ID NO: 201444 - DNA, 541 bp, Homo sapiens
atttctttgtattaggaatatttcaaattttctcttctcactatattgaaatacataataaattattgttaactatagtcactctactgttccatcaaacactagaacttacacttgctatctaactatatgtttttacctattaaccaacctstatttgcagcccccccaactcttcccaacctctagcaactatcattatacccgctacctccatgaattcatcttttttggctcccacatatgagtgagaacatgtgatatttgtctttctgtgtttggttttgcttaacataatgatctccatttccatccatgttaacaggatttctttcttttaatggctgaatagtattttgtgtgtgtgtgtgtgtgtgtgtatatatatatatatatatatatatatatatatatatatgtatatataccacattttctttatttattcattcactgatagacacttgggttgattttatcacttagttgttgtgattagtactgcaattaatatgagggtattaactgcaccctttgatgc

SEQ ID NO: 201445 - DNA, 541 bp, Homo sapiens
atttctttgtattaggaatatttcaaattttctcttctcactatattgaaatacataataaattattgttaactatagtcactctactgttccatcaaacactagaacttacacttgctatctaactatatgtttttacctattaaccaacctgtatttgcagcccccccaactcttcccaacctctagcaactatcattatacccgctacctccatgaattcatcttttttggctcccacatatgagtgagaacatgtgatatttgtctttctgtgtttggttttgcttaacataatgatctccatttccatccatgttaacaggatttctttcttttaatggctgaatagtattttgtgtgtgtgtgtgtgtgtgtrtatatatatatatatatatatatatatatatatatatatgtatatataccacattttctttatttattcattcactgatagacacttgggttgattttatcacttagttgttgtgattagtactgcaattaatatgagggtattaactgcaccctttgatgc

SEQ ID NO: 201446 - DNA, 413 bp, Homo sapiens
atgttctgaacaatggccattagtactgtaacaaccacacctttaaaaatacagtcatgaattgcttaatgaccagaatacattctgagaaacgtattgtgaagtgattttgccattgagtgaaaataatagagtatatttacacraacctagatggtatagcccagtatacacatagattatattgtatagcctcttgctcctaggctacaaatctgtatagcatgttaccatattgaatactgtagggaattgtaatgcaatggtgaatattttttatctgaacatatctaaacatggaaaagatacaataaaaactgtatcttgtaatcttatgaaacccccattgtttatatgtggttcatcattgatcaaaatgtcattttatagtgtacttttattaagggaactat

SEQ ID NO: 201447 - DNA, 440 bp, Homo sapiens
tgagtttcccctccagtctgcaggactggcagcctagcctgcaggtggggcttcactggggacccacccccttccacccaggaacctgtctgcctcccacagccatccatggcacccaggcttctggcatcaaggggcacttgcaggccagtgcccagccaccctcagatcccctcagcttcccctcccatgctcctgctcctcagtgttcaaagttcagagggggctgaggtggcagggggctggcatgtcatcactggtcccaatgtgtgcayacctggctggactgtgacagcaccctgctgggtcccaaccccactctgaggtcagagcacagagccaggagctgggagagaccaggcagcaggaggaggcacctccaagcctgcaaggggcaaggggggacgttcccagcctccccaagagtgcagggatgcctg

SEQ ID NO: 201448 - DNA, 386 bp, Homo sapiens
aaagctaatatgagttagaataaaatctagtagaattyttgcaaagctgcataatccagctatggcagattttatagaagctattaccacaatgcagtaatacaatgtgtaagaacattgaaaggaagaacatgcaaaatacatcttcctcattttcttcctactgcttacactacttttccttacatggaagaaacaaacaaaccaacaagcaaaaaacaaacccaatcaacaaataacacagaggatgagatcatctaacaaaaaatgtccttcataaaatataagtagctgtctgtaattggtaatttgcccggtatcacagaatgtacagatgaaggcaatgtgtatcttgtcgcattacctttttcgttagtatgatcaac

SEQ ID NO: 201449 - DNA, 386 bp, Homo sapiens
aaagctaatatgagttagaataaaatctagtagaattcttgcaaagctgcataatccagctatggcagattttatagaagctattaccacaatgcagtaatacaatgtgtaagaacattgaaaggaagaacatgcaaaatacatcttcctcattttcttcctactgcttacactacttttccttacatggaagaaacaaacaaaccaacaagcaaaaaacaaacccaatcaacaaataacacagaggatgagatcatctaacaaaaaatgtccttcataaaatataagtagctgtctgtaattggtaatttgcccrgtatcacagaatgtacagatgaaggcaatgtgtatcttgtcgcattacctttttcgttagtatgatcaac

SEQ ID NO: 201450 - DNA, 592 bp, Homo sapiens
agtctgccccttaatttgcatrtaattaaaggtcaatgtaaatatgactgcagaactgccctgagctgctactctggtcacactacctacagggtagccctgctctgcaaggagcagtccctctgctgttgctataggccactgcttcaataaaagttggcatctaggccaggtgcagtgggtaatgcctgtaatcccagcactctaggaggctgaggcgggtggatcatttgaggccaggagtttgagaccagcctggtcaacatggtgaaaccccatctctactaaaaatacaaaaaaattagttgggtgttttggcgcacacctgcactcccagctactcaggaggttgaggcgggagaatcacttgaacccaggaggcagagtctgcagtgagccactgcactccagcctgggtgacagagtgagaccctgtcccgaaaaaaaaaaaagttggcctctaacaccttcggtttgcccttgaattatttcctgggtgaagccaagaaccctctcagtctaagccccagttttgtggcttacctgccctgcatcaacaccagaaacttaaccctttgggaatctcgatctt

SEQ ID NO: 201451 - DNA, 595 bp, Homo sapiens
tatagtctgccccttaatttgcatataattaaaggtcaatgtaaatatgactgcagaactgccctgagctgctactctggtcacactacctacagggtagccctgctctgcaaggagcagtccctctgctgttgctataggccactgcttcaataaaagttggcatctaggccaggtgcagtgrgtaatgcctgtaatcccagcactctaggaggctgaggcgggtggatcatttgaggccaggagtttgagaccagcctggtcaacatggtgaaaccccatctctactaaaaatacaaaaaaattagttgggtgttttggcgcacacctgcactcccagctactcaggaggttgaggcgggagaatcacttgaacccaggaggcagagtctgcagtgagccactgcactccagcctgggtgacagagtgagaccctgtcccgaaaaaaaaaaaagttggcctctaacaccttcggtttgcccttgaattatttcctgggtgaagccaagaaccctctcagtctaagccccagttttgtggcttacctgccctgcatcaacaccagaaacttaaccctttgggaatctcgatctt

SEQ ID NO: 201452 - DNA, 595 bp, Homo sapiens
tatagtctgccccttaatttgcatataattaaaggtcaatgtaaatatgactgcagaactgccctgagctgctactctggtcacactacctacagggtagccctgctctgcaaggagcagtccctctgctgttgctataggccactgcttcaataaaagttggcatctaggccaggtgcagtgggtaatrcctgtaatcccagcactctaggaggctgaggcgggtggatcatttgaggccaggagtttgagaccagcctggtcaacatggtgaaaccccatctctactaaaaatacaaaaaaattagttgggtgttttggcgcacacctgcactcccagctactcaggaggttgaggcgggagaatcacttgaacccaggaggcagagtctgcagtgagccactgcactccagcctgggtgacagagtgagaccctgtcccgaaaaaaaaaaaagttggcctctaacaccttcggtttgcccttgaattatttcctgggtgaagccaagaaccctctcagtctaagccccagttttgtggcttacctgccctgcatcaacaccagaaacttaaccctttgggaatctcgatctt

SEQ ID NO: 201453 - DNA, 592 bp, Homo sapiens
agtctgccccttaatttgcatataattaaaggtcaatgtaaatatgactgcagaactgccctgagctgctactctggtcacactacctacagggtagccctgctctgcaaggagcagtccctctgctgttgctataggccactgcttcaataaaagttggcatctaggccaggtgcagtgggtaatgcctgtaatcccagcactctaggaggctgaggcgggtggatcatttgaggccaggagtttgagaccagcctggtcaacatggtgaaaccccatctctactaaaaatacaaaaaaattagttgggtgttttggcgcacacctgcactcccagctactcaggaggttgaggcgggagaatyacttgaacccaggaggcagagtctgcagtgagccactgcactccagcctgggtgacagagtgagaccctgtcccgaaaaaaaaaaaagttggcctctaacaccttcggtttgcccttgaattatttcctgggtgaagccaagaaccctctcagtctaagccccagttttgtggcttacctgccctgcatcaacaccagaaacttaaccctttgggaatctcgatctt

SEQ ID NO: 201454 - DNA, 554 bp, Homo sapiens
gtactgacagaaaatattaaaaaccttcctattgagtttttaatatcaaacagggaggttagtaaattgttttctgattcttctacaaaaaaaaaagtctagaagagggacagggaatgtagtgtgcaccacttattattattctaagtaataatttttacttacgaggtcaacacgagtgcaaagggcttagtgatgcatcttattctttaattttggacagtaacaccctcagatggtatttttattggtttgttttatatcccccttttccatttgcccttctgttttgaagtgctttttcttaaaacttaagttctttgcctccattttcttataaacccaatttcctctttagtgmaactctaccatttgaaaggaacctttctattgtaatttacaagctgtgaataactgctatgtaattctttccaaggattaataaactgagagatgatttgaaccaacagaggtagggaaagattagaagggggatgcaagtggccacaggtcttagaggcggccagcagagggcgctgctccaaggtgaaggt

SEQ ID NO: 201455 - DNA, 560 bp, Homo sapiens
aagcttttaaatatatcacaaatattttaccaaataaacctgaatggccctggtttaatgaatctgyttctctgtctatagactatctagtcttataaagtcaaaagagaagcaatgtgacaaattattcaacagcccttctctatttatagagagagactgaacttcttctttggttagaaagaaaaccttgagtttcatttcctagttcatatatttttataacatcgtgggacggattttgggagaaccaagatggtatagcgggtgcacactttgatcctccctctcccttcaagaacatacaagtgagagtaaaatataaaaaagagaaattgaaaagacatagtcatgcttaaataagttacaacaatctcaatggaacagacacaaaactgtgagcaggactaaaactgcaggccttctagactccagatgcagaaggaggaagtggtggctgaacactaacagtaagagtttctcgggggtaagggaggctaacatgctgtgtgtgaggcagtgataggctccctgctggaagttaagggttgactgggcta

SEQ ID NO: 201456 - DNA, 560 bp, Homo sapiens
aagcttttaaatatatcacaaatattttaccaaataaacctgaatggccctggtttaatgaatctgtttctctgtctatagactatctagtctyataaagtcaaaagagaagcaatgtgacaaattattcaacagcccttctctatttatagagagagactgaacttcttctttggttagaaagaaaaccttgagtttcatttcctagttcatatatttttataacatcgtgggacggattttgggagaaccaagatggtatagcgggtgcacactttgatcctccctctcccttcaagaacatacaagtgagagtaaaatataaaaaagagaaattgaaaagacatagtcatgcttaaataagttacaacaatctcaatggaacagacacaaaactgtgagcaggactaaaactgcaggccttctagactccagatgcagaaggaggaagtggtggctgaacactaacagtaagagtttctcgggggtaagggaggctaacatgctgtgtgtgaggcagtgataggctccctgctggaagttaagggttgactgggcta

SEQ ID NO: 201457 - DNA, 603 bp, Homo sapiens
aagacttgaagacagaatttgccctcctaatataagcccatggtaacctgaacctccttcaccctaactctcatcacagtgtattgtgattacttattgaggatgaaatttgattttcctttttgatgttacttctccagcacagtacctggtatgtggaaggcactcaaactagggccaacctggtgccagctaacctgggactagtgcaagctcctgaaattcacctggtcaagggacacatgttcacaggatctcctggggttgtgtcacccaaaaaaaaaaaaaaaaaaatttcacctggtgtctctagtcaccatgattttctctaaaatgccacacagaattctatgtatggaatttttttcttttcttttttctttttctttttytttttttttttttttgagacagtctgtcgccagtctggagtgcagtggcgtgatctcggctcactgcagtctcctcctcccgggttcaagcggttctcctgcctcagcctcccgagtagctaggactacaggtccgtgccaccacgcccagctaatttttgtatttttagtggagatggggtttcaccatgttggcaaggatggtctagat

SEQ ID NO: 201458 - DNA, 570 bp, Homo sapiens
atctttcccccttcctgtacatcagatatcattttggatcgatactacacccaaggctgggtgtggtggctcatgcctgtaatcccagcactttgggaggcygaggcaggcagattacttgaggtcaggagtttgagaccagcctggccaacatggtgaaaccccatcgctactaaaaatacaaacttagccaggcatggtggcgcgcgcctgtagtcccagctacttgggaggctgagaaatgagaatcacttgaacccaggaggtggaggctacagtgagccaagacttcaccactgcactccagcctgggcaacagaggaagaccttgtctcaaaaaaaaagaaaaaagaaaaagaaagcagactacacccccgggtacttacataaatgagatcatttctgtaaacacagcgcagtagcagcatctagtataataagcactcaataaatacgagctattattgctgaggcaatgcatattggggctctttttctccatcctcttgtgtagcctaagtttgcagctgtgtttggcagccgcctcatactaatgaagcacactgggct

SEQ ID NO: 201459 - DNA, 567 bp, Homo sapiens
tcattttggatcgatactacacccaaggctgggtgtggtggctcatgcctgtaatcccagcactttgggaggctgaggcaggcagattacttgaggtcaggagtttgagaccagcctggccaacatggtgaaaccccatcgctactaaaaatacaaacttagccaggcatggtggcgcgcgcctgtagtcccagctacttgggaggctgagaaatgagaatcacttgaacccaggaggtggaggctacagtgagccaagacttcaccactgcactccagcctgggcaacagaggaagaccttgtctcaaaaaaaaaraaaaaagaaaaagaaagcagactacacccccgggtacttacataaatgagatcatttctgtaaacacagcgcagtagcagcatctagtataataagcactcaataaatacgagctattattgctgaggcaatgcatattggggctctttttctccatcctcttgtgtagcctaagtttgcagctgtgtttggcagccgcctcatactaatgaagcacactgggcttgggatcatttcagacctgcagatc

SEQ ID NO: 201460 - DNA, 604 bp, Homo sapiens
tttcctattgaggaccaaagctctcaactcttttttcctaataaactaggagagaccagtttggaattgtctctaaatgtacaggatgagtttgagtttaggggtagcggagcctcttgttcccaactgaaggcactcacgaaacctgaactgcacccacttggaggaaagtgagacggggcttcccagtgagaacccagggagatgcgtcaaaggctacagagggaacaaacaaacaagcaatttagtttagattttttaatgcagaaatgaagtgttccgcttgtttgcttttaaaatggagaacagagaacataaaatgacttcacaaatgaaggaagtaattagaaaaaattcctccagttctatgtgatggccagtaaaggaagagagarcacagaaaagatagaacgggaagggcagatgggaaggaaggagagtatgacacagagatgatgacgcaaagagagagagtgaagaagagatgaacatggaaccatccctccacacacacacattttgatcttatggaaaacctgctttgtaaaattaaagtttgtcttttgttgtttttacactgtaagagagcgatttgaatacattt

SEQ ID NO: 201461 - DNA, 604 bp, Homo sapiens
tttcctattgaggaccaaagctctcaactcttttttcctaataaactaggagagaccagtttggaattgtctctaaatgtacaggatgagtttgagtttaggggtagcggagcctcttgttcccaactgaaggcactcacgaaacctgaactgcacccacttggaggaaagtgagacggggcttcccagtgagaacccagggagatgcgtcaaaggctacagagggaacaaacaaacaagcaatttagtttagattttttaatgcagaaatgaagtgttccgcttgtttgcttttaaaatggagaacagagaacataaaatgacttcacaaatgaaggaagtaattagaaaaaattcctccagttctatgtgatggccagtaaaggaagagagaacacagaaaagatagaacgggaagggcagatgggaaggaaggagagtaygacacagagatgatgacgcaaagagagagagtgaagaagagatgaacatggaaccatccctccacacacacacattttgatcttatggaaaacctgctttgtaaaattaaagtttgtcttttgttgtttttacactgtaagagagcgatttgaatacattt

SEQ ID NO: 201462 - DNA, 310 bp, Homo sapiens
tgcctgggatatacttatgccaaacaattttttgttgtttacaygaaattcaaatttaactaggtatcttatatttttatttactaagtctggcagccttagaaggtaagcacttgagaaatggattttgaatggatccacattgttatgtgcgtgggtgtgtttgtattttaggtgtgtattttgggggacagaagggagggtctagggaagaatttcttgggcaattagacaagtgcatgttacaggaaaagtctgatgggcaaataaatggtgtgtgtttactcatcaaacaattctggtcatctca

SEQ ID NO: 201463 - DNA, 396 bp, Homo sapiens
gtgaaaccccatctctactgaaaatacaaaaagcagccaggtgtggtgttgcttgcctgtaatcccagctactcaggaggcagaggcaggagaatcgctttaaccttggaggcggaggctgcagtgagccaagattgtgccactgcactctagcctgggcaatgatgcaagactccatctcaaaaaaaaaaaattatctctggattacttataatacctaatacaatgtaaagattatgtaaatagtcatactatattgtttytagagtttgtctttttttatttttatttttgtttaatttttgatctgcagttggttgaatcaatggatgtggaactcatgaatacgaaaggcctgctatatatacacacacattgatatagctatatagatag

SEQ ID NO: 201464 - DNA, 446 bp, Homo sapiens
ctctcctacagtcttcacaccattccaatgtcgtactgagacaaattttactttggtcaacagatctttagtgataacttaaattctactctcttcacctcatattcaccctgagagacatagtctcaaagttcatatcatgggccattgaaaattctattgtaatcttatctcaagggcttttcattttttttgtgagaatatctgtaaattaaagtaattcactttctgtgatgtttatctagtacttcagtattttacattgtattaagaattctcataaacattatcagctatactccawcatgattcttctattgacattagccaaacttctgaccagttcatattatgtcccaagaaggggaaagatgaaaaataatacatagggagaaatttgtaatttctctactggtttgatttcaggggagaaaagcagatattct

SEQ ID NO: 201465 - DNA, 440 bp, Homo sapiens
aactatattttaatagtctttactttctttcggattctttctttaagaagaaaagatacaggaaataagtggaggaaaattaaacactcaaagacacgaaagtaatttttatttctacagggcccttgatggggttgtcatttttgtttttccttcaggattagtggcctaccccttgggcccttcccctggcctarggcaatgtgggccaagaagaaacatttatcagaatcacttaaagcagcctcctaggtcctacccagacctagaattgggctcttttggtggaaatcaccagtcttaggaacgtaggttagcaaaataaacagactatccattatccttgacattaatacatgtcctatgaatatataatacatgaaaagaacctatcaaagtgtatatgattattttaaaatgatggcttatgggaaaatttt

SEQ ID NO: 201466 - DNA, 647 bp, Homo sapiens
taatgcaaagcgagagtgggaaaaagcaagcaggcggcggtgcggcgtgcagagagctgtccagcgccggaggtgctgaaaccgggactagctctgtccagccctatgcgaggaacagcagcggcagcggcggcagcacgagcagccgccagagcgttggcagccacttcctatgctcatcggattgtttcaaatactcagggtgtaaagaggcttttcatatttttctaccagctctgattcccgtcccatattttggaccataaatgctggcttttaaaatgcggatttctttgaaaagcctgactaaaaggttacatagcttggattgggtgataggatcttctctgctgctggttagggatttttcctccttttagaatagctgctgtgaaaatttcaccctggaaacgggaagcagcagcagcggcatcagctggttccgactctcattgcctttgcctggtatccaggggaggggtgggtttcagacctaagcttcctactcyacacttcactcagtccagctcgcctctgacgtccttgacatttctttccctcaactgcttctttgccctggggcagaagcattaagctaaccccaagtccgctagaacattcagaggaataaccccaccccaaagtcc

SEQ ID NO: 201467 - DNA, 630 bp, Homo sapiens
gtaccacaaaaatttcaaatcactttgtatagtgcagggcaattttaagtcattgaagtacttatagattttaccatttcatttgaaggcttccaatttgaaaggaagtaaagcagcttttataatatgacaattcaaaatacactaagaaatttcaaatttaaccaaaactatggtgaaaagtagagtgcatatattagaaaaaaatgtaaaaattaaataatgtatatcctccaaaatataaaagggaattaaactgtcctataaattgcttcgttggcatagaacagcagaatgtgtgtaaggggtaacatccatgtgacagtagtgccatattttaaaagtaataactcagaaagtagttattcaattttatgaggaaaggttaaaaaaacaagattgacatgcttggttttaatatttcatccagtggtatactggagtctgctcataaaggctcacaagaatcaactgtgcatatatctctccccagttttttattgttcagcaatgttaygatgatagcctgaaaccagccatggtaggaatatttacaccatggaaattgacaaatgctacaaattagggcctttttccttttgagagtctattgttaacatttaccagctt

SEQ ID NO: 201468 - DNA, 399 bp, Homo sapiens
gggagaagcagaaataagggtggagaggttgsgggaggggcacacaattatgacaggttttgagagtcagttaacttagatataccatgatacacagtgcaaatcgttctagcttcttgaggtgaagattttgtgccaaatctagagttttaggaagacagggctaagagcagcaggcagaaagggctggagtggagaagggaggtgaggatgcaggccaccctgctggtgacggccttctccattcattgccacctttagcaggtcccaggtttggggctaggctctgaggttttaagatggctaatgggaagaaataaaaatgaataaaaactacagcaaaacgatgaatgctgtaataaaggaaggcatagggtgctggaggaaaagagaggaaga

SEQ ID NO: 201469 - DNA, 558 bp, Homo sapiens
atgctacgagctcagtgaagggcaactgtcttccatcctctcttcctttcactacccacacttgagccaggccctccactaccaataaaacacaattaatgagcacaattaatcaactaaattcacttgaaggatgatgaaaagaaacaaatgatttccaaatgaaatgtattactctatcctaatcatttctaaaaatggacactcactaagatctatttatatggaaaaaaaaaacaggaagatgtctgataagtaaatgtagtggttttgttttgggtttttstttgctttctgaatttcttgccctttgtccccatgtagatacatctagtactattcattagggcttttaaaggagtctcccaagcctcctcatttttgtgagtacaatggagaaaattatttctgctcaatattttcaagatatatttaatcacctggataaaaacacatattgatccttagtgctattctcagcataattattatactttgggtttcttgacatttctgtactgatccgtgctacctttcaaccattaatcatggatccat

SEQ ID NO: 201470 - DNA, 600 bp, Homo sapiens
gtcaaatacatttaattggttttccccctgtatgtgaggtaacttgcctcccttctttttatattgtgcaattggcaggaattataactagatacgatctctcttttcacatggaatttgagagggaggtatcttttactccagaggtattacaatgtagacttgttaaacaggctctttgagtgatggttaactagttcatgtatacaaagataaagtaagcactgccacaggaaaaatgartaagtttttggcctagcaaacagttacacagaggctatgaaacctagagagtcatatgtataatccatagacattagaaaaatcagtttttctcaactcataaattattacctccttccaaatatctcagattttcacttttccatggctagaaaatctgcattcccatccatgttatcccagacatctaaacagtttcatctcaccccactaaacatgattcactcctatactacccttatttcaagaatctctagctatttttctcactcaacttttctttatagaatataccaatactcttttttaatttatcttcctttcatttctattccatttctgcaccacattaagccc

SEQ ID NO: 201471 - DNA, 417 bp, Homo sapiens
attgaatcatgagggaggttctccatactgttcttgtggtagtgaacaagtctcacaagacctgacggttttaaaaatgggagttcccctgcacaagctctcttgcctgctgccatgtaagatgtcctgttgttcttccttcatcttccaccatgattgtgaggcctccccagtcatgtgaaactgagtccattaaaactattttctttataaattacccagtctcaggtatgcctttgttagcagcatgagaatggactaatacaggtaagtttaaggatttttacatattatttttatcactagtctacmttacaatggaaaatgagaatttataggaaaagaatgtttttcacatccctgcactaaaaagtatgtgcaaataaaacacatggtttcaaaatgttatttataata

SEQ ID NO: 201472 - DNA, 444 bp, Homo sapiens
aaatgtcttcatataaactctgaatatttggagtaactagtaaaggagaaatcttaagagacatttgtgagcagttttttcatcttactggctatgggaaaaaaaaaaacaacaccaagtcttctccaacttgtatttatctttaagaacagtgtactactaaggatgtcttttttcttcacttggtaaggaaatrtattccttcaagttggagatgatgatgtagatattactgaattcaattcggttaggtagagtttttagagataataatattgagactcctttgggtatatacccagtaatgggatggctgggtcaaatggtatttccagttctagatccctgaggaatcgccacactgacttccacaatggttgaactagtttacagtcccaccaacagtgtaaaagtgttcctatttctccacatcctctccagcac

SEQ ID NO: 201473 - DNA, 504 bp, Homo sapiens
gtgtagtggtagggtttgggcttctagtgtacccatcatttgaatagtaaacattgtacccaaaaggtactttttcaaccctcaccctttccaatcctcttcccttttgagtcccgagtgtcttttacttccatgttgatgtccatgtggactcactgtttagctctgacataagtgagaatatgaggtatttggttttctgcttctgacttatttcacttgagataacaacatccagcttcatctwtgttgctgcaaagacgatcgcattcttttctataattgcatagtattccatagtgtctgcataccacattttcttaatccaatcatctgtcgatagaacatggttgtttctttgactttgctgatgtgaatagtgctgcaataaacatatgagtccaggtgtctttttattatactgatttctttttctttggaaatacctacgagtggaattaccaggttgaatggtagttctattttcagttctttgagaaatct

SEQ ID NO: 201474 - DNA, 521 bp, Homo sapiens
tctcagatgtcagatattctgtgttagaacttcctctctctgtgttagaaaggatattctctcactttgtggatcaatgtccttaagcagctattttgcatggctttttatgcatattttatgacctagacgcaaatctgtcaggcaaagatgcaacatgagaaagtaaatattgaaaaactcacttttgttaagtactgttgagataccctacataggtaggtatgtaataattactgtcccttatattttacttggaaatttatggggcatttatttgtatatcctcatttgactgttacacttccttaaaaagtattattaatgttatcgtctattaaaattaaaacaacccaaggtgtacattaagtaaacagtagaacygggtgttctgactccagaaccagtgctctccttggattttactcttcctctggggaaaaaatatccttggccctacatctttttgaagtatcatctgaggaccagccatgcttttttcccagcagatacagcacaat

SEQ ID NO: 201475 - DNA, 521 bp, Homo sapiens
taggttacctgcaagggaaaacctatcagagtaacagcagacttctcagcagaaaccttacaagctagaaggggcttggagtcctatctttagccttcttaaacaaaataatggtcagccaagrattttgtagcctgcaaaactaagctttataaataaaggagagataagtctttttcatacaaacaaaagctaagggaattttccaataccaaaccagcaatacaagaaatgctaaatggagttccaaatcttgaaacagaagcttcatgtgcaccaaaatagaacttcctgaaagcataatactcacagggcctatgaaacaataacacaatgaaaaaataaagtatctaggtaaaaattaacatgtgtagagcagtacctaccatctggatgttaatgttgaatgtaaatggcctaaatgcaacacttaaaagatacagaatagcagaatgaattttaaaaaccaccaaccaactatcacttgtcttcaagaaactcacataacatgaggattcatg

SEQ ID NO: 201476 - DNA, 369 bp, Homo sapiens
gggcgactattcctttgttcctgtatcaaagaccatttkactctatttgtatgtgtctatttcttggttctctatcctgttccattgatttgtttgtctctcattttgccactaccacattttgtttattactctaaacataatgctttacagtaaaccttgaaattgggtagtgtcagtccatcaactttattcttcttcaattttatattaactattttgggtcttttgctcttacacaaactttagaatcggtttgtcaatatttacaaaataacttgctggggtttttacaggccctctttaagtgccacatgaattttagaatagtttttctacttctgtgaaaaattacatgggtatcttaat

SEQ ID NO: 201477 - DNA, 521 bp, Homo sapiens
taggttacctgcaagggaaaacctatcagagtaacagcagacttctcagcagaaaccttacaagctagaaggggcttggagtcctatctttagccttcttaaacaaaataatggtcagccaagaattttgtagcctgcaaaactaagctttataaataaaggagagataagtctttttcatacaaacaaawgctaagggaattttccaataccaaaccagcaatacaagaaatgctaaatggagttccaaatcttgaaacagaagcttcatgtgcaccaaaatagaacttcctgaaagcataatactcacagggcctatgaaacaataacacaatgaaaaaataaagtatctaggtaaaaattaacatgtgtagagcagtacctaccatctggatgttaatgttgaatgtaaatggcctaaatgcaacacttaaaagatacagaatagcagaatgaattttaaaaaccaccaaccaactatcacttgtcttcaagaaactcacataacatgaggattcatg

SEQ ID NO: 201478 - DNA, 523 bp, Homo sapiens
atgagatttatacttaaaaatttagtacaaatatataaaatacaacttaccaaactgataacaatatgaatacctatgtatttatgtacatattattatggatgtgtgtgtgtgtgtgtattgcatacttcaaatctctagattttaaggaagtacttactgatttattttataatttaataattacataattttttaaagtttggcatgatrtttatctcaaaatcttaaaagaacattatatgaaaaaaactaaaaatctatcccataatcatataatatatacttatttatattatatatataattatttaaaaaccagctctatttgttaatgttattatgttggatatttatttggttttaaaagatttgtttttcattaaataacaaactaatatattaatatcagaataaagaagaatgtgtgatttactcagtggatgtggaaaaacatttgataatgttgaaaattaatccacaataaaaacttgtagcaaataaagcatggatgggaaatttc

SEQ ID NO: 201479 - DNA, 402 bp, Homo sapiens
tgagatttaataatggatgatgagtgttttagtgttaaacatattatttttatactaatattgatagtgaacaaatattaaaaataatcattagatttctctattctaataaaagctaattctagaaaaaataatttattcaactactaaaatttatttttaaatattttgatataaataattatttaacttttgttgactgttatatgaattgtctatatttctttttcttaggtggatataattcgttatgccaaaaccaattaagaaataattttctcccattagttttcaatggtattttwaatgtggtatatatagttctcatacattcttgagtaaattaggagaatatttttcaaatctttagcatggtttggcctttcaagcaagggaagaaac

SEQ ID NO: 201480 - DNA, 494 bp, Homo sapiens
ctgtgctctctctctcctgccacaatgtaagacatgcctttcttccccttcaccttccaccatgattgtaggtttcctgaggcctcttcagcaatgcatactgtgagtcaattaaaccttttttatttataaatcactcagtctcaggttatctttatattagtgtgaaaacagactaatacagagaattgggaccagaggtggggcactgctatgaagataaactgaaaatgtagaagtaactttggaattgggtaacaggaagaggttggaacagtttggagggcttagaagaagatcagaagatttggaaaagtttgaaacttcctagagacttgttgaattgctttgaccaaaatactgatagttatatggacaatgaagttcaggctgaggtgatctcaaataaagatgagaaamttattggaaactagagaaaaggttactcatgctatgctttagcaaaaagactgttggcattttacccctttcct

SEQ ID NO: 201481 - DNA, 495 bp, Homo sapiens
atcaaatacaacaaaaacaaaaataaatacattggacctaattaaattaaaaagcttctgcatagcaaaagaagtaattagcagagtaaacagataatccacagagacggagaaaakattcgcaaactatgcattagacaaaggactagtattcagaatatacaatgaactcaaacaaatcagcaagaaaaaaaataatcccatgaaaaaaatgggccaaggacatgaatagacatttctgaaaagaagacatacaaactaccaatacacatacaaaaaatgttcaacatcactaatcatcagcaaaatgcaaattaaaactacaatgagataccaccttactcttgcaagaatagccataatttaaaactcaataaacaatagatgttgatttggatgtggtgaaaagggaacacttttgcattgctggtgggaatgtaaatcagtacaacctctatggaaaacagtatagacattccttaaagaactaaacat

SEQ ID NO: 201482 - DNA, 495 bp, Homo sapiens
atcaaatacaacaaaaacaaaaataaatacattggacctaattaaattaaaaagcttctgcatagcaaaagaagtaattagcagagtaaacagataatccacagagacggagaaaagattcgcaaactatgcattagacaaaggactartattcagaatatacaatgaactcaaacaaatcagcaagaaaaaaaataatcccatgaaaaaaatgggccaaggacatgaatagacatttctgaaaagaagacatacaaactaccaatacacatacaaaaaatgttcaacatcactaatcatcagcaaaatgcaaattaaaactacaatgagataccaccttactcttgcaagaatagccataatttaaaactcaataaacaatagatgttgatttggatgtggtgaaaagggaacacttttgcattgctggtgggaatgtaaatcagtacaacctctatggaaaacagtatagacattccttaaagaactaaacat

SEQ ID NO: 201483 - DNA, 561 bp, Homo sapiens
aagcttgtgcatgtgtcacgtaaacttctcgtgccatggtattcagctccatcaggtcatttaaggtcttttctacaccttttcttctagttagccatttgtctaatcttttttcaagatttttagcttccttgtgatgggttcaaacatcctcctttagctcagagaagtttcttattaccgaccttctgaagcctacttctgtcagctcgtcaaagtcattctccatccagctttgttccattgctggcragaagctgcaatcctttggaggaaaagaggcactctagcttttagaattttcagcttttctgctctggtttctctctatctttgtggtttcatctagctttggtctttgatgttggtgacctacagatggagttttggtgtggatgtctcttttgttgatgttgatgctattcctttctgtttgttagttttccttctaacagtcaggtccctcagctgcaggtctgttggagtttgctggaggtccactccagaccctgtttgcctgggtatcaccagtggaggctgcagaacagcaaatagcagaac

SEQ ID NO: 201484 - DNA, 561 bp, Homo sapiens
aagcttgtgcatgtgtcacgtaaacttctcgtgccatggtattcagctccatcaggtcatttaaggtcttttctacaccttttcttctagttagccatttgtctaatcttttttcaagatttttagcttccttgtgatgggttcaaacatcctcctttagctcagagaagtttcttattaccgaccttctgaagcctacttctgtcagctcgtcaaagtcattctccatccagctttgttccattgctggcaagaagctgcaatcctttggaggaaaagaggcactctagcttttagaattttcagcttttctgctctggtttctctctatctttgtggtttcatctagctttggtctttgatgttggtgacctacagatggagttttggtgtggatgtcycttttgttgatgttgatgctattcctttctgtttgttagttttccttctaacagtcaggtccctcagctgcaggtctgttggagtttgctggaggtccactccagaccctgtttgcctgggtatcaccagtggaggctgcagaacagcaaatagcagaac

SEQ ID NO: 201485 - DNA, 565 bp, Homo sapiens
taagcagcttgctgctgctccagaggacctgtgttatagcagacagaggctgacacatctcagaagactcctttttgaaggaaagaaaaaagagaagaattgagtatgtgtccaatattataatttgttagggggctgcttgacggactagtttttgtcttgtcaaacttagaatgttgatggagtctggcacactccacaagcctggaactctctgagagcaaaggagaactgagcattttccagcatattcagagaatctgcagtactacagacagacacaccagagaaagcaaaaaaattataagctcctgagaaaaagaaactggyaaaaccctctacttggaatttacgagcacaagttgagaaaaaatacattcacagaaaaaatttgagaagctctcagaatcttgagccaggctaataggtgaaggtatttcagttttgaagttagtttgtagcactgggagaagtgttttttgtttgtttgtttgtcttttgtttttttcttaaatgtgtagtgtccaacacaaaacacacaaagaaataaggaaaaattactcaa

SEQ ID NO: 201486 - DNA, 565 bp, Homo sapiens
taagcagcttgctgctgctccagaggacctgtgttatagcagacagaggctgacacatctcagaagactcctttttgaaggaaagaaaaaagagaagaattgagtatgtgtccaatattataatttgttagggggctgcttgacggactagtttttgtcttgtcaaacttagaatgttgatggagtctggcacactccacaagcctggaactctctgagagcaaaggagaactgagcattttccagcatattcagagaatctgcagtactacagacagacacaccagagaaagcaaaaaaattataagctcctgagaaaaagaaactggcaaaaccctctacttggaatttacgagcacaagttgagaaaaaatacattcacagaaaaaatttgagaagctctcagaatcttgagccaggctaataggtgaaggtatttcagttttgaagttagtttgtagcactgggagaartgttttttgtttgtttgtttgtcttttgtttttttcttaaatgtgtagtgtccaacacaaaacacacaaagaaataaggaaaaattactcaa

SEQ ID NO: 201487 - DNA, 480 bp, Homo sapiens
atctaacatgtaaatggaccctctgcaaaaatagtgattttttttgctagtcatatggtagaataaaaaattaaacattagaaatcttagagaatctacattcattggcaatgtaatactatttttaaataaatacttatctaagtcttattctgagctgctaaggatatgcacgtgtgtgtgggtatgttagaaaatatacagtaaaatattttccttaaatctacagtaaaactttgttgttaaattaactaggatatattttttgaaattcatatgctaggcagacattccagatgaaatacagagaattgttaaaaacccaaattgttagatgatctctcacctttttgaggttagaaagggtacttcctattttgaattttattatgtagcattggggacatggataaattatttaattttattgagtctgaatttttcackataaaatgaagatgtttcagtaatttctgtaat

SEQ ID NO: 201488 - DNA, 362 bp, Homo sapiens
catctcaaaaaaaaaaaaaagaaaaattataatatacttacaatgatggaaattacatcataaatatacagtttggtgaattctcatagattgatcatatatgtgtatccaccaccaaggtacagaaatagaatattacmagcaccccagaaactatccttatgtcctccttggttggtactccctattctctccagagacaactgctcacttaaaacactatggaatagctttgcccgatgttgaactatgtataagtggggtaatacatatgtgttctattgtgcttggtttctttcacttgacagtatatttatgacatccatccatgttgtgtgtagtaaaaaatgttccttcttttt

SEQ ID NO: 201489 - DNA, 524 bp, Homo sapiens
ttggacaaactctttccagaatgaattgataaacttgatgttatcactggggcaagcaggagtagaaggcttggaaagtgctgatctgcttctcagactgctggagggtcactgtttgtttgatctttaggtcctcaatgtatgttaggtagaagccaggctactaagtatccactgcaacagtgtgtcataaaccccttctggggagaaacaaggagctgttttttcaagccccttctctgcactactgctggaggatagagcccctagaagtgcttgcacatgtatacaaaaccactcattttttttttcttgtggacaagwtagacttttacatggttaatctccttcactcccagagttagtgaattaagaaccaaattaaaaggaaccttagagtgagggcattacatgtgaggtccaagccctcttctccacaggcagagctgagtgtttgggatttctctcctgtctacgtggtgcagtatctgaacagggcctgtacctgggtgtgcctctgcttt

SEQ ID NO: 201490 - DNA, 547 bp, Homo sapiens
cccacaaagatgagaaagaatcaaagcaaaaacaattaaaactcaaaaagccagaatgctttattttcctccaagtgacagcaacgcctctccagcaagagctcagaactgggctgtgtctgagatggctgaaatgacaaaagtgggcttcagaatgtggataataacaaacttcaatgagctataagtgcacgytgtaacctaaggcaaagaagataagaatgatgataaaacaatacaggagctgacagtcaaaatagccagtttaaagagaaacaaaactgacctgttagagttgaaaaacacattacaagaagttcacaatgcaatcacaagtattagtagaagtatagaccaagcagaagaaagaatctcagaactggatcactggctttctgaattaagacaggcagacaagaagagagaaaaaagaatgaaaaggcaagaacagaacctctgagaaatatggtattatgtaaagagactgaatctacaactaattggggtacctgaaacagacagggagaatggaatcaagttggaaaac

SEQ ID NO: 201491 - DNA, 547 bp, Homo sapiens
cccacaaagatgagaaagaatcaaagcaaaaacaattaaaactcaaaaagccagaatgctttattttcctccaagtgacagcaacgcctctccagcaagagctcagaactgggctgtgtctgagatggctgaaatgacaaaagtgggcttcagaatgtggataataacaaacttcaatgagctataagtgcacgttgtaacctaaggcaaagaagataagaatgaygataaaacaatacaggagctgacagtcaaaatagccagtttaaagagaaacaaaactgacctgttagagttgaaaaacacattacaagaagttcacaatgcaatcacaagtattagtagaagtatagaccaagcagaagaaagaatctcagaactggatcactggctttctgaattaagacaggcagacaagaagagagaaaaaagaatgaaaaggcaagaacagaacctctgagaaatatggtattatgtaaagagactgaatctacaactaattggggtacctgaaacagacagggagaatggaatcaagttggaaaac

SEQ ID NO: 201492 - DNA, 547 bp, Homo sapiens
cccacaaagatgagaaagaatcaaagcaaaaacaattaaaactcaaaaagccagaatgctttattttcctccaagtgacagcaacgcctctccagcaagagctcagaactgggctgtgtctgagatggctgaaatgacaaaagtgggcttcagaatgtggataataacaaacttcaatgagctataagtgcacgttgtaacctaaggcaaagaagataagaatgatgataaaacaatacaggagctgacagtcaaaatagccagtttaaagagaaacawaactgacctgttagagttgaaaaacacattacaagaagttcacaatgcaatcacaagtattagtagaagtatagaccaagcagaagaaagaatctcagaactggatcactggctttctgaattaagacaggcagacaagaagagagaaaaaagaatgaaaaggcaagaacagaacctctgagaaatatggtattatgtaaagagactgaatctacaactaattggggtacctgaaacagacagggagaatggaatcaagttggaaaac

SEQ ID NO: 201493 - DNA, 547 bp, Homo sapiens
cccacaaagatgagaaagaatcaaagcaaaaacaattaaaactcaaaaagccagaatgctttattttcctccaagtgacagcaacgcctctccagcaagagctcagaactgggctgtgtctgagatggctgaaatgacaaaagtgggcttcagaatgtggataataacaaacttcaatgagctataagtgcacgttgtaacctaaggcaaagaagataagaatgatgataaaacaatacaggagctgacagtcaaaatagccagtttaaagagaaacaaaactgacctgttagagttgaaaaacacattacaagaagttcacaatgcaatcacaagtattagtagaagtatagaccragcagaagaaagaatctcagaactggatcactggctttctgaattaagacaggcagacaagaagagagaaaaaagaatgaaaaggcaagaacagaacctctgagaaatatggtattatgtaaagagactgaatctacaactaattggggtacctgaaacagacagggagaatggaatcaagttggaaaac

SEQ ID NO: 201494 - DNA, 590 bp, Homo sapiens
agtccaatgacaatttcgggaaacatgaggagacatggtgctcttgtggtggcctgtattggaatctggtttgcccctcaagtgaatagtgttgatttgaaaacttctaatattctttcttttaggagatcttcttgatagttgcagaaattctgactggaatagattaatgtcttgctatttggcttgtawagtagcagcataaaattccacttcttcttaactgaagaaagcatttaatttaagcacaagaagatgactcaaactgagccactgcaaagcaggtgaagggctcaaaacattatagtggtttctcaatttgagtcatattttcattctcttgaatcaaagggtcacttaacaaacatgatttaattatatacgtcttgcctgatttttagtcacagagaaattccgagatgaaaactctggaaaggtgtcattaactcaaggaagacaagggcagagttaggctagcaactagacactctgtgtacagtttcatatacaagcaagactttcctttaatattgataaagaattgagtatcatgtatgcattcccttttatgatatacaattaattgtaag

SEQ ID NO: 201495 - DNA, 595 bp, Homo sapiens
ataaaagttctacatgattgaatgcatgaaaccctcttaacataatgcttaggacatgttagcttaaacatgagagatgtttgttagaataccaaggcaacataggtgggatctgaattcttgactctgtgtgaggggagataacggaggtggatgatacaggtctgggagagcaccctcccctgttttgctccgtcctggacttcccgatgcccaagttacacaacacatctgtaccctggggagggattgagatgaactcattaaatgcacagaggtcatcccttaactgtgcccagctgagagtattcattagggtgagggcaggcttttccattaaaggaagccattgaaggtgaggcagtagagagtacaatcaagaaagcggactccgggatcaaatgggtgctgagtgcaaatcccaattcctactgcttactggcttgagagagtaacttcgccttatgggcctcagttttctcatctgtaaaatgaagttaaaaagcacattcttcctcatagggcagtggtgaggactaaaggaggcgatgagaagagagtccccacaaggagyctggcacagaggaagtttcga

SEQ ID NO: 201496 - DNA, 605 bp, Homo sapiens
aaaggtcatgggaattaaggatgggacaagagaaaggaaagtgaggcacttgcttcaagtgcaaaatgcaagagagcacccaaaatctcaataatcacaataaatgatattttaaacagcattttaaaatataaaaattagtgcaaaataatcattatgaaaaacatatcagaattttagataaagacaaagtcagcattactgacttttccttttgcttcggcctccaatatggctcagcacagccctgatagaaaatattttgaaattttgcttgtatgaaatgtctctattctattctttcatttagctgggaattgaattctaggtcaaaaataattttccttcataattttggaggcaatgttccatcatcttctcacttccagtgttactttctgagaagtcttcaatcactataattgctgaccatttttgtacgtgacctggttttgctgtttggaacctcatagaatcttttctttatcaccagtattcttgtactttgcagtaattgtttkgtggagctttttgtttgtttgtttgttttttaatctatggacctgattctcaaggattctttcattctggagacttatgccctt

SEQ ID NO: 201497 - DNA, 605 bp, Homo sapiens
aaaggtcatgggaattaaggatgggacaagagaaaggaaagtgaggcacttgcttcaagtgcaaaatgcaagagagcacccaaaatctcaataatcacaataaatgatattttaaacagcattttaaaatataaaaattagtgcaaaataatcattatgaaaaacatatcagaattttagataaagacaaagtcagcattactgacttttccttttgcttcggcctccaatatggctcagcacagccctgatagaaaatattttgaaattttgcttgtatgaaatgtctctattctattctttcatttagctgggaattgaattctaggtcaaaaataattttccttcataattttggaggcaatgttccatcatcttctcacttccagtgttactttctgagaagtcttcaatcactataattgctgaccatttttgtacgtgacctggttttgctgtttggaacctcatagaatcttttctttatcaccagtattcttgtactttgcagtaattgttttgtggagctttttgtttgtttgtttgttttttaatctatrgacctgattctcaaggattctttcattctggagacttatgccctt

SEQ ID NO: 201498 - DNA, 488 bp, Homo sapiens
cctcatctaaaaataagaatcatattaatgcccacttcgcagggatgatatggcaatcaaatgagaaaatgtatttatgatacctagttcagtgcctggcataggtaagtgctcaatgaaygttcattgatattatcatcatcactcccattggaatttataacctggggctatacgatctctataggtccttacagcatgaatggaatatgaatgggtgattctctatacaaaagttgctgccaatccagatattattttagtcttttgatctcaaggtagagttgaggcttagacaataaaaattataattatctcttgttgccatttataagcaagaggactatgccttttacagagaggtttcttcacgtgatgtcagccatttggaactttcatgccctgttacagataacaggtaacatttatggagcattttctctatgccaaataacctgagtctttatatgtggaattgtataatgcca

SEQ ID NO: 201499 - DNA, 488 bp, Homo sapiens
cctcatctaaaaataagaatcatattaatgcccacttcgcagggatgatatggcaatcaaatgagaaaatgtatttatgatacctagttcagtgcctggcataggtaagtgctcaatgaacgttcattgatattatcatcatcactcccattggaatttataacctggggctataygatctctataggtccttacagcatgaatggaatatgaatgggtgattctctatacaaaagttgctgccaatccagatattattttagtcttttgatctcaaggtagagttgaggcttagacaataaaaattataattatctcttgttgccatttataagcaagaggactatgccttttacagagaggtttcttcacgtgatgtcagccatttggaactttcatgccctgttacagataacaggtaacatttatggagcattttctctatgccaaataacctgagtctttatatgtggaattgtataatgcca

SEQ ID NO: 201500 - DNA, 488 bp, Homo sapiens
cctcatctaaaaataagaatcatattaatgcccacttcgcagggatgatatggcaatcaaatgagaaaatgtatttatgatacctagttcagtgcctggcataggtaagtgctcaatgaacgttcattgatattatcatcatcactcccattggaatttataacctggggctatacgatctctataggtccttacagcatgaatggaatatgaatgggtgattctctatacaaaagttgctgccaatccagatattattttagtcttttgatctcaargtagagttgaggcttagacaataaaaattataattatctcttgttgccatttataagcaagaggactatgccttttacagagaggtttcttcacgtgatgtcagccatttggaactttcatgccctgttacagataacaggtaacatttatggagcattttctctatgccaaataacctgagtctttatatgtggaattgtataatgcca

SEQ ID NO: 201501 - DNA, 556 bp, Homo sapiens
gaaaaaaaaaaaaaaaaaaaaacgawtaaaattgaaagacccacacttcctgatttcaaacttactacaacgacagtaatcaaggcagtgtgatactggtataatgctggacatatagatctagagggaaatttatagctataaatgcctatattacaaaagaaaaaaacattatattttgcatttctcaaaacccatagaactacacaacacagaatgagccctaatgtaaactatggatgttagttaataataatatatcaacattggcttatcaattgtaacaaatgtaccactctaatgcaagatgttaataactcaataaaatgctagcaaacttaatccaacaatatataaaaaggattatacaccatgaccaagtggtatttatcccaggaatgttaaggttgatactgcatatgaaaatcattaatggaataaaattcaaagtccagaaatagacccttgtatttatgatcaagtgatttttgatgagggtgccaagacctttcaatgggggaaagaatagtcttttcaacaaatgatgccgagacaa

SEQ ID NO: 201502 - DNA, 549 bp, Homo sapiens
tctgtgggccctgattgcaggcccctccctgtgtgatgagggatgagtcagcttggggagccacttggccagcctgcatgcctggtcatcaggaggttgagaaaagccttgaaagttgtgaagcactgagcagatacaagtgtttgttaattttgtagaaattaactttcccatctggcctttatctccaaagttggtattgttgctccacgcagactgcagtccggtttcttattgtgactttgacaatgcaaagtgcaaaataggaagaggcctccccaccccactatcccaccctggtgaccaattcagtgtaaccwttgcacgtactcagtcattggtgtctttggagtgacatctgcagccagttagtgccacctgagtacagcactcgtacttttacatgatgtgtgtgtgagtagctcttctgtccaaaccatgatttgaggttcaactacctgtagatcaaagctttattttagaacgataaactgattttttccaaatgggtgaaatcttctccccatgactatgttttcttaactttgc

SEQ ID NO: 201503 - DNA, 549 bp, Homo sapiens
tctgtgggccctgattgcaggcccctccctgtgtgatgagggatgagtcagcttggggagccacttggccagcctgcatgcctggtcatcaggaggttgagaaaagccttgaaagttgtgaagcactgagcagatacaagtgtttgttaattttgtagaaattaactttcccatctggcctttatctccaaagttggtattgttgctccacgcagactgcagtccggtttcttattgtgactttgacaatgcaaagtgcaaaataggaagaggcctccccaccccactatcccaccctggtgaccaattcagtgtaacctttgcaygtactcagtcattggtgtctttggagtgacatctgcagccagttagtgccacctgagtacagcactcgtacttttacatgatgtgtgtgtgagtagctcttctgtccaaaccatgatttgaggttcaactacctgtagatcaaagctttattttagaacgataaactgattttttccaaatgggtgaaatcttctccccatgactatgttttcttaactttgc

SEQ ID NO: 201504 - DNA, 509 bp, Homo sapiens
ttctccttagtcctgctccttcttggcatagatgcctgatctccaagtccatgagtctgtctttagtcctcctcctccctgggcatagactccacatctctaartccatgggtccctccctagtctttctccttgaacatgcacaacacttgagggctctctctttagctcccctacttgacttccatttccctgctttctgctggcctcccacctctatgactaccttctctggcccttcaccagcttcagctcctttccgggccacctaagtatggctgcttggaaaggttctgccgctggggatcctgtctctccacacccccttggtgctgatctgccctcctctggaagatgattcttagatatggggctgtagcaccccgattcttctcctgaactccagatttcaatgtccagtggcctgctggagatctcttggatctcaacttgtcctccattcttaagagactatccccccttgctgccagaggcttaccgtgttactc

SEQ ID NO: 201505 - DNA, 579 bp, Homo sapiens
gaagcttgggtgtcgccttggagtcctggtgtatttctattgttgtgaagtgctctcagtgttgaatgggcacccgactgcaacctcatgaagcccagagctgcagaaagagggactgtggacatctggcttcttcattattgtcatgctgccccttggggtggctgcctttaagggaagagggagttkaaaaagaacaaagggagatatgtaccaagggtgtttgtcctcatcagtatgtgagttcgtggaaggagttcttgctgcctgctgaacagtgaaaatattctcttgatggacacctttagcttggattgacaggtgataaatatatatcccaagatttctacgttgagcctaatgcaagcagctggtgaaatataccagcacatcctcaatctttccctgattgtgtctgcataaagtttagaaataaataatgtgtgtattagttcattcttgcactgatgctataaagaaatacctgagactggtaacttataaagaaaggaggtttaattggctcacggttccacaggctgtacagggagcatagccagggaggcctcaggaaagcta

SEQ ID NO: 201506 - DNA, 408 bp, Homo sapiens
ggggacaaaaatatttttatatttacttttatttttatttttaacccaaaatgctacaattctaagccctttacataagtctatcattgcttagatttctctaaacgtagcacggcataatgaaaagagcagagattccagcttttggaccaacctagaactctggctgtacctttatattaatattagctgtgtgactttagacaagttatttgatccattgagactcargttctacatcttcagatggaggtaatgacgcttaatttacaggactgttctaagggttaaatgagataaatccagcacatattaggccattaagaacttctagttcacttacttctttttgagaaaatgtctaaactttatccacatgttacataaatttttcagactataattaaa

SEQ ID NO: 201507 - DNA, 388 bp, Homo sapiens
attcataagtgtgatagactttactgaggatgggttgaggtggttagggacaaaagcgagtgtcatatcacagcagcaagaagattttcaaattccacatcaggcatccctagtcttatatggtggaatttmtaatggttgcttcattgcatgtggatctcagctttatttcatctgctaattcctccaatctcttttcttaatctttcctttcctctcttctgtatcctccctcttgggaacacagagcatcttctccttggttcaagcagggcactatttttttgttgttgtcttgacttacgcctttgtaaattttaccttcttctcttagtaacttaacaaaatgttttttccaaacaatggcatttttccctgagaagaattc

SEQ ID NO: 201508 - DNA, 440 bp, Homo sapiens
gaattcagcctctctgatgacaaagttagtgtattacagcttaaaggagttacaragacagaagctgtcttctctggagggccagccagtttttatggtagcatggggatttgagctgaactctgaaggctggaaagactaagatcagtggaaagatggaaggagaacatttacagtggagagaagtctgtgagcaagagctggaaggctagtgtggccaacgcctccagagaacagaagcgagacttaccctcagcctcctgtgcagcacttctcccagccctgctgggtcttctcaaatccggagctggggagcctctaccacggctccatccagctgctttgggagtcacactcatgcctctctattgcaccaacatggaaggacaggcatcctctccggaaacccacaaatacttccaaaaaaccaaagttaaaaa

SEQ ID NO: 201509 - DNA, 334 bp, Homo sapiens
tgtcttcatataatttattttttgagccttccagcatctgtgaagaagctaggacaaataaaatstataaggcattgttattattattgttgccatttaacagagaaggaaattaaggctcagtggagcaaaaacttggcgggcttacataacaagtcaggattgaaaccagcactaaaaccctgggttcctgacccttagtctagtaaataactaaatacagaaaatccaatctgtgtttttgtaaaaaatgatactgaaactttataacacagtgcccctcctccttttccaaaaggcctgctttaatttctgagtggattccaagctgatg

SEQ ID NO: 201510 - DNA, 609 bp, Homo sapiens
tattacttttaacttttttatttcaatagctttaggtgtataagtggttttggctacatatatgaatagtctggtgaaagctgggcttttcatgtmcctgtcacccgaatagcatgcccaattattgtgcccaagagaaagtttttattaatataattttcccaaagtcactcggtagataagcaaatgatggaggtggggttagaggccaatttctctgactccaaactcatagtcttcaatacaacattctcctgcatggcagaagatgagatgagctggctcactggtgactatcaaggctgtgggagattgccaagtccagagaagatggggagggtgggaagagagccaagccctccaacacctggcaagtgcctccctcctagctgagcaccagcaaaagttcttttgctaagaacacatgcccaagccagagggttgaacttatcatatcgaggtcatcttgatcccctctgtttatcttctctcttaggcacttcctgagcaaacttgcttacttacccaatatagcctcatgtacttttgaaccgatcacctccctcccaaatccctagatgctctttgccagtctcccagattggcttt

SEQ ID NO: 201511 - DNA, 609 bp, Homo sapiens
tattacttttaacttttttatttcaatagctttaggtgtataagtggttttggctacatatatgaatagtctggtgaaagctgggcttttcatgtccctgtcacccgaatagcatgcccaattattgtgcccaagagaaagtttttattaatataattttcccaaagtcactcggtagataagcaaatgatggaggtggggttagaggccaatttctctkactccaaactcatagtcttcaatacaacattctcctgcatggcagaagatgagatgagctggctcactggtgactatcaaggctgtgggagattgccaagtccagagaagatggggagggtgggaagagagccaagccctccaacacctggcaagtgcctccctcctagctgagcaccagcaaaagttcttttgctaagaacacatgcccaagccagagggttgaacttatcatatcgaggtcatcttgatcccctctgtttatcttctctcttaggcacttcctgagcaaacttgcttacttacccaatatagcctcatgtacttttgaaccgatcacctccctcccaaatccctagatgctctttgccagtctcccagattggcttt

SEQ ID NO: 201512 - DNA, 558 bp, Homo sapiens
gaattcttgtttagcttgaaacatcttgtgtaaagatgttctcaaagaatggaaacatgattagaacatgtaaggaacaggagccaagttaaagggtctcccatttgaaaaattgagaagaatttaagcatcaaaatagagtaactgtaccccattaaataccataagaagccatgagtccacacaaactggaaaatataaatacatacataaatacatayatacataaaaataaagaggagatggtaaagctcttccttatattagaaggctaacaaatgcagaaggaatgatggagttgttaacaaatcaccactttgcaaccaccagaggtataacataagccaaggattatcaatagaagctaaaaagtagtgagtgtactgtttcaacaaaaacaggatatttacatagtttcaaactatcttaccacaaattactcattagttacataggaaaaaattagttactttacagtagagaaatttggcagacaacacttaaagcaattgattaaattaacgagacagttatcacgaacctcctctgataactgaa

SEQ ID NO: 201513 - DNA, 322 bp, Homo sapiens
acctagaaaccaattaacaatatgatgacagtatgaaatttgcacatatccatattaaccttgaaggtaaagggsctaaatcccccacttaaaaggcacagagtgaaaatctgaataaagaaacaggagtgatgtatgctgtcttcaagagacccatttcacacgtgatggcacccataggctgaaagtaaaggcacacagaataatctaaaaagcaaacagaaaacaaaggacagcagaagtctctatcctaatttcagaccaaacagactttaaatcaacaataataaataaggacaaagaagggcattacataatgata

SEQ ID NO: 201514 - DNA, 322 bp, Homo sapiens
acctagaaaccaattaacaatatgatgacagtatgaaatttgcacatatccatattaaccttgaaggtaaagggcctaaatsccccacttaaaaggcacagagtgaaaatctgaataaagaaacaggagtgatgtatgctgtcttcaagagacccatttcacacgtgatggcacccataggctgaaagtaaaggcacacagaataatctaaaaagcaaacagaaaacaaaggacagcagaagtctctatcctaatttcagaccaaacagactttaaatcaacaataataaataaggacaaagaagggcattacataatgata

SEQ ID NO: 201515 - DNA, 600 bp, Homo sapiens
aataagttataccgtatagtctaggtgtgtagtagggtatactatctaggtttgtgtaagtacacttgatattcacccaatggtagaatcacctaacaatgcatttccagaatacgtcctcattgataagcaatacatgactgtatccagatactggctaaaacaaatcaggaatatgaatagaaatggaacatttatactcatatatgagttgaaaacttttatgttttcaactatttgaaatataaatgcatatggacaaggacaagattatatcttgggaaaaggaagttgttaagttagagataatgtttttaatttccacaaatggtttaattttatgtttttttaracaataaaacaaacaagaatacctgaaagataaataagaaaaactgaagtttaaataaattaatttttagaggaaaaaaatcacctatataaaattcacttgtataagtgagaaggcagaaagacaactgaatatttctcaataaaatgtgatgcctgtttgtcatgaactgtaagagcataaatatgaaaaatcaaaaggttgtcttagtatatgtcataatttcttaaaggaatacttagaaaaat

SEQ ID NO: 201516 - DNA, 591 bp, Homo sapiens
ccctttctttttttcctcaaggaaggacttccagagttagcaaagagagacaaagaacaactcttacagccatgtgttaaagtgccttagggcacattacagagatgagccattatctgtgtgtgtgtgtgtgtgtgtactgggggaaccagcccccaatatttcaatgtaggttctttctattttccctaagtgtcgactggtctgagacataaagagaaagagtacaaagagaggaattttacagctgggccgcctggggtgacatcacatatcggtaggacygtgatgtcccctgagctgtaaaaccagcaagtttttattagggatttcaaaagcggagggggtgtacgaacagggagtaggtcacaaggatcacatgcttcaaagggcaagaaaggagaacaaagttcatatgcttctgaggccagtaaagaccacaaggcaaagggcaaagcaagatcacaaggaaaaagggcaaaattagaattactgatgagggtctatgtttggctgtgcacgtactatcttgataaacatcttaaacaacagaaaacagggttcaagagcagagaaacggtctgacctcaa

SEQ ID NO: 201517 - DNA, 561 bp, Homo sapiens
cgccctgcgcagatgcatgggagattaagatgcagtcatggccttcagtgaaacatctctccagtgagacaaagacaccaataggcatggctccctccatggcaacctgtgataggtacaagggagagacctgacaacatgcaatgaagtacagaggagaaagaacacgtttacatctgcgggagaaactagggacagtttcatcaagaaagtggtgtctgaacttaaccttgaaagaaagtgaatattttcacatcctttggattacaagaaggaagtcgcaactcaaataggcttcaataaagaaaaaaatttatttcacatggcaagaagaccagagacagagaagactctttgctcagcagaattcacttcatgagtcaggtgctctccattttctccctcattcttggtgacactttcctctttagtttggtagtagtagctccggtatcacatccagatatagccaagtccaaataaagaaargggagagtcactttcattggaaagataaagtccttagcagcagatttcctttgcatcttattggcctggatt

SEQ ID NO: 201518 - DNA, 572 bp, Homo sapiens
gttccccttttgccttttcagttccctgacacctatttaactaattcctcatatgtaatttgcactgtgaaaatagctagcatggtttatttctgacaaaggcccctgattgaaaaccatctcattccgaattaagagtctaaatccataacataccttataagatcccatgcaatgtggaccctggctatttctctgcccttgtttcttgtatctgcccaaatattgccccagtaaacacttttcctgacaatgtatacaaaattattatttctcccaacccctgcaatctttycccatgctcccttttctctgcagcattcctccccatctggtatactctatatcgttacccgtcttccccattacaatatgagttccatgaaaaaagttttgttcactgctgtgttcctagggtccagagcaggctctggcacacagtaggtgctgacttttgaaagaaagactaactgtagaaaaaatcctagaagcagccctaccattgtgtccatttacctgaattataaccaatctttaatttttaaaggctgtgtatttattgcctcgctttg

SEQ ID NO: 201519 - DNA, 562 bp, Homo sapiens
ccgtatttactattctggcattgaattccttatttatttctggtatctggagatttctctttctttcttttgtgtttttcctactatgtctgttgttgttgttgttgttgttctgttttattctattaaatgtttataaagcgttcttggaatgacagggagagtccatgccagctcagtctgtcatattatcagaaattctggtctgattttttttgtatttctaagccatataggaataaattctcaagtaaagtaatttcaagttataaatttttwaataaaatttgaccataggaagaaaatggacttgagtattacagttcctatgactatcattgttattgccaatcaattatttggcattctggttttgaaacaagtctcataaattttttctaaagaagaagatcagctctgagagtgcacataacatcaaagcttgccagtcttggggctagatgctggattttgataaaatttcctaatgttataaatgctaccttatgtagcttggagacacagcctgactataggaaattttctctagtaatcagaactc

SEQ ID NO: 201520 - DNA, 552 bp, Homo sapiens
tgctcagcattcattacctttatttctaaaggtttactttcttagataatacaattgttgttgtgggaagtcagggactctgaatggagggaccggctgaagccatggcagaagaacataaattgtgaagatttcatggacatttattagttctccaaattaatatttttataatttcttatgcctgtytttactgcaatctctgaacataaattgtgaagatttcatggacacttatcacttccccagtcaatacccttgtgatttcctatgcctgtctttaccttaatctcttaatcccgtcattttcataagatgaggaggatgtatgtcacctcaggaccctgtgataattgcgttaactgcacaaattgtttgtagagcatgtgtgttggaaaatatgaaatctgggcaccttgaaaaaagaacaggacaacagcaatgttcagggaacaagagagataaccttaaactctgatcaccggtgagctgggcggaacagagccatatttctcttctttcaaaagcaaatgggagaaatatcgctgaatt

SEQ ID NO: 201521 - DNA, 576 bp, Homo sapiens
accatttaactcgtaaaattgtcacgtggtttaaagctatgtacctgtaaagtgctttggaacagtccctggcaaatagtccttggcctacaataactaatagctattactacatttttattcttatgtccagagtttgggtaatccagtggagaagtaaaagcargatggaatggaagagactatgaaaaaggcatgaatttgggggatacttcaaagttctgagagtatgttgtagcatcactatattactcatagtcccattgaataacagactaaatcacaggatctcttcatttccaaaatgtcccagctctctgttcacaagagttgtccatggaaacatgaaacacctcttaggctttataattaagaaactcccaggtttcataaataaaacttcaaggacagactactacatatttaaaaggattgctaaagtaaaaaagacagacaatgccaagcgttggagaaagtgtgaggcaaatggaactcacatacacaaacaggggttacataaactcctaaaaatcacttcagaaaactggctggccatatctgagagagctgagcata

SEQ ID NO: 201522 - DNA, 456 bp, Homo sapiens
tgtctctttttgctacaatgtggaactctgcccgagataactgaaaacccagtggcattttcacctgtagttcagagtgatttctgattcaagaaagatttgtgaaatgtgctagactgctctcccaggaggataaaatcctgtatttactcattacactggttgtgtgactgtcacttatgctaacatagtcttgaaaatagacaccagaaaattcacagctttttgtatactgattttcttccattgggcctctattctcttttgccagtctcctcactttaggaaacactagaaaacaattcggcagggaatttcctgttttaagatggtaaactaaaatacattcctacctccttctcctcttgaaaattacccagaaacgaacaaaggaaaataaaaattggaaacacaaatyccatctttcataaagtcaagagatttctgaaaccccaa

SEQ ID NO: 201523 - DNA, 350 bp, Homo sapiens
aaattttagggttttttttttcactttgttattgctttatagrccctataagttttatactttcaagacgtctattctgatgcagctcaaccttttgtttcaagatttagcatttcttgtaggactggtctgatagggacagattccctcagcatttgcttgtctgaggaagacattatttctctttcatttatgagactcagttttgctggatacaaaatttttgactaatagttattttgtctaaggatattaaagataagcctaaagatagagtgaacttctggcctgtaagatttctgctgagaagtctgctgttagtctaataggttttcctttataggttactt

SEQ ID NO: 201524 - DNA, 350 bp, Homo sapiens
aaattttagggttttttttttcactttgttattgctttatagacyctataagttttatactttcaagacgtctattctgatgcagctcaaccttttgtttcaagatttagcatttcttgtaggactggtctgatagggacagattccctcagcatttgcttgtctgaggaagacattatttctctttcatttatgagactcagttttgctggatacaaaatttttgactaatagttattttgtctaaggatattaaagataagcctaaagatagagtgaacttctggcctgtaagatttctgctgagaagtctgctgttagtctaataggttttcctttataggttactt

SEQ ID NO: 201525 - DNA, 350 bp, Homo sapiens
aaattttagggttttttttttcactttgttattgctttatagaccctataagttttatactttcaagacgtctattctgatgcagctcaaccttttgtttcaagatttagcatttcttgtaggactggtctgatagggacagattccctcagcatttgcttgtctgaggaagacattatttctctttcatttatgagactcagttttgctggatacaaaatttttgactaatagttattttgtctaaggatattaaagataagcctaaagatagagtgaacttctggsctgtaagatttctgctgagaagtctgctgttagtctaataggttttcctttataggttactt

SEQ ID NO: 201526 - DNA, 431 bp, Homo sapiens
cattgctggggacttactgtgttctttttgaggtgttatagaaccctattttgtcctactgccagaattatttttctggtttcttctcatttgggtagagtatatctcctaattacttttgagactatatcttctaattatttttgaatttattttttkatttgagtgtgatttttcactttttttttcaccttgaggatgtgactttaatgtttatagtttattgtaacctaattcagctctgggtgctttcaggggtgaagactgtataagttccctggttatttaaaatctttgtgttttggctttctcagatgctagttgtggtaacattatgctcagcgtgtgtgtggaggttcactgtttcctgtggggtagcaatggcagaggtcttatgaagcttatctagttcccaagtggtgtacactttt

SEQ ID NO: 201527 - DNA, 443 bp, Homo sapiens
gagtcaactaattgcaggaatcttttgttatttggttgaaatgttcaaacaagtcccactctgaattctrttagaaatccatcattggcttatctctgtttctcactgtcttaaatcatgtattttataacactatgaagaacgatgttcaaaagaataagctaaatttaattaattaaattatttatttatttattttgagacagagtctcactctgtcacccaggccagagttcagttgcacgatcttggctcactgcatccttcacctcctgggctcaagagatcctcctgaagcagggcatttccctgaccccttcatgggactcgtgacaggggtgccccatttactcagcccactgctctcaactcctcgagggagggaatgcacaactgaacaaggcaggaactggagtacatgagtgctggaaccagtggcctct

SEQ ID NO: 201528 - DNA, 443 bp, Homo sapiens
gagtcaactaattgcaggaatcttttgttatttggttgaaatgttcaaacaagtcccactctgaattctattagaartccatcattggcttatctctgtttctcactgtcttaaatcatgtattttataacactatgaagaacgatgttcaaaagaataagctaaatttaattaattaaattatttatttatttattttgagacagagtctcactctgtcacccaggccagagttcagttgcacgatcttggctcactgcatccttcacctcctgggctcaagagatcctcctgaagcagggcatttccctgaccccttcatgggactcgtgacaggggtgccccatttactcagcccactgctctcaactcctcgagggagggaatgcacaactgaacaaggcaggaactggagtacatgagtgctggaaccagtggcctct

SEQ ID NO: 201529 - DNA, 443 bp, Homo sapiens
gagtcaactaattgcaggaatcttttgttatttggttgaaatgttcaaacaagtcccactctgaattctattagaaatccatcattggcttatctctktttctcactgtcttaaatcatgtattttataacactatgaagaacgatgttcaaaagaataagctaaatttaattaattaaattatttatttatttattttgagacagagtctcactctgtcacccaggccagagttcagttgcacgatcttggctcactgcatccttcacctcctgggctcaagagatcctcctgaagcagggcatttccctgaccccttcatgggactcgtgacaggggtgccccatttactcagcccactgctctcaactcctcgagggagggaatgcacaactgaacaaggcaggaactggagtacatgagtgctggaaccagtggcctct

SEQ ID NO: 201530 - DNA, 443 bp, Homo sapiens
gagtcaactaattgcaggaatcttttgttatttggttgaaatgttcaaacaagtcccactctgaattctattagaaatccatcattggcttatctctgtttctcactgtcttaaatcatgtattttataacactatgaagaacgatgttcaaaagaataagctaaatttaattaattaaattatttatttatttattttgagacagagtctcactctgtcacccaggccagagttcagttgcacratcttggctcactgcatccttcacctcctgggctcaagagatcctcctgaagcagggcatttccctgaccccttcatgggactcgtgacaggggtgccccatttactcagcccactgctctcaactcctcgagggagggaatgcacaactgaacaaggcaggaactggagtacatgagtgctggaaccagtggcctct

SEQ ID NO: 201531 - DNA, 455 bp, Homo sapiens
ttgtctctgcacaagctctttttttgcctgctgccacccacataagatgtgtcttgctcctttttgccatgattgtgagtcctccccagccatgyggaactgtatgtccaataaacctttttcttttgtaagttgtctggtcgtgggtatgtctttatcagcagtgttaaaatggactaatacaatcactctatcaaatgagataatatttattcctttaccactgacaactctctctcggctcttctattcaatcatgttactgatagatgctttgctttttgtttttgttgtttaacctgattgttatagcttattttatgaatttctgttcttcttttaattttacaacaattttactatttctccttacatgtttataagtcatacggagactccttctcatctaccctgaccccagaatattaaaacttttcagagtttctggattaatt

SEQ ID NO: 201532 - DNA, 455 bp, Homo sapiens
ttgtctctgcacaagctctttttttgcctgctgccacccacataagatgtgtcttgctcctttttgccatgattgtgagtcctccccagccatgcggaactgtatgtccaataaacctttttcttttgtaagttgtcyggtcgtgggtatgtctttatcagcagtgttaaaatggactaatacaatcactctatcaaatgagataatatttattcctttaccactgacaactctctctcggctcttctattcaatcatgttactgatagatgctttgctttttgtttttgttgtttaacctgattgttatagcttattttatgaatttctgttcttcttttaattttacaacaattttactatttctccttacatgtttataagtcatacggagactccttctcatctaccctgaccccagaatattaaaacttttcagagtttctggattaatt

SEQ ID NO: 201533 - DNA, 455 bp, Homo sapiens
ttgtctctgcacaagctctttttttgcctgctgccacccacataagatgtgtcttgctcctttttgccatgattgtgagtcctccccagccatgcggaactgtatgtccaataaacctttttcttttgtaagttgtctrgtcgtgggtatgtctttatcagcagtgttaaaatggactaatacaatcactctatcaaatgagataatatttattcctttaccactgacaactctctctcggctcttctattcaatcatgttactgatagatgctttgctttttgtttttgttgtttaacctgattgttatagcttattttatgaatttctgttcttcttttaattttacaacaattttactatttctccttacatgtttataagtcatacggagactccttctcatctaccctgaccccagaatattaaaacttttcagagtttctggattaatt

SEQ ID NO: 201534 - DNA, 522 bp, Homo sapiens
ggattgtctctgcacaagctctttttttgcctgctgccacccacataagatgtgtcttgctcctttttgccatgattgtgagtcctccccagccatgcggaactgtatgtccaataaacctttttcttttgtaagttgtctggtcgtgggtatgtctttatcagcagtgttaaaatggactaatacaatcactctatcaaatgagataatatttattcctttaccactgacaactctctctcggctcttctattcaatcatgttactgatagaygctttgctttttgtttttgttgtttaacctgattgttatagcttattttatgaatttctgttcttcttttaattttacaacaattttactatttctccttacatgtttataagtcatacggagactccttctcatctaccctgaccccagaatattaaaacttttcagagtttctggattaattccattatatggacatgatttcttgagataggaaaaactgatttgattgtgacattagacttatc

SEQ ID NO: 201535 - DNA, 522 bp, Homo sapiens
ggattgtctctgcacaagctctttttttgcctgctgccacccacataagatgtgtcttgctcctttttgccatgattgtgagtcctccccagccatgcggaactgtatgtccaataaacctttttcttttgtaagttgtctggtcgtgggtatgtctttatcagcagtgttaaaatggactaatacaatcactctatcaaatgagataatatttattcctttaccactgacaactctctctcggctcttctattcaatcatgttactgatagatgctttgctttttgtttttgttgtttaacctgattgttatagcttattttatgaatttctgttcttcttttaattttacaacaattttactatttctccttacatgtttataagtcatayggagactccttctcatctaccctgaccccagaatattaaaacttttcagagtttctggattaattccattatatggacatgatttcttgagataggaaaaactgatttgattgtgacattagacttatc

SEQ ID NO: 201536 - DNA, 542 bp, Homo sapiens
attgtctctgcacaagctctttttttgcctgctgccacccacataagatgtgtcttgctcctttttgccatgattgtgagtcctccccagccatgcggaactgtatgtccaataaacctttttcttttgtaagttgtctggtcgtgggtatgtctttatcagcagtgttaaaatggactaatacaatcactctatcaaatgagataatatttattcctttaccactgacaactctctctcggctcttctattcaatcatgttactgatagatgctttgctttttgtttttgttgtttaacctgattgttatagcttattttatgaatttctgttcttcttttaattttacaacaattttactatttctccttacatgtttataagtcatacggagactccttctcatctaccctgaccccagaatattaaaacttttcrgagtttctggattaattccattatatggacatgatttcttgagataggaaaaactgatttgattgtgacattagacttatcggaatctaagatctcacaaaat

SEQ ID NO: 201537 - DNA, 522 bp, Homo sapiens
ggattgtctctgcacaagctctttttttgcctgctgccacccacataagatgtgtcttgctcctttttgccatgattgtgagtcctccccagccatgcggaactgtatgtccaataaacctttttcttttgtaagttgtctggtcgtgggtatgtctttatcagcagtgttaaaatggactaatacaatcactctatcaaatgagataatatttattcctttaccactgacaactctctctcggctcttctattcaatcatgttactgatagatgctttgctttttgtttttgttgtttaacctgattgttatagcttattttatgaatttctgttcttcttttaattttacaacaattttactatttctccttacatgtttataagtcatacggagactccttctcatctaccctgaccccagaatattaaaacttttcagagtttctggattaattccattatatggacatgatttcttgagataggaaaaactgattkgattgtgacattagacttatc

SEQ ID NO: 201538 - DNA, 567 bp, Homo sapiens
tatcaaatatcttaatttttatgcagatagttacatatgtggtatatgtgacattttccagggagccccataaatccacaaccttctactttgttaaccataagcaattctaaacgaccaagtacattctgctaaaagcatttctgtgatagatgatcactctcctgctagcaaaaaaacaaattgtttgtcaggagctgtcattagtatgtttatataagcaaaatgggcttccttccttctgtggatcctggcagggcatctcagtaatcagaaagaatcaaagaccctttccttcccartctgctctggccttggtcaacatcttagtgccaaatattgctggtgtattatcattattggcttacaccattttctgcagtgtttcacttaagccaactgatactctgaccttgatttgaaccatccaacagagagtaggaattccctccacaaagcacgttactcattaacatcttcctttacaagtctcttgatgttcattcacaaactcaattacctttttcctccctcaacctcaattatttgcatcattttccatgggcc

SEQ ID NO: 201539 - DNA, 567 bp, Homo sapiens
tatcaaatatcttaatttttatgcagatagttacatatgtggtatatgtgacattttccagggagccccataaatccacaaccttctactttgttaaccataagcaattctaaacgaccaagtacattctgctaaaagcatttctgtgatagatgatcactctcctgctagcaaaaaaacaaattgtttgtcaggagctgtcattagtatgtttatataagcaaaatgggcttccttccttctgtggatcctggcagggcatctcagtaatcagaaagaatcaaagaccctttccttcccagtctgctctggccttggtcaacatcttagtgccaaatattgctggtgtattatcattattggcttacaccattttctgcagtgtttcacttaagccaactratactctgaccttgatttgaaccatccaacagagagtaggaattccctccacaaagcacgttactcattaacatcttcctttacaagtctcttgatgttcattcacaaactcaattacctttttcctccctcaacctcaattatttgcatcattttccatgggcc

SEQ ID NO: 201540 - DNA, 591 bp, Homo sapiens
tccactttctacgaattccacacatgggagataaacttctttttcatccatattaccagggctgtcagggagcaacattaamggtcacagtgttcagtgaaaccttgccataacttaggctaaacacgtttttcccataattttacttcttcagcttctttctttcctttctttctttctttctttctttctttctttctttctttctttctttcttctttctttctttctttctccttttctttttctctctttctttttctctctctctttctctatctttctttctttttctttctttctttttttttttttggcagggtttcactcttgtcacctagctggactgcagtggcacaatctcggctcactgcaactttcacctcccaggttcaagcaattctcctgccttagcctcccgagtagctgggattacaagcacccaccaccatgcctggctaatttttgtatttttagtagagatggggttttgccatgttggccagtcttgtcttgaactcctgacctcaggtgatccacactcctcagcctccctaagtgctggtattacaggtgtgagccactgcgccc

SEQ ID NO: 201541 - DNA, 535 bp, Homo sapiens
ggagtaataaatctataagtaataaagctccaaaaatttgtaagagagagtagaacctaggcaggggcaagaaaagatttttttctgtggcttttcaaggaagcgtgaccctattgactccttggcttcagacttctagcctccagaactgtgaaataataaatttcagttgttttaagctacccagtytgtggtaatttgttccagcagccctaggaaagtactacaatgctgtattcacgttctgaactctttccagttattttgtgagtatgggtagacaagattcttagaacagtcttgacagtctctgagtttattgcttattgatgggtcctatgaaagataaattacttctcacagtttaaggaatgtcctaagttgatctgcactaatttacaggatttagttgcagtttaaggaatgtcctaagttgatctgtactaatttccaggaattaatttgcaccttgggctgtgccttaaattatagctggatttatcagccagcttctatttgtaatatgggtgacgat

SEQ ID NO: 201542 - DNA, 535 bp, Homo sapiens
ggagtaataaatctataagtaataaagctccaaaaatttgtaagagagagtagaacctaggcaggggcaagaaaagatttttttctgtggcttttcaaggaagcgtgaccctattgactccttggcttcagacttctagcctccagaactgtgaaataataaatttcagttgttttaagctacccagtttgtggtaatttgttccagcagccctaggaaagtactacaatgctgtattcacgttctgaactctttccagttattttgtgagtatgggtagacaagattcttagaacagtcttgacagtctctgagtttattgcttattgrtgggtcctatgaaagataaattacttctcacagtttaaggaatgtcctaagttgatctgcactaatttacaggatttagttgcagtttaaggaatgtcctaagttgatctgtactaatttccaggaattaatttgcaccttgggctgtgccttaaattatagctggatttatcagccagcttctatttgtaatatgggtgacgat

SEQ ID NO: 201543 - DNA, 596 bp, Homo sapiens
aaaaactaacctattaaaaggttagcttttacaggtatgctagcaggagtcagccaatgggattttcacccaatttccctttgtccatgtactccctagacctgtactcccagactatagtctatggcccccagatttcaatggtaagacttatttcccttagcctgcctcaaagattccactacctcataccaaaaatgtacagccaactatcctgagaacaaattctcatatttttccattatctccttttgaaaaggagcacaggtagaaaaagaaaacattcactgttttgatgtgtgggtctaaaagacaatcctgctcacagtgccaatctgaacccacaaaaagcattgaattgtcaaatcagactyagattgaagattttgctcagtatcatgctttctgaataatttcaaagataaaataatcatatatgggttaagtggggagagacctgggtcctttcatcttcattgaatgtggtctggtccaagtttctagatttggtttctaagtaaaatgtacagttgctttacttactcaggtgtattctcagttacaaaccatctccttttatacttagatagcaacac

SEQ ID NO: 201544 - DNA, 392 bp, Homo sapiens
cctttttctataacttaacttcttcaaacttttcttcactgtcgtataatgataattactctaaaatgacaatctgatcattaaaactttaatcttttactctctgccaatttcataaataaatatttgattcacagttgttatttcttcttcaagatacatcaaataatccacctttacaaaaagcaatttactgtttcataaatgtgctttattatgtcacatattcagtcttttaaacattttgtgccacccttggtcatcaaataagtttctatctactaaacatgactgacktagcaaaactatatccttagtttcatgcatgtctccatcaattttgcaattgcttttatacccaaactgcagtgggagaaaaacacacaaccaaa

SEQ ID NO: 201545 - DNA, 392 bp, Homo sapiens
cctttttctataacttaacttcttcaaacttttcttcactgtcgtataatgataattactctaaaatgacaatctgatcattaaaactttaatcttttactctctgccaatttcataaataaatatttgattcacagttgttatttcttcttcaagatacatcaaataatccacctttacaaaaagcaatttactgtttcataaatgtgctttattatgtcacatattcagtcttttaaacattttgtgccacccttggtcatcaaataagtttctatctactaaacatgactgacgtagcaaaactatakccttagtttcatgcatgtctccatcaattttgcaattgcttttatacccaaactgcagtgggagaaaaacacacaaccaaa

SEQ ID NO: 201546 - DNA, 399 bp, Homo sapiens
ctccctgtcatccctaataayagttgcattttttacaggctcctgctcctttacataggcccactgtggttccaacttcccccagatatccctccctgcagctccagtagtacagcctcctatccctgttctccaagggaaggtgatagtagcctcccattgttgctaaattgtaggttgcctcactgtcccctggctgggtttaatttttttaaagttatttttaccatcaattacctgtatcaattccctttgttttaaattctcaatgatttcaattttcctggctagtttctgattgcttcagatacctaatggaaatctcaaagtaagtatgactcaagagaaattgctgatttccatctcccagccactaccaaacctgtttatgcttatcca

SEQ ID NO: 201547 - DNA, 428 bp, Homo sapiens
aatttctccctgtcatccctaataacagttgcattttttacaggctcctgctcctttacataggcccactgtggttccarcttcccccagatatccctccctgcagctccagtagtacagcctcctatccctgttctccaagggaaggtgatagtagcctcccattgttgctaaattgtaggttgcctcactgtcccctggctgggtttaatttttttaaagttatttttaccatcaattacctgtatcaattccctttgttttaaattctcaatgatttcaattttcctggctagtttctgattgcttcagatacctaatggaaatctcaaagtaagtatgactcaagagaaattgctgatttccatctcccagccactaccaaacctgtttatgcttatccatttcatttgatggcaagtccttcc

SEQ ID NO: 201548 - DNA, 428 bp, Homo sapiens
aatttctccctgtcatccctaataacagttgcattttttacaggctcctgctcctttacataggcccactgtggttccaacttcccccaratatccctccctgcagctccagtagtacagcctcctatccctgttctccaagggaaggtgatagtagcctcccattgttgctaaattgtaggttgcctcactgtcccctggctgggtttaatttttttaaagttatttttaccatcaattacctgtatcaattccctttgttttaaattctcaatgatttcaattttcctggctagtttctgattgcttcagatacctaatggaaatctcaaagtaagtatgactcaagagaaattgctgatttccatctcccagccactaccaaacctgtttatgcttatccatttcatttgatggcaagtccttcc

SEQ ID NO: 201549 - DNA, 428 bp, Homo sapiens
aatttctccctgtcatccctaataacagttgcattttttacaggctcctgctcctttacataggcccactgtggttccaacttcccccagatatccctccctgcagctccagtagtacagcctcctatccctgttctccaagggaaggtgatagtagcctcccattgttgctaaattgtaggttgcctcactgtcccctggytgggtttaatttttttaaagttatttttaccatcaattacctgtatcaattccctttgttttaaattctcaatgatttcaattttcctggctagtttctgattgcttcagatacctaatggaaatctcaaagtaagtatgactcaagagaaattgctgatttccatctcccagccactaccaaacctgtttatgcttatccatttcatttgatggcaagtccttcc

SEQ ID NO: 201550 - DNA, 413 bp, Homo sapiens
tccctaataacagttgcattttttacaggctcctgctcctttacataggcccactgtggttccaacttcccccagatatccctccctgcagctccagtagtacagcctcctatccctgttctccaagggaaggtgatagtagcctcccattgttgctaaattgtaggttgcctcactgtcccctggctggstttaatttttttaaagttatttttaccatcaattacctgtatcaattccctttgttttaaattctcaatgatttcaattttcctggctagtttctgattgcttcagatacctaatggaaatctcaaagtaagtatgactcaagagaaattgctgatttccatctcccagccactaccaaacctgtttatgcttatccatttcatttgatggcaagtccttcc

SEQ ID NO: 201551 - DNA, 413 bp, Homo sapiens
tccctaataacagttgcattttttacaggctcctgctcctttacataggcccactgtggttccaacttcccccagatatccctccctgcagctccagtagtacagcctcctatccctgttctccaagggaaggtgatagtagcctcccattgttgctaaattgtaggttgcctcactgtcccctggctgggtttaatttttttaaagttatttttaccatcaattacctgtatcaattccctttgttttaaattctcaatgatttcaattttcctggctagtttctgattrcttcagatacctaatggaaatctcaaagtaagtatgactcaagagaaattgctgatttccatctcccagccactaccaaacctgtttatgcttatccatttcatttgatggcaagtccttcc

SEQ ID NO: 201552 - DNA, 413 bp, Homo sapiens
tccctaataacagttgcattttttacaggctcctgctcctttacataggcccactgtggttccaacttcccccagatatccctccctgcagctccagtagtacagcctcctatccctgttctccaagggaaggtgatagtagcctcccattgttgctaaattgtaggttgcctcactgtcccctggctgggtttaatttttttaaagttatttttaccatcaattacctgtatcaattccctttgttttaaattctcaatgatttcaattttcctggctagtttctgattgcttcagatacctaatggaaatctcaaagtaagtatgactcaagagaaattgctgatttccatctcccagcyactaccaaacctgtttatgcttatccatttcatttgatggcaagtccttcc

SEQ ID NO: 201553 - DNA, 432 bp, Homo sapiens
cattactgtgcattacaaatctattggtaaattgcttgcaaaaataagactgaaaacaattttaaattaagtgtacaaatttttctctttttcttttgaaataattaatattttattttattacyatagtttcctttaactctataatttgaactgagatgtttggagaaaaaatatttttaaaagaatttataacaataagaataactgttagaatgccagtcctatcaggaaatgttagaaatatataagcaaaactcaaaagtaaatatcactgtctgtctaaccatattccatgcgtagcttctactactgttccccagaattgactgttttatcatttctcttgacttttgatacatttattcatatatcctccatcctcacttagtccttactgtttatacttcggcatcatatcaaccctatctt

SEQ ID NO: 201554 - DNA, 432 bp, Homo sapiens
cattactgtgcattacaaatctattggtaaattgcttgcaaaaataagactgaaaacaattttaaattaagtgtacaaatttttctctttttcttttgaaataattaatattttattttattaccatagtttcctttaactctataatttgaactgagatgtttggagaaaaartatttttaaaagaatttataacaataagaataactgttagaatgccagtcctatcaggaaatgttagaaatatataagcaaaactcaaaagtaaatatcactgtctgtctaaccatattccatgcgtagcttctactactgttccccagaattgactgttttatcatttctcttgacttttgatacatttattcatatatcctccatcctcacttagtccttactgtttatacttcggcatcatatcaaccctatctt

SEQ ID NO: 201555 - DNA, 432 bp, Homo sapiens
cattactgtgcattacaaatctattggtaaattgcttgcaaaaataagactgaaaacaattttaaattaagtgtacaaatttttctctttttcttttgaaataattaatattttattttattaccatagtttcctttaactctataatttgaactgagatgtttggagaaaaaatatttttaaaagaatttataacaataagaataactgttagaatgccagtcctatcargaaatgttagaaatatataagcaaaactcaaaagtaaatatcactgtctgtctaaccatattccatgcgtagcttctactactgttccccagaattgactgttttatcatttctcttgacttttgatacatttattcatatatcctccatcctcacttagtccttactgtttatacttcggcatcatatcaaccctatctt

SEQ ID NO: 201556 - DNA, 432 bp, Homo sapiens
cattactgtgcattacaaatctattggtaaattgcttgcaaaaataagactgaaaacaattttaaattaagtgtacaaatttttctctttttcttttgaaataattaatattttattttattaccatagtttcctttaactctataatttgaactgagatgtttggagaaaaaatatttttaaaagaatttataacaataagaataactgttagaatgccagtcctatcaggaaatgttagaaatatataagcaaaactcaaaagtaaatatcactgtctgtctaaccatattccatgcrtagcttctactactgttccccagaattgactgttttatcatttctcttgacttttgatacatttattcatatatcctccatcctcacttagtccttactgtttatacttcggcatcatatcaaccctatctt

SEQ ID NO: 201557 - DNA, 254 bp, Homo sapiens
gcagatctctgatttagcttacacacctagaggaagattaaatgaagatcaatttgcaagtgaatttaaaattttgtkacaaaattttaggagctaaattaggacactgcggtgttacagaatctaaagaactattttgagctgcttttgaaaaataaacattaaaagtaccaatctgtatgattgacttttgcaacattttctcattgaaaacacatattctacaaaaaaaattatttttgtaaccttatcat

SEQ ID NO: 201558 - DNA, 254 bp, Homo sapiens
gcagatctctgatttagcttacacacctagaggaagattaaatgaagatcaatttgcaagtgaatttaaaattttgttacaaaattttaggagcwaaattaggacactgcggtgttacagaatctaaagaactattttgagctgcttttgaaaaataaacattaaaagtaccaatctgtatgattgacttttgcaacattttctcattgaaaacacatattctacaaaaaaaattatttttgtaaccttatcat

SEQ ID NO: 201559 - DNA, 254 bp, Homo sapiens
gcagatctctgatttagcttacacacctagaggaagattaaatgaagatcaatttgcaagtgaatttaaaattttgttacaaaattttaggagctaaattaggacacygcggtgttacagaatctaaagaactattttgagctgcttttgaaaaataaacattaaaagtaccaatctgtatgattgacttttgcaacattttctcattgaaaacacatattctacaaaaaaaattatttttgtaaccttatcat

SEQ ID NO: 201560 - DNA, 254 bp, Homo sapiens
gcagatctctgatttagcttacacacctagaggaagattaaatgaagatcaatttgcaagtgaatttaaaattttgttacaaaattttaggagctaaattaggacactgcggtgttacagaatctaaagaactattttgagctgcttttgaaaaataaacattaaaagtaccaatctgtatgattgacttttgcaacaytttctcattgaaaacacatattctacaaaaaaaattatttttgtaaccttatcat

SEQ ID NO: 201561 - DNA, 258 bp, Homo sapiens
gtagattaaatatgtacttcattatttttgttatttctactattggtttactaatgtacttcttttttaggttctgctttaaggtttaaaatataaatacttctgytttaaggtttaaaatataaatacttctgttttaaggtttaaaatataaatacttctactttaagttttaaaatataaatacttagctcatcacagcctactttcaaataatagtacatcacttgatatgcagtataatacattgccagtttt

SEQ ID NO: 201562 - DNA, 258 bp, Homo sapiens
gtagattaaatatgtacttcattatttttgttatttctactattggtttactaatgtacttcttttttaggttctgctttaaggtttaaaatataaatacttctgctttaaggtttaaaatataaatacttctrttttaaggtttaaaatataaatacttctactttaagttttaaaatataaatacttagctcatcacagcctactttcaaataatagtacatcacttgatatgcagtataatacattgccagtttt

SEQ ID NO: 201563 - DNA, 258 bp, Homo sapiens
gtagattaaatatgtacttcattatttttgttatttctactattggtttactaatgtacttcttttttaggttctgctttaaggtttaaaatataaatacttctgctttaaggtttaaaatataaatacttctgttttaaggtttaaaatataaatacttctactttaagttttaaaatataaatacttarctcatcacagcctactttcaaataatagtacatcacttgatatgcagtataatacattgccagtttt

SEQ ID NO: 201564 - DNA, 175 bp, Homo sapiens
atatttgcagagctttctgagctttgagaattgttcttcagaccctttgtgttggcattttaccccaggcttcagttattttctctcatgtattcacagtttagtattcaatgaaggactcaataatttcctrggaaggtctgcagacacacagtcatctgtattcattagcatg

SEQ ID NO: 201565 - DNA, 175 bp, Homo sapiens
atatttgcagagctttctgagctttgagaattgttcttcagaccctttgtgttggcattttaccccaggcttcagttattttctctcatgtattcacagtttagtattcaatgaaggactcaataatttcctgggaaggtctgcagacacacrgtcatctgtattcattagcatg

SEQ ID NO: 201566 - DNA, 405 bp, Homo sapiens
tacttttttactgagattattcacacttcagtcttcctgttttggtacaaaatattttagacaaactattatacttgttcatgtataactgtcacyttagttataaaaatgatgcttaagttaaaaacaaaataattttaataaagaagtgtgagaagtaatatataacctctgagtcagtcagaatctagcaaagctttatagatcacattcattaaacattcttacattcactgtcagtggctctaattaagaatgatcatataaaaagatcttttcatttttcttggctttttctagtttgcccaaatcgcaccaattatttcttctatactgttggttcatgagttcgtgactgtacatagttagtaattacttaaaatcagattttttttttacatttta

SEQ ID NO: 201567 - DNA, 584 bp, Homo sapiens
ggcacacctaagtttttatcataacctgtaccttcaatcatcttcattcttcctgacctgatctatttttctcatcgtatttaccaccttcaaacatatggtacayatcctatttactttgggtatcttatattacaatataatctcaaaacagattttgttgattttatttacgagatgtaaccaaagggcctagattatctttatagcatagtatatgttcaaaatttattaccaaataaatataaagtacatttatgaaaggtgaaggagaatataaaacagagggaagatcttcagaactaccacaacaaaatgacacataacttaaatgtcaaaataccaacactgatttcttatcaacagcaataaaaagcaggaaaaaatttggaaaatatcctcaatgagtttagacacacttctatacattagaggtttataaaacacaaaaactccttttataaatgagtcaaaataatgacattttagacaaagaataacagaaaatttatcatccaaaagcaccttctaaagaaatctcaaaagacaaatttcaaacaaaggaaaatgatcacagataaaag

SEQ ID NO: 201568 - DNA, 584 bp, Homo sapiens
ggcacacctaagtttttatcataacctgtaccttcaatcatcttcattcttcctgacctgatctatttttctcatcgtatttaccaccttcaaacatatggtacatatcctatttactttgggtatcttatattacaatataatctcaaaacagattttgttgattttatttacragatgtaaccaaagggcctagattatctttatagcatagtatatgttcaaaatttattaccaaataaatataaagtacatttatgaaaggtgaaggagaatataaaacagagggaagatcttcagaactaccacaacaaaatgacacataacttaaatgtcaaaataccaacactgatttcttatcaacagcaataaaaagcaggaaaaaatttggaaaatatcctcaatgagtttagacacacttctatacattagaggtttataaaacacaaaaactccttttataaatgagtcaaaataatgacattttagacaaagaataacagaaaatttatcatccaaaagcaccttctaaagaaatctcaaaagacaaatttcaaacaaaggaaaatgatcacagataaaag

SEQ ID NO: 201569 - DNA, 584 bp, Homo sapiens
ggcacacctaagtttttatcataacctgtaccttcaatcatcttcattcttcctgacctgatctatttttctcatcgtatttaccaccttcaaacatatggtacatatcctatttactttgggtatcttatattacaatataatctcaaaacagattttgttgattttatttacgagatgtaaccaaagggcctagattatctttatagcatagtatatgttcaaaatttattaccaaataaatataaagtacatttatgaaaggtgaaggagaatataaaacagagggaagatcttcagaactaccacaacaaaatgacacataacttaaatgtcaaaataccaacactgayttcttatcaacagcaataaaaagcaggaaaaaatttggaaaatatcctcaatgagtttagacacacttctatacattagaggtttataaaacacaaaaactccttttataaatgagtcaaaataatgacattttagacaaagaataacagaaaatttatcatccaaaagcaccttctaaagaaatctcaaaagacaaatttcaaacaaaggaaaatgatcacagataaaag

SEQ ID NO: 201570 - DNA, 399 bp, Homo sapiens
taattctatgaggtgtttttattatcatcatttccatttttcatatggagaaactgagagggaagtgctaaaaaactaagtgattccacatatgagtgagaacatacagtgtttatctttctggtcctggcttatttcactctacataatgtcctccagggtcatccatgctggaggagaggatttcattctcttctatgctacattttctttattcactcatccattcatgggcatgtcagttgattccgtatcttgacagttgtgaatagtgytgcaatactataatattcagtatttggtattcagtatttgtttgcatactgatttcttttttggggaatatatactccatcatgagattgctggatcctatggtaagtggcaaaacctgaattc

SEQ ID NO: 201571 - DNA, 399 bp, Homo sapiens
taattctatgaggtgtttttattatcatcatttccatttttcatatggagaaactgagagggaagtgctaaaaaactaagtgattccacatatgagtgagaacatacagtgtttatctttctggtcctggcttatttcactctacataatgtcctccagggtcatccatgctggaggagaggatttcattctcttctatgctacattttctttattcactcatccattcatgggcatgtcagttgattccgtatcttgacagttgtgaatagtgttgcaatactataatattcagtatttggtattcagtatttrtttgcatactgatttcttttttggggaatatatactccatcatgagattgctggatcctatggtaagtggcaaaacctgaattc

SEQ ID NO: 201572 - DNA, 421 bp, Homo sapiens
ttccaaaaaattaaggaggcaaggattctttctaactcattctatgaagccagtatcaccttgatactaaaaccagacaagaacacaacaaaaaaagaaaatgrcagacgaatatccctgatgagcatagatgaaaaaatcctcagcaaaatactagcaaactgagtgcaacagcatgtcgaaatgataatacaccatgattaagtgggttttattccaggtatgcagggatggtccaaaatacacaaataaataaaaaggatacatgatatacatagaattaaggaagaaatataatcatctcatagacgtaggaaaaacatttgataaaattcaacattttttcaggataaaaaccctcaacaaactaggtatagaaggaacatacctcaaaataataaaggccatctatgacaaatcc

SEQ ID NO: 201573 - DNA, 548 bp, Homo sapiens
tttggatccctttttcacacacattcaggagtagctcctctgtaatcctggtgggcctcttttccttggaaagacaggtgtcatgacagttagtaagatggcaccaagcacccgcccctgcagcyggctttgaggctgccacggatgctcaatatgtccctgccccaccacctgttctggattccccctcacctgcagccagcgccccttctggtcctagtgactttcctgggagaatgagcagatcctcagtcctgagaatatgaacactttgtcactgttcttctgagcctgggattggtgtaactgtctattttaccattgctatcaggccagggagaaccaggaagctccagtatgggtcacctggattttaaccacatcctttctcacctcaggagcagctggatcccctcctgatgatcaggagcaattgccctggatgggatggcaaatcctctttttgactgctcgtccctggaaatgaagaaccagacctaaagtgcccatacagcagccatcactaatatgagttcagtggaagtgtt

SEQ ID NO: 201574 - DNA, 569 bp, Homo sapiens
aatttttgttgcttgattgttcaggtacagtattggatcagtctaactttgaatagaaatgctatgagtaggcatccttgtcctgaaaagggaaacactctttgtattttaccactaatcattttactgcaagttctgttctgttttttgtttgatattctttatcagattaagaagatatccttctatccatgtttgctgagaatttttatctaaagtgcttctaatgggtatattgaagtaatgacatatgttattcctttttctgttactgacataaatgaattttgttaaaattttatagtatgataaatatattcacatatatatttcatctatatataaacatatagatgaaatatataaacatatattatcatatatgtaaacacatacagcacatgtatataaaatcatatataaacacatatatgtgaaatatayacattatcatcatacatacagttagtatgtttaatatataaatttataaaatatatatgaaatttatttatatatgtgaaatagatcaactttatatgtataataataatgttctcattagttat

SEQ ID NO: 201575 - DNA, 505 bp, Homo sapiens
ggaaattatttaatttttcacagcagagtctgatgtaggctgtggggttttcatggctgccccttttaccaagttaagttttcttctactcttaattttacaggctttgtattattattattattattattaaggggtagcagattttgtcatttgtttcattcttmatctattgagataatcacgtatttttgttatttattctattaatatgatgaattacatcattagattttcacatggttaaaacaatcttgtgttcttgggacaaatcctacttgcctattgcatataatcttttttttatgtttctagatttagttttctattattctgttgatgatttttgcatctatagtgtagatagtatttgtttttattttataattgatgcaaagggagactacagaagttcagcacattttccaagctcatgcagatagaaaatgaaggagcaagattcaagcctgagattagttgcaatgatgactttcagtttcggtga

SEQ ID NO: 201576 - DNA, 505 bp, Homo sapiens
ggaaattatttaatttttcacagcagagtctgatgtaggctgtggggttttcatggctgccccttttaccaagttaagttttcttctactcttaattttacaggctttgtattattattattattattattaaggggtagcagattttgtcatttgtttcattcttcatctattgagataatcacrtatttttgttatttattctattaatatgatgaattacatcattagattttcacatggttaaaacaatcttgtgttcttgggacaaatcctacttgcctattgcatataatcttttttttatgtttctagatttagttttctattattctgttgatgatttttgcatctatagtgtagatagtatttgtttttattttataattgatgcaaagggagactacagaagttcagcacattttccaagctcatgcagatagaaaatgaaggagcaagattcaagcctgagattagttgcaatgatgactttcagtttcggtga

SEQ ID NO: 201577 - DNA, 559 bp, Homo sapiens
attttgtcatttgtttcattcttcatctattgagataatcacgtatttttgttatttattctattaatatgatgaattacatcattagattttcacatggttaaaacaatcttgtgttcttgggacaaatcctacttgcctattgcatataatcttttttttatgtttctagatttagttttctattattctgttgatgatttttgcatctatagtgtagatagtatttgtttttattttataattgatgcaaagggagactacagaagttcagcacattttccaagctcatgcagatagaaaatgaaggagcaagattcaagcctgagattagttgcaatgatgactttcagtttcggtgacacatttagctactaaaactccaaattccggattagaagaagaatactgtttattattgtaacctcaagaggatttagtacacccccaaagaaagaccattttytcaactgccttctttttttttaaaaaaaaaaaaaggtcagattgttaaaaaaaaaaaaaaaagctctataagctaaaaatatcaatcaagctt

SEQ ID NO: 201578 - DNA, 395 bp, Homo sapiens
tgtgcacccctgttccgcgaagtgtgggcctaggcctggtgttyccatgtcaccccagggaagatgagtcctgctgggttgccaacttccacagaccccgacatgctgggtggccttccggcttcgctgggtctttttctccttctctcccagccactcagatgacttcagtggtggcttctcatgcctcaatgtcaaggacttaaggtgaccctctgggttgggggcgaggggaacatctgagatcaggaagctaaaaccccttccaggatgatctggatctcctggggtcacgaactgccctgctctgagctcctttggggacggagggtcccagggcagagagctgttccaaagagaccccagttcagaggcttctgtgcagaccaggctcc

SEQ ID NO: 201579 - DNA, 449 bp, Homo sapiens
tcccgctgatggagctgaaacctgtctctgggtgttctctgcccagtgggtgtaggtggggtctccctgggagcccctggatgaycgagactggctccccaagatgagtaatctgctcaccctaccattccccatgagaacccctcttccctatttgagcccaaagctcccttctgtgcctgttttcctatggggtgcccagagtgtgtcccaccacacccctctgaggacccctcctccaagatcacagagcagggaagctgttccttcttgttacccctgtaccctgaaaacattgaggctgagccccagagcacgttgggttgggtctgggccgcttcccgtgcacccccccgggccgggctctgtacaaggcatacttggactgcaggagcccacagaacagcccccccatttccctccctgtggccgctttccctggtcccggg

SEQ ID NO: 201580 - DNA, 590 bp, Homo sapiens
ccagagaataaataacatccagcaacagaatcaaattctaaaattaagcaagaaaaagaagtagaaataaaaggagaaggaggaaaaggcaaaagagaagaggaggaggatgcgggagggagagaggaatccagaaatttcaacacctgcatcatgaaaaatgttttttcctttttccccaaaacaaaacaacamtagcacttactgcaagacagattatttctcaccaggtggtgaagaaatctcactccaccctcagattcacactgacaaaacttctcttacagctatgcacattctgacatacaaaggccacaaactcagtgctctggtgctacagctggtggagcctgattaaaggcagagttcccgcccatgcatgcagacaggaagatcaacttacagaccccttcaacagtgtacagcagggctctggaccaaggtgattcattttagctatcctaaaaaggagatcacccacagagcacagaattaaatctgtgttattaaaaaaacaaaatatcaggcccacactaacaatatcaccacaaagaacaaatatttctatacaagaaaaacaacaagtcgtt

SEQ ID NO: 201581 - DNA, 424 bp, Homo sapiens
ttaagagctttctgttgattcttcacattttaaatgaatatgccaattagatagtatgcattatagattaattatatataaaatacttacacagtgttctacagtatgcttttcttcacctactgatacaccctggaagtcttctcttgtcagtagatatagatctacatcactctttttaatggctaccaagtattccattrtatggacagatcataatttatttaaccagtcccttactgatggacatttggattgcttccaattttttgctattaaaatctatgcagcagttacatctttctacgtatatatttgtgcacttgtaaaactatgtctgtagactgaagtgattttgtttgggggtaaaagaatacaataaacgtataaaaaattattcacttagctttaattcacactacca

SEQ ID NO: 201582 - DNA, 597 bp, Homo sapiens
gcaacttctcaccgcgagatagttacaaatatagtaccgttgctactacccggtgccttcaatgagcagtcttgacaggggaggcataatctaatcctacttctgctgccaagcgtcattgcacgactcccatttttagtcaaaaagcaatatccccgaccacagctttccaccgccccccggctttttttttttttttttttttgcagccaatacaagtctattgttgcctctattatgcgccagttaccgagcctttactcacgctcacgtttaactgacactggcgctttttacaatgcagcagcacgagggatctctttcaggaacattttattgaacccatccagtcagaggcatcacctgaaatgaagttgtaaccacaccggcatcggctgaacccaattatctcgtaactcataaattaagaattcacagaggaaaaacacataaacaacatccggagacagtggcatggaggaaaaaaascctcagcgctggaattgacgctgctgccagacgccccccaataggttccccaagccgagctcctttgcaagcctattttgggggcaagcagccaacccggcgtccccc

SEQ ID NO: 201583 - DNA, 654 bp, Homo sapiens
gaagttgtaaccacaccggcatcggctgaacccaattatctcgtaactcataaattaagaattcacagaggaaaaacacataaacaacatccggagacagtggcatggaggaaaaaaagcctcagcgctggaattgacgctgctgccagacgccccccaataggttycccaagccgagctcctttgcaagcctattttgggggcaagcagccaacccggcgtcccccaaatctcaagctagcacccccacacatcccccgtctcctacagcgtgtctcctgcggtgtttacataactgtgtgtcctctagcgtgtaaacaaaaggcacagcccaagcggagaggcgcccctgaagcagcaccgtggccccaacgctgtgcccgcccgggcctggggctccgcaggtgggggctgagctctcggcgtcctccgccacttgttgctcccgggtcctgcagctctggagctgcaaggaggggctttgcaagctcagagccctgctgcatcccctcctgcatcgccgctcgcaccccgcggccccgtgccactcggtcccggcgcccgcctggagcctgcagcaggggccagaggacgccgcgcggctgccaagcgcggcgaggtggcgggaagggaggctgggtgcagcacagccgg

SEQ ID NO: 201584 - DNA, 654 bp, Homo sapiens
gaagttgtaaccacaccggcatcggctgaacccaattatctcgtaactcataaattaagaattcacagaggaaaaacacataaacaacatccggagacagtggcatggaggaaaaaaagcctcagcgctggaattgacgctgctgccagacgccccccaataggttccccaagccgagctcctttgcaagcctattttgggggcaagcagccaacccggcgtcccccaaatctcaagctagcacccccacacatcccccgtctcctacagcgtgtctcctgcggtgtttacataactgtgtgtcctctagcgtgtaaacaaaaggcacagcccaagcggagaggcgcccctgaagcagcaccgtggccccaacgctgtgcccgcccgggcctggggctccgcaggtgggggctgagctctcggcgtcctccgccacttgttgctcccgggtcctgcagctctggagctgcaaggaggggctttgcargctcagagccctgctgcatcccctcctgcatcgccgctcgcaccccgcggccccgtgccactcggtcccggcgcccgcctggagcctgcagcaggggccagaggacgccgcgcggctgccaagcgcggcgaggtggcgggaagggaggctgggtgcagcacagccgg

SEQ ID NO: 201585 - DNA, 600 bp, Homo sapiens
ctcttgaatccaagtggcccaccaagataaaagacataggaattatgggtttttaatgaagcagtaacccaactaagtaactggagaaaagttcaggaaaggtgctgaaatctgacctggtggtcaaaataatccacggagaatgcatgcagttttaaggaatctgggttccttgaccctcaagacgatcttcctcagcaaatgcttccataagcttgaagaaaaaaaaaaaaaattccactgcctgctcccagatayatagcattagggcagggataaatttcaagctggcaaaagtccaaacccaacagttgcagctgtagtagctgccttgtttacaaagcaattcaggaagcttttagagggcagagtgcaccagacagaagggggtctgtacgcaaaacatggatgcatcccaatgctttcagaacagacaacacatctgttcccaggtcccccttggaaacatgccgcatacaaatccaagtcaacctttactgctcatgttttttcaggaaaacatatctacttaagcactcaaatcaaaattatacactgttagttattgggcccttgggccatccccaacatcctaaccag

SEQ ID NO: 201586 - DNA, 559 bp, Homo sapiens
caaacacacaaaagcagagggcatagtgtattgaatatcatgttcttatcactcaacttcaacagttattaactcatgaccaatattatttcacctgtaatctcacccactcccccaaccatggatcattttaaagaaaattatagacattgwactatctttccatcaagatttcagtatgtatctctaaaagacagggattcttttttaaaaagataaccacaataatattttcttacctaaatacttttgtaccaacaatatccaggcagtattaaaattctgtaattgccttatattattattactttgaaaaaaacctttttatttgttgagtcaagagtcaaatgaagtccgtgagttataactacttgattagcacgccaagtttttcttagcctatagcttcttcatcccttttttctccctcgaagtttaagaaactggactgcttgtcccataattgcccacagtctgattttgcttattatgtcttcctgatgttgtttaacatgttttttaaaaatttttttatttcttattagtcaaataagtctat

SEQ ID NO: 201587 - DNA, 559 bp, Homo sapiens
caaacacacaaaagcagagggcatagtgtattgaatatcatgttcttatcactcaacttcaacagttattaactcatgaccaatattatttcacctgtaatctcacccactcccccaaccatggatcattttaaagaaaattatagacattgtactatctttccatcaagatttcagtatgtatctctaaaagacagggattcttttttaaaaagataaccacaataatattttcttacctaaatacttttgtaccaacaatatccaggcagtattaaaattctgtaattgccttatattattattactttgaaaaaaacctttttatttgttgagtcaagagtcaaatgaagtccgtgagttataactacttgattagcacgccaagtttttcttarcctatagcttcttcatcccttttttctccctcgaagtttaagaaactggactgcttgtcccataattgcccacagtctgattttgcttattatgtcttcctgatgttgtttaacatgttttttaaaaatttttttatttcttattagtcaaataagtctat

SEQ ID NO: 201588 - DNA, 576 bp, Homo sapiens
ttcattcatttttatttttatttttttaagatagggtctcactccattgcccacgctagcgtacactggcatgaacgtgagtcaytgcagcctcaacctccttggctcaagcaatcctcccgccttggcctccagtgtagctgggaccacaggtgcacatcaccacacctaactaatttttttaatagtgtgtggagacgggacctcattatgtcacccaggctggtctcaaactcctgggttcaggtgatcctaccacctcttcttcaagtacagaaacctatgtcaagtttagttcaagattttatcaatcactgattttagcaatatggacatggtgttttttcttctgggaaaaaaaaaaaaagtaaaactaatgacgagggccaaaggagtgaagtcctgcctgctcatgcttgtacctataggcttagaaatcatatacatgctggctgagggcttctcccattccatgaaaagggtggggtgtgttgtatctcacagaaatgatgggacacaccaatgaaaatgatgactcaatagccttgaagttttaaccattcaaatacaaaatgt

SEQ ID NO: 201589 - DNA, 364 bp, Homo sapiens
tgtatttataccctgaggttataccctataatgtgcaaacattataggatagacaaatggatataaggtttctttctgtgtttccttatgtattcaaaatgggaaaactagatggaagacaattcatatttatttagaattctaaatgatgttaatttyagaaccttcaatgtcagagttactttgtatgaataagtttacctaattttccacactatgcatatctaatagatattactattgcacagatgagaaaactgcatctctgattattattatttattctagtcacagtgataagaaagggcaaaatatcacaatataagcccaaatagttcttagtttaatggaatattctttccac

SEQ ID NO: 201590 - DNA, 597 bp, Homo sapiens
gcaatcattttacttatgaataaaaacttatactatttcaggtcattttcttattgtttcttgaaaaaggaagtcctttataagtccagtgaaatattacctaattttcacatcaaatttcatggtaaacaagacttattcttcttactttactgattttaaaaagctaaatttcactggggatatatcatttgtttaagactaggtaactgataacctaaaccaagacccaaaatttgttattttctttatttccagcacacactattttccatcatggtatattacatcttgctaaagaagcaatgttttttagcaagacaattgaaaagcatgaacattggtttacactttagaaagatcttttaataytccatatcatttacaactatttgtttatttccatgtataaaatgacattgatttaatagacttcatccatatttgcatgatactcagctataccactaactcaggcactattcacatagctccagaattaaatcaatgtctgacaagagggtccaatatgacctcccaattgaaacagaagacaggcattttgtgatttgaggaagacaacctgtgaatttacaa

SEQ ID NO: 201591 - DNA, 498 bp, Homo sapiens
aaagcagtgctactatttcttgaaatgcttaaaattgtaataagtatcattcccaaatctggcgataagatatagaaaatggcatctcccaatataatcttggacatatttgtcaataaggagtacaatgaaatatgacaaattatacagcaagttttaaaagctgctaataactctttgtttatctcagtaataaaatttaaacactgatccaacctaacacagatgaacataatatacccattctgaaaacaaagaatatatatcgatatttatatattaaatacaaatcatggaatatagaactatagacttgtgcatattttcctagaaaatattaccccaattttgtttctctaagcttcaagagagrtttcttggagaaaatgagattttataaacaatgctagcaaaaaaaaagacaacttaagagattatggagaaaaaggcatactttagatgtaaaacacagcttgagaaaagcttaggggtgagaag

SEQ ID NO: 201592 - DNA, 616 bp, Homo sapiens
gctaaaattaataatctgcttcaggctgtgtgcaaaaataaagcatgtgtaccaggcttcttcaaaatatgcatattgcagtctaccttataagcagatttactatcaattataagagctaaaagaaaaggaattattaaaaaaaaatcctaacttccaccaaccccatacaaagtttggttttattaactttcttggaaggatgtttttaattttatgaaaatcaagtgttataactgttaccatatattgattggattttatatattcaatatattctaaaagatttttaaacatattatttccatttatatttcttttacaactatcaagacaaatcagctttctttaaattctagagataggtactattattctttccatattgctcatgataaaattgaggagcagaaaagttgagaawctatccatgatttttcagctatcgagtggtaaactaggcttcaacacaatttagtcttagagaccaatatgttaaaccctctattttctgttagatcttcagttcttaacacacagaaagaaggtatgggaagcattagataaaatattacctgttaaactgatataacaaactctaatatgtataatgtga

SEQ ID NO: 201593 - DNA, 589 bp, Homo sapiens
gctgttctcatagtagtgaataagtctcatgagacctgatggttttataagggggagtttccctacacaagctctctctctttgcttgcagccacccatgtaagatgtgacttgctcctccttgccttccaccatgattgtgaggcctccccagccatgtggaacagtaagtccattaaacctctttttcttcccagtctctgggtttgtctttatcagcagcatgaaaatggactgatacaattactaaacatcatttatgacacactgtaagtacagatataaatctggcccttttttattctatttacttctatatgtatttttaagaatctaatgaacatttagtaccaaatccaagaaccagaaatatatgcacccttttgtttcacgtttttcttctatcctgtccttgtatcaacaaccagaaatagctgctattctgaatkttaataaacattatatattcataggcacatttacatgcatgggtgtgtcagagtggtttagtttctatttgagttttcttgaagaacattaagcttgataatgttctaagatttgaatttaaagcattcaacattacggt

SEQ ID NO: 201594 - DNA, 439 bp, Homo sapiens
acatttactagataaaaatacaagtagttaagatcttacaaattaaattatctttctctctatatatatatatacagttttaaagtcaaatacaaaattccttttcatgctgactttcatagactattctagtatttgatcatcakcaaaacaatagcatctgatatcatttatattcataaataaattcaaaaactgctatgatgtattgcttagtaattatgaattagaacaaaaaccatatgttctggagttgaaaatactaatttgtgaaaaaaggtacacggacattacacatatgtcacatagcattttaataacatgggatatatatgtaaatgttcacagggacaattttattttcatgtttgtgttagtttgttcttgcatagctgtaagaaactacctgagactgggtaatttataaagaaaagagatt

SEQ ID NO: 201595 - DNA, 439 bp, Homo sapiens
acatttactagataaaaatacaagtagttaagatcttacaaattaaattatctttctctctatatatatatatacagttttaaagtcaaatacaaaattccttttcatgctgactttcatagactattctagtatttgatcatcagcaaaacaatagcatctgatatcatttatattcataaataaattcaaaaactgctatgatgtattgcttagtaattatgaattagaacaaaaaccatatgttctggagttgaaaatactaatttgtgaaaaaaggtacacggacattacacatatgycacatagcattttaataacatgggatatatatgtaaatgttcacagggacaattttattttcatgtttgtgttagtttgttcttgcatagctgtaagaaactacctgagactgggtaatttataaagaaaagagatt

SEQ ID NO: 201596 - DNA, 308 bp, Homo sapiens
tgaattcactcttctcactgattagttgagttgagacattggtttttctcctgaycttctggttctcagacctttacgctcagaatggaatctacaccattggctctctgactctccagcctttgaactataccatcggcctttctggatatcttgcagagagcagattgtgggatttatcagtcttcagagttatgtgagccagaagtttataataaatctcctattgtttctgtttctctgcagaaccctgactaatacacatcttctatgaagatatatgggaaataatttacagcttgttacaa

SEQ ID NO: 201597 - DNA, 583 bp, Homo sapiens
attttttagctgattctgagccagtaagcgcggcatttgttagtgggctagtgtttaggaaacattgaactatttaattctatccaaagttcactgttagaaacgaaattggcagttaatattagaattaaattgaagttaaatatttacatattttgaaattatgactaacatgttatgcttaatttaaaagttataaatttaaatatattttttctgcaggaaacrgtttagcaggtcccttttaattcttgaattaaaagtaactccatggaattattctgatttttgttttttgttttagacagggtctccccatcagcctggctgggagaaagtggtataatcatggcttgctgcagtttcaactctctgggttcaagcaattctcctgcctcagcttcactagtagctgggactacaggtgcattccacctcacctggctaattaaaaatttgtgtttgtttgtttgttttgtaaaacaaagtttttctgtgttgcccaggttggtctcaaatttccaatcgcaagtgatccacttcagcttttcaaaatgctgggattacaggtgtgagccactgc

SEQ ID NO: 201598 - DNA, 552 bp, Homo sapiens
tagtacatataatatatttagagaaacattgtcccatattatagtggcaatttggcagttggtcctgtggagtcattttgtggattcaaatcctaaattcaaatgtgtctcagagctcacctaacatttctgtgtttcagtttctttgttcataattggtagtcaaaataagtttaagaaaaagaagagtaattttaaaatattttcctctttgttcattgaaaaagtttaaaagcaatgactaattcaatagaaatgagtattcctagttcttacaytgtagctctaaatactattttacattacaccaatttaggtctccttgaagaaatggctgattccaattctgaggtaggaaatagatcagattagcccaaagagtatccatccaagaatactgagatcatatcagaaggaaccaatttaattaggtttctagtgagtgaacatgggacaatttaagcactggtaagcataatttaactgtaatgaactgaaatctatcaatatgtttatatccatgagtttatgatgatatgacaaaagaaaaat

SEQ ID NO: 201599 - DNA, 582 bp, Homo sapiens
tctccgtctttttctcccttcttgattgttttgttgaatccctaaagcattttccaactagccttttctttgttcattacaatgatccaatttggcagttgtaaaattttcaagcttttttcaacccttcattaaaatttatgtcaaatgtttggtgaattttacagctccagatacagtgagtgctgtatgctgaccttgtttactgagcacgggaaattcccaggtatcatagctgcagtggctcttgcattcaygtcagaatgagctaaagtctaaaaatagattgtgttctgtacctgaggttcttccctagcgcttttcaacctctgtttctgggaaacagtgatgcagctcagaggcagacaaaaacagtgagagtaactccataactcacagtgggaggaaatcatattaaatgcctaatgagttctgacacacctatcgtcataaatttctataagtcatggtaacattttgaagagaaatcttactgaaaaaattatatatttcaaacttcatagttcatgattcaggatctttgtaatctattttatatactcgtaagtgtatgtttttaca

SEQ ID NO: 201600 - DNA, 582 bp, Homo sapiens
tctccgtctttttctcccttcttgattgttttgttgaatccctaaagcattttccaactagccttttctttgttcattacaatgatccaatttggcagttgtaaaattttcaagcttttttcaacccttcattaaaatttatgtcaaatgtttggtgaattttacagctccagatacagtgagtgctgtatgctgaccttgtttactgagcacgggaaattcccaggtatcatagctgcagtggctcttgcattcatgtcagaatgagctaaagtctaaaaatagattgtgttctgtacctgaggttcttccctagcgcttttcaacctctgtttctgggaaacagtgatgcagctcagaggcagacaaaaacagtgagagtaactccataactcacagtgggaggaaatcatattaaatgcctaatgagttctgacacacctatcgtcataaatttctataagtcatggtaacattttgaagagaaatcttactgaaaaaattatatatttcaaacttcatarttcatgattcaggatctttgtaatctattttatatactcgtaagtgtatgtttttaca

SEQ ID NO: 201601 - DNA, 582 bp, Homo sapiens
tctccgtctttttctcccttcttgattgttttgttgaatccctaaagcattttccaactagccttttctttgttcattacaatgatccaatttggcagttgtaaaattttcaagcttttttcaacccttcattaaaatttatgtcaaatgtttggtgaattttacagctccagatacagtgagtgctgtatgctgaccttgtttactgagcacgggaaattcccaggtatcatagctgcagtggctcttgcattcatgtcagaatgagctaaagtctaaaaatagattgtgttctgtacctgaggttcttccctagcgcttttcaacctctgtttctgggaaacagtgatgcagctcagaggcagacaaaaacagtgagagtaactccataactcacagtgggaggaaatcatattaaatgcctaatgagttctgacacacctatcgtcataaatttctataagtcatggtaacattttgaagagaaatcttactgaaaaaattatatatttcaaacttcatagttcrtgattcaggatctttgtaatctattttatatactcgtaagtgtatgtttttaca

SEQ ID NO: 201602 - DNA, 576 bp, Homo sapiens
gtcttgtattttcttcagtgcctcctgtaatgctggccatttaatctcctaaaccctgtggcagagaagagtaagactgaatgtatgaccagaagcagctaaaaatgtagtttgtagaggtcagttgctacatttatcttgtgttttttgggattttttttttttagacattcttttggacttggattctataccataaaatgcaatatctgcttacttgaaaataaaaaacaataaacaaacataaaagagggtaaattgttttaaattatgtgatgttgcataaaatttatataccaggaaactgtcatattcaccctgaaatatgtaacaatggatgttacataaatttaattaaatttagaaatctagtcttcagaaagctgtgaatacagacaacaactcagytggagacaaggtaaatgtaatttttatcctctgctctctttctagtattctgtatccctttttgttttctttctccatctctgtgacttattacttccaacaggctttatgccattgtactgtcagcacttataccagacctcagggaagggactcccattggctgtt

SEQ ID NO: 201603 - DNA, 603 bp, Homo sapiens
cacccccatgggtctcagtttctccacctgtaactgaggggctcagattagcccagtggctaacgtcacagaagaaacaacaaaacagcaaacaacggcctggccccaacctggagcaattaagtcagaatcggatagcccagggcccaggtatggtatcatgataacagctcccaacaggcggttctgaygagcaggcgggcgggaacatggttagaccagcccctgcgaccgtgcctggaagtctgagctctccacccatgcctggatgctccggtgtgcaatgaacagcaggtgatggagccctggtcccaaaatcatctagggttcttcacatttttgcctccacaacaggaagacacgcaaaggccatgaatgcacacacctgtgtgtgacactcagaaaacatctgaggggttggccccatcccagcagcacagaaccactccagggagggacccagccctggcgtacaatgaagaagtgcaggcttctccaaggacacccagcgtgagaggaggggctcacagtagcgggcgaaccctttccccttcttccactcacaataacagggctgggggagggacatcggcacagaacaca

SEQ ID NO: 201604 - DNA, 587 bp, Homo sapiens
cacctaccacaacctactttgtaaccggatcttgaatgttatctagattgggtgttcctaaaagtgaggacttcctcattttccactctgaccacatacccagtgacatagtttggatctctgtccccacccaaacctcatgtcaaactgtaatccccaatgttggagatgggagcctggtgggaggggattgaatcacaggggtgaatccttcatgaatggtttagcaccattcccttgctgctgtcttgtgatagggttctcatgagatctggttattcaaaagtgtgtagcagctccccactccttctcttgctcctgctccaaccatgtaaaatgcctggctcccctttcaccttccaccatggctgcaagtttcctgaggcctcctcagaagccgagcagatgcctccatgcttcctgtacagcctgcagaagtacgagccaattacctttctttatagattacctagtttcagatatttctttacagcaatacaagaacagactaatacacccaggactaggctttgaccaagtcaagtgyttatataaatgcttgctgaaagaaaatcagtactgaacag

SEQ ID NO: 201605 - DNA, 524 bp, Homo sapiens
gagtattaagttcaaaaccatatgttgttgatatgcatagtatttgtggggtttatgtgtacaatttgaaaaaaaacaaattcttatttgtggattgtaatatatagtatgtctttgttcagtattttctcttagaaaaaataaagcagtaatacaattctcatgatactctcttctggacaaagaaaatccagtgtgctgttaaataaataagatttatactgtatgagacatatataagaataagaaataaaatcactactaagtattctcatattgataatttgaaaattatcaattttaagttgaagaaaattttagttcctattactgtatagaaaatatttataatttaaaaatatttttggtaatagaaaatatgaatcatttattataaatgatcatttaaattctattttgaayatgtagaaaactagatgccaagtagagtctacataaaatgtattgttttttcttcctggtaattgccagtgaatcctggttcttacaaaccaacaaaaacc

SEQ ID NO: 201606 - DNA, 623 bp, Homo sapiens
gaaaaattatagaaagataatctggggaaagaacagtttattgtggtgaaataattggtaacatttttgcctgagattacttgaaagatggaaatgaacttatagatctggctaagaagatttctagacaggatgctgaaaatataatctggtttctacctatgataaaggcatagggaggaaaaaaagatcaactaaagacgaaattgttcagtttgcaagcagaatgtagtgggggaaacagtccaggatttggtgggttggaaataaacctctctctcattctcaaagtttttaaaatgataggtaaccaatgtgtgtgttgggatgggggaggtgagagtaacagtagaaaaaaaaataggatatgtacttaaatacacacgtgtgtgtatgtgtggagagaggaaatgttttcccactagttacttaaaatattgttttacatcaaaataaatattaattagtatgtataractctaaattggcattaatttttaagaaagaacatacaacttcaaagaaatgttactcttatggcttgtgatttagggctctgcccctaaatcctctagaatatggacttttttggggcagcaatgagataagccatctagatgaat

SEQ ID NO: 201607 - DNA, 538 bp, Homo sapiens
cttgtggttagaacaaatttataaacaaaaaaagggaagtgatgtacagaaatcagcagtgaggtacagaaacagctggattggttacaggctggcatttgctttatttgaacatggtttcaacacttagcaggctatgagtggctgaaatatggctgctgggattggccaaaaatgcagctattgttacaggtgcatgcttctaaattaggatttcaattttgtatgcctattaagctaagttacagtttgtccacaaggactcaaatatagaagcacgaagtccttctcaggccatatttagtttgctttaacagtctaatgccctccctgttagaatttttgttaaaaacaattattctctgcttttggtcagcctcttatgagagactgaacaatacttaggcatagrcacccctccctgtcaccatcacaggtaagttgtctttgtctctgtggaactcacaagtcatgatgttaggctcattgaagaaagattccctttgttgttcacatcattattgtcactctgatcaag

SEQ ID NO: 201608 - DNA, 600 bp, Homo sapiens
aacaatgtgatctttgtcacaactactccactgtggcaactttgtggttatagctgaagtagccatagatgatatgtgaacgaatgaatgtggctgtttcaataaaactttatttacaaaacaggcttggctatgggcatagtttgctaacccctggactagataacctttgaaatctccttaggattaggccttctatgttatttaatatttgatcatagttaatcttaaatgaaatgaaacctttgggtacttgtaggaagacctggactttgtgtgtgtctgtgtagcactattaatggtttcacttttgacttacactgagtcttgctatcrgggaatgtttgggggatccaaactcaggtgggagatttgggtctttttcagagtatcattgtgtgaagacttccttgctgtgctctgcatttttatctggttcagagatttggagtactagaaaatgatgcctccatggaatttacggtggctacagtagtatctcaattctgcatttttttcccctttattgcagtatgctggaaaaaattttggatttttctttgcacagggagaaggccttaaatctaaggatttcactcc

SEQ ID NO: 201609 - DNA, 600 bp, Homo sapiens
aacaatgtgatctttgtcacaactactccactgtggcaactttgtggttatagctgaagtagccatagatgatatgtgaacgaatgaatgtggctgtttcaataaaactttatttacaaaacaggcttggctatgggcatagtttgctaacccctggactagataacctttgaaatctccttaggattaggccttctatgttatttaatatttgatcatagttaatcttaaatgaaatgaaacctttgggtacttgtaggaagacctggactttgtgtgtgtctgtgtagcactattaatggtttcacttttgacttacactgagtcttgctatcggggaatgtttgggggatccaaactcaggtgggagatttgggtctttttcagagtatcattgtgtgaagacttccttgctgtgctctgcatttttatctggttcagagatttggagtactagaaaatgatgcctccatggaatttacrgtggctacagtagtatctcaattctgcatttttttcccctttattgcagtatgctggaaaaaattttggatttttctttgcacagggagaaggccttaaatctaaggatttcactcc

SEQ ID NO: 201610 - DNA, 600 bp, Homo sapiens
aacaatgtgatctttgtcacaactactccactgtggcaactttgtggttatagctgaagtagccatagatgatatgtgaacgaatgaatgtggctgtttcaataaaactttatttacaaaacaggcttggctatgggcatagtttgctaacccctggactagataacctttgaaatctccttaggattaggccttctatgttatttaatatttgatcatagttaatcttaaatgaaatgaaacctttgggtacttgtaggaagacctggactttgtgtgtgtctgtgtagcactattaatggtttcacttttgacttacactgagtcttgctatcggggaatgtttgggggatccaaactcaggtgggagatttgggtctttttcagagtatcattgtgtgaagacttccttgctgtgctctgcatttttatctggttcagagatttggagtactagaaaatgatgcctccatggaatttacggtggctacagtagtatctcaattctgcatttttttcccctttattgcagtatgctrgaaaaaattttggatttttctttgcacagggagaaggccttaaatctaaggatttcactcc

SEQ ID NO: 201611 - DNA, 582 bp, Homo sapiens
gaattccctgactgaccctctgaaaacagccgattgggatttttttttttttttaattgacacagggtcttgctctgtgttgcccaggctagagtgcagtggcacgatcacggctcactgcagcctctacctcctggacccaggtgatcctcccacctcaccctcccaagtagctggggctacaggcatgtgccaccatgcccagctaagttatgtatttttagtagagatggggtttcctccatgttgcccaggctggtctcaaactcctgaggtcaagccatccacccrcctcagcctcccaaagtgctgggattacaggcatgaaccaccgtgtccgtccccagttgggattttttttattaggcgaagtacaggaattgatatcagggtagggtatgcaggctgggctgggcaacgcatgtgagggttagggtatgcaagtcaatgtatctggttgtgatgattatcttgagtcatgggccacctggtggtctagccggcaacaacaaggctataaatcagttgttcagcattccttcctgaggtgggacactccgcaaccttggttccatattttgg

SEQ ID NO: 201612 - DNA, 597 bp, Homo sapiens
gaattccaacctgattatgggggatcgacagttgtaaactcaactgcagaattaacctggaaactcccgaggccaaaggacagaggctgtgtgtccctgtgcagcacagctgttggcggggctgtccctcacatgccttgaggcaccatgagatccctgygtgttgtccagcttcccagcagtgaagcttctatggaagccagggctagttcaacctgtttgtatgatacagatacacagaatcacctgctcacaagaccctcggaatctacagagtaggtcggtgcagagcaccctgcctcctgggttgctagggtaactcccgctaagcactgaactgagtgagggacttcatctgcccagggaagaagagacctggttttcccttgcatttttaggtggggttcctgtttgcaggtaaactctgcatcccccttaaaatgaaacagacctgcttaatgataacagcacatcactccttcgttatggctgcgactccctttcagtctaatcatgagtcagaccctgacgacactgacacatacctgaaagtctcctgtaaggcttgttgctgtttttggtgccattttggtgttt

SEQ ID NO: 201613 - DNA, 597 bp, Homo sapiens
gaattccaacctgattatgggggatcgacagttgtaaactcaactgcagaattaacctggaaactcccgaggccaaaggacagaggctgtgtgtccctgtgcagcacagctgttggcggggctgtccctcacatgccttgaggcaccatgagatccctgcgtgttgtccagcttcccagcagtgaagcttctatggaagccagggctagttcaacctgtttgtatgatacagatacacagaatcacctgctcacaagaccctcggaatctacagagtaggtcggtgcagagcaccctgcctcctgggttgctagggtaactcccgctaagcactgaactgagtgagggacttcatctgcccrgggaagaagagacctggttttcccttgcatttttaggtggggttcctgtttgcaggtaaactctgcatcccccttaaaatgaaacagacctgcttaatgataacagcacatcactccttcgttatggctgcgactccctttcagtctaatcatgagtcagaccctgacgacactgacacatacctgaaagtctcctgtaaggcttgttgctgtttttggtgccattttggtgttt

SEQ ID NO: 201614 - DNA, 598 bp, Homo sapiens
gacttggacatcaggacaggcttaattaaaggaggggtggagacggcagaggacgaggtggaggaggcagaaactgcagtagtggttgtggagttcattttgacattggcaccatctgccttcactaggttaggaattttctctaaactgactacaggaactggaacactgaaaaataaatgaacaaacacacacaattgtcttctttgatacatctagtctgctgaggaaccatacccgcttatcattatcagaacatttccttatcacttatttatactccttctataagcaagcagcatgagtccagttttgatgggagagagttctgtgccctggaaaggatcaacagggggtgcgaggctggcacagtgtcaggggtggcatcagggctgactgattaccgcccgtgctgagctgtccccatagatcctgcaactcyccacttcccgggccctataggttggccatttccaacacagcaccttgggcagaacaaggcgcctgttgtgaagctcaggaagagataccgtttgtcccctgaagacaatgtgccactgctgaatcacgccccctccccccgctgctcagctagtcc

SEQ ID NO: 201615 - DNA, 598 bp, Homo sapiens
gacttggacatcaggacaggcttaattaaaggaggggtggagacggcagaggacgaggtggaggaggcagaaactgcagtagtggttgtggagttcattttgacattggcaccatctgccttcactaggttaggaattttctctaaactgactacaggaactggaacactgaaaaataaatgaacaaacacacacaattgtcttctttgatacatctagtctgctgaggaaccatacccgcttatcattatcagaacatttccttatcacttatttatactccttctataagcaagcagcatgagtccagttttgatgggagagagttctgtgccctggaaaggatcaacagggggtgcgaggctggcacagtgtcaggggtggcatcagggctgactgattaccgcccgtgctgagctgtccccatagatcctgcaactccccacttcccgggccctataggttggccatttccaacacagcaccttgggcagaacaaggcgcctgttgtgaagctcaggaagagataccgtttgtcccctgaagacaatgtgccactgmtgaatcacgccccctccccccgctgctcagctagtcc

SEQ ID NO: 201616 - DNA, 566 bp, Homo sapiens
ttgactggcctaaattctgaattttcactctcatttaccttgaatgtggaagaagwaaagattagggctcagctctcatgtggtttataattgagaaattctacctgtaatagagaagacttgttttcaattattcatgccctccttgctttagagttatacatctgcatcctttgccatttgtctttccaggttctcctgcaatggcaggcatccttgccctctctgccgccccagtattggagcttggctatataacttgcaattgccaatgtaaagtacgtgagggagtgacagtgcaccaggtttaggtcaagggcttaagagacatcatgtgaatctgtccataagcttaaattcctgtgatcaccatgaggaaagcaagccccagaaaggcactaacttttcaaaatggaacccagaatgagacacatggagtagacctgaatttgactgactttgaagctggagctgagctgagcctaccagcttaattgtagaccaattagcaataaaaataaatgctgggtgttataagccatgagtttggggatgattgttataca

SEQ ID NO: 201617 - DNA, 552 bp, Homo sapiens
caaaatgggatagtctacttgcaggaaaacaagctcagggctcccactgattctacattatggtgagtagtataatcatattgttgcatattattatataataataatagacatccagaagttgataaatgtaatgtgcttgaatcatcctgaaacaattccctgcacccsagtccgtggaaaaattgtcttccacaaaactggtccctggtgacaaaaacattggggactgctgtattattttggagtccattaaaagcaatttctgaataatttgtgtgtactattatttatagtataataatctataaactttccataactcattaatgattttgttggtagacttcaagcataaggataaaatctcttcatctctaaaatgaggtcaatcatgggtagtgatatttgtcaacttaccataattcagtaattttccagaatgatcaaaattgggggaatattgaatggctttacttagataacttttattcatcttaatgaagctgtctcattaacctgcaaggtatagagacatttgtcggtttgaga

SEQ ID NO: 201618 - DNA, 552 bp, Homo sapiens
caaaatgggatagtctacttgcaggaaaacaagctcagggctcccactgattctacattatggtgagtagtataatcatattgttgcatattattatataataataatagacatccagaagttgataaatgtaatgtgcttgaatcatcctgaaacaattccctgcacccgagtccgtggaaaaattgtcttccacaaaactggtccctggtgacaaaaacattggggactgctgtattattttggagtccattaaaagcaatttctgaataatttgtgtgtactattatttatagtataataatctataaactttccataaytcattaatgattttgttggtagacttcaagcataaggataaaatctcttcatctctaaaatgaggtcaatcatgggtagtgatatttgtcaacttaccataattcagtaattttccagaatgatcaaaattgggggaatattgaatggctttacttagataacttttattcatcttaatgaagctgtctcattaacctgcaaggtatagagacatttgtcggtttgaga

SEQ ID NO: 201619 - DNA, 589 bp, Homo sapiens
tatttaccaattgaatagccttctttgtgaagtgatgagtcttcagtcactgcagcattcaagcagtgtttgaaaaatcacccaatgaggctcccttcacgtacacatccaatgaccactcatgcctcttccacgctaatattgtattcacatatatcattctgctggtttaaactctgaatattcctcgcctcatcttgtgaaatttaataaaacttacaaggtcattggtttggacttctcccacactggasccaatagaccaaatgaaaatcgaattcctcatgctgaagttgcatgccaccaagccaaaactaagctatttatctgaccttccaagaaatcaggagagagaaggaaatagccaaatccccaaacaggccagtttaagccagcaagataaggcactcccctctgctttaacctttacacaaaaagtaactgaaatgaccaatctgttttttgttctgtttctggtttcctcagcccttttctgtctataaaactaacctcctctgctccactcatcgggacattcattctattttggagaatggggtgttgcccacttctagaattgcaaattaaa

SEQ ID NO: 201620 - DNA, 524 bp, Homo sapiens
aaaaggaaagagtactaacttatatttgactataatacgtcaagattcaagttataataaaggyaataaaaatgagtaaaatcatttataactaatatactaatgagaagaaaatatgaaattaaaaatatctgattaatccacaagaagataagtatgtaaaagaaaccataaagcctgtgagacagattgaaaacacatattaaatattaacatagagagacaaatatgtcaattactgcattaacatataacgagtcttaaagattggcagcctggaaaagaaaaaaaatggtttgcaaaatcacacctaatagataaagacacagaaaagtaagaattagggtagaaaaagatgtactagacatttctagctaaaaggtagctcatatcacaagactaatagcaaacaaagtaatttaagacaagaacagtttccagagataaaggcagtggtggtggaaggtgggaaagaatatttatgatggaaataggatcaattcactttgaagatatgacattaa

SEQ ID NO: 201621 - DNA, 506 bp, Homo sapiens
tcaaacaggataaaatttaatttttttaattctgtaaactggaatatcttaaattctgaggaaaataatggtatagagattatatttttattgaaagcatttatattttgaatcagcatggtattaatattgagaattctataatttatttgaaaaactttgacttyaaaaataatttccaaagcaagatacttggaatggagtaaagaaagacaatgtctataaaaatatttatgtagacacatctccatgtttcaaaatgcaagaatagtaagaatattctttatatagcagaatttgatcttatcttactaggtataccagcatctgtagagaaagtgtttgctcaattaaaaatactgatggacatcaactaaagatatccatatcaaatatgttaataacataatacaactttcaaatgattgcagtcaatttgatgtaaaaaagtaagatcctggccggtagtgtaagttcatgcctgtaatcccagcaatttgaaaggc

SEQ ID NO: 201622 - DNA, 599 bp, Homo sapiens
taggaatagacttgtatattttgatactgttcttaaactttccagaaaaacaagtaagctgggatatgattatgatttctgctttcctctgtgattcatattttactctttatatggttttactctttaggacattggacctttagaagaaactcagtcaataccatctacagtagattaacaaggagcacagactttttgcttatcctactgttgaaagatggtgattctctttcccttgaatctaagttcaccttagagatttgcttgattataaaatgctgccgtggaatattctggaacttctaaggctggttcataagaactcttacagcctccatctgggtcttttggaacactgggctcttgaaacccagccataatactgtaaggaagcccaaccagccccagggagtggaccctggccaacagccccacgtgaactcccagctgacaactcccaccagcttgacagccatgtaagtgagccatcttggaaatgtattcaccagacmagctgggctgctgatgcctcatgggattgagatgagcacaccctgttaaactctgcccagagtataaagttgtgagacaaaaat

SEQ ID NO: 201623 - DNA, 449 bp, Homo sapiens
tttaattgtaacttttgttatttttgtgttttatagtctaactttaaacatgtgatagcaatgttttaaaatagctaaaaaacttgaaatcagttgttttctttattgaaagagaacatttaattttatttctcaacttatccactcttaaaatctctgtcttttgatcactgtatttaaaacattgacatttaaagggattgttaatatagttgaattaacatctacttatttgcaattgttttatattagttgcatttgttctccgtttctttctctcccctgcctccacccatctgccttctctggtttggtttgattccatttttctcagcataacaatcacatttttaaaaaattgttmacagttgtcctaaagttaagagtatgcattttttaactaatctaagtgccttttttcaaataatattatactgcttcacatgcag

SEQ ID NO: 201624 - DNA, 605 bp, Homo sapiens
cactttagtttgagaaagaacttcttctttacctttgaaagataagctcactagatatagaattctaggtttctttttaacactgcatattttactccactctccttgctttcataatttttgacgagaagactgatataattctttttattttgttttgttttaatccagcttttattggtgtggttcacatattcaaacactgaatgtttaaaatcatttttggaatatctagtggatatatgtgtcgttgagtatgtgcatgtagtatgtgcatgtatgtttgtgtgtagatatgtctacacatgcctggatatacatgcatgtaggtcggtgtgtatgtgtgcatgtaggttggtgtgtatgtgtgcatgtgtctatatatgtgtgaacatgtgtgtatgtatatgttaccaggtatgtttrtggtttgtgtttatatgtgtatattcatgtgcatgtgtacatatgtgtgtattatgtgcatatgatactatttgttctgcaatctatgcccaaacatcacaaatgtgacaaatgtcacggtgaccacaggaaagaagagttcatgccagttacattttcagaaaaaagaaaaaactcac

SEQ ID NO: 201625 - DNA, 605 bp, Homo sapiens
cactttagtttgagaaagaacttcttctttacctttgaaagataagctcactagatatagaattctaggtttctttttaacactgcatattttactccactctccttgctttcataatttttgacgagaagactgatataattctttttattttgttttgttttaatccagcttttattggtgtggttcacatattcaaacactgaatgtttaaaatcatttttggaatatctagtggatatatgtgtcgttgagtatgtgcatgtagtatgtgcatgtatgtttgtgtgtagatatgtctacacatgcctggatatacatgcatgtaggtcggtgtgtatgtgtgcatgtaggttggtgtgtatgtgtgcatgtgtctatatatgtgtgaacatgtgtgtatgtatatgttaccaggtatgtttgtggtttgtgtttatatgtgtatattcatgtgcatgtgtacatatgtgtgtattaygtgcatatgatactatttgttctgcaatctatgcccaaacatcacaaatgtgacaaatgtcacggtgaccacaggaaagaagagttcatgccagttacattttcagaaaaaagaaaaaactcac

SEQ ID NO: 201626 - DNA, 402 bp, Homo sapiens
ttattgtgtgtttggatttggatgttcataatcaaaagaagctcttccataatattcttatktctattacagctatatcaacccattctccaatgcaacaaaagcccataaagggggtaggggggagagagagacagaaagagagagagagactttgattagtgaaagaatcttatatctcatccctgctgatcttccccctgcagccttaaaatattagaggtttacagggctcttcgcaaaacttggtcataggaaagtgactcttcaggttcctatgcctgataacagatatgatatttttatctgatgtttaaggcccttctgtgtcaaagagaagtagatggcaactctctataagcaatactgttgcagcagttaaaattgaggcaaacagatatg

SEQ ID NO: 201627 - DNA, 553 bp, Homo sapiens
tactcagatcaaggtgttaatacatcaactcaataatacattcaagaaaatataaactaggaagacctttgaagaatgcatttccttcttgctatctcctttaaagcagtaatgaccagaaaaatctctcaaggctgaatgtgaaaaaaattatggattttgactgctgaatatcatgtaaagaaaaattatggtaataacatttaggagaaaaggacaacttcttcaatgatatgtaatcatacctagagtgaaaatctttccctaatgtcatgacacgagtgctaaaatcataggtgaatttaacttaatgattctgccattktgctgtgcctttatttaccttctaattgtagttgtaaaataattcagcatttacatatttatgccttgcatttcttgcggaattttatgcaatcgtgaaataactccatttagcaatcaagacacttaatttaaagcttgcctcacttccaatgctgggtgacaatcataaataattttaatgacaatgtcaggaatgttagaaatatttgaaggatcatttgttttg

SEQ ID NO: 201628 - DNA, 401 bp, Homo sapiens
tctgtgcatttctagctatgtatccatctatctacttatctaattccttaagtaagttttaaaccagggctgtaccttatccataggaaaaatacacagatcacacccatctctttccacatacggtgagtttgctttcaagcctaaagaacagcgctaggcagacatctaygtgtgtctcatactctgtttcgtcatgtaggcagcttggaatttcaaatgattgagttattttggggttccatgaattttattatttgatatgatagacagtaatgagtagttcagaatgagcgtccacaggtacaaaaggactcactagttaatttaaaaaatgaataaactactagtgggttgaaataacattatcagtgaattgttactgatgcatagaatcaaac

SEQ ID NO: 201629 - DNA, 495 bp, Homo sapiens
ctttctgttctattcacattttcaactgattgcatgaggcccacccacrctatggggggcaatctgtcttacttaagagttcaccagtatagtgttactgtcatcctaaaacatcctcatttaccaagaaagaacccagcagacaacatgtttaagtgggaagaaaacatagatgccacactgcaggagaactaggacaaagcctgcaaactgccttgcagaggggactgatgccaatggatctgttttgtgaggtgtaagccatttttgccctaagtagaaaaaaaaaaacccatacactacctcaagtgggaaaccttgaaaactgtttcagtagctcaccttaagagcctgtcacaccctcctgaggaatcagtaacgtctacttaataggcagtcagtgccctctggctctgagtcctggtacaaaaatttaaaactctctgccagaccctctctaaggatacctacttacaaagtagggaaagggaattc

SEQ ID NO: 201630 - DNA, 469 bp, Homo sapiens
tgattgcatgaggcccacccacgctatggggggcaatctgtcttacttaagagttcaccagtatagtgttactgtcatcctaaaacatcctcatttaccaagaaagaacccagcagacaacatgtttaagtgggaagaaaacatagatgccacactgcaggagaamtaggacaaagcctgcaaactgccttgcagaggggactgatgccaatggatctgttttgtgaggtgtaagccatttttgccctaagtagaaaaaaaaaaacccatacactacctcaagtgggaaaccttgaaaactgtttcagtagctcaccttaagagcctgtcacaccctcctgaggaatcagtaacgtctacttaataggcagtcagtgccctctggctctgagtcctggtacaaaaatttaaaactctctgccagaccctctctaaggatacctacttacaaagtagggaaagggaattc

SEQ ID NO: 201631 - DNA, 467 bp, Homo sapiens
ctgttgcttcatacacccagttttggatactttgtaacagcaaccctagaaaaccaagacaccacaaattcctacatgcttagggcagatcttttttttttttttttttttttttaagatggaatctcactctgttgctcaggctggagckcagtggtacaatctcacctcatggcaacttctgcctcccaggttcaagcaattctcctgcctcagtcttcccagtagctgggactacaggcatgtgctaccatgcccagctaatttttgtatttttagtacagaaagggtttcaccatgttgaccagattggtcttgaactcctcacctcaggtgatctgtccgcctcggcctcccaaagtgctgggattacaggtgtaagccactacgttcgaccagattatttttttattaactaagtacttttctgactgatcctgtatggaaccttggaaacactgacataa

SEQ ID NO: 201632 - DNA, 550 bp, Homo sapiens
aaagatcatttcctccctcaccttgttcaatgatagaagagtttgatcaaagagaatatgaatcttcatgaacattaacctggactacaaagcaagacaagcagcaagatgtattcatttttagagcatattatttatattatcaatagagaatagtttcctaaagaaaaaaagacaattttaaataatgaaattatgaaaatttgtgctactgttgcatagcaacatgtttttcccccatttataaaatgctcttaaatgcattataatattaaaactaaaactataaaacaagtgaaatgtccaaaaatacagcattggttaaataaattataatagaatcacatgatggaattctgtgtagttattaattatgttgtaaaaatatgtagggttattgaaaatgtttataacttggaaagtgagaaaaacagagagtaacttatacactacatttttgtgaaggaaaatacaygtgaatataaaatagtttgtgcctagtgaaagaatatgatgacatttttctttgtactttttcttatttccacag

SEQ ID NO: 201633 - DNA, 428 bp, Homo sapiens
ctgcataccaaattaaaatcctcagaaccaacctctataaattctgcaagacagaatttcaatctggcaaacatggaaaggcctggctcacaaaatgtgccaaaaacccatttcccaatgaagagccatggaggtgcacccatgccctgcccaacacacccgagccagtcaaggtcagaacccgaggctcaattttaatcccaagtcatttccaatcaaagccggatggaggggcaagcaaatggaagccaccctgtgcttcccttcataatcacattaaacatcaacagctgcattgtcctcattttctcatcaccccactcagtctgaatcctgcaaaaactcagagctggtaaaaccatgtgactcctttcttggggttgtcrgctttccattatccccagttcccctcctgatctctgatcctg

SEQ ID NO: 201634 - DNA, 622 bp, Homo sapiens
taattgtggttgttaaagcaggctttctccagccatgagtattaaaaagccatttgctaaggatggaagagcagaaggagaagtctgagtccttactgtccctggtgacatggttgtgctgtctacttctgtgtttcttgtggtatcttgtgctagttaagcacagggtaagttatatgcttgattatttgaagccaaayacacttcttactgtgggatctgattgcaggaccctcctgggccatactttgtgtaggtgaaaattcagaagagttgacacagacagtctgacttctctcactgccttttttttctgaaaatggaaaactcagctttgccttgcataagagccattaaaaggtaagaatctaggttggacttttgtgtagaagtaaagcagatattttttatataccataattgaaggttccttaatggaaaacaaaggctgtcttcatgtggctgaacctaactccttggtattctccaacagggcttggggccaaagccacaggtgacaggaaagcacttctttcttaattctctgtgcacatatctgtccaggaaacttgagggtagtaagtggtcaaaagcggaaactgcaaatccccgtgtcccagcc

SEQ ID NO: 201635 - DNA, 514 bp, Homo sapiens
gcttccccatccctgcatctccctttgctgcttttattcatatgggctgatggacctgttgttcctatctaatgagtcagcccagatggggttctagtttgcatgagtggccatgtgtcaatgttgtgctcaaagaagttgctgctgctggtctgtcatccagggaggtaccatttgcaggtaaaacgaaagttccttctagagagccaatatgaaacatcattacaagatgtcagatacagtggatgcacaacaggtgtcagtcctcttccctttggattcaagggagcatttgattttctttgcatttgtatgggttgattaaatgagcttgsttaaagcaggccttcaagcgacttgcacagcttgaaatgtcacgagtaatttaaaacctcagaccagaaaatttgtcgtgcaatatcacactgtgacaggagtttctgcagagagaatttttctgattggcaaaaccagaacctgcaaccagttccaagcagtcagaaggtgggagaag

SEQ ID NO: 201636 - DNA, 577 bp, Homo sapiens
aaatattctcaaaatttgtcaagtcatacataatggctacccactgaaatgtcacttgggtacataaaatgacccataatagcatgaagagtgcaaacattcacaagtcatgccagtaatcgtgatggaaaaagccattgcaagctttgtgtccacatcattcaaattcttgctgctcagctatgctcaactgtaaattgaacattgctgaggacaaggcaccaaaacagtggctgagaacacaagaaggaatgatggactagtccctgacttggaggagcttacagtctaacagagaacaaaaccaatttcacaaattataatcgtaatcataggaaacccctcaggacttccaagggggtaagaaaaagagtgaggttagctcagagtgggaacagattgcctttagtagaagacaggagttgatttaaggaagaagcaaatttaaaactaaaagtccctacaaggtagtagaacatatgagagagacttcayattgcaagaaatagccaagagtacaaagccaataaaaacagcaaaatggctggagcaaaaattgctatctttgatgtcagta

SEQ ID NO: 201637 - DNA, 577 bp, Homo sapiens
aaatattctcaaaatttgtcaagtcatacataatggctacccactgaaatgtcacttgggtacataaaatgacccataatagcatgaagagtgcaaacattcacaagtcatgccagtaatcgtgatggaaaaagccattgcaagctttgtgtccacatcattcaaattcttgctgctcagctatgctcaactgtaaattgaacattgctgaggacaaggcaccaaaacagtggctgagaacacaagaaggaatgatggactagtccctgacttggaggagcttacagtctaacagagaacaaaaccaatttcacaaattataatcgtaatcataggaaacccctcaggacttccaagggggtaagaaaaagagtgaggttagctcagagtgggaacagattgcctttagtagaagacaggagttgatttaaggaagaagcaaatttaaaactaaaagtccctacaaggtagtagaacatatgagagagacttcatattgcaagaaatagccaagagtacaaagccaataaaaacagcaaaatggytggagcaaaaattgctatctttgatgtcagta

SEQ ID NO: 201638 - DNA, 460 bp, Homo sapiens
aatatttgattagctgcaattgcgactatacttagttctcctagggaagcatatggggaggcagatggttcaggaaagcctgaatcacatcaacaaggctctttgcctccaatttgctgagtctcctgatgacttattagcaggacgggtttcaggatttgaaggtggggccttggctgtacccttctcagaaagccccatgttgtgcattctgggcatcctttgtgctggccttttgcaagggaacctggatcgatgtggactctgggtcatcatgaggacatagcgggaaatagagacagcctcagtgagctaactgctctgtccaagattcagctcacctccacaaatgttactacacccactgccaagttctctgtgatcaggccacttggagctttggtcagtcatgcattctataaatatttgcygggccgggatacagcacaaagcgtcagct

SEQ ID NO: 201639 - DNA, 562 bp, Homo sapiens
ggtgtgaatccacaggatgtgctgttgcgggaagtcagggaccccaaacagagggaccggctgaagccatggcagaagaatgtggattgtgtagatttcatggacatttattagttctccaaattaatacttttataatttcttatgcctgtctttactgcattctctaaacacaaattgtaaagatttcatggacacttatcacttccccaatcaatacccttgtgatttcctatgcctgtctttactttaatctctcaatcctgtcagctgaggaggatgtatatcgcctcaggaccctgtaataattgcattaactgcacaaattgtacatcgtgtgtttgagcaatatgaaatgtgggcaccttaaaaaaaaaaagaacaggataatagcaattgttcagggaataagagagataaccttaaactctgaccgccggtgagccgggtggaacagatccacatttctcttctttcaaaagcaaatgggagaaatatygctgaattctttttctcagcatggaacatccctgagaaagagaatgtgcagctgggggtaggt

SEQ ID NO: 201640 - DNA, 594 bp, Homo sapiens
cgaaccagctgagtccccggtgctgggctgtttatgcattttattatattgaattatttttaggcaatggagctccttctttcccagccccccaactcaatcttacatggaagtctaatctgtaaagcagacaaacataattttatgaaaataatttagtttatatagtccaaatgggtagcatttgctgaagaaaatcagtgaaaccatgaagctattctggttgacatgcaagttagaaatcaagagctatggagccttagataaggagttttttatttttctgacagcataagatagagtatatctaacatctacaagcatcactgtttgtacatacgtattttgtgtgatatatatttgattcatcccatcccttttcaaaatctttggctctgctattcatttttaccccccagggtaactatttctcttgctattattcaaaaaccctaaaattgatttttttaataaaaatttgggatcaattattgtttcaaagtcccattactttatctagcaaatgttcacactcccttcctcatgaatactaaagccraatgagaggtatggggagctcagggtaagcactga

SEQ ID NO: 201641 - DNA, 451 bp, Homo sapiens
tagctatgtgaggctgggattccagatggtgccaggtgtcctgctggcaaagagactgggaagagcagtgtgacagctcattaggtgaggtctaggcaaatggcagttcttcataaagatggaggtagggcaggttatgtttatcatacctggccatataagaaaatatttcacctstctagttatttataaatcctcgtgcaatttccccatagctgactatcattagattatggggcattagcttttttaaaggagagaaagccactgattgcattattgctgattctgtcatggtgtcccactcttaggacaagaccgaggacaggactgccagtatttaatcgggcttttcagaactcactggaaaaacctacagtatcaagcaatctggagttacttttgactctaaattgactcagccttttggggaacaatatagcacaggaga

SEQ ID NO: 201642 - DNA, 522 bp, Homo sapiens
tgaccctgtgagctaggcagcacatgctcaactacaggaaattattctggtccttctctggaaaaacaatgaatacctttttcaaagtggctttctcttctgcctattgcttacaatctttggaaaaaaaataaagtttggcttcagggtgactttctgtccttcccgttcctagaaagggtccgaaaattcaccctacctgaagagtcttaatcgttgtcmtcttcaatctatgaagaaatctgtttggattttgataatttttcagtaaaaaacatacttcttcactcaccattttgcctaagcctcacattcattatggaaattaagtaaggcatgattcttgtctcattggagctcggattctgtagtcctgcctaaggccacacagctggaaagtggggacaagtctagaacttatatttcccttactacaggagcattttctaaaccatatgaaaaccaacattgtgactttgaggaacccatagtctaatggggcttttccacttctgttggctc

SEQ ID NO: 201643 - DNA, 545 bp, Homo sapiens
ggtcatgtcatcaggggtttgaggaacctgctctcagggtcaaggtaaaagcctcggagaggagacctagaagtgaagcagaaataacaccacagccaacctgatgaaagccatgcccaggctcccgtcaaggactctgcttcttccttgtgactgtggacaacaggagcttgggtcctgtcaccggatgagccatcttttggagctggcaggcsccagctgtgaggaccagagggctgcaggatgctcagtggttggcagagcccagcgagtaatgggggaagagaagggcttgagatagtgctgcacagagacaaagaaaataaaaaaaaaactattttcttttctagtatagtttaacagaagaataattatgatgaagttggtatgccttgagctttacagtagcacactgtttagaacagaatattaacacagtggccagcaataatttacaatgagattgtgccccaggtgagggatgtgcagaatttgtatttcttcttcaaggtgaattttccaattatactatttttggttagaga

SEQ ID NO: 201644 - DNA, 573 bp, Homo sapiens
attctcagaagtcctatcacactgcttgcccaaatgaccaatccgtaaatcttttttgaatgttctgttcctctgacattcttttttccactttcttcttctcatccataaagactgtgtatttttcctttcctcagaagttcttccctcagtgccacaggcagagtaattgctccctcgtctgtttccacagcattttgcaccagctcttgtagaatacttgttcctccgagcagcagttctgtgtgtctttctgtaaccagactgtgggcttctccaagacggaaaagtacacaactcaccagtgagctctaggattctagtaaggtgcttgacataagaggcacataattagtcttttttattgaattgatagcatcatcctcacctcaaaagtctgcctgtttctcagtgacctcttaaatgctacctcttctatgaagatcttcccaaytggaaggcagaatttagcacttataagctgcacaggctctgactcagactgatctttatttaagttcaggctttccatgcacttgcaaatcatttatcctttctgagaataattatctt

SEQ ID NO: 201645 - DNA, 576 bp, Homo sapiens
cctattttattttacatatccaacatttcctcctaaaccagattcgtcccaataatgttgaaatatattcaccattctctcattagaaataaaatatacacagaagtcaaatctcgcagctcttcctagataccttggttgggtggcaaccaacttacctaaaggatgtctctactggctgttttcatttctccattgctctactcactcttcattatcccagatctgatttccgtccccttagcatcagtttaaaaaaaaaaaatcctattgaggtaaatagtgtcctacatgtttctaaaagctcgaggaaatttttagtccacattatacttggattctttgcagtattctccaatgttgttccrctcctcccccttgaaataccctcccttggccgccgtgaaatgaagcttcactatttttcctcttgaccctctgatagcttttctctctctccttataagggtcacctccctgtaaattggcatgcctttccccactccaatgtcactttctatccccattagggtggtttattttatctcatggcacatattactgtttgtgttatac

SEQ ID NO: 201646 - DNA, 524 bp, Homo sapiens
aggtttacttaggaataagacttgatcccttccttgagctacagtcaaatataatattgtaattataataaacaacccccctcccccaagagacatgaggactcaaaagggttaatttctttttttctttcttttttttttttttcacatcactcctttattatactgatctggaaaaagatttagtacagttatgctcagatgaacactggacccatgtggcagggccaagcaagtagaacatgattcagaaatcagtgaaagacatacttggacaggaccaagaggcatttcactgtcacgaaacaaggcaggaagggattgtaatacccacaccaggaagcactcctgcccctcagaggtcaaggagctgatcctatattggtatgaggaatggcttattttctgatgacyacatgtgggactatttcaaccgccacgagaaaccccagaagggttattgttttgtattatttatatatactatacttcttaaattaaatgtaacacataactaaattcag

SEQ ID NO: 201647 - DNA, 275 bp, Homo sapiens
ctcattacgcgttttatgctgctgacttttttatttttaagacatctgctcccgaaagctcagagccctttagcatttcattttctaaacgaatcctaatctttcctgtgactgaatcggttcagaggatatcttttcaataaggaaggaagccctcccctgctcactggggacgtcgcaggrtttttaaacctaaagatttactcttttgtgcacagacgctggaagcatttgggtgaggcagtgcagtgctttttgggaaatgcatcagatct

SEQ ID NO: 201648 - DNA, 409 bp, Homo sapiens
ttcctctctaagcctcagctttttcatctctgtgcgatggaacaaagagaatactttaactgccagtcctggtcaaaattcttagtattttagtgctaagaaggggcagaggagaagttgggaggcggggaggacatagcttggttgttttactcctctgctaccagccttccacygcctgacattgcgctaagaataatgcttgaattcactccacaccacagcctggccacaatgcctcatttaccttcactcccttattcacagtaggacaacccagtagcacattcacagtttagggaagctgagatgcctcctctgattctaccaggcagaggtagtagttctgtctatggagttccccatcttgacgatggccttatccattacattgatgatacctgcgtac

SEQ ID NO: 201649 - DNA, 550 bp, Homo sapiens
ctttctgtttttctgtggggagatggattgtctagagagcctgcttttttgtattaaatgatgggtagaattttaaaactcccttgggagtagattctttgtgtcatctatgtgaaaagactttttgctctgttcacaaaatccccaaataaaacctgattcatcataattcagccctaacatcagatttagaaatgcgtgaagtaatctatgtacttgcaatttaggacttaataaattactaatagaactctgaattgagggctttttacaatccaactaatttgttacacctagatatcactacaaagattgcatatattttataaagtaaacwccagtttgaggttctcgggtaattattttaataagtgccatggtttccacacacacacacagataaaattagctgctcatcattattttagacttatctttttgtggttttaaaaaatgtgtggtattctttaaaatataaccatatgactttaatgcactaccagtttattacaactttttcacaatttccttagtgtattttaattgcatc

SEQ ID NO: 201650 - DNA, 550 bp, Homo sapiens
ctttctgtttttctgtggggagatggattgtctagagagcctgcttttttgtattaaatgatgggtagaattttaaaactcccttgggagtagattctttgtgtcatctatgtgaaaagactttttgctctgttcacaaaatccccaaataaaacctgattcatcataattcagccctaacatcagatttagaaatgcgtgaagtaatctatgtacttgcaatttaggacttaataaattactaatagaactctgaattgagggctttttacaatccaactaatttgttacacctagatatcactacaaagattgcatatattttataaagtaaacaccagtttgaggttctcgggtaattattttaataagtgccatggtttccacacacacacacasataaaattagctgctcatcattattttagacttatctttttgtggttttaaaaaatgtgtggtattctttaaaatataaccatatgactttaatgcactaccagtttattacaactttttcacaatttccttagtgtattttaattgcatc

SEQ ID NO: 201651 - DNA, 550 bp, Homo sapiens
ctttctgtttttctgtggggagatggattgtctagagagcctgcttttttgtattaaatgatgggtagaattttaaaactcccttgggagtagattctttgtgtcatctatgtgaaaagactttttgctctgttcacaaaatccccaaataaaacctgattcatcataattcagccctaacatcagatttagaaatgcgtgaagtaatctatgtacttgcaatttaggacttaataaattactaatagaactctgaattgagggctttttacaatccaactaatttgttacacctagatatcactacaaagattgcatatattttataaagtaaacaccagtttgaggttctcgggtaattattttaataagtgccatggtttccacacacacacacagataaaattagctgctcatcattattttagacttatctttttgtggttttaaaaaatgtgtggtwttctttaaaatataaccatatgactttaatgcactaccagtttattacaactttttcacaatttccttagtgtattttaattgcatc

SEQ ID NO: 201652 - DNA, 537 bp, Homo sapiens
tccagccaccacttattcatcagctgcaactgtggatctcaccagcatcctggtgctcattcttcttcacaagtcaaaagagttgtttataccctcagcctccaccgcttcaccaatgtttcatttgtagcattccattatgacttctgaaccactaccatcctgagacttctttgccaaggtcacagatcatcattttgttgctaaagtaagtgaatattttacattctttccccagttaacctagcaccatcattagctataataaatatttcctttttcttgaatatagactccagatttttttttaatcgtcataatttcctattaccttcttggctgtttttcttagttttttgactctcatcttatacatgtataggttacatgcctgcaagggacattttcatamcttcaatctcaccacagaggttgaactggaaatctccacatgacccaaacctggtcaattaaactattccaggatttatgtgggtagcagccatcaatgaagaattatgtcttttctgctgacag

SEQ ID NO: 201653 - DNA, 602 bp, Homo sapiens
tatttgtagaatttcttttttttgatgtcatcagagtctataataataacccctgttttattcctgaaattggtaatttgtgtccctcttttttttttttgttcagtcttgctagagttttgacaattttattaatcttttcaatgaaacagttttttgtttcaatgatgtttttctatcatttatgcttttaattttgttgctttctactgtggtatttatwatgctctttcatctgcttgatttggatgatctagctcttctttttttagtttcctgaggtgggggcgtattgttaatttgaaacttttcttcttttccaatgtgagactccagcgctataaattttcctcccagcattattttaacaccatcccacaaagtataatatgctttactttcattttcattcagttcaatgtatttttagaaaattccccttgagactgcctttttgacccatggattctttagaagtgtgtttagtgtccatgtattttagtcgtggtgttgaaaagcatattctcacctggacaagctatggtggtgctgcgaatactattgcttagaggaaaatattaaaaacaactatgagattgtcc

SEQ ID NO: 201654 - DNA, 430 bp, Homo sapiens
tgactattgattgaattttttaaataaatataagcctattcagatggtctgttttttcttgtgtgagttttggcagattgtgtctttcaggggatgggttcatttcacctaggctagtatgtgagactagaattgtttgtagtatttctttttaattgtgtttttaaactttctaaagagagagtgtcttgttctgttgctcatgctgaagtgctgtggcatgattgtatttcattgcaacctcaaactcttgggctcaaggaatcttcccatgtcagtcacctgagtagctaggacttcaagtgtgcaccaccatacccagatattttgttaaattatttttgtagagataagttctctctatyttgcctagattagtctcaaatcctggccttaatttatctcttgccttgacctcccaaagggcttg

SEQ ID NO: 201655 - DNA, 442 bp, Homo sapiens
catacaacaaagtagaaaatgtttrgcaaaactattagatttttataacaaaaatagagtctgtggcattttattttggggatatttccatcccaaacccaggtccatggcatggtagctctcctaaccatcagccttgcacccaccggatgcagctgatccattttggaactctgcaaattataccattccccagagtgttctctgtatttgactatacttagagttctctggaaaagtcccatttccagggcattgttgctatttagcctgacttgggggtcagctcaacagaaaagcctcattttcagatcattgtcaaaaacaagtacaattatctgcaataattaatattacaactgcttaagattgcaagtatcagttggtcaagaatttgcaaggaagatctaagcaatgacacaaccctaaagggttttgaaaa

SEQ ID NO: 201656 - DNA, 524 bp, Homo sapiens
gcagcagcccttcagaaaagtggccagactgttgcatgagtgcctgctctcacatattctcactgggcaggttctccaggtctgggcctggtagggatattgagccagtagcaacttagaaacttcctggacagagcctataggggcaactgaaaatatttctgccactaattttgcagtagaactgtccttactgtgcttcttagactaatgaaaaatccaaaacccaagtgcyttatttacaccccaaacaagctgcattttgcccaagaagaggaggccagtccatcccccatgggttccacatactatccattgctcctcgcccgacagtaaactcctatcttagcccaaatcacagatcctccatcctggactgactgtagtgaggagctgctgacctacatctctctgagatgcagcccccagaagacaagcaaggaaatggggtagcaagccacctcatgtggtgccaagagtgttggtgcaagagcagttgtagtaatatattgccagtgatggcc

SEQ ID NO: 201657 - DNA, 466 bp, Homo sapiens
caaaaaagtctggaaacaataatgacctctggggtttcagctcaatgctcagaactaattgcagtcattcaggttttacagctcacagcttcagatcctatcaacgttgtctgtgattcagcttatgttgtaaatgtagccagtcacgtataacaattatatatttttatatatatatatatatatatatatatayacacacacacacacacacacacacacaatcacatatagcagcctttggtaagcttagctatgttcatgcaattataaacacttattctcatatgctgcatgctacatgccaaacaggtgagacagctggtcatgtacagtgacattgtctgtcatcatttgctcatatggggatacctaaacaattaaaaactgacaatggacctgctaatactagtcacacttttaaaaatttcttacagctttgggctataacctataaaacaggaat

SEQ ID NO: 201658 - DNA, 325 bp, Homo sapiens
atcatgtaaaagtttttttaaaaataaatccttttattgtgacttacacagaccattcatgacatgcttggactttctggtttgtcccaaacattcctctttmttaaacaactagtcattttattctaggtctaaatttaccatacaagattctttcttatataaaattatttctctttaagctttcttacccccccaaaaaaaccctctttatttctataactttctttatatctctcttatttcctggttccttttaccttgttttatacataacctttaaataagctttgaatttgacaaaatttgttcacctttttaaaaa

SEQ ID NO: 201659 - DNA, 599 bp, Homo sapiens
aacatttgcaccatacctacaataaaccaggcgttttaacaagcaaaaaagatacatggatcaaatccatgccatcttggaaacttgagtttaataaggaaatagaaaaatagatatacaataaaagagtgttataagcaatatggcagggaaaaacagggtgcagtgagattccatagagggaagagttagcctagacagtgaattagaagagttatcgaaagtgacrtgaaaactgggaacagaaggatgacctgtgggaatgaaaggggacatattccgggcagatagagatatgtatggcacacttaaatctcccagttcccaaatggtacagctttcgatatatccactattctgttctcttgtctctttaggtgatatggtctttacattctgacttgcctgtgaaactgcaataaaggcaaattgcttctcatttcaaagtttacagttcaccactaccatcacaccactataccaacaggcaataccaacctttaagctactctaaacatgctaaaccccttcagacatcgcactgttatggcagaaatgacaagtgtagcaagaaaatcaaactaactcatgatattgtc

SEQ ID NO: 201660 - DNA, 600 bp, Homo sapiens
atattgataaatttagctttagaagatattaaaaagcatttttcgagataattgtgccaatttatacctctatagcrttgaaaataagaattgtgattgctcagcattcttaccaatgtttgatgttttgtctccctctcatttacttcatttttaaaaaaattttagccattctcttagttatgtaagctatttcagtgtggttttaattccttgatgatattttgagcataagcactttttcataacgtgtcttaggtcagatattcacagaatcaaattttgagccaaaggttgctatgtgagtgatatattgaggaagtgttcccaagagaaacaagtaagtgagtgggaagagcaggatgaggaaggagaagaaaaaccaagggtccaattccgagtgaagttccagaatttgcctgattctgcaacccaaaagtcttaacgctccaatttatcatttttctctcttgatgattactgtgttgtaatcatcaagagaaaatgatgtttaataaataatcctgcttaataaatcttcgcatacaaactgaatattacaaagatactctccggttttcttctgaaaacagtagcgtt

SEQ ID NO: 201661 - DNA, 432 bp, Homo sapiens
ctgtggacaggcagtagtcaacataacatgttttcacagaacatcaattttatccaatcatttgttatttagatcattattttatatgaaatataaaactaatacagaacaacaaatttataaaattctgttgattaataacacagaacttcagagagattgcattttcctgagagcaacttcagctaagtctcaaatcctttcaagtttcactattgtctggcaatcaggtttttcagatgaaagtacttgagatatttcacgaatttttaaaatcaatctgttgaggtgaaagttatgttaaagtaattagcataattactatttcagtgacatggcacaattaaatytatttcattttaaaagaaaatccgttgaggcccaggaaattcttccaggcatatgtcctcagtgtgctcagaggtgcaggct

SEQ ID NO: 201662 - DNA, 380 bp, Homo sapiens
actggggttaacaactctgtcaactctctcttttgagaattaccagagatgtggtttgatttacatttcatcacaaggtatattttatttaaaatttcaaatggcttaaaacaggacctgaaaatttttgtattgtaaccaattataattcaagaaaattttgtgatgtatcattcaatgatttagcatgatggaaatctaagaaaaattagattgttgtattttggtarttagcattttttctgcctgaatgtctgcattatgtttttgtcttggcttgaatttattaaatttgtctaggacataagtaaatgagtgagagctgcttctcctactcaatcccacccctaccttaccagatactttcactcatttctact

SEQ ID NO: 201663 - DNA, 378 bp, Homo sapiens
catggttaacttcagacaaactgatgsacaaaaccaatggtgaagtcagagttagtcaacgcagaggaaatggatgtagatcacgctaatattccttagggcagtagctctccgccctgggatgattctgattcagaagtgctgtggtagggcccagggaaagtgcattttaacaagccactttgacagactgatgaacagtggacaaatgcagtgctccctgggcccctctaagaagcagtaccaaagataaaagttaatttcaagtcactatagatagagtattatgcaaataaaagattattttttatgttcctcacactttcaccaaaagaaacagatacccctaacctgccatatgagctccttcttatccac

SEQ ID NO: 201664 - DNA, 551 bp, Homo sapiens
agcctctggtccagccctggcaaatgctggcaatgagaccatggctaagtgacctctcctcacaggctcactcatgcctgtgatcccagccctttgggaggccaaggtgggaggatcacataagcccaggagttcaagaccagcctgggcaatgtggcaagaccctgtctctacaaaaattttttwaaaaattagccaggcatggtggtgtgcccctatagtcccagctactcgggaggctgaggtgggaggatcacttgagcctagaacacagaggctgcagtgagccaagatcatgccactgcactccagcctggatgacacagtgagacccagtctcaaaaaaacaaaaattactgggtgtgtgtgaaagcactttataaaccagaaaactcaaaagcaaggggacagaaatttgcttatccactcgtctttttccctctaggatgtgagtctttgagccagcacaaagcagtggtgcctggcacatagtagatatttagtaagtgttcaaagtgccaagtactttaaatgttatgtaatttaatctt

SEQ ID NO: 201665 - DNA, 593 bp, Homo sapiens
gaattcagttcttttggcctctctatccagccccccamccccacccccattgcattctgtgttcttaggggttgggcatggcccactaagacgcttctcaaacttgacttgcagaagagggagatatatgagcagagggctatgggatttctgcagcagctcacaagctcaaaattcattgcatcatccccccacctaaaagtgtatgtgaattttgcatttaatgcacaaataaatgtgctcttaaaaaaagaaagtgcttgtcttaatgtacacattaatgttttcaatgacatgccattgggtagaattgatggctcagtaagatggtctgtgctcactcttggaattgaggatttcctggtagttcctcaggtttcttactgtgacctgttggagaagcacggttcaccagatgtgatggttaatttcaggtgtcggtgtgactggattaaggatgcccagacagctgatgaaacttgatttctgggtgtgtctgtgaaggtgtctccagcagacgtgagcactgggatcagtgggctgagtgaaggagctctgccctcaccaatgagggtgggtgtcgccagttccat

SEQ ID NO: 201666 - DNA, 535 bp, Homo sapiens
ggaaaaaatgagaaaatgatttgtttgatctctttaaatgacttgagaaggttttaaattgtgccaaaaggccaggtgcggtggctcatgcttgtaatcccagcactttgggaggccagggcagatggatcatgaggtcaagagattgagaccatcctggccaacatggtgaaacctgtctctactaaaagtacaaaaattagctgggtgtgggggcatgtgcctgtagtccctgctattcgggaggctgaggcaggagaatctcttgaacccaggaggkggaggttgcagtgagccaagatcgtgccactgcactccagcctggcaacagagcgagactccatctcaaaaaaaatttaaaaaaaaattgtgccaataaatcttcctttcctaatgttcagcatcaatctgaaaaacaatattatgatgcagaaataggaactttcggattgatccctgaatgcaggttaggtgagtttggaataaccatgctacatttcccacttaatattaaaaaatatatatttgttttgac

SEQ ID NO: 201667 - DNA, 586 bp, Homo sapiens
tatagaaaatgtatgacaaaatacctaaacagaggaaaaacagaaacacaaagaggaggaaaatatgccagaggtttagaccgacacagttaacagaaataaaagtcctagggccgggtgcagtggatcatgcctgtaatcccggcactttgggaagctaaggcagttggattccttgaggtcaggagttcaagaaataaaagtcttagtatttgaataaagataatttcagaaggatggagcagagaaaatttgggagcagcacttcttgtaaaaataattgcaagttttctggtrttgatgaactcagattcatgaagcacaaaaaatgacaaccagaaaaaacagaactaatctatatctagacccatcgactgacattgcacaccaccactgacataaaatttataaaaacaaccagacttccaaaaaagagtaataaattgagatagtattcttctttctaaatggcaatattagaagccaaaagatcatggaatatttttaaagtgttaagagaaagtaattatcaatctgatttaaaagcagaaaaactataacatatttttaaatgagtagaaataaa

SEQ ID NO: 201668 - DNA, 399 bp, Homo sapiens
atgctattttaacactgagacatcctataaaaattatgatccgatgattttttttttcttttgagatggagtctcactcttgttgyccaggctggagcacagtggcacaatctcgtctcaaggcaaactccgcctcccggattcaagcgattctcctgcctcagcctcccgagtagctgggattacaggcacctgccactacaccaggctaatttttgtatttttagtagagatggggtttcaccacgttggccaggctggtctcaaactcctgacctcaggtgatcctcccacttcagcctcccaaagtggatcctatgaattttaacagccatgtttatattttaaaatgctcaaaacattattgtttataacttcagtcattattttaatgaattc

SEQ ID NO: 201669 - DNA, 399 bp, Homo sapiens
atgctattttaacactgagacatcctataaaaattatgatccgatgattttttttttcttttgagatggagtctcactcttgttgtccaggctggagcacagyggcacaatctcgtctcaaggcaaactccgcctcccggattcaagcgattctcctgcctcagcctcccgagtagctgggattacaggcacctgccactacaccaggctaatttttgtatttttagtagagatggggtttcaccacgttggccaggctggtctcaaactcctgacctcaggtgatcctcccacttcagcctcccaaagtggatcctatgaattttaacagccatgtttatattttaaaatgctcaaaacattattgtttataacttcagtcattattttaatgaattc

SEQ ID NO: 201670 - DNA, 525 bp, Homo sapiens
ggtgtgttttgcaacatccctctttcccctattagagctgagtcttacttttcactggttaattcagagcagcatttgattgagattaactttatctccagctctcatggttgaagaatatgattctattatgtatgtataacataaaatgcaagtccacttgaaaaacaccattatttgcattgaagagattttgcgtatcatcttacgacawattatctccaaagaaggaagagaaatagagaaattgcatgaatgtttgcaatgtagcaatatcatcacatcctatcccctacctcccagcatttttggcatttccagccctgattcagcaatgtcaaattattccctgtcaaaagattgggttatcctatccctagacagctaattccagcaaattattatgatccaaattcaaagctctccagagattcctgtgccattgagatcagtctatcagaggcacagctaaagttagagttaagtgctcagatatccataccactggctaagaccactgacgca

SEQ ID NO: 201671 - DNA, 591 bp, Homo sapiens
ctggcttaggtgactggttgtcagatggtaatgccagtactcaacttagatcctaagaggaaagataggtttaattttkgttctacctatattgagctgaagtatctccaggatgacctatatgggcagttggatattagttctgaatatcaggaaagagatctgctgagtagcaatgtatattatttgaagatcatcaaggtggaggtaatagttaagtccctgcacttgaatgaggttgcccagggagattattaaagtgaaaagttggcacagaagagaatgttgggtaccaccaacatttatgtgggaaagtaaagcaaaagaatgtaactatgaagatcaagaaaaaaaaaagaggcaggaaaagcacctagatgccatggcacaatggactcaaagggaagatagagcattaaagaggacatttttatttaggtaaataagtagactaagaatgaaactaggtccacgttaattagctacaaagtatacatgagtaaaatggattggtgtccttgaaaagagtaatttcagtggtgtgttgggttaatgaatggggaattggagggtggaggtcatgagtaaact

SEQ ID NO: 201672 - DNA, 263 bp, Homo sapiens
ccattagtaaaccgaattagtttttaacatgatgaggatttttctcttcatttctaatttttattcacgtaagccttcattctttgtacattttgtaagtaaatagtttgtggagaaactgatttgaaaattaagctgaggtttataaatatttaaaatacaattttgtgacaaaaatctaacctgaattatatwcaatatcagaatcagagtattggaatactttcctttctaactgttgcaggagaacataatgaagggca

SEQ ID NO: 201673 - DNA, 595 bp, Homo sapiens
attcaatattagcaagtacactgtaagaagaaaaaaaatcaaccctgtgacagagccttcaaaactcttctgaacaaatatagaaatatacttggaggcacaatattacaatgaatcaattctattgtaaaaattcttctaagatagatattgtaatagaaaatttcattgtgaaaattgcctaaaagtacctaaggttgacatggaaacatgctaaccattagtaaaccgaattagtttttaacatgatgaggatttttctcttcatttctaatttttattcacgtaagccttcattctttgtacattttgtaagtaaatagtttgtggagaaactgatttgaaaattaagctgaggtttataaatatttaaaatacaattttgtgacaaaaatctaacctgaattatattcaatatcagaatcagagtattggaatactttcctttctaactgttgcaggagaacataatgaagggcaggataaagacagtcagaaccaaatatgcasaaatctcttctcagccagcacagtaggtcactaacaatccctgccttgttggttcctcttgtttttctgttcctgtttccacagg

SEQ ID NO: 201674 - DNA, 576 bp, Homo sapiens
gctcccatagtctctgtgcttgccccattggagcacrtttctcaattgtgattttctgtttatttgtctgtatctcctctgcactgcatgttccctatgggtagaggcagtgccttgttctccgatacatcctccaggaggagtcgcagtgcctggaaggtaagtactttttgagttaaaaacaaaagaatgatccaattaatgcacgaataaaggcatcactgtatttattttcaaaaggtgcctaatatttatagtgattttttattattatccatgtctttggatttttcaggatgttgccagttcaaaagtgcagaagccatacacacagagaaactgtaagttaaaatgcattttgatagaacgagacaacattttcagtgctttcattatattacctgacacaaaaagagagtaataatagatcacctggccacttacataatgaacctgagttcttcttgtcagaatgaccttgtaggactatatagagtgatattgcaaccataacagcaattgaagaaagatccaaagcccagaactcataataaatagatgagtcataaactggaa

SEQ ID NO: 201675 - DNA, 567 bp, Homo sapiens
tagaggtatgagatttccagatcagctggagctaaggataattaagtaagtaagtgttagacatggcaaagaatgccagctaactgaggatcttgaatgctgggctaaggattcaaagtttttaatagacaagtggaaattattgaggagttttgactctaagactgaatagatttctcttgaattaactctaaatagttttgtttctctatttctattttctgaaacacagagctcttaatttcaaaccattcaactagcatttgttgttcacttattatatccttagtttctcaaaatcagtttctagtatactctatgcgactatttaaaaaaataaaagaaacacatttccaatttaaatgccttctgaacaattttattaaaaaaatgctgctggcacttgaagctcaatatgtcctaaactactcataatttacatcacactagcaaacacacacacacacacaaacaaacayacaccacaagcctcccatcctgctggctctcatcacaattaattatataatgaggaaaaatgtggtgttaagtaagtctaccagtaaa

SEQ ID NO: 201676 - DNA, 516 bp, Homo sapiens
tacaggagctggaaagcaaggccagagcagagtttgtatgcactcaaatcaaaaccttattagagaggatgcaagccacaccacccccagtttgggaaagaagtagaaacatcagttttctaaggaaattagggtctatattgaaaagaatcccggaaacttsaaactgttaaaagtgcctctcaaaaagttgccctttttctccccaatgtttgattagatcaaactcagagcattctcaaaagagccagattcttcatgctaaggcctagtggcgattccgtcccttcttggagaaacacatcactttagatcagtttttgcaacatgactaaagaaaaaaatggaaaatattgtctccctgctgtatatttgaattttgtttccttccttctaggctcagtagcttcttggctttcaactgtaaaaagtggtatctatattaacgatgtatacatcctcaggtgtcacttctttttagtcatttttgcaggatttttccctaattcacctaaa

SEQ ID NO: 201677 - DNA, 588 bp, Homo sapiens
tgctttcagcatacaatttcaaaccacttggaaggagcatttctttatccatgtatccatctcttcattcacatccatccatacatttatgcatgcatccatctatctacttacccatttacctgtattagtcaggattctccagagaaaaagatccagtaggatcttgatcactytctctcggggagatatttatatttaagaattggctctcacaattgtgggggctaaaaagtctgaaatttataaggcagtatggcaggtggaaatttcagcaagaattgatgctgcagtcttaagtccaaaggcaatctggagacaaaatgccctttttgttagagaacctctcagtcttttctcttaaggcctgctgtggtctgaatgtttgtgcccctccaaatttatacattgaaatctaactctcagtttgatagtgttagaaagtgaagactttggggagggagtaggtcaccagggctctgcctaattagtcctcttgtaaaagaagctccagagagctagctagtctttttctcatgtaaggacatagctagaaggcaccatctatggaaaagagggccttcataa

SEQ ID NO: 201678 - DNA, 615 bp, Homo sapiens
ccatgaaccctggtctttcacagtgatcctccaaaaagagattccatagttcaaaaaatttaggaaactttatccatgttatgactcccttggacattcacaaacacattagcatgctaaaggttctgagaggatgttcaatggagacacaagcataactaggtgcagtctagtacttgcacacctactggacagcaaaacaatgttttctggaagagtcactaaaatcttgccaatctaatgactcatsatgaatcaccattatggaaaagtaatactaaagtcttgtttaatgtgggtccttagaggaacattgaataatcttttcaacattttcttgacacaaatccataaaagaaatgccaaagtggtttttacatggcatggccgtcattcactcttttttttttaactgaatgtttagcacagaaataaaatgtgttaaaagatggtcctgagggaagctagactacatataaccttaatatggtcattagatggaatgaagacagaatgcccgagctagtggccacaatttccaagatgttagctgataaaatgtgttttagattagttgcttcttaactgagattttggaaaacacttattacatta

SEQ ID NO: 201679 - DNA, 296 bp, Homo sapiens
atctgtcttctgcacaggccaaatgggagacttgaatggggatgtgatgggaatcaccacccctgcrtctttcaagtctttgatgctggcactaatctccacagtccctccagggatgtaatattatttttgatttactatttttctaggtagaggcagctctaatggcttccatttggccttttccaccataatagacctcaccctaccagtcagggagccagtgtgggggttctgccagctgctaagtatgtctatggcaattatgcattctggtactggggaaatgacagcag

SEQ ID NO: 201680 - DNA, 425 bp, Homo sapiens
tcaccacccctgcatctttcaagtctttgatgctggcactaatctccacagtccctccagggatgtaatattatttttgatttactatttttctaggtagaggcagctctaatggcttccatttggccttttccaccataatagacctcaccctaccagtcagggagccagtgtgggggttctgccagctgctaagtatgtctatggcaattatgcattctggyactggggaaatgacagcaggatgagtccggggacccactggacccactgtaagtcaaacccgagctaaaactccattaattacacaactaccataagcccctactttaactggaggcccacaatgactttttgggtcccctagaattagcatcagctcagagccagtgtccagtagtccctgaaatgtctgatcatttccc

SEQ ID NO: 201681 - DNA, 537 bp, Homo sapiens
aacagtgtgattaattaaccaatgccagagctctacacgagtcagactgttctgattgccactttgcctttgctgtccattatggtagctatgcccagcttgcctttgacagttgagtgacaccacttggcccctgccaccttgggatctaattattcccattgtgtttaaattttgtagttgagtgcctgtggttcccactgttagatctgacatatagaaaacagcaatcacagagctcttcaaagatgcaggtgctgccctsacaaatctattttgcaaggcattggtcaagggtgtatcttctggagcctcccagctgggatgagtaggactaaagtgactaatccactccaccatcccaatctccctaagcctttggatcccttcctctgcattaagccaagggagatcaggcatttccagctcgctcacagtgggccatcttttaatccatatttcagctaaccaagcaaataaactgttagaacctttttaaattccctgagctgccacattaaatgcagagtccctact

SEQ ID NO: 201682 - DNA, 260 bp, Homo sapiens
ggtcctggcccagtctgcccatgaggctgggcctgagccccagccattgccctgggatgacccctcttgggcagagggttttgcttgtgtgtcctttggggacccgcctgagcctcctgtgggctgggagtgagccagacccccgggctggggaagcagggcactgcagggcaaggarggtccctgagccagggtctccctatgcctccttaccccatcaatcaatatccggatgaggcagcctaaggacgaacactgcc

SEQ ID NO: 201683 - DNA, 331 bp, Homo sapiens
cagggcctaggggatgccaaattccagggtccagaaagagcttgggataaaatgaaacttcaaggggacggctttgacctgggctgagtctgcctgtgccgagtctgcctgtgccatccaactggagtctcaagtcctgaggcagkacgtccagatgccccagtgcagggtcctcctgatcaacacctgctcccctgtactcattagcaacctcacccaccctactctcaaagcacacttggctctcatatccaggagctctgcatctgtggattcagcaacagcagatggaaaatattcagaaaataaattggacggttatgtttctatt

SEQ ID NO: 201684 - DNA, 331 bp, Homo sapiens
cagggcctaggggatgccaaattccagggtccagaaagagcttgggataaaatgaaacttcaaggggacggctttgacctgggctgagtctgcctgtgccgagtctgcctgtgccatccaactggagtctcaagtcctgaggcagtacgtccagatgccccagtgcagggtcctcctgatcaacacctgytcccctgtactcattagcaacctcacccaccctactctcaaagcacacttggctctcatatccaggagctctgcatctgtggattcagcaacagcagatggaaaatattcagaaaataaattggacggttatgtttctatt

SEQ ID NO: 201685 - DNA, 331 bp, Homo sapiens
cagggcctaggggatgccaaattccagggtccagaaagagcttgggataaaatgaaacttcaaggggacggctttgacctgggctgagtctgcctgtgccgagtctgcctgtgccatccaactggagtctcaagtcctgaggcagtacgtccagatgccccagtgcagggtcctcctgatcaacacctgcycccctgtactcattagcaacctcacccaccctactctcaaagcacacttggctctcatatccaggagctctgcatctgtggattcagcaacagcagatggaaaatattcagaaaataaattggacggttatgtttctatt

SEQ ID NO: 201686 - DNA, 414 bp, Homo sapiens
tccttccacgcagggcctaggggatgccaaattccagggtccagaaagagcttgggataaaatgaaacttcaaggggacggctttgacctgggctgagtctgcctgtgccgagtctgcctgtgccatccaactggagtctcaagtcctgaggcagtacgtccagatgccccagtgcagggtcctcctgatcaacacctgctcccctgtactcattagcaacctcacccaccctactctcaaagcacacttggctctcatatccaggagctctgcatctgtggattcagcaacagcagatggaaaatattcagaaaataaattggayggttatgtttctattgaattgctcttgtcattattccctaaagaatacagtatcacgaccatttatgtagcatctgcattgtattaca

SEQ ID NO: 201687 - DNA, 414 bp, Homo sapiens
tccttccacgcagggcctaggggatgccaaattccagggtccagaaagagcttgggataaaatgaaacttcaaggggacggctttgacctgggctgagtctgcctgtgccgagtctgcctgtgccatccaactggagtctcaagtcctgaggcagtacgtccagatgccccagtgcagggtcctcctgatcaacacctgctcccctgtactcattagcaacctcacccaccctactctcaaagcacacttggctctcatatccaggagctctgcatctgtggattcagcaacagcagatggaaaatattcagaaaataaattggacggttatgtttctattgaattgctcttgtcattattccctaaagaatacagtatcaygaccatttatgtagcatctgcattgtattaca

SEQ ID NO: 201688 - DNA, 410 bp, Homo sapiens
tgaattcctgaagggctaaaggtagaaacaagaagagtggtaatacaggggaaaagagtaaagagtgaaggaagaatatatcaagtctcactacatacttcaaaagaggaggggtatgaaatgacaagagattatggaaatcaaagagaggtggcaaaaaaaaaaaaacatcattaaaccctggttaactattccgccaaaaatctaracaaaactgtggcttaaaatagtcttctctgctgaggctgtattttattgagcaacccaacttaaaaatataaacttatcaatataatgtacattccaaataattttctacccattcaatcatgagttagcttctttcttcctgaaacatgcttttaatgagtcttccccactaaataaagctgagaaaatatgtgcatcat

SEQ ID NO: 201689 - DNA, 379 bp, Homo sapiens
attttattttatgattaatacactcgtgccctttcttggaaccacttgcttgtttaattctagtctatcaagtgataattttgttgatatttagaggctcctcagttaatttctgtgggatttttggttatatttaataaggaaaatatatatgaaatgtctaagaaaaaaagaaacaaagtcaaytattcctgagaatgtttaaatttattgaagtacacttgttaattgttagtatagaacctacatttcataatagaaaaccttggacttgccagttgtagctgctggaatgagtgaggtgtttgtccagtacatccagaacgtcgccacagattaactttagctcagtctcaacctgaaaaaataaaaataaatt

SEQ ID NO: 201690 - DNA, 379 bp, Homo sapiens
attttattttatgattaatacactcgtgccctttcttggaaccacttgcttgtttaattctagtctatcaagtgataattttgttgatatttagaggctcctcagttaatttctgtgggatttttggttatatttaataaggaaaatatatatgaaatgtctaagaaaaaaagaaacaaagtcaattattcctgagaatgtttaaatttattgaagtacacttgttaattgttagtatagaacctacatttcatratagaaaaccttggacttgccagttgtagctgctggaatgagtgaggtgtttgtccagtacatccagaacgtcgccacagattaactttagctcagtctcaacctgaaaaaataaaaataaatt

SEQ ID NO: 201691 - DNA, 358 bp, Homo sapiens
agaattctcaaattttgattttgctgatattatccccagagtttcattgaccatgttcatctgttccccaaatttccaaaaactggtakttaaatttaggtggttgatctgattcagattacactctcagtatcgcatatgctttgatcaggaggcataatgtgtacttgtgtgtgtgtatgtgtgtttttttagttatgttagtggtcactgcctgtgtcagcatttcactaccagggtaatttggcaatgtctggagacacactgattgtcacaggttgggggagggaatgctataggtaccttcaggggtaagagtcagcacagcacagccccctaacgcaaagtattaataggc

SEQ ID NO: 201692 - DNA, 358 bp, Homo sapiens
agaattctcaaattttgattttgctgatattatccccagagtttcattgaccatgttcatctgttccccaaatttccaaaaactggtatttaaatttaggtggttgatctgattcagattacactctcagtatcgcatatgctttgatcaggaggcataatgtgtacttgtgtgtgygtatgtgtgtttttttagttatgttagtggtcactgcctgtgtcagcatttcactaccagggtaatttggcaatgtctggagacacactgattgtcacaggttgggggagggaatgctataggtaccttcaggggtaagagtcagcacagcacagccccctaacgcaaagtattaataggc

SEQ ID NO: 201693 - DNA, 358 bp, Homo sapiens
agaattctcaaattttgattttgctgatattatccccagagtttcattgaccatgttcatctgttccccaaatttccaaaaactggtatttaaatttaggtggttgatctgattcagattacactctcagtatcgcatatgctttgatcaggaggcataatgtgtacttgtgtgtgtgtatgtgtgtttttttagtkatgttagtggtcactgcctgtgtcagcatttcactaccagggtaatttggcaatgtctggagacacactgattgtcacaggttgggggagggaatgctataggtaccttcaggggtaagagtcagcacagcacagccccctaacgcaaagtattaataggc

SEQ ID NO: 201694 - DNA, 420 bp, Homo sapiens
catgcacgctctgggatgtacattgccagattgctcatgatcagcctttctcatgtcaaaatgttttgtgaccaccagaaggctggttctgcttttattatccattgactgaggartagaaatgacatggcatgtatgcaggatatttaaccatcgtatagataatccttgtgcacaagtgcattctatattctttcccaataagtccacatctgccagagttgaaataaaataaaacaaaacaaacctatttagcaccttctctgtagcaggtccattcatgtatgttgttgtatttcattctcagaattcttatgacctaggcattttaaaaatttttaaaaaaatatttagttgacaaggattgtgtatatttaatgcatacaatgtgatgatttcatatatgtatatattgtgtac

SEQ ID NO: 201695 - DNA, 420 bp, Homo sapiens
catgcacgctctgggatgtacattgccagattgctcatgatcagcctttctcatgtcaaaatgttttgtgaccaccagaaggctggttctgcttttattatccattgactgaggaatagaaatgacatggcatgtatgcaggatatttaaccatcgtatagataatccttgtgcacaagtgcattctatattctttcccaataagtccacatctgccagagttgaaataaaataaaacaaaacaaacctatttagcaccttctstgtagcaggtccattcatgtatgttgttgtatttcattctcagaattcttatgacctaggcattttaaaaatttttaaaaaaatatttagttgacaaggattgtgtatatttaatgcatacaatgtgatgatttcatatatgtatatattgtgtac

SEQ ID NO: 201696 - DNA, 480 bp, Homo sapiens
ctccaccttcttccaggcagtctgtgagatgtttgatgtccgaggcaaacagcacattcagatccccaagctctacacctccagtgtgaccaggcacctgcaccacttcaggctcatgcaggactcacagcctttggacctcagctaaaggacttgcttctcttcagcacacggggcttgtttgtgttggggtctgagccctgagccatggtcaaggagacccccaggtctttctgaacagagacagctggcctgggggcctccctctcactgcrtgcaagaggctgttagggtgcaagactcaaggcactgagggaggctgtttcaggagggagccccaggagggtggtggagacagaagggggcagcatctgccgagggcctactgtgtgcctggcaccgtgtggggtttctggcccatatgggctaagtgaccctgcacactcctcttaggagaaaggctcagatggagaaattgca

SEQ ID NO: 201697 - DNA, 480 bp, Homo sapiens
ctccaccttcttccaggcagtctgtgagatgtttgatgtccgaggcaaacagcacattcagatccccaagctctacacctccagtgtgaccaggcacctgcaccacttcaggctcatgcaggactcacagcctttggacctcagctaaaggacttgcttctcttcagcacacggggcttgtttgtgttggggtctgagccctgagccatggtcaaggagacccccaggtctttctgaacagagacagctggcctgggggcctccctctcactgcatgcaagaggctgttagggtgcaagactcaaggcactgagggaggctgtttcaggagggagccccaggagggtggtggagacagaagggggcagcatctgccgaggscctactgtgtgcctggcaccgtgtggggtttctggcccatatgggctaagtgaccctgcacactcctcttaggagaaaggctcagatggagaaattgca

SEQ ID NO: 201698 - DNA, 473 bp, Homo sapiens
aagtgaacctgaacctcccgccttgacctctcaaattgctgggattacaggtgtgagccaccacacccggcctaaatttcttatgtgccatgggactgcaaaacatcattattaggggcagctggatggaaggtataggacactatagtgccttttcaatatttctgtctaaaatctaaaatcatttcaacaggaaacatttatttcaaaacrtgaaggtggttatccttccatgagtttaaagtacaaaggcaggctcacggtgtcgtcagaattcagaacgatggtcgtggggctgggggtgttgggaggggctgggcatggttggctttgtgatctggggtctggtgtgctccatctctgaatgtctctcgagctgcactctttcttaatacattctcataagtttaacaaaaaataaaacgaggaggcgaagcttgcttgggttgttaagcctagggaaattatccagc

SEQ ID NO: 201699 - DNA, 451 bp, Homo sapiens
ttgacctctcaaattgctgggattacaggtgtgagccaccacacccggcctaaatttcttatgtgccatgggactgcaaaacatcattattaggggcagctggatggaaggtataggacactatagtgccttttcaatatttctgtctaaaatctaaaatcatttcaacaggaaacatttatttcaaaacgtgaaggtggttatccttccatgagtttraagtacaaaggcaggctcacggtgtcgtcagaattcagaacgatggtcgtggggctgggggtgttgggaggggctgggcatggttggctttgtgatctggggtctggtgtgctccatctctgaatgtctctcgagctgcactctttcttaatacattctcataagtttaacaaaaaataaaacgaggaggcgaagcttgcttgggttgttaagcctagggaaattatccagc

SEQ ID NO: 201700 - DNA, 473 bp, Homo sapiens
aagtgaacctgaacctcccgccttgacctctcaaattgctgggattacaggtgtgagccaccacacccggcctaaatttcttatgtgccatgggactgcaaaacatcattattaggggcagctggatggaaggtataggacactatagtgccttttcaatatttctgtctaaaatctaaaatcatttcaacaggaaacatttatttcaaaacgtgaaggtggttatccttccatgagtttaaagtacaaaggcaggctcacggtgtcgtcagaattcagaacgatggtcgtggggctgggggtgytgggaggggctgggcatggttggctttgtgatctggggtctggtgtgctccatctctgaatgtctctcgagctgcactctttcttaatacattctcataagtttaacaaaaaataaaacgaggaggcgaagcttgcttgggttgttaagcctagggaaattatccagc

SEQ ID NO: 201701 - DNA, 479 bp, Homo sapiens
cctgaacctcccgccttgacctctcaaattgctgggattacaggtgtgagccaccacacccggcctaaatttcttatgtgccatgggactgcaaaacatcattattaggggcagctggatggaaggtataggacactatagtgccttttcaatatttctgtctaaaatctaaaatcatttcaacaggaaacatttatttcaaaacgtgaaggtggttatccttccatgagtttaaagtacaaaggcaggctcacggtgtcgtcagaattcagaacgatggtcgtggggctgggggtgttgggaggggctgggcatggttggctttgtgatctggggtctggtgtgctccatctctgaatstctctcgagctgcactctttcttaatacattctcataagtttaacaaaaaataaaacgaggaggcgaagcttgcttgggttgttaagcctagggaaattatccagccatgagccctggc

SEQ ID NO: 201702 - DNA, 473 bp, Homo sapiens
aagtgaacctgaacctcccgccttgacctctcaaattgctgggattacaggtgtgagccaccacacccggcctaaatttcttatgtgccatgggactgcaaaacatcattattaggggcagctggatggaaggtataggacactatagtgccttttcaatatttctgtctaaaatctaaaatcatttcaacaggaaacatttatttcaaaacgtgaaggtggttatccttccatgagtttaaagtacaaaggcaggctcacggtgtcgtcagaattcagaacgatggtcgtggggctgggggtgttgggaggggctgggcatggttggctttgtgatctggggtctggtgtgctccatctctgaatgtctctcgagctgcactctttcttaatacattytcataagtttaacaaaaaataaaacgaggaggcgaagcttgcttgggttgttaagcctagggaaattatccagc

SEQ ID NO: 201703 - DNA, 529 bp, Homo sapiens
gcaaaaataaataggagatgtaatgagagcaataggtttgggtaggcccttgtaatccattgtaagaacatttttttcaaccttggaatagaatggagaacatagagaaggcttttgagcagaggagtgaccaaatccagcttctctgttgagactgaactatagaggtaatagcagaacaatattttaactacagttatactgtatgttttatttatatctgtattaatattgtatattattatttkttatcgcttatgtcccatatttgttacttatatttgttatatttctttatatttaatatgtttatatgttatacatgtattgttatattctatatattatgtatatgtattatagatgtatttgcatgtgtatttatatattatatagcataaatatgtattgtagatgtatatgtggaagatactttgaatctatcctgtttctcatcaaaatttaaaacattcatttatttatttatatctctctattcatgtttttcattttattcagtggatttcca

SEQ ID NO: 201704 - DNA, 529 bp, Homo sapiens
gcaaaaataaataggagatgtaatgagagcaataggtttgggtaggcccttgtaatccattgtaagaacatttttttcaaccttggaatagaatggagaacatagagaaggcttttgagcagaggagtgaccaaatccagcttctctgttgagactgaactatagaggtaatagcagaacaatattttaactacagttatactgtatgttttatttatatctgtattaatattgtatattattatttgttatcgcttatgtcccatatttgktacttatatttgttatatttctttatatttaatatgtttatatgttatacatgtattgttatattctatatattatgtatatgtattatagatgtatttgcatgtgtatttatatattatatagcataaatatgtattgtagatgtatatgtggaagatactttgaatctatcctgtttctcatcaaaatttaaaacattcatttatttatttatatctctctattcatgtttttcattttattcagtggatttcca

SEQ ID NO: 201705 - DNA, 361 bp, Homo sapiens
gctagtaatctgtccatcttgtgcatcactcagtgctcgcatgtctaaagattgtggctatatgacaaattttagtatctgtttagagaagccccatcctggtttggggggtttttttaagagaaaaactcctgggttttcttataggcttattaatctacactggggagcatccaactttttgtaatgtttaagtaaaattacaagttaagtaatattttaagttttgtagcccattaggtttctatcaactaatctacccagcttttgtagggcaaaaagcaatagacaatatgttagtgaatgsgcatggtatggttcagtaaaattttatttttgagaacaggtggtggactggatt

SEQ ID NO: 201706 - DNA, 460 bp, Homo sapiens
ataattggcattcttctaccacaggaagcctcaggtagaaaaaaagcctctgtaattgttagaaaagactctgtaattattagaaaagcctctgtaactatttgtccccataataggtgagaaagtttagtttctcctaagaaatggggacaaataattacaatggaaagattaaagttatattcagtagttttagaactataaaagtcatgtcttctgyttctatgagctgtctaagcatgctaaacaacttgtagttttgcaaacagacttgttctccctgagacattgtgtactcaccatgtggttcagcaggtacattctgtttcaagtctcatcatagatattaccttcttcacaaaggtgaagggcattccagcccacctgaggtggaatctaccactttcttctcttctatattcccataacactatatcatccacatatttgaaggattttt

SEQ ID NO: 201707 - DNA, 252 bp, Homo sapiens
tgaattccatactgataccaaataagtcaatgatgaaagtgacagagagtgatgtcaatgcccaaggttttggtcaacctctcaaaattgagaggcagaccaaaaggtggggaattgttaaattaagtttggcctaaaattgccacgatatgtagcaaactgcaacttaatgtagtttgtaaacaaactgcaaccaaacttaagagtattttcttgtaacaaatatgrgtctcagccaatcatggcagctga

SEQ ID NO: 201708 - DNA, 508 bp, Homo sapiens
gaattcactctgtcaaccagggtggagtgcagtggtgygatctcagctcactggaacctctacttcccaggctcaagcaatcctcttgcctcagcctcccaagtagggaggcactacaggcatgccaccatgcctggctaatatttgggtttgtttgtttgtttgtttgtagggcaggctttcaccatgttgcccaggctggtctcaaactcctaggctcaagagatccacccaatgccttggcctcccacagtgctgggattacaggtagcatgagcaacacacaaggccccagtatttttcactagtgaagttcatgtgaggtgaaaggaaagaggaaacaggaagattgctccctggtgtttggattggcataagacttacctgatgtcaatttaatttccacattcactatatatgcctaatggtaggggtgaggtataactcttccttgatttgcttttcagtggcagctatctccccctttccttttgaacttatgtctttt

SEQ ID NO: 201709 - DNA, 370 bp, Homo sapiens
tacacttttactattatattcccatttcccttttccctcagcccctggcaaacaccattctaccctctgcttctgtgagttcaacattataagattccatattaagtgagatcatacagtatttgtctttctgtgtctggcttattttacttagcataaagtcctccaggttcattcgtgttgtygcaaatggcaggattttcctcagtttttaaggctgaataatattcagttgtatgtgaatgtatttataaatgtggtatgtgcacacacatatacataccacgttttctttgttcatttatctgctagtggacatttagattatttccatatcttgactattataataatgctgcagtgaacatag

SEQ ID NO: 201710 - DNA, 628 bp, Homo sapiens
atttttaaaatatataacacattattatcaagtatagtcaccctgccttgtaatatatctcaaaacctatacctcttgtttctctgaaactttgtatcctttgatcaataactccctattccctcccttcccaccacccccaacctctgctaaccatccttctactctctacttgtatgagttcaacatttttagattccacctataagtgaaatcatgttatctgtctttccatgccttgtttaactaacttaccatgatgtcytacagttttatccatgttgtcacaaatgacagaatttccctgtttttttttaaggcagaatagcatttcattgtgtatatatgccacattttccttttccattcatttgctggtagacaggtggattctatatcccggctggtatgactaatgctacaatgaacatgggaatgcagatatgccttcaaaatattgatttcagttactttggatatatgcccagaattgggcttactaaatcacatggtagtttctatttttagttttttgaggaaatcctatattgttttccataatggctatagttatttacatttccactaacagtatacaaatgttcccttttctccacatcctctccaa

SEQ ID NO: 201711 - DNA, 623 bp, Homo sapiens
gagaaaaaaatattgatatttagaaaggcaacctaattaaataaaaagacatatcatgtggrtatatataggtaaatttaataccataaaattgtaattctccaattgattaatgtgcagttccaatgaaaatacccacatagaaaattcattaccagaattataagaaataactcaacatacatgcttttactgaaatttttagatcaccaccatatataaaaatgagtttgaaggccgggcgcagtggctcacgcctgtaatcccagcacttagggaggctgaggtgggcagatcacaaggtcaggagatcaagaccatcctggctaacacggtgaaaccccgtctctactaaaaagacaaaaaaaaattagccgggcatggtggcaggcgcctatagtcccagctactcgggaggctgaggcaggagaatggcgtgaacccgggaggtggagcttgcaatgagccgacatagtgccactgcactccagcctgggtgacagggcaagactccatctcaaaaaaaaaaaagaaaaaaaatgagtttgtgagggacattgtaaatttaaagactttgcattattgatcatattgttgcttattgtgctgaatattttacattt

SEQ ID NO: 201712 - DNA, 594 bp, Homo sapiens
aatctccagatctaggtaaagatgataacattcagatatagaagctcagaaactggcagtaaaattcaaccaaaagagaagttcactaagacacattataatcaaattgtgaaaatttagacaaagaaaatactaacaatagcaaaagataaaaaacagatcacattcaaagctttcagcagatttcagattttttcctgctgtgtgcagcctagggacttagtgccctgcgttccagctgctccagtctggctaaaaggggccaaagtacacctcagtccatggcttcagatggcacagacgccaagmcttggtggcatccatgtggtgttgagcctgtgggtgcacagaagtcaacaattgtggtttgggaacctctgtctaggtttccagggatgtatggaaatgcctggatgtccaggaagaagttttccacaggggtgaagccgtcatggagaacctctgctagggtagtgtggaaggaaaatgtggggtcagagcacccatacagagtccccactggggcactacctagtgaagctgtgaaaagagggtcactgtcctccagactccagaatgatagattcactgaca

SEQ ID NO: 201713 - DNA, 594 bp, Homo sapiens
aatctccagatctaggtaaagatgataacattcagatatagaagctcagaaactggcagtaaaattcaaccaaaagagaagttcactaagacacattataatcaaattgtgaaaatttagacaaagaaaatactaacaatagcaaaagataaaaaacagatcacattcaaagctttcagcagatttcagattttttcctgctgtgtgcagcctagggacttagtgccctgcgttccagctgctccagtctggctaaaaggggccaaagtacacctcagtccatggcttcagatggcacagacgccaagacttggtggcatccatgtggtgttgagcctgtgggtgcacagaagtcaacaattgtggtttgggaacctctgtctaggtttccagggatgtatggaaatgcctggatgtccaggaagaagttttccacaggggtgaagccgtcatggagaacctctgctagggtagtgtggraggaaaatgtggggtcagagcacccatacagagtccccactggggcactacctagtgaagctgtgaaaagagggtcactgtcctccagactccagaatgatagattcactgaca

SEQ ID NO: 201714 - DNA, 625 bp, Homo sapiens
tatctttcaacattgcaaatgatcaaagagacagaggtttttaattaaagttatgtcatgtaaacaacaactagctctttgaacgtcatacacaaataggataaagtgaggttgtggaggaggctttggacaatgcattctctgtgagaggtgagtttttgctccagttaaattgaggatcactscctgtcatgaggttccgctgctgtagcagtgaactttattttcaaagctttgaaactccttgtaatcatcaagagaagaagggtcatctggtgtcacttttaaggtctggtgcttgttgaagtgttgataagagacatttgagcaaagaattcaccaacagaagagcaaagaaaaagagtaagatgatgatgatgagaactgtttatcagatctttcttcttttcagaatctgtactccttatattgtctcatacctcacccatacacaagattcttaaaagaaaataattttcttaacttttcccagtctttgctccagagggttcttaactggcctactgaaatagcaccatctatcttggacttttattttttgtgcacttggtataatagatcttatctattacaatgaactttcattctagaacacaaaaataat

SEQ ID NO: 201715 - DNA, 625 bp, Homo sapiens
tatctttcaacattgcaaatgatcaaagagacagaggtttttaattaaagttatgtcatgtaaacaacaactagctctttgaacgtcatacacaaataggataaagtgaggttgtggaggaggctttggacaatgcattctctgtgagaggtgagtttttgctccagttaaattgaggatcactccctgtcatgaggttccgctgctgtagcagtgaactttattttcaaagctttgaaactccttgtaatcatcaagagaagaagggtcatctgrtgtcacttttaaggtctggtgcttgttgaagtgttgataagagacatttgagcaaagaattcaccaacagaagagcaaagaaaaagagtaagatgatgatgatgagaactgtttatcagatctttcttcttttcagaatctgtactccttatattgtctcatacctcacccatacacaagattcttaaaagaaaataattttcttaacttttcccagtctttgctccagagggttcttaactggcctactgaaatagcaccatctatcttggacttttattttttgtgcacttggtataatagatcttatctattacaatgaactttcattctagaacacaaaaataat

SEQ ID NO: 201716 - DNA, 627 bp, Homo sapiens
tgtcttagaattttctaataaaaaaaagaagcattgaggacctattaccagggttgaaactatgctaaaattataaaggagagggagtgttccaggtaggccaaaagagactgcaaatgagcttttcaaatgaatttaggaattatggaaggactctacttaaagctatggttacaaattatttatttataagctgaaacttaagagggatggagaagtcacctgaatgttactcttaacaaaatgtaccttctaatctaagaaactatatcctctaataacatctaataatgcaattgtctgggatcaattcgtctaatagtgaaaatttgaaatttctcttgtataggaactaactgtcctggctctatataagctagaaaaatacgcatcttatatttaggggactctgtgaaatcatttaggtggccaatccagttacatacctaattcatctaaaaagcattagtcagtggcacatataaataacttttaaatgtacagtaggtggtaaagaaaatggatgtggtgtacaatttgtattctaaatgcacaaagctattacattagaagaaaatcckacaaaacacttaatggattaaacttgaaaaggagtaatgatgtgaa

SEQ ID NO: 201717 - DNA, 514 bp, Homo sapiens
ataagtgcaggagttagttgatgcttccgtagctttgtggtaggcagtgtaaggaaagggaaagtattgttctggcaaccagctagatttggttttaatgtctaaattgggacaagatacaaggctttgttggattgtaagagtgaagtcaaagcaaagatccctacataagccagaatatctgaagaactccacattgcatgaaatatgagtttgaaaaaataaaatatctgcaggtacagcaagttgacaaacaaattttctacttctgtctgggttttgagggaaacaaaaaaggttctccaaactgtgattttaaaataaaaagtggtgcaaagtggttgacaygtgtgagtagatagaagaaacacatgaaaaactgcttcggaagactatctcaccctaggttaaacaagaaacctcagttaaattcttactaaagttcagatagttggggctcagaaaatgatatccccaaatcaaggcctcagaagcagcctcaaaactagagttt

SEQ ID NO: 201718 - DNA, 392 bp, Homo sapiens
cagtaccaaggtctccgtttcttgctggcttttggctggatgttgttctgaactctagaggctacacagattttttttttagcctatgggaccctctgtcttcaaaccagaaatggcaaattgcatccttcttactttccaaatctctctggtttcctcttctgcctcgtattcctgcctctttttmtcttattagacttttctgcctttcgtttttgtctttaaagggatttttgatcttgagtccaggataattaaaataatctccttattttcagtttagctgattagttactttaattacatgtgcaaagtacccacagtagtatctagattagtattggattgaataattagggaagaaggatcttcgtaaggcaccttcagaattc

SEQ ID NO: 201719 - DNA, 562 bp, Homo sapiens
tttgttatagcagcccaatgaagactgactaagatactcattatcccttcagcccctggaacattctcagctttctactattgctagtctctggttgcctcaccactccttattttatccataattctgctcacttcactgtgagtagtcctttcactgaagtatttttatttgaaccatttgtgttgaattctgttttctctggtgactctgaataaatgaaaagccagtgcttgctgatgtggcagatgtagagaagtgacgaaaagtgaagcrtcaaggtcaactctcacatttcaggctgaagcagttgggtgcacagggttgcattgaatgcagtaaagaagactgagaaagaaatggttcacttgtgaaaccaatataccatcatataacagtatacatatccctaatatgtgcccgatgaatagccacttgagcccaagacactgatagctgaagactgtatcacccagagttatgctaagtttcggaagaatcatgatatgagtttttttttagtactacagcaactaatacatatgtgtacttttctgctttt

SEQ ID NO: 201720 - DNA, 562 bp, Homo sapiens
tttgttatagcagcccaatgaagactgactaagatactcattatcccttcagcccctggaacattctcagctttctactattgctagtctctggttgcctcaccactccttattttatccataattctgctcacttcactgtgagtagtcctttcactgaagtatttttatttgaaccatttgtgttgaattctgttttctctggtgactctgaataaatgaaaagccagtgcttgctgatgtggcagatgtagagaagtgacgaaaagtgaagcatcaaggtcaactctcacatttcaggctgaagcagttgggtgcacagggttgcattgaatgcagtraagaagactgagaaagaaatggttcacttgtgaaaccaatataccatcatataacagtatacatatccctaatatgtgcccgatgaatagccacttgagcccaagacactgatagctgaagactgtatcacccagagttatgctaagtttcggaagaatcatgatatgagtttttttttagtactacagcaactaatacatatgtgtacttttctgctttt

SEQ ID NO: 201721 - DNA, 562 bp, Homo sapiens
tttgttatagcagcccaatgaagactgactaagatactcattatcccttcagcccctggaacattctcagctttctactattgctagtctctggttgcctcaccactccttattttatccataattctgctcacttcactgtgagtagtcctttcactgaagtatttttatttgaaccatttgtgttgaattctgttttctctggtgactctgaataaatgaaaagccagtgcttgctgatgtggcagatgtagagaagtgacgaaaagtgaagcatcaaggtcaactctcacatttcaggctgaagcagttgggtgcacagggttgcattgaatgcagtaaagargactgagaaagaaatggttcacttgtgaaaccaatataccatcatataacagtatacatatccctaatatgtgcccgatgaatagccacttgagcccaagacactgatagctgaagactgtatcacccagagttatgctaagtttcggaagaatcatgatatgagtttttttttagtactacagcaactaatacatatgtgtacttttctgctttt

SEQ ID NO: 201722 - DNA, 554 bp, Homo sapiens
gttgggcaaatccatataccctgaggacaaatgccagcactacttctgtgggctgctgtgggactgagccacaagcaaaccatgcctcctagagctgcctacctatggtgctgccgatgagattgtccctctgccctccgtgatgtagcacagctgcttcactgctcatctgagcattatgctagtggcccagggaccaccctgcctctgcttattacagccagagcctgaatgtactaccaaagagcttgaggacaagttcaccagcccagttcatcctaccagtacttgatcatgccatccaggggcctgaggatcactcagcttagtccaccactgttggcatttgaacatctctcttggagtctgaggtcagtctgaaccaacttgccaatgccaccatagctggcactcactcayatgcatccctgtgggtcaggggactggcctgtccaaccctgttgcagccaccgccaccaccagcataagccacttgggttccagtaggttgtcctaccactgctactaccatcacccacatcacgcccaacacc

SEQ ID NO: 201723 - DNA, 554 bp, Homo sapiens
gttgggcaaatccatataccctgaggacaaatgccagcactacttctgtgggctgctgtgggactgagccacaagcaaaccatgcctcctagagctgcctacctatggtgctgccgatgagattgtccctctgccctccgtgatgtagcacagctgcttcactgctcatctgagcattatgctagtggcccagggaccaccctgcctctgcttattacagccagagcctgaatgtactaccaaagagcttgaggacaagttcaccagcccagttcatcctaccagtacttgatcatgccatccaggggcctgaggatcactcagcttagtccaccactgttggcatttgaacatctctcttggagtctgaggtcagtctgaaccaacttgccaatgccaccatagctggcactcactcacatgcatccctgtgggtcaggggactggcctgtccaaccctgttgcagccaccrccaccaccagcataagccacttgggttccagtaggttgtcctaccactgctactaccatcacccacatcacgcccaacacc

SEQ ID NO: 201724 - DNA, 569 bp, Homo sapiens
ccacccccaatatttttaacacttacaacactgacttaaatgtagcagatattcaataaatgttactaattcattaaaaataaatagtcttttaaaaatcacatatcctaggactttgggacatgccaaaaaattaaaacatagaatctctagaacagacagtaaccaaattaaggaggagtataaacgtatgcatatagttggtactatgagtgtgtatggagggaagaaaaaagacagagagagagagggagagagagagagagagaaagactctgttattatgtataagatgccaaaaggaaatagataaaatagatctatgcagcccagaatggattatatatattgtgggctagtgagtttagagaagggctaggggtcaaggtatacttcaaattackctctaaaaaccgctctcagtaaagtatcagtaataaaactcaatcatcgtaaggtactttgcaggcttatatagcagagaagaaccaaggaggagtgctttcagacccagctgactttaccatcctacaatatcatcagggcttgctctcatgatttctcagctc

SEQ ID NO: 201725 - DNA, 569 bp, Homo sapiens
ccacccccaatatttttaacacttacaacactgacttaaatgtagcagatattcaataaatgttactaattcattaaaaataaatagtcttttaaaaatcacatatcctaggactttgggacatgccaaaaaattaaaacatagaatctctagaacagacagtaaccaaattaaggaggagtataaacgtatgcatatagttggtactatgagtgtgtatggagggaagaaaaaagacagagagagagagggagagagagagagagagaaagactctgttattatgtataagatgccaaaaggaaatagataaaatagatctatgcagcccagaatggattatatatattgtgggctagtgagtttagagaagggctaggggtcaaggtatacttcaaattacgctctaaaaaccrctctcagtaaagtatcagtaataaaactcaatcatcgtaaggtactttgcaggcttatatagcagagaagaaccaaggaggagtgctttcagacccagctgactttaccatcctacaatatcatcagggcttgctctcatgatttctcagctc

SEQ ID NO: 201726 - DNA, 618 bp, Homo sapiens
attaagaaccactgagatatgaaacagtaaggactaaacatcacttccattatattattgccaaaaaatgcctaccatgattttcatcacaaggaaacctcacacaagtgaaaattgagggatgttcaactaaatatctttttcagtactcttcaaacatgaaagggtctcaaagatagattgaagaaatgtcatagatgagagagaactaaggtgatagttaaatgcaatatgtgacctagactagactttgaaccagaaattgaacattttttgcacaattggcaacatttgaagaaagtttgtagattagttaacagcatcatatcaatattaattycttggttggatagctgtagtgtagtgacataagatgttaacatctggaggtgttggataaagggtactgccagtgaaaaacacactcacagtgctatttttctattctctcactgaacaataatcaataaaatacttctatgaccaaatgtgtggggatttctcccaactaacaagcaattaatcaattttgcaacagacatcaggtggaggtcctctaattcaattccattttgacactatctacctgggtatagcatcagatcccaccagtggagg

SEQ ID NO: 201727 - DNA, 431 bp, Homo sapiens
tgtgtgacccatgcagtttaacctccatgcagtttaaagtctatgctgaaaaatagatattaactgttgtaactatatcatttatttgacaaagagatacttttgtgaatggtaaataataccaagtactctagtaaaaccggcataaagctggactgttcaagataatccaggacatatatggtcaccctactagtaatagtgtctaacattaytaaatgagaaaacacccagaaaacacttagacttagaaattagaactataggtactcaataggtgttagaatattattaatatttgtatatattattattggcttagaaaaacccttgaggccactgttgatctatactaagagtcactctattgagacaattagacaattcaggacagtgtaattattagtccacttttgtttcttttacatttt

SEQ ID NO: 201728 - DNA, 596 bp, Homo sapiens
taggtactcaataggtgttagaatattattaatatttgtatatattattattggcttagaaaaacccttgaggccactgttgatctatactaagagtcactctattgagacaattagacaattcaggacagtgtaattattagtccacttttgtttcttttacattttttgacagcatatttcaaagttaaacaattctcatcatcaatacatttctatcatctgaatgcagtgaataaaatattttaatgaactaaaacactgtttgttagaattctgtccttgttgtggatttagaagagctgttcaattttttgaatgagcctgaaagattattttgaaatgtttctcagtctcctgttttaaaagcagaatcattttaattcctttaagttmtcctcctgagtataattttccagctttctcatttatgtgactctccagtgaatcctacacaaagttcattaagctccttaaggacctcaaattggacagtatccttatctaataacaccaaaatgttgagtacagcaagagggtaacactgaaattgctatatgctaatttggcattctagtaaagcatttccatatgta

SEQ ID NO: 201729 - DNA, 474 bp, Homo sapiens
accagaaacaaagcctctacattgcactatgtttcaaccatctggaagttattatttttttaaggaaacaacaagtttatagatrctagaaaggaagagatgcaatgataattgtgtgtgtatgtgggtgtgtgtgtgtgtgtctctgagagagagagtgactatgcagagatagtcatcaaaatgtccataattactatcttgaagaagatgaaactgcaggggctgtcattctgtttacaattttgtatttgggatgatgggggtggttgtagctttgtattaaaaaacacatccctcaccacatggacctgcgctgaagaagaaaaatgtaactataaccaaataacccgcattgtaatatgtaacatgataggaacccttacaaagagaacatgggaggaaataaccaatggaatgctaggacatatcttggagacaaaagaaatgttttcaagaatgtaaaaataatgt

SEQ ID NO: 201730 - DNA, 371 bp, Homo sapiens
acagagatgctatttggagcccccatagatgaatcatagcctagtctcttgggattttggaacaaaaccttgccatcttctactgataactacttcccttttaagaaacagctcttggcctgctgctgggccttagtagagactaaacacttaaccatgggccmccaagttaacatgtgacctgagttgctcatcattaaacgggtattgtctggcccacctagtcataaagttgggtatgcacagcagcatttcatcattaaatggaagagatctgtgactggactagagaggccctaaaagcacaagtaaattccctgaagaagtggcccaaatagctatggttcctgctgctactgcgttgccttgtt

SEQ ID NO: 201731 - DNA, 405 bp, Homo sapiens
ttctattaagttactaggcttttctttagctgaaataatgagtttamaataatattacaatcagcacccaatgacttgataatgagttcttctgtttgcctggaattcatagcttagtaatagcaggtatatgatatatgtgtaactatacagaggtttaaaattaaaaatgccttgttgtaagtatttataaaaaaaaaaagaccattaagctctcctctaacaatatacagtttttaaacatactcacttttctatctataacctatgattcaagatgaatgtaagattttaagtgaaactcatttaggaaagttgcttgttttgttgctctcccggagcccccagaagctggtgtctgtagggtggacttttctaggcttcaaatctgatctgttctgcaac

SEQ ID NO: 201732 - DNA, 498 bp, Homo sapiens
ggactggtaggatttatataaaccagagaagctctgaaggtttgtcagacatgaagaaaagcaaaagtgtgatgtgatcatgttccacaaaggagacctatctgccaacagcatgaagggaaatgaagaggagataagattaactagatcttcaaagttcaaatgatggaagatgttgaccatgaaaattttaaattttggctataatccagcaatctctaacgtttttggcaccagggactagttttgtggaagacaatttttccatggactggggttgaggggatggtttttggatgattcaagcacattacatttattgtgcactttatttctattattattacattgtaatatttaatgaaataattatgcaactcaccatcatgcagaatcagtgggagccctgascttgctttcctgcaactagatggtctgatctgggggcgatgggagacaatgacagatcatcaggcactagattcttataaggaatgt

SEQ ID NO: 201733 - DNA, 432 bp, Homo sapiens
cattctggggtctggagggtggtggcccactttccatagttccactaggcagtgcctagagggactctgtgtggaactccaaccccacatttcccctccacactgccctagtagaggttctctgtgagggmtccacccctgaggcagcttagctgggcacccaggctttctcatacatcctctaaaatcgagggggaagctgccaagcctcctttatacttgccctcttaacaccacatggaagccactaaagcttatggcttgcaccctccaaagaagcagcccaagctgtacctgggcccctttgagccgaggctggagctggagcagctagaatgtggggaggagtgtcctgatgctaagcaggacagtggcaccctgggacaggtccctgaaaccattcttcccttccaggcctctgggcctgtgatg

SEQ ID NO: 201734 - DNA, 553 bp, Homo sapiens
tttatcaacctgaaggcagtcaatattcaatgaataaggcacaataattcaccaaatccatwtccctttctttgactcaaatctatcctatctgccacatcagtttaggacaacagaaagtgtttgtcagaataaagatcttaaatatcccccccatcctcttatcaactacatactactttacaggtgaacaaaaaaccttggggaaaaacagtaatcaatgaacttttttttttttgagacagagtctcgctctatcgcccaggctggagtacaatggtgtgatctcggctcactgcaacctccgcttcctgggttcaagcatttctcctgcctcagcctcccaagtagctgggattacaggtgcctgccaccatgcccagttaatttttttcttttttttttttttttgtatttttagtagagacggggttttgccatgttggccagcctggtctcgaactcctgacctcaggtggtccacccacctcggcctcccaaagtgctgggattacaggcgtgagccactgtgcccgacctgcatgtgtattta

SEQ ID NO: 201735 - DNA, 551 bp, Homo sapiens
tctatggaatgtttttatcaacctgaaggcagtcaatattcaatgaataaggcacaataattcaccaaatccatttccctttctttgactcaaatctatcctatctgccacatcagtttaggacaacagaaagtgtttgtcagaataaagatcttaaatatcccccccatcctcttatcaactacataytactttacaggtgaacaaaaaaccttggggaaaaacagtaatcaatgaacttttttttttttgagacagagtctcgctctatcgcccaggctggagtacaatggtgtgatctcggctcactgcaacctccgcttcctgggttcaagcatttctcctgcctcagcctcccaagtagctgggattacaggtgcctgccaccatgcccagttaatttttttcttttttttttttttttgtatttttagtagagacggggttttgccatgttggccagcctggtctcgaactcctgacctcaggtggtccacccacctcggcctcccaaagtgctgggattacaggcgtgagccactgtgcccgac

SEQ ID NO: 201736 - DNA, 529 bp, Homo sapiens
atattcaatgaataaggcacaataattcaccaaatccatttccctttctttgactcaaatctatcctatctgccacatcagtttaggacaacagaaagtgtttgtcagaataaagatcttaaatatcccccccatcctcttatcaactacatactactttacaggtgaacaaaaaaccttggggaaaaacagtaatcaatgaacttttttttttttgagacagagtctcgctctatcgcccaggctggagtacaatggtgtgatctcggctcactgcaacctccgcttcctgggttcaagcatttctcctgcctcagcctcccaagtagctgggattacaggtgcctgccaccatgcccagktaatttttttcttttttttttttttttgtatttttagtagagacggggttttgccatgttggccagcctggtctcgaactcctgacctcaggtggtccacccacctcggcctcccaaagtgctgggattacaggcgtgagccactgtgcccgacctgcatgtgtatt

SEQ ID NO: 201737 - DNA, 487 bp, Homo sapiens
catcctcttatcaactacatactactttacaggtgaacaaaaaaccttggggaaaaacagtaatcaatgaacttttttttttttgagacagagtctcgctctatcgcccaggctggagtacaatggtgtgatctcggctcactgcaacctccgcttcctgggttcaagcatttctcctgcctcagcctcccaagtagctgggattacaggtgcctgccaccatgcccagttaatttttttcttttttttttttttttgtatttttagtagagacggggttttgccatgttggccagcctggtctcgaactcctgacctcaggtggtccacccacctcggcctcccaaagtgctgggattacaggcrtgagccactgtgcccgacctgcatgtgtatttaataagaaggcatttctctagacatggggaaatgtaaatataattctttcaaagagaaatggtcatttgtctctccgatgattggggac

SEQ ID NO: 201738 - DNA, 584 bp, Homo sapiens
gagtgggaatactttcaactcaaccacctgggttgggttcaggtcttcccacttgctcagcaccacctttgaggagtaaggaggcgaaggaagtgagagtgattcaaagatggaaaagaggggggcctttaagaagcatagcctggaaactccagatttttcccaccaggaaccaggaatgaagaagggagggaatctctactgcctgcggcaagccaggagagagttaccccacgggcagatgctggatcttcccaagctcaagagcaccgtccagtgtgatgcagacgtcgggatgtaactgaatagccatacrtgcctgtcatactcagaactgacttagatgtggtcctgtctataggcgccaacatgaaaccacccaggaacaagactaggagaaaaaggacacgtgctcctgctcctgtcatagcagcagcagcttgaatcccacagcaaagtggccagatgcttacagacacctgataatatcagacacagagcacaaaacttggtgcacccacttttacatgggtttgggggaggacggtttggctcaaaactttctggtgaacaaagagcataat

SEQ ID NO: 201739 - DNA, 514 bp, Homo sapiens
tgaattctgtaattgttaatcatatacacagaacatgtcaaataaatacagacgaaaacacaggctaacaattccacacctaacccagcccaaatcatgctaaacatgccatatatattcacagtttaagtttgattccaggtatgcagtcttgagtcataatggccccaggcatgacaaggttactgggtcagagttggttatcgtagtacttagacaacgtgctcawgggaaacaaacgactccagggtgtgtgccgccgatttgcaatatgaggctgatctactgttcccactgttttattccctgctgctatatctcggctgggaaatgtacgctgtggaccccgcatcttcataatgatggtccctcaatgatcaaccaccttccacgtagcatccatacagtagtctgagcaagctgaaggataacaagcttaaatttatcttttaaaaatgtcagaacttccagaaatttgtattaaaatttctaaattgtatttctgaaccgaaat

SEQ ID NO: 201740 - DNA, 590 bp, Homo sapiens
gttccattccagacataccgattatcttgcctacgtggcatagaggcctaggagcctccctgggaggaagaggcaggccaaggtcttgcctggctgcttctagggggaaagatgtagggaggaagctgccttatgcttggatctgcagcctttgcctggacctgtggagcctaygtggccagggtgagggagacagaaattagaacccaatgtattcagctaatcctcttcttgcctctgaacattgccgttaatacttgaaaagaaaaaaaaaaaagcaaaaaaactcttggcatatagagctaagcagtgggaagaagatagctttctaaaccatgacccaataggtctgataacataacatttaactggataaattacataattttgtatatatgtaggggggagttgaattcagttttgctgtttacaggctgcaccaatgcattgttaaaagatgtatattttagtgataattgtgataattaattacaaaataattgctaataagcaggtaaataagccaaattataatttagagtgcatcctttgtttaaagtgaaatggatctaaattgaggatataatttt

SEQ ID NO: 201741 - DNA, 510 bp, Homo sapiens
tcctgtagctgcaggcctctctgaaacaaagagctggctctttctgtcttgggcagagacttgattctttttaagcacctcctctggattgtcctgaaattcttttcatccctttctsctctcagtgctttgtgcatttgagattctccataatgtgtcccctgctgactcactcctgcttccccgaagaagaagggtcttctgtaagttttagtcaaataacaaccatttctctgcttttcagttcaaaattttagtgggtcgtaagccttcctttcatgttgtcaccagatctttttaaagctctcagttaatttatttatacacacgtccttgttttagcttctaatattctgagagattgggggaattttagagcctggtttggctgaaaagtcaaatggaatagtcatttttcaataattctcacaatttcttactataagattgcttgattgcagtttaaaacccttctctgttctggcccattcatgttgacatactgcttcc

SEQ ID NO: 201742 - DNA, 531 bp, Homo sapiens
agagagctcatttgggcttggtttttcctgaggaaatccatttagtataattttttaaaaattaaacttcacatgcctatgactcaaactttcaaaccacccccacactccatcagttattttcaayaattaacagtgggtgatctcagatacagcctggatgttttggaaaacaggaaatagtctgctagattgtagcctcatattccccttggaaggcttcttgattgaatgctacaagttgtcaaaccagactggttcatttgactcccctgaagcgcttgcaggagagttacttagtctctctcttccagaaaggagagcagccagaatgccagaacccaaacatagtcaccccaggactctggtgaaggagaaccttgcaggtggctcccaaaacacctctgctggcagcttttcccaagaggaaggccaaatggccgaagctaagtcaatgatttatttctaactgctgctaggaggtatcgtgcagggttatggataagtaccatgacttttctttgttgtctt

SEQ ID NO: 201743 - DNA, 620 bp, Homo sapiens
tagagacttgctttggcaaaaggacaaaggagtcaggtgagtgagctgacctagtgaggtggcctcagagatgtctcaggaagtcctgtcccatgcatgccacagcaggacaatccttagtaccaaaaggctgaagcgattgctgcatgtgtgtctcttaattaggaacagttacagattgtcataatgtaaaaaaacaaaacatccaggatttgcaggagaaggagttggaaagcgcttttttttttttttttttttgagacagagtccagtctagttctgttgcccaagctggagtgcaacggcatgatctcggctcactgcaacctctgcctcccgggttcaagcaattctcctgcctcagcctcttgagtagctgggattacaggcacacaccaccacacctggctaatttttgtttttttagtagagacagggtttcaccatgttggtcaggctagtcttgaactcatgacctcgtgatctgcccrcctcagcctcccaaagtgctgggattacaggcatgagccatcacgcccagctggaacgtgcttttcaaatgtttgtttttgcatttgttctttccatttcttagccctgttttaagggatcagatgaac

SEQ ID NO: 201744 - DNA, 338 bp, Homo sapiens
ccattattattttatcttcttcacatcacttaaaactacttaaaattgcttgactgatacatttttgagtttgggaatttttttacatcctattatatgaaattgatttaaaggatctataattttcacagcttctccttttaatgtgctgtatgtatatcaaaataacatgttgtacatcttaggtatatacaagtaaatacataaataaataaaaatatttcataagatacaggtatattcartaccttcaaagaaggtaaattgagggggggaagcttcagtaatgggacagaataaaatatattggcgagctcaatgacagcaaaatagtttcc

SEQ ID NO: 201745 - DNA, 536 bp, Homo sapiens
tttctcttttctttatgaattgcattctgcttttgttgaatgcaaacgatctacagactgttctccctcctagacaagggtgaattggcatgctaataactacctctgtgttattccttccttgatggtgtttgttttgttttgtttttctgtaaaactcatctcactggagacaaatctctggatcctgcacctcaccatgcttcttatgcagacctggatccttggagttattggctccctttgccttgtttattttgttgactctcttcagcaaaactgaactccaacttttacaccctaaatctggctcttggacatataggtccttttgctttctgactcctcctcaacccagccctgcctttccaacctctccatctgtatctgtgtgcctgtgtctgtcygtctgtctctcataccccaggctgcccccagtattacccactttcttctccccctcttcagtgttcagggtacaccttcttctctgcctacagagtcccacaggctgagggtgcgtccccttacagaga

SEQ ID NO: 201746 - DNA, 533 bp, Homo sapiens
gaaaaccaacagcaatgtcagtaggagtgattcagccttcgttgaaaacatgaaattaaacacaccctgttttccctggatctgtcatctccaggtgttaacacagaattaagcatctacaattgctgaaagttacctggggcatggtgggttctgatcttcttccccttcttggtacttttcaatttctgaaataaattcagacatggacagacacaataagctgattcccctacacacataacaatccactgtctaatcctcaaacagggacctcaggctcctcagtataagaataggacactgtgggagatatatttcaggaggcctgaaggctgctcatgatagagattccttggtttttgtcccagaaactaagggtaaaatgtccctattctggtagattgttatcccaatatcatttgtcccaagtttgtgyaaatgattatgccatatttttccgatcaatttaaagcaaatgccctcaaatgatttctaggagaaaaactgcaataatcagccctgtttcatca

SEQ ID NO: 201747 - DNA, 533 bp, Homo sapiens
gaaaaccaacagcaatgtcagtaggagtgattcagccttcgttgaaaacatgaaattaaacacaccctgttttccctggatctgtcatctccaggtgttaacacagaattaagcatctacaattgctgaaagttacctggggcatggtgggttctgatcttcttccccttcttggtacttttcaatttctgaaataaattcagacatggacagacacaataagctgattcccctacacacataacaatccactgtctaatcctcaaacagggacctcaggctcctcagtataagaataggacactgtgggagatatatttcaggaggcctgaaggctgctcatgatagagattccttggtttttgtcccagaaactaagggtaaaatgtccctattctggtagattgttatcccaatatcatttgtcccaagtttgtgtaaatgrttatgccatatttttccgatcaatttaaagcaaatgccctcaaatgatttctaggagaaaaactgcaataatcagccctgtttcatca

SEQ ID NO: 201748 - DNA, 546 bp, Homo sapiens
aatgtccctattctggtagattgttatcccaatgtcatttgtcccaagtttgtgcaaatgattatgccgtatttttccaatcaatttaaagcaaatgcccccaactggtttctaggagaaaaactgcactattcagccctgtctcatcaaatattcagattgttcatggttgtgaggatattagacactgaaattagagtgaaggaggaaatctacaaaactgagacaaaatcagagttgtgtgaatttgtcacatctgcccgaatccaatgtattgagagtaagatcagggtgccacaagcatggcytgagactacaaagagagccacgctcactgatccatcccgtgtctgggcttccaagtagaactagagtttcatttaaatctacatgtgcttataggtcctccctgtggcaatgatatctctcagctcagtaatggccactagcagcaggaatatgaccctatccagaagactcagtggatccttatcaccttcatagaaaggtactcaccacccacatcaagagccaagctaacatgct

SEQ ID NO: 201749 - DNA, 632 bp, Homo sapiens
aaatcaaaaaaacagtagatgttggcgtggatgcagtgatcagggaacacttctacactgctgattggaatgtaaactagtacaaccatgatggaaaacagtgtggagattccttaaagaactaaaagtagaactaacatttgatccagcaatcccactactgggtatctaccggaggaaaaagtcattatacgaaaaagatacttacttgcaaacacatgtttatagcagcacaatttgcaattgtaaaatcatggaaccaacccaaatgcccatcagtcaacaagtggataaagaaactgtggtatataaataagatggaatactatgcaggcataaaaaggaatgaattaacagcatgtgcagtgatctggatgagattgtgaagtaactcaggaattgaaaaccaaacatagtatgttctcactgatatgttggagataagctatgataatgcaaaggcataagaatgatacaatggactttggggaattgggcagaagggtgggaggcagacaagggwtaaaagactacaaatagcgtacagtgtatactgctcgggtgatgggtgcaccaaaatctcacaaatcaccactaaagaacttattcatgtaaacaaacaccacctgtac

SEQ ID NO: 201750 - DNA, 559 bp, Homo sapiens
ttggttaacatggagaagggggtttctgatttttgtccttgtacgtgaatcaaggggaggactattctgattattgagtgaaagtgatttaattccacatgtgttattaccaaagtgagactataaatcacaaaatgtagtgatctgtctaaagttacacagcctgtaaaagaccagtcatgcctcctgacttcagttccagtgtttcatttttacatattgctttggccatgttaaaattaatcaagtggtacttatcgcttaaaatagcttctaacattataactatgaggaatttgaaagcatcaagttcaaaccgtttgtaaaccagcactattttcattgcatgtttttcacacataacatttgatatttcttttctgcctttattacaagatctgggactctagattttaactaacttgaatggcatgttgtaacatctsatctaatggagatttccaccaccttgtttttacaggcttaatgtagaaatttcttaaaagatcatatgtacccatgaatgttctttttccagcaagacggaagaagccaaaga

SEQ ID NO: 201751 - DNA, 559 bp, Homo sapiens
ttggttaacatggagaagggggtttctgatttttgtccttgtacgtgaatcaaggggaggactattctgattattgagtgaaagtgatttaattccacatgtgttattaccaaagtgagactataaatcacaaaatgtagtgatctgtctaaagttacacagcctgtaaaagaccagtcatgcctcctgacttcagttccagtgtttcatttttacatattgctttggccatgttaaaattaatcaagtggtacttatcgcttaaaatagcttctaacattataactatgaggaatttgaaagcatcaagttcaaaccgtttgtaaaccagcactattttcattgcatgtttttcacacataacatttgatatttcttttctgcctttattacaagatctgggactctagattttaactaacttgaatggcatgttgtaacatctcatcyaatggagatttccaccaccttgtttttacaggcttaatgtagaaatttcttaaaagatcatatgtacccatgaatgttctttttccagcaagacggaagaagccaaaga

SEQ ID NO: 201752 - DNA, 599 bp, Homo sapiens
tttggttaacatggagaagggggtttctgatttttgtccttgtacgtgaatcaaggggaggactattctgattattgagtgaaagtgatttaattccacatgtgttattaccaaagtgagactataaatcacaaaatgtagtgatctgtctaaagttacacagcctgtaaaagaccagtcatgcctcctgacttcagttccagtgtttcatttttacatattgctttggccatgttaaaattaatcaagtggtacttatcgcttaaaatagcttctaacattataactatgaggaatttgaaagcatcaagttcaaaccgtttgtaaaccagcactattttcattgcatgtttttcacacataacatttgatatttcttttctgcctttattacaagatctgggactctagattttaactaacttgaatggcatgttgtaacatctcatctaatggagatttccaccaccttgtttttacaggcttaatgtagaaatttcttaaaagatcatatgtacccatgaatgttctttttccagcaagacrgaagaagccaaagactctctggtcattgcagaaggaagaatgagagcccaagc

SEQ ID NO: 201753 - DNA, 586 bp, Homo sapiens
gctgagtaaacagtgaccgatatgacaaatatgttatctataataagcaagactttgaagaaaggactgcaacttcaaaatgagtttcctggtttacaacaagcattaatgtcaggaaagtcaattaagaggtgacctccagtagcaagcytttgtcattcaggtttaggcaacattctttgtcagcctcaatgtaacactaactgttgaccttttgctttgcattgaaaggtcattaggataagttaagcctcctaagcgttcactacttttgaacctgtggctcacaacattccattaaaggggttatcaaagggtggctagaagaaaaaggaaaatgtcactatgaactttttaatctataaactacattaagcagttcaaattgtcatctgtaattcagttgtataattagaaatactttcctttcaacttaatccaaatgccacatctcattgtgatactaacagtatgttgtcttcaccaatgtatagctgtgtttatttctatacttaaatgtttagaagcaaaatttcctgtttctctaagctctaagtttccttttttagtaactcttccatatcaa

SEQ ID NO: 201754 - DNA, 586 bp, Homo sapiens
gctgagtaaacagtgaccgatatgacaaatatgttatctataataagcaagactttgaagaaaggactgcaacttcaaaatgagtttcctggtttacaacaagcattaatgtcaggaaagtcaattaagaggtgacctccagtagcaagcttttgtcattcaggtttaggcaacattctttgtcagcctcwatgtaacactaactgttgaccttttgctttgcattgaaaggtcattaggataagttaagcctcctaagcgttcactacttttgaacctgtggctcacaacattccattaaaggggttatcaaagggtggctagaagaaaaaggaaaatgtcactatgaactttttaatctataaactacattaagcagttcaaattgtcatctgtaattcagttgtataattagaaatactttcctttcaacttaatccaaatgccacatctcattgtgatactaacagtatgttgtcttcaccaatgtatagctgtgtttatttctatacttaaatgtttagaagcaaaatttcctgtttctctaagctctaagtttccttttttagtaactcttccatatcaa

SEQ ID NO: 201755 - DNA, 586 bp, Homo sapiens
gctgagtaaacagtgaccgatatgacaaatatgttatctataataagcaagactttgaagaaaggactgcaacttcaaaatgagtttcctggtttacaacaagcattaatgtcaggaaagtcaattaagaggtgacctccagtagcaagcttttgtcattcaggtttaggcaacattctttgtcagcctcaawgtaacactaactgttgaccttttgctttgcattgaaaggtcattaggataagttaagcctcctaagcgttcactacttttgaacctgtggctcacaacattccattaaaggggttatcaaagggtggctagaagaaaaaggaaaatgtcactatgaactttttaatctataaactacattaagcagttcaaattgtcatctgtaattcagttgtataattagaaatactttcctttcaacttaatccaaatgccacatctcattgtgatactaacagtatgttgtcttcaccaatgtatagctgtgtttatttctatacttaaatgtttagaagcaaaatttcctgtttctctaagctctaagtttccttttttagtaactcttccatatcaa

SEQ ID NO: 201756 - DNA, 559 bp, Homo sapiens
gtttcaatgaataagaagtgattaagtgtgtcaaatactcctgataggtcaagtaagatacattrgctagaatacattacctagatcactagaaatatgtttgagaaaatgtcagggggatgaattaaactgctgctatcttttagccacatgaaaaggcagggagaaaagtgtaggtcaattttcagtggacacaaaatttagtcacagtttcatcccaaatagataaacaatcacccacacataaatatgcactcatactttctttttatatcatgattactgttgacagatacccagctctcttataggcccacagtacaattgaaggtgatatttctgtggacacaattcggggtatttcataggatctaccatgaggagggacatggtgtggcaaaaagatgttttgtattttacctacacaacactttcatcaggtaatttccaagttatgatctactcatttttgcatcacattaccccacactgaataccattgtagaattataggatattttatcatatggtttattttgtattccattgagaagtgcat

SEQ ID NO: 201757 - DNA, 620 bp, Homo sapiens
atgatgcaaaaatacatcaaatgattgaattgggatgtagaagatctaagggtggaattatgaatcaaacgtgacaagataaattataakaattttttttctgatcataacaataataagtatttattgtaaaaaactaggagccatattaaaaaaagttatatgccaggcctaatacacataattaaataacctaacttattgttttctagtaccttgaaacaataaattttaaaactgtatgtatatatatatatatatattttctgtgtattgttatacacacactttgtaacatattagaatattattttattgcactgttttcttaattatcatctttccaggttaataaatttatgtgtcattcagcatcatggtggctacaaagtattccactaggtagatatactataattaacaatggactctggacaaacatttagtagtttgatatgtgttatcatgatcaagaatgttttgatgatacctgtgtgtattcatctctacatacttgcctgtatatatattcagtttctagaaatggaaatgcagggtcaaatggcaaactttttcaaaatctggtatacattgctaaatcagcaagataaaatttaacg

SEQ ID NO: 201758 - DNA, 620 bp, Homo sapiens
atgatgcaaaaatacatcaaatgattgaattgggatgtagaagatctaagggtggaattatgaatcaaacgtgacaagataaattataagaattttttttctgatcataacaataataagtatttattgtaaaaaactaggagccatattaaaaaaagttatatgccaggcctaatacacataattaaataacctaacttattgttttctagtaccttgaaacaataaattttaaaactgtatgtatatatatatatatatattttctgtgtattgttatacacacactttgtaacatattagaatattattttattgcactgttttcttaattatcatctttccaggttaataaatttatgtgtcattcagcatcatggtggctacaaagtattccactaggtagatatactataattaacaatggaytctggacaaacatttagtagtttgatatgtgttatcatgatcaagaatgttttgatgatacctgtgtgtattcatctctacatacttgcctgtatatatattcagtttctagaaatggaaatgcagggtcaaatggcaaactttttcaaaatctggtatacattgctaaatcagcaagataaaatttaacg

SEQ ID NO: 201759 - DNA, 620 bp, Homo sapiens
atgatgcaaaaatacatcaaatgattgaattgggatgtagaagatctaagggtggaattatgaatcaaacgtgacaagataaattataagaattttttttctgatcataacaataataagtatttattgtaaaaaactaggagccatattaaaaaaagttatatgccaggcctaatacacataattaaataacctaacttattgttttctagtaccttgaaacaataaattttaaaactgtatgtatatatatatatatatattttctgtgtattgttatacacacactttgtaacatattagaatattattttattgcactgttttcttaattatcatctttccaggttaataaatttatgtgtcattcagcatcatggtggctacaaagtattccactaggtagatatactataattaacaatggactctggacaaacatttagtagtttgatatgtgttatcatgatcaagaatgttttgatgatacctgtgtgtattcatctctacatacttgcctgtatatatattcagtttctagaaatggaaatgyagggtcaaatggcaaactttttcaaaatctggtatacattgctaaatcagcaagataaaatttaacg

SEQ ID NO: 201760 - DNA, 432 bp, Homo sapiens
ctggcatctggtaaatgccttcttgctgcatgcataacatttgygactcttgctttcctgtgttcaacagaactcatgatttctggcctgaagataagacacaaagtccagctccctctgagcacagtcagcatggctctccgaaaatacagtacacaatatcagtctcttttctgtgaaagaagttcggaattaaccaggagtcaattattctggtattaaattgaagttgaagtcactgggaattgcagggcaatttaaagaaaatgtgttagtgagattgggtaatagcagatttgagtctctcacacacacacacgagctccatgtggtattccatatgaatacaaaatgggcaaaaccttgtaaaaatgtggtaggataactacattgaaataactgaggtatggagtcactgccaggatttttaac

SEQ ID NO: 201761 - DNA, 563 bp, Homo sapiens
cactgcaaacttcagtgtggatatctggtcttcctgtgccaggcgggcagaccccagttcggtcctataatagcagtggatgtctggcattgcagtggagactatgagagaaacatattgtatacaayggcaaggtgagaactgggatttccaaggacttagtccctggagaaacgaccctctctttatccagtgatggcagcatccaattctcaggagaagctcccatgggaactgctctggtggagccttctgttagcagttgttataagggtattagttcctttctttagcagtcaggtgagctgaaaggaaacaatggcccagagagctaacctgttttggtttcactaacaggctattactaacgacccctgaaaggtgttaaggacactatttgggagttcattaaagaaggtaagagtaggaattatgggattgggccaataaaggaataatagggttgtgccccagaattctgggactgaaccatgcaagtcacaggaggtggtttttcccaaatgttgtggggaggctccagtcctgctgcagtgcttacatat

SEQ ID NO: 201762 - DNA, 520 bp, Homo sapiens
  misc_feature (1)...(520): n = A,T,C or G
nnnnnnnnnnnnnnnnnnnnnnnnnnnnnnnnnnttctactctcctcctacttaataagtcaaaagggcaygttatagcatcttggtatatacaacaaaagcaaagatttaccttctctaggttaagttaccttctctaggcaagagaaaaaattctgcggtgttacattagaaattttgcgggtaagaaagtgagatattataatgaatagctcccttttggtaccaaaacccaattcagcactcttggttaccagaactcaataaaaattaactttagaagcacaagtaatagaaaaaagtggagtggggacaagaacagctccaagaattagaactggggactttactgggataaagtctctctcttcccatctttcctgtctgcttctttctacttattggtttcatatactcttatattaagtcaagctttttccaggattcagcaaacaaagagagaacagagccatgggatcagtttcagtttagtgagtgaaaatcagtttccctgttagat

SEQ ID NO: 201763 - DNA, 565 bp, Homo sapiens
tgatgtagtttgttgccatggataattrtctctaaataaactcagggtagttaagtggatatgaacagatggaaataaattgattgaagttgtctattgtgcctcttggctcctgtttatttgttaccagcagcatatctttttgtcttgtcaggcctggcattttgtgcacttgaactttaacaatgtcagctggattcctcctcaaaactggcatagaaattgctccagggtacagccctctgccaacctggccagaaccacagcagaaaccaatagcctaattacagttctctaagcctcataggaagaaggtcacatatattggtacagctgtctaaccatgtccaagtttatctaacctcagatgaattgtaggcaggttctattaaagcatcacaatctctccactcttattttacatatagggaaaattaagttagaggagagaaaaatattcagcctggtgtttagtcattcattaaactaatttcacaattacgtattaagtgccaactacaggccagccactattctgggcaccaagaattcaatagtgataagg

SEQ ID NO: 201764 - DNA, 576 bp, Homo sapiens
tccattcatgaactgggcagctttaggaccagaagagattcagagagctctgcctcatcagttttggcagtggactttcatarggtgattatagaagcaaagtgaagaaattactgattggcaacagctcagcatttggcttatttgggcattatctgatggaaagtccctagttagaggttagctggaggtttctgattggttaagtctagttttgttttactggttacctcggacttcagtttgtttacacagaaaatcaaagtggtagagctctctcaacctaatgtcttctctattaactttgttaactgtatgtagaaacctaatattagtgaactatccttttagcatgattgattccaaatgtaaaaagtgataagagaacaaaaatcaccagatactttaaaaaccaatattttagagtaatctttccattgatatttgtccactctccttcagatgaaaccatcattctctttacatgtgtgactcccacagaatattgaaaaaacttgaaatgttgtttggaaaactaggcattttctaacaattgggtctttcttttattttctt

SEQ ID NO: 201765 - DNA, 576 bp, Homo sapiens
tccattcatgaactgggcagctttaggaccagaagagattcagagagctctgcctcatcagttttggcagtggactttcataaggtgattatagaagcaaagtgaagaaattactgattggcaacagctcagcatttggcttatttgggcattatctgatggaaagtccctagttagaggttagctggaggtttctgattggttaagtctagttttgttttactggttacctcggacttcagtttgtttacacagaaaatcaaagtggtagagctctctcaacctaatgtcttctctattaactttgttaactgtatgtagaaacctaatattagtgaactatccttttagcatgattgattccaaatgtaaaaagtgataagagaacaaaaatcaccagatactttaaaaaccaatattttagagtaatctttccattgatatttgtccactctccttcagatgaaaccatcattctctttacatgtgtgactcccacagaatattgaraaaacttgaaatgttgtttggaaaactaggcattttctaacaattgggtctttcttttattttctt

SEQ ID NO: 201766 - DNA, 578 bp, Homo sapiens
cccatgctttcccagacattctctggaatctaggtggaagctgccaagcctcctttattcttgtattctgtgtgccagcaaacttgacactatgtgaaagccaccaaggtttatggaagcttgcaatctccaaagagatatctcaaacctgtctctgcgcgtatgggccacagctggagccagaggggctggggatgtaaagrgcagtgtcccgagtctgagcagggaagtgttgccctgttcctggcctgtgaaaccagtcttttctcttaggcctctgggcttgtgatgggaggggctgcctgaaagatttctgaaatgcctttgaggtcttgttcccattgtcttaaatattaacacttggctcccttttaattattctaattgtttagcaactggttgttccacagcctgcttggattctttaccacagaggcagactgcaaatttttcaaacttttatgctctgcttttattttaaataaaagttccagctttaagtcatttattttctctgcatctgaaatagtctataggatattagaagcagctaggccacatcctgaatgctttactgc

SEQ ID NO: 201767 - DNA, 592 bp, Homo sapiens
cattgctataaagatatacgtgaggctgggtaatttaaaaataaaagaggttcatggttttacaggctgaacaggaagcatggcactggcatctgtttggcttctggtgagggcctcagagagcttacaatcatggcagaaggtaaagcaggagccagtgtgtcacatggcaatatggtggggaggtgccacactcttttaaacaaccagatctcatgtgaactaccagagcaagaattcactcatcaacaagtggatggtgctaagctatttatgagggatcttctttcatgatgcagtaactcccaccagtgttataytggggagttctctcaccctctaaatcactgagcttcttagagatcaccacagcatctatatccttattttaaatcacaggccaactgaaggttgaggtaccttgaggtccagcattctatgcagacactatagttgtcttccttgtagacaaggaagggttggttaaatgaaggaatgattgaatgaatgtgtaaatggaatttgaaccttctaatgcagaccttctggacactattattgctatacagagtttagtttctatatcaccact

SEQ ID NO: 201768 - DNA, 564 bp, Homo sapiens
aggtttttccaaatctaagattatagtatatgcaaacaaggataatttgacttcttcctttccaatttggatgccctttatttctttcttttgtctgattgctctagttgggacttcccgttcaatgttgagtaacagtggtgaaagtgggcatccttgtcgtgtttcagatcttaggagaaaggctttcagtatttctccataaaacatgacacacaatgtgggtctgacaagtatgtcttttattgtgttgaggtttktcctttctacaccaagtttgttgggattttttatcacaatgagatgttaaattttatcaaatatattttcagcattaattgaaatgatcatatggttttttttcttcatttggttaatatgatgtatcacattgattgattcatgtatggtgaaccatccttgcatcatggggataaatcccacttggtagtgatggatgatttttgcaatgtgtttctgaatttggtttgctgttattttgttgaagatttttgcatcaatattcatcagggatattggtctggttttttgtttgtttgtttt

SEQ ID NO: 201769 - DNA, 561 bp, Homo sapiens
tgtaattatggggaactaaatccctaggaattcacaaaatcacaaaattgtgagttagtgatcttgagcaatttcatttaaatttcaaaggagagtgtgatctcagttccatatacttatctcatttaacacatatgattatgtggcaaagatagagttgcaactcccaggtttcttgagtctgtctctgtttagcattctttccattatgcagatggaggaaggtgaagcaaaacaatctggaattgttaagaatttgggagactatggtggataagtaaagaagagtgtcctatctttaaactcttttaacaaatggagatttcaatgctatgctaaggaacaaatggtagaaatcagccctggtgcagacaatatgggtgtacttttcttcattcttggcagagaatataaaagcaaaaataaaactgactgaaagtcartctgctgttgttattatcatgcaaaggtaaatctaaacagtgtctatgccaaagtcattctctgctgggtctaaccttcccacaagtcccaggtttggtgtgcactgaagacacccgt

SEQ ID NO: 201770 - DNA, 620 bp, Homo sapiens
gatgtataatttgcaaagaacagtgctgtaaaacatgaaatgtagaytgatctcatgtcttgggaagaatgctaatagaactaatgaatgttgcttcatgaactaatgaattagggttacagagttactctatacctagagtaagacagattatttaggttacaaagttcacaataaaaaaccaactgagtgcctactttctctgaatcagggcagactagatgtactgaatgagaataaatcttccactaattcatgaaattgtgcttcttcacccataaccagcagcaaaaattggcatggttattgttgagattctgccctggggcattgatgcaggaagtctgcaggttttctgaaaggtttacaaagtttccaccaagtttactgaacttcattgaatctatgcaccctgtctagcttttcccagacagttcttggttcctcatcttcgtggcctaaggatacaccagcttctgctgcccacattaactttataacaatctatttccacagaaagtctagccagagggattaacaaggagagacaatatttattcaatttctttcaagtctgctgcctaatttcttgccaactggatggttttgggtgtttggca

SEQ ID NO: 201771 - DNA, 620 bp, Homo sapiens
gatgtataatttgcaaagaacagtgctgtaaaacatgaaatgtagattgatctcatgtcttgggaagaatgctaatagaactaatgaatgttgcttcatgaactaatgaattagggttacagagttactctatacctagagtaagacagattatttaggttacaaagttcacaataaaaaaccaactgagtgcctactttctctgaatcagggcagactagatgtactgaatgagaataaatcttccactaattcatgaaattgtgcttcttcacccataaccagcagcaaaaattggcatggttattgttgagattctgccctggggcattgatkcaggaagtctgcaggttttctgaaaggtttacaaagtttccaccaagtttactgaacttcattgaatctatgcaccctgtctagcttttcccagacagttcttggttcctcatcttcgtggcctaaggatacaccagcttctgctgcccacattaactttataacaatctatttccacagaaagtctagccagagggattaacaaggagagacaatatttattcaatttctttcaagtctgctgcctaatttcttgccaactggatggttttgggtgtttggca

SEQ ID NO: 201772 - DNA, 620 bp, Homo sapiens
gatgtataatttgcaaagaacagtgctgtaaaacatgaaatgtagattgatctcatgtcttgggaagaatgctaatagaactaatgaatgttgcttcatgaactaatgaattagggttacagagttactctatacctagagtaagacagattatttaggttacaaagttcacaataaaaaaccaactgagtgcctactttctctgaatcagggcagactagatgtactgaatgagaataaatcttccactaattcatgaaattgtgcttcttcacccataaccagcagcaaaaattggcatggttattgttgagattctgccctggggcattgatgcaggaagtctgcaggttttctgaaaggtttacaaagtttccaccaagtttactgaacttcattgaatctatgcaccctgtctarcttttcccagacagttcttggttcctcatcttcgtggcctaaggatacaccagcttctgctgcccacattaactttataacaatctatttccacagaaagtctagccagagggattaacaaggagagacaatatttattcaatttctttcaagtctgctgcctaatttcttgccaactggatggttttgggtgtttggca

SEQ ID NO: 201773 - DNA, 620 bp, Homo sapiens
gatgtataatttgcaaagaacagtgctgtaaaacatgaaatgtagattgatctcatgtcttgggaagaatgctaatagaactaatgaatgttgcttcatgaactaatgaattagggttacagagttactctatacctagagtaagacagattatttaggttacaaagttcacaataaaaaaccaactgagtgcctactttctctgaatcagggcagactagatgtactgaatgagaataaatcttccactaattcatgaaattgtgcttcttcacccataaccagcagcaaaaattggcatggttattgttgagattctgccctggggcattgatgcaggaagtctgcaggttttctgaaaggtttacaaagtttccaccaagtttactgaacttcattgaatctatgcaccctgtctagcttttcccagacagttcttggttcctcatcttcgtggcctaaggatacaccagcttctgctgcccacattaactttataacaatctatttccacagaaagtctagccagagggattaacaaggagagacaatatttaytcaatttctttcaagtctgctgcctaatttcttgccaactggatggttttgggtgtttggca

SEQ ID NO: 201774 - DNA, 344 bp, Homo sapiens
aaaagaatttgtactgttacccttttttagtttctaaactatgattttgaggtataagtgaattgttcagtagaatataattttgagttgctacttttataagtgtttaagccaatctgattgttgacataaagcaaattaaatatacacatacacacacacacacacacactcacagtgtatagtagacttaaaatatataactttttatttgttgtgttgyttgatatacttgtcattatttttataatttcattttgcatttacaaaatttattttttgtctcttttcctgacatttattaggctgacataatttctactttcctacatttcttttttctt

SEQ ID NO: 201775 - DNA, 525 bp, Homo sapiens
cgagtaccctatcataatgagaagtcatagtctccttttctcagggccaccagtgccctctcccagctctatcagctgtgggccaggagtcttaaggttgaatgatcagtccattagggttctgagtccaactcaccatatcacacttggatagaaatayaagagcgggacattctttatttaggcttagtcttgacctttttttttttttttttttttgagacagtctctctttgtggcccaggctacagtgcagtggcgcaatctcggctcactgcaagctctgcctcccaggttcacgccattctcctgcctcagcctcccgagtagctgggactacaggtgtccgccaccatgcccggctaattttttgtacttttagtagagacagggtttcaccgtgttagccaggatggtctcgatctcctgacctcgtgatctgcccacctcagcctcccaaagtgctgggattacatagacttgacattttaaaacctgtatttgtgctgtcggtatgctgtaaat

SEQ ID NO: 201776 - DNA, 596 bp, Homo sapiens
tgcaaataaattctgtgcagtggagaaattattcttttctccccatgcctctgctccagctcccgaccctgaygaaaaagccaagtttgcagccagccatttgcaaattgattttagtaaagtcgagctacaaaagtctctgcttttttgacatgtgctcatctcatgtctgcataaggtttgtgaatttaacttttttgaaagtgccttttaacaaagcagatttcaaagtagctggacttacgcggttgttggtggtgtcggggcagttaaggcaggattccctgagaatatgttattttatccaaaatataaaggtttagtaggtgctaattaatgtcagagtgaaacagcactggacacttgtaaaagacagaaagacaggttttattttgagtactgcagtgatggagagattctagtacaaactgagctcaactcccactgagacaaaagtaactaggtttttaaagggagaacagagagaaaacagaaaagatctgtgggaaagtaaaagagggaacaaaaagaactagggaactatgggggaagcaaatggggcagagtgaggaggaaatagaaaattacagaagggg

SEQ ID NO: 201777 - DNA, 521 bp, Homo sapiens
aacgaacatttatcaatttgccatttcatggcatatttcctatacactgccataagaggaaattaagtttattcagatatgcttaataaactaaagatgtggggacctggagtttattaagtattaaaaaatatacttgcctaattrtcaaaccatattttttgtttatacaagagctaagagccttttctagcaaatttataaatcaatatactttatagcaatattctattaaatatctaatttatagagatgtattttacctaaaaagcaaatttggtgtcaatatgtaaatatatctaagaatactcatacacacagacacacaaataattttaattttgtatttatgtatatgtaactgggcagctttacttcacgatgcattttaaaacttgttttttcctttctcttgggtttcaacatacaatcttgaagtaaactgcagaagccttttcctttaggcttaaaatagattctacatccctccctttctcaccatttatacttccttcacattt

SEQ ID NO: 201778 - DNA, 521 bp, Homo sapiens
aacgaacatttatcaatttgccatttcatggcatatttcctatacactgccataagaggaaattaagtttattcagatatgcttaataaactaaagatgtggggacctggagtttattaagtattaaaaaatatacttgcctaattgtcaaaccatattttttgtttatacaagagctaagagccttttctagcaaatttataaatcaatatactttatagcaatattctattaaatatmtaatttatagagatgtattttacctaaaaagcaaatttggtgtcaatatgtaaatatatctaagaatactcatacacacagacacacaaataattttaattttgtatttatgtatatgtaactgggcagctttacttcacgatgcattttaaaacttgttttttcctttctcttgggtttcaacatacaatcttgaagtaaactgcagaagccttttcctttaggcttaaaatagattctacatccctccctttctcaccatttatacttccttcacattt

SEQ ID NO: 201779 - DNA, 590 bp, Homo sapiens
tctttctaatgtatgccactcttgttcattagactctgcaagcggtgagggactgaacctgcactcattactatatacaaaagaatgtttatagtaattccaagcactagtttccccaaaacaacagtataagccacgatgcctataaatagttatcttccattgtttacaagtattgttttttaatgagtgacaatgtagtatattaatattcaggaaatgtgtaagggtttgttactgccatattttttctgtttttatctttctagcaaccggcaagtaaagtaagaaccccaggcatctgatttctaatccaattgcattttcrttttataattttttttctgcttgcatttagagtattttatttgttttttttcttaaatcatatataatggtcttcatcattattgcaaataaatatatacaggtcataatagtcagtggacatttacacccttaagtcacacatacacacacatattccactctattgatataatcacagtgctagtgatctcactagtgattactcatgagaaatatttgcagatgaatagatggagcttcatatatagatatggagatat

SEQ ID NO: 201780 - DNA, 515 bp, Homo sapiens
atcctgtacaaattgcaaatgtgtagcctaaaactaaagatggcattctactactaaacatggatgaatctcattctccttgaaggactgcatgtcttctattattacttatataccttgtattatctgatattgaataggagatacagttatgcctcagtatctactcaggattggttccaggactcacatttataccaaaatctgcagattcccaagttccttatataaaatggtgtagtatttgcatataacctatgctaatccttctatatactttaaatcctctctagattacttataatatctaatgggatctaaatgttatttaaatagttattatactgtattttaaaatttgcaatacattgtattgcattcaattgtattgttttattttgtttttttttycaaacattttttatctttggttgattgaatgcccagatggagaacccatggacacagagggcctactgcaattctcttctgctgcagttgatagtggtctagta

SEQ ID NO: 201781 - DNA, 524 bp, Homo sapiens
aatcagggctgtggactcactgccttcgttatccacagacagaacagcaccctcaaacaatgaatgccaaatattttgctaagaaagccatgtctcctagacctaataaccatgatctagaacttgatgctcttgattaarcaacactgaagctatctctcttatgtgcacctgcactacaggatttaagaaatgttcaattatgtccactttgagatttctgtggagatgcctagccttagcctatcacataagataccagtaacctcacacatttcctactcattagagggcaagaaaccatgccaatgtgaaaattctctatgtataagctgtatatagagaacaaggtcaaatacaatgcagatgaatataaggttgtagtgttgtcctgcttggaaggtgtcctccacaaggatttcctcagttctgggttatttctgcttagtaatctcatttgacactgatgacttttacttttccagacaatgccagattatattttccaaagttggctgcaccaa

SEQ ID NO: 201782 - DNA, 524 bp, Homo sapiens
aatcagggctgtggactcactgccttcgttatccacagacagaacagcaccctcaaacaatgaatgccaaatattttgctaagaaagccatgtctcctagacctaataaccatgatctagaacttgatgctcttgattaaacaacactgaagctatctctcttatgtgcacctgcactacaggatttaagaaatgttcaattatgtccactttgagatttctgtggagatgcctagccttagcctatcacataagataccagtaacctcacacatttcctactcattagagggcaagaaaccatgccaatgtgaaaattctctatgtataagctgtatatagagaacaaggtcaaatacaatgcagatgaatataaggttgtagtgttgtcctgcttggaaggtgtcctccacaaggatttcctcagttctgggttatttctgcttagtaatctcattkgacactgatgacttttacttttccagacaatgccagattatattttccaaagttggctgcaccaa

SEQ ID NO: 201783 - DNA, 519 bp, Homo sapiens
ttgttttctcctttattctttcaccatccagaacaagttttcacacctagtaggtttcttggtttatgtgaatttgtttttctgaactttgagaatcaggtggaattcagaaaagctcttctaacttctcatagatttctctctctcgtaccgtttttttttaagatgaagcttaacttactgagtttttccttcttgattcctttctcccactttggcccagactttcacctttgcttctccttgaagtttctaactggctcaatatttttaaatctgctttttttgaactataatttgcatataaaattgcaaamtttggtgagttttgacatatgcatacaatattataactgccatctcaactatcatgatctagaacattctatctccctcaaaattccctcatgtccctttgaagtcaatcccttcctctcccccaagcaacctttgattttatttccatccctacagttttttcttttctaaaattttgtgcaaatggaatcatgcagcatg

SEQ ID NO: 201784 - DNA, 378 bp, Homo sapiens
agtatctttgaggtttccacattgcgaaatcccgaaaatgtggagaragctgaagtttccaatgtaaaagtaacaagaatgtcatggactagaaacataaagtatttgagttttcctttctgttacttttattacaataaaaaaggagacagcaggataagtactttaatattgtgtttctcatgtgtttttgaaaatgtgtagtaatacttcaatagttttggtttccttttatttattaattgattttttaagattccaccttaggggcctgttgggtagcaaagggattatgttgtccttgacattaagggaattagccaaacatagacttcctgttcattcttgatttttttccatgtcatatatgcctacaaa

SEQ ID NO: 201785 - DNA, 497 bp, Homo sapiens
atattatagggtaatactgtagttcttcggcagatgttacggctttctctgtacttcttttccacaaattaagggcagtaagtaagccacagctggaaaagagacagtataatgtcttctacttttcaataaatacttactgattaaaaacatacaggtagcatcattcatcaatacacccacattcagtaatggctcacagtaaatgctacaaacaagtagggcttttcttctagccattgctcagagaaggaaaaagaagaagaggtgtaccccacacgtttcaagtacatggaaaatgtcaacaaatgagagacaytgaagaactaattcactactatttggttactttattttccatcgaagaaaacctctttttaaaaactaacacataaataaaatgaacgaagaacaaactaaacgttatttatcaccagtaagtgacaagagtatgtcaaatcctactttaaatatcaaagcaaccagcatcagagaaa

SEQ ID NO: 201786 - DNA, 513 bp, Homo sapiens
atgatattatagggtaatactgtagttcttcggcagatgttacggctttctctgtacttcttttccacaaattaagggcagtaagtaagccacagctggaaaagagacagtataatgtcttctacttttcaataaatacttactgattaaaaacatacaggtagcatcattcatcaatacacccacattcagtaatggctcacagtaaatgctacaaacaagtagggcttttcttctagccattgctcagagaaggaaaaagaagaagaggtgtaccccacacgtttcaagtacayggaaaatgtcaacaaatgagagacactgaagaactaattcactactatttggttactttattttccatcgaagaaaacctctttttaaaaactaacacataaataaaatgaacgaagaacaaactaaacgttatttatcaccagtaagtgacaagagtatgtcaaatcctactttaaatatcaaagcaaccagcatcagagaaattacgtgccagaa

SEQ ID NO: 201787 - DNA, 510 bp, Homo sapiens
tgataggagcccctgactataccctgcctcagcaaaatgtagacaaataaagaaaaaataattcaagagaaataaaatttaaaaataaagcaattggaaaatagtaagggcaaataaaataaactgaaacaaaatagagaaaagtaaagaaaaatataactaagattagtgaaaataaaatcaagatgaagataaacagtaaatacaataaaattgagaaataagaaaattttaagaataagaagagacaagtgaaagtaaaaaagaaatgcagagaaaaataaaataacaaagagatatgcatggaaataaataaaagaaacaagaaattgaataaaattacaaacracaaaaatctagaaaatttgaaattgagactataatgaaaaaacaaaaaataaaaaatgaagtaaaattaaattaatagaaaaaatgaaagtaaataaaaataaagagaaacaagataaaaacaaagacaaatgtacagaaaaataaaagattaaaaagaaa

SEQ ID NO: 201788 - DNA, 323 bp, Homo sapiens
tcttcagtgtctctcatttgttgacattttccatgtacttgaaacgtgtggggtacacctcttcttctttttccttctctgagcaatggctagaagaaaagccctacttgtttgtagcatttactgtgagccattactgaatgtgggtgtattgatgaatgatgctacctgtatgtttttaatcagtaagtatttattgaaaagtagaagacattatactgtctcttttccagctgtggcttayttactgcccttaatttgtggaaaagaagtacagagaaagccgtaacatctgccgaagaactacagtattaccctataat

SEQ ID NO: 201789 - DNA, 412 bp, Homo sapiens
aaaagatatcacttttctttctagttgattaaggtgaaagattaaggtattgacttaaatttttttcttctttaacataaagttacaactataaaattccctttaaagattcttttacttatattccatacgttttggtattttgtgtttattttaatttatctcagaccgttttataatttcccttgtgatttcatttcctgactcagtggttatttaagrgtctattttttaacttccacatatttgtgaattttctaaatttctttgttactgatttctaatttccttacactgtactcagagaactttctttgtataaatttattaggactcgctttaaggcaggtcattaacaaaataccagaatacgtaatttataaaagagcagaaatgcattttctcacagtcc

SEQ ID NO: 201790 - DNA, 414 bp, Homo sapiens
ccgggcgcggtggctcacgcctgtaatcccagcactttgggaggccaaggtgggcagatcacctgaggtcaggagttcgagaccggcctggccacatggcaaaactctgtctctactaaaaatacaaaaattagctgggcatggtgatgcactactaatctcarctactctggaggctgaggcatgagaatcgcttgaacccaggaggtggaggttgcagtgagccgaaattgcgccactgcattccagcctgggcaacagactgagactgcatctcaaaaatacaaacaaaaacaaaggtagtggcaattggggatgaaaaagaagggacactgttggagacatttagactatagaatctataagacttggtgaccagttgaatataaggagagggagggagcataacaccca

SEQ ID NO: 201791 - DNA, 621 bp, Homo sapiens
gaagagtatggtatgaattctttccttcacaaccagttacatgaagggtgatctgtggaatacaaaatttcaaatagtgcaagaggatttggacaaggaatcaatgcctactctaaaaagaaataattatgtgacactaggcacagaaaatcctggkgcttttttttctttttttctttctttctcttttttttttttttttttgagacagagtctcgctctgttgtccaggctgaagtgcagtgatgcgatctcagctcaccacaacctcttcctcctgggttcaagtgatactcctgcctcagcctcctgagtagctgggactacagtcatgcaccaccattctcggctaatttttttttcttgtattttttgtagagacagggtttcactatgttagccaggctggtctcaaactcctgacctcctgatccacctacctcggccttccaaagtgctgggattacaggcatgagccactgcgcccagccagtcctgatgctttttaaggggctttttatgttttaacctccaatctttctacataacatggacaaaattttattgaaatgcctcttttccactgagtgcaagaaagccgtgtaaactaacaattgtgat

SEQ ID NO: 201792 - DNA, 293 bp, Homo sapiens
gctctctgtgaggtcctcttggtcttccaaaatagaggagggggtagccttgcttctgggctstggtgtgagtggcagccctgatgatctctgatcaatcccttcttgagtcactcttccctttctagaaagataaagcatttttacagatgaatacctctttcatccttccctgttacctatagtccaaactaggtattgctgctgccttggtctaaaatgacagtctttctgctgatatactaattccattcctatcttctgatgaggctgctatttaaatttatggctta

SEQ ID NO: 201793 - DNA, 466 bp, Homo sapiens
ttctttacattttttagttgattttacaggtttcaatttttctgcaataaaattagtaaacatgaaaactagagataaaaaagaaaacaaattatagatcattatcatttttttcagactgatttccccaggaagtagattctgggatagagtttgtgaagtcgattagagaatgaattgagaggactacctatggaagaaggtgggaaaaacagggttttgagagacagaaagagagataatgagctgtaatatacacctgaacacaaattcaggtaaattgatgaggttctattacaatgcaataatcatagaaataaagygcacaataaatttaatgtgcttgaatcatcctgaaaccatttgctccacccccgtgcccctagtccacggaaaaactgtcttccacaaaattgtctccctggttacaaaaaggttgggaccactgctgtagtggtctaaaacg

SEQ ID NO: 201794 - DNA, 570 bp, Homo sapiens
cttattttgtgctttggagttagaascagtacaaatctcctgacaaggttctaacattcaggctcttctctttttctgagggtaaaagactctgactctaaggttaattttcttttcatttctcaacacatactcaagaataaatgagagaaatggtgaggccagggtaaaaaaataaaggattatttatttcaccatcatcaaaatgcccattgattaaaacaaaaacaaaaaacaaatggcccattcagctctaaaagcactcttttttaaaagtttcattctattttctctttgtgtcacgattgctaagttgaggggaaagaggaaagaggaaagaggatatctgttttttctatttctgggtaaattctaagattgcatattgctagttattttctgcttcctatagcttgacagcatttatcattaaatttgtcctatttatataatagattcattatttcttttttcatctttctctatcattattcccttatccagattagcacctaaagttgtttacaagatttggtcacaactcaactttcctttttttttttttttttg

SEQ ID NO: 201795 - DNA, 503 bp, Homo sapiens
tgattaaagaacctcctatctatacacacttctatggagtaaaatgtgtctcccaaattcctatgttgaagccctaacccccagtggggttrtacttggagatagggacttttaggaggtaattaaaattaaatggtatcagaagggtggaaccttaatctgataaaactggtgtccttccaagaagaggaagggatatcagagctatctctctctcctcaagcacacagaggaagggccttatgaggacacagagagaaggcagctgtctttaagccaagaagaaaggcctcactaagaaccaccctgctattatcttgatcttgaacttcctgcagaactgtaagaacattaatttttgtcatttaagccactcagtctgtggtgttctgttatagcagccagaacagactaatacacccacaacatacaatctgtattacaaaatatacttgtataggttaccttacagggtgctataaaaacccagatgaacaaacaca

SEQ ID NO: 201796 - DNA, 571 bp, Homo sapiens
aagttcttccaatctttcaaaatatggtatctctgggctttttgaaagctgcttttggaatatgaaataattttggagtgcwgacctagattttgttttcttctgttactaccatatcttttgcctgtaatttacaatgtaatcataatgggatatgtagttacttttgtttgactgttttatggtattgtaatattctcaagtgtacttgcttttacatatctagcaccagtctcactttggaaggttaactaaatcttggaaggaaatacatgaaaggaaacaggaaagtaaaagaaagataagtaaacaagtaagaaagaaaaaaaattaagaactgtataatttagcagtagtctgcaaaaaatatagaaatttagatactaagaatctgaccactcattttgcaaaagaagaaaattttgtcatagatgctagtaatttgctatatgttctgtgttagtttttttttttactgctgtaacaaattaccacaatcttaatgctttaaaacaacccaaatttatcttacaattctttagtgtcttattaattttgaaaatttctcagt

SEQ ID NO: 201797 - DNA, 571 bp, Homo sapiens
aagttcttccaatctttcaaaatatggtatctctgggctttttgaaagctgcttttggaatatgaaataattttggagtgctgacctagattttgttttcttctgttactaccatatcttttgcctgtaatttacaatgtaatcataatgggatatgtagttacttttgtttgactgttttatggtattgtaatattctcaagtgtacttgcttttacatatctagcaccagtctcactttggaaggttaactaaatcttggaaggaaatacatgaaaggaaacaggaaagtaaaagaaagataagtaaacaagtaagaaagaaaaaaaattaagaactgtataatttagcagtagtctgcaaaaaatatagaaatttagatactaagaatctgaccactcattttgcaaaagaagaaaattktgtcatagatgctagtaatttgctatatgttctgtgttagtttttttttttactgctgtaacaaattaccacaatcttaatgctttaaaacaacccaaatttatcttacaattctttagtgtcttattaattttgaaaatttctcagt

SEQ ID NO: 201798 - DNA, 645 bp, Homo sapiens
actgtacatgatgtagactttataaacactgtacacttatgggacattcaatttgtaaacagaaacaaaaaaaattaaatgtataaaaaataaagtaattgtgctatgacatcactggattataggatttttcagcttcattataatcttatgggaccactgtcctatatgcggaccttgttgaccaaaatattgttatgccatgcatgactgcatttacatgaaatgattttcaaagaactgatttacataaaagactacatacaattctttagtgtggtctatattatgtgaggaatcaatttgaacattattagaattaattacactcatgctatctactctatatttttcccyattcaaatacttaatactctaatgatcacaattagatcagtgaatgcagaggtgaacaatgctagagaccaaactgctttacaacctagcttgtgacatactataataaactcaaatcatgcttgatgaataagaaagatgagtgatacccttacagtcctttttcagagaaaattttaaatgcttactttgttagagatgaaaaaatagtcaaatgagaatttaatggacgtactgtaaaaccaagtggcctgttttagtatagattttattacattttatggaact

SEQ ID NO: 201799 - DNA, 584 bp, Homo sapiens
gtgctgggattgcaaaaacgagccactgtgcctggctagattacacattttaaaagccaaaagccagcattagcaaaaaccagtttgcttattttaaaaaccaaagccaccaatttgtcataagcaatttttacactgttataaagaagatgaacttatacataatttatttaaaatgtattaaatgtgtactatcaaccaaattctgtgtgaggaactagggatataaaggtgaaaaattaatttctctttccaattaccagtgtattagttggttctcacactgctataaagaactgcctgaaactgggtacttcataaagaaaaaaggtttaactgacttgcagttccacatggctgaggaggcctcaggaaactcacaatcatggckcaagagaaaacaggcacatcttacatggggacaggagttagaacgcatgtaaaagaggaactgtaaaacacttacaaaatcatcagatctcatgagaactcactcactatcacaagaccggcatggggaaactgcctccatgatccaatcacctctactaggtccctccctcgatgtggggattatggggatt

SEQ ID NO: 201800 - DNA, 562 bp, Homo sapiens
cagtgtaaacttgtattcaaatacattttagtcctcaaaatgttcattacacaaaatcatcatcttgactggcattaattagaatctttgtctggaagtctctgcagaaaggctgagaattgaatgtactaacaatgccactaaattaattgcctacagtgatggacgtgtagggccaaatattcaaaaggcatctagtacttgatctatgatggccaatttgaactattagtttcaaataatgtctacattgtcaatcttgtttccacaggacaaaaggatgtcagtggaatgttttcagaggtaagaaggttgaagaaaactatttccaacaatggctaagctgtatggtaccatccacacagatcargagactacctccagttgttccagtgtgctaatttgattttttagcataattatatgtttgagtagagtagacttacagacaggttataaatgcattgttttgaagaacacatttaattgtatagtctgtattttattaagaagccatcaaaagaaggaaaagtatgaagatgttctatgctattttataatt

SEQ ID NO: 201801 - DNA, 534 bp, Homo sapiens
tatatatcagcaaaaaaatggaaagatattggggaaatatatttttaattaggtaattgtagactgaacaaatggtcttatcaaaatgatgctggttttggataaaaaaatttgataggcattactttaaaaatgtcactgggatctgccattgaccatattctatttaaatgctaatctacatatccaagttaaaggttatatacatacttctggttgacacgaagtaggaagggatagttaacaacctgaaataaattgaaaagcagatctcagtgactgaatccaataacagcgtgtggtggaaaagacctaagaataaagtccgctgaaggaataaatatttatagtgatcattaaactaatgtgacccaagagmaagttgtttggattataatatcttgcatggatggatatcatgattctcattgtattctgtgcgtgctagaaaatcaatggcttctccaagtacacagaaatacaggtaattttaggcagagcaatatgacaggaatgatgtacatgaagacttgt

SEQ ID NO: 201802 - DNA, 510 bp, Homo sapiens
tttatgcattttgaccatcttttacactacttttcttaatcatttttgaaccatagttattttgaagtcattgtctgcttactatttacatctacttctactaactcttcttctgcttcattacaagtttggtaaattttgacttatactggatattgcaaatatgttgcagagccctggcttatattatctttctcaaaagagtgttaaacgttgttcggtagtcaattaaattaccagtggttcaccttgatcctgatgttttggttttagtctttattagggtggatttatttcagtattgcccttatgcttggagatatatctgtactcctagggcgtgacatttcagaggtctcaatgaattgtcccttatgttaataaaggactccttcattctggctgggtctgaactatgactgggttttaactctaatatctccccagaactgtatgagaggaactatgtacatgctctgaaatctccrcttatctcttaactttccaaga

SEQ ID NO: 201803 - DNA, 549 bp, Homo sapiens
gttatattgagtgtaatcataactatattagtaaaaaatattggtacatattttcttttcttatgaatcytcttcaggttttttgtatcaagggtttgatggcttcataaaatgagttggaagttggcctatttttctattctttggaagcacatgtaagattggtgttatgtcttctttaaatagtagaaagaattaatcagtaaaatcatctacacctggagattttatgagaagattattttttataacggatttgatttatttaattgatataggactatacagatgttccactccttttgagtcagttttggtaatgtgtacactatatctaagttaataaatctattggcataaagttgttaataatctcctcttatccatttgatgtacttgagatctgtagggatgcccccttatattggtcgtttgtgttaccttcctcttgctatttattaattttattaatattttcaaaaagtcaaagagaaaaccttgttgacttttctgttttattgatttcaccatttgtttttattactttta

SEQ ID NO: 201804 - DNA, 496 bp, Homo sapiens
acatgcaaaaatcaattctaggcagagttcagacaatatcacaaacaaaattttagaactttaaaaaaaaaacagaatacctttatgacttagggttaaggaagaatttcctaaataagacacagaaaacacaagctgtgaaaggaactctaaataaataactagattaaagtttaaaaccttttttcaatagaagacaccataagaaaagttaaaataaaccaatttttaaaaagctattttgtagcgcacctacattttaaaggaacattattcaatatagagcaaaataacactttataaactcttatttattaaaaataaataaatagatcacctaaaagagaatgagcaaaagatatgcaaagaaatttacagaggagaatrtttaaataaccaataaacctaggcaaagatatactccctcactagtaatcaaagaaatgcaaatgaaaccagaaagtaaaacccacaaaattgtgagggcccttgataa

SEQ ID NO: 201805 - DNA, 522 bp, Homo sapiens
acatatatattaaaagtaaatggatagagcaaaatataccaggctaacaccaatcaaaagaaagggggagtatctgtatttatttcagaagagcaggcttcagagcaaaaaaaaccatcagtgattaaaaatgrccattacataatgataaatggtaaattctccaagaagacataccaattcctaacatgtatgcacctaacaacaaagtgtcaaaataagtgaggtaaaactaaaagaactgcaaagaaaaatagatgaatccaccatcatagttgaatacgtcaacacactttcattagaaatgaaaagattcatgtccaggtgcagtggctcatgccagcacattgaatgccaaggtgggtgggtcacttgaggtcagaagttcaagacctccctggccaacatggcaaaactctgtctctactaaaaaaatacaaaaattagccaggtgtggtggtgggcgcctgtaataccagctactcaggaagctgaggcaaaataatgcctttaacctgggag

SEQ ID NO: 201806 - DNA, 610 bp, Homo sapiens
aatcaggaagatttgataaaggcaagtcctcactatgcatcaaatcttgctcctcctgcgtgtcctccatgaatcactgtcaactattctagccgattattgatcttcccattttacaatgtcttaaaaggcacttcaaaaatcccctataaaacatttaaccctttgtcctacactatcttatactgttctgtttgtttgaagtacgttattgttcttttagcaatattggaagatgcctgagtatataaatcatattttctagaactaagaccacttcaaaatcattcaaattcaaggctggaagcattgtagttattcaaaaataatgtagaaaaatcatagtgcataatggaaagaaaatgggcagtcatatagacaaaaatgtaagcccttcttccatccattaaccatacgaatttgagaaagtttaattgtaaacgttgtgagaatcaaagaagatgatagcacaaagacacctagtgagatttcgtagctacaaactgaataaatgartgaatgaaagaatttccatgaaaagatataaaatatgctaaagaatgtgccagatcagaaaaaaaaagaaatataaaagagttgaaacagccag

SEQ ID NO: 201807 - DNA, 447 bp, Homo sapiens
aacaaaaaatctcattctgcaaataacacctgaatattgtctttcactcagaagagtgcctattgaaattaataaaagaagatttgcagctttcgttttctgttttccaagtgaatggctttatgtctagttgtttgggatggtggatgaaggatcagggaaggaggttgtagaatgggaaatgggggasagatggatgttaccgtataatgaaggaagataagcacagaaagggggaagtattctattaatacttcaaaataaattacaacacaaagcaagctatatgtatatatactcaagagtttaaacagcattggtgagtcaaattaaagggcaacagtttctcagaactctgtctccccaggtttttccccaaaggtaagttgttcaacctcttcaatctccagctcatcacctccagggccaggtgtaggttttgtggag

SEQ ID NO: 201808 - DNA, 447 bp, Homo sapiens
aacaaaaaatctcattctgcaaataacacctgaatattgtctttcactcagaagagtgcctattgaaattaataaaagaagatttgcagctttcgttttctgttttccaagtgaatggctttatgtctagttgtttgggatggtggatgaaggatcagggaaggaggttgtagaatgggaaatgggggagagatggatgttaccgtataatgaaggaagataagcacagaaagggggaagtattctattaatacttcaaaataaattacarcacaaagcaagctatatgtatatatactcaagagtttaaacagcattggtgagtcaaattaaagggcaacagtttctcagaactctgtctccccaggtttttccccaaaggtaagttgttcaacctcttcaatctccagctcatcacctccagggccaggtgtaggttttgtggag

SEQ ID NO: 201809 - DNA, 563 bp, Homo sapiens
ttccatgatatgtcaatgaaatgattttaaaagctgaggacccataaacagcattggtaatattaagattatgtaaacattaaaggctgcagaaatacatcatgtataagatgaaacatgggggaaagaacgtaatcctgtgacacaaaaactggactttttgagagaaactatctcaaacatttaaattcaaaaaaaattatcgtatttcattatttgctsaaaattatgcctttttcatttgctttatacttacattataacttccttttacagattctttagcatttctaattttctttctttctgtgtttcattctctctttttgtagttgtcaggataatactatgcatgtagtaatcactaagcacaccgagcttcctaaacatgcttcctcactttctaagtttagtttctgcgcctttttctatttttaatggtttacatacatgactgtatgtaaacatacagtaatttcactttcctcttgaagacatcctacttagaaccctctggctgcctattctgattttgagtggttgctttctaggcctgctgcata

SEQ ID NO: 201810 - DNA, 590 bp, Homo sapiens
ttaaaaacagtaagagatactgtgaacaaacatatcgaaacttagaagaaaaggatagttttcccaaaatgacttaagaagacacagaaaatctaataaacccccccaaaaaattaaagaaattgaaagtcaccttatcctaaagaccagacccagatacctttagagatgactttaaccaaactttcaataaatggataatccccgtgtcataaacttgtttcaaataatagaaaaattggaaaagctacctaattcatttcatgaatttacaattgacttcatgccaaagccaggcaaatacagtccaagaaaagggagttatggaccaactcacttgtgaacataaatgcaaagatattaaattaaataytaagaaactaaatcaccagtgcccaaaagaatagtttcagtaagtaggttttatcccaggaattcttagataaccaaacatcagaatgtctaatattattcactgtattagtaaaatgaaggcgataagacatacgatctctcaagagatgcagtagatgaaggaaaatatccatttaggtaaacattcataataaaagcaacttttacataataaa

SEQ ID NO: 201811 - DNA, 602 bp, Homo sapiens
agcactttaattttccctcaagaaattttcctttgcattcaacttggctgtttggygcaagaggactagctttcaacctgtcaactttctacatgccttcctcactaagcttactcatttctagcttttgatttcaagtgagagaaatgttactcttcctttcacttgaacactgagaggccactgtagggttattactcggtctaatttaatttcaatattgttgtgtctcagggaacagggaggcccaaggagaaggaacaagtcagaagaacattctgtcggtggagaagtcataacacacacaacatttattggttaactttgccatatcatattggtgtggttcatggcaccccctgaaattataataacatcaaaaatcactgatcacagaccaccataacagctataatgattggaaaaaaatttaaatttctgtgagaattgccaaaatgtgaagcatacacaaaacgagcacatgctgttggaaaaatagcactaatatatgacatgtttgcctgaagcaaggttgccataaaccttcactttgtaaaaaaataaaataaaaataaaaataaaacacattgtctgtgaagcac

SEQ ID NO: 201812 - DNA, 534 bp, Homo sapiens
atgttgtttagtgtagccaccttcatcagtgatcttatctagatcttctggataacttgcaacttctacaacagcacttgctctttcaaccttgcacttttatgttatggaaactacttctttccttaaaccttgtgaaccaatctctgctagcttccaacttttcttttgtagcttgctcacttctctcagccttcacataatggaatagttagggccttgtctggattagactttggtttaagagaatattgtagctggtctgatcttctatccagaccactcaaattttctccacatcagcaataaagctgtttcagtttttatcatttttgtggtcattagagtagcactttaattttccctcaagaaattttcctttgcattcaacttggctgtttggcgcaagaggactagctttcaacctgtmaactttctacatgccttcctcactaagcttactcatttctagcttttgatttcaagtgagagaaatgttactcttcctttcacttgaacactgagaggccactg

SEQ ID NO: 201813 - DNA, 377 bp, Homo sapiens
tccatctggaacctgtaactatgactttaatttggaaaaagggtctttgcaagtataattaagttaaggaactcagggtgagatcctcctgactgtgagtgggccctaaatccaatgacaagtgtccttataacagaggtaaaggggaraagattcagaggagaaggccacatgaagactgaggcaagattgcagttaggaagcagcaagtaaaggaacactaaggattgccagtagctaccacgaagagagacatggaatagatttgccctcagagcctccagaaggaaccaacaccactgaacccttaatttctgacttccagcttccaaaactgtgaaaaaataaattttactttcattaatctgccatccagt

SEQ ID NO: 201814 - DNA, 612 bp, Homo sapiens
acattcaccaaatatatatgatcacctcccatgtgcaaagcacagagccattttctgtctagattctctatgtagttgggcactttatctgtgttcccctctgaaatctatcactgataataaattaacaagtttgtctaacattacctttgccatgggaacattagagctacctagggacacttccattggaaaaaagatacctgagtacactaaagtttttatgtttataaagatgatttctctacctagtagacaaatcacagtgaaactggatcctttgaattacmatggaattgctccagccagaggaaaggggaagccttgaatagagccggaggacaattactattattagagatttaggctcttaacatttccaacatagggggctggtttctactgatgagaaagggaaaatgtacagattttcagagggtctgcaattcattcaggccatctgggaatagttaaaaaaattacctcttttattcagtgagcagtactgtaacagtactaaaaagtgatcattttataatctttcactttgaagcagattgtctttctctccttctcacataggcagtgctgcatccatatctctaaatttta

SEQ ID NO: 201815 - DNA, 612 bp, Homo sapiens
acattcaccaaatatatatgatcacctcccatgtgcaaagcacagagccattttctgtctagattctctatgtagttgggcactttatctgtgttcccctctgaaatctatcactgataataaattaacaagtttgtctaacattacctttgccatgggaacattagagctacctagggacacttccattggaaaaaagatacctgagtacactaaagtttttatgtttataaagatgatttctctacctagtagacaaatcacagtgaaactggatcctttgaattaccatkgaattgctccagccagaggaaaggggaagccttgaatagagccggaggacaattactattattagagatttaggctcttaacatttccaacatagggggctggtttctactgatgagaaagggaaaatgtacagattttcagagggtctgcaattcattcaggccatctgggaatagttaaaaaaattacctcttttattcagtgagcagtactgtaacagtactaaaaagtgatcattttataatctttcactttgaagcagattgtctttctctccttctcacataggcagtgctgcatccatatctctaaatttta

SEQ ID NO: 201816 - DNA, 330 bp, Homo sapiens
tcacagtgaaactggatcctttgaattaccatggaattgctccagccagaggaaaggggaagccttgaatagagccrgaggacaattactattattagagatttaggctcttaacatttccaacatagggggctggtttctactgatgagaaagggaaaatgtacagattttcagagggtctgcaattcattcaggccatctgggaatagttaaaaaaattacctcttttattcagtgagcagtactgtaacagtactaaaaagtgatcattttataatctttcactttgaagcagattgtctttctctccttctcacataggcagtgct

SEQ ID NO: 201817 - DNA, 304 bp, Homo sapiens
aactcttggtttctaagatatccatattgacatccagctggccagtaagagaagaaagagaaaggagggttgtgtgctaggatttyatgcaccatgcctggaagtggtgcacatcacttctgttcacttccactggccagaactgagtcaatgcagcctaaccccaatggaggttaggaaatgtagtctagccctgggtctacagtaaagagagttgagtgtgccgagctgctagctgctctctgccaaagtttccttgttggttcactttactgccacatcctcgtatcttcccccaactctc

SEQ ID NO: 201818 - DNA, 304 bp, Homo sapiens
aactcttggtttctaagatatccatattgacatccagctggccagtaagagaagaaagagaaaggagggttgtgtgctaggatttcatgcaccatgcctggaagtggtgcacatcacttctgttcacttccactggccagaactgagtcaatgcagcctaaccccartggaggttaggaaatgtagtctagccctgggtctacagtaaagagagttgagtgtgccgagctgctagctgctctctgccaaagtttccttgttggttcactttactgccacatcctcgtatcttcccccaactctc

SEQ ID NO: 201819 - DNA, 441 bp, Homo sapiens
tcatatgctcagctaaactaagcatcgtaaactacggatctctagcattagaaagacataatttagtagaaagaaacataaccacaaaaaagcacagaaatacaagaaataaaacaagaaaaaaatcaaccaactattttggtaactagtgagtgatacagaatagactcatagcccaaaaattcctctgygctctgcctatttatccatccctcccactaatccctggcaaccactgatctttttactgtctccatagttttgccttttctagaacgtcatacaattggaatcatacatatgtagcctcttcaggttggcttctttcagttggtaatatgcatttaagtttcctccatgttttttagcatttaaaatcaaaagacaatatttggaataattttttaccaatacatttgcaaactttgataaaattaaaaa

SEQ ID NO: 201820 - DNA, 539 bp, Homo sapiens
gtagaaagaaacataaccacaaaaaagcacagaaatacaagaaataaaacaagaaaaaaatcaaccaactattttggtaactagtgagtgatacagaatagactcatagcccaaaaattcctctgcgctctgcctatttatccatccctcccactaatccctggcaaccactgatctttttactgtctccatagttttgccttttctagaacgtcatacaattggaatcatacatatgtagcctcttcaggttggcttctttcagttggtaatatgcatttaagtttcctccatgttttttagcatttaaaatcawaagacaatatttggaataattttttaccaatacatttgcaaactttgataaaattaaaaattctagaaaaatttaaatctgaatagtcattatagaaaatgattcattagttacaatttccatacatttccatgcatctcctaacatccatagacacaccacgatcctgagactaaatggttttatcattaagcaatagatcctactttatataatgattata

SEQ ID NO: 201821 - DNA, 398 bp, Homo sapiens
tcatttatcttccaatatcactatggaggtaggcttyggcttcccatctcctgacccctctggctgataacaaacagctgtttcttgcgaagggtaaatctaatcacagtggtgctgtgctgtgtggccgcacatgaggctgagtgtgacagatggctgacagtgagtgccacatctgggaagggctgacattcaccctatggccaaaagaggacagagaatggcccctcctgtcacagcatccaacaagaaagaagaacttccagcacctgaatttgtaataggcttggggaataaactattaattgaagctctctcctaatgcttagtaattcctgtaagaatgcatttgaaggtttggtactgtacatcaagttgaaatttttcagtttccttcc

SEQ ID NO: 201822 - DNA, 398 bp, Homo sapiens
tcatttatcttccaatatcactatggaggtaggcttcggcttcccatctcctgacccctctggctgataacaaacagctgtttcttgcgaagggtaaatctaatcacagtggtgctgtgctgtgtggccgcacatgaggctgagtgtgacagatggctgacrgtgagtgccacatctgggaagggctgacattcaccctatggccaaaagaggacagagaatggcccctcctgtcacagcatccaacaagaaagaagaacttccagcacctgaatttgtaataggcttggggaataaactattaattgaagctctctcctaatgcttagtaattcctgtaagaatgcatttgaaggtttggtactgtacatcaagttgaaatttttcagtttccttcc

SEQ ID NO: 201823 - DNA, 491 bp, Homo sapiens
gaagttttaacctgttgcctttttagctttttaagtagatcctgtcttggatgctgatgactatctttgttgatatgaacacatcagcataatagagtgtgttaaatttccatcagtgtttccctagtgarcatgtataagttattatagatacagatgctgtttggagatctagtttttctacaagttatagtcttataaaataaggatttagacattaaactagcttctagttactctctatgtcttaggatgtttagagaaaataagttattacagtaacacctgaataaaatcatctgggctaagctttggccattatcacagtttctctaaacttttgtcttttgttcttattttaaggaaattacttacatgatctcactattatgtctccaagcattgtaaacacattgctctgactctgtttggattcccacagcagcaggttgttaattaccatggcagtttctcttattctggtaactgct

SEQ ID NO: 201824 - DNA, 561 bp, Homo sapiens
aaaggggctagaaagtatctgaataagtctgcatagacaagaaatgcaggactagactgaaaggcaaatctgggcatagaaaggaccacattagggtttttactgtttgtaaacaaaggaaaaaataggtcttgaaggaatactaagtaggtcacagtgggaaccctaatttaagttatttctgcactgctatttatcttcatccaagcccaagacacgtgaaatagtgtcagttrctaactccccaccaaccagcacatctgccccatctttaaagtgtatgtcttcctaagattcacaagagatcagaattccagagattgacatattagcatgattatcagttttcctaagtcattttctctatttcctatacgtagcatttgcatacatacaacttaaagtcccagatctggacactgattgctttgggacgagtgtggccccaggattttatttgggatcacatcatcattagtcgatgacaccaccaccctcatcagcagtactgcaatgactgtagcttggtcaaaaagacacagtcaacaaatggctgagcca

SEQ ID NO: 201825 - DNA, 491 bp, Homo sapiens
gaagttttaacctgttgcctttttagctttttaagtagatcctgtcttggatgctgatgactatctttgttgatatgaacacatcagcataatagagtgtgttaaatttccatcagtgtttccctagtgaacatgtataagttattatagatacagatgctgtttggagatctagtttttctacaagttatagtcttataaaataaggatttagacattaaactagcttctagttactctctatgtcttaggatgtttagagaaaataagttattacagtaacacctgaataaaatcatctgggctaagctttggccattatcacagtttctctaaacttttgtcttttgttcttattttaaggaaattacttacatgatctcactattatgtctccaagcattgtaaacacrttgctctgactctgtttggattcccacagcagcaggttgttaattaccatggcagtttctcttattctggtaactgct

SEQ ID NO: 201826 - DNA, 544 bp, Homo sapiens
atggcttttcctgcagaactcaagataaggcgctgttagtgataycacatccacatccaccatgaatgaagcctggattcggattacaaagctgaataaaccagatatcatctttggcataagtgtggctatttattggtatctaaaggatctgagtctgaaggaaagataaacctaagtatcaataagttgtgaaatctgtttatattagtaccgctgggagtactgtctggatagcagtggcttcactagaaatgcctagaacccactcttctggtgaaggcaatgcatctagattaaggtaaagccactggcacagtgcccattgctttgcccaatgtatttgtgtctgatttatttccttataggcccacgtttccctgtaaattgacaggcaccccctcctgctgacactggacatactagagcaaaccctagatgagggcccatggctattttgaaggctcagctgcttagctgtgtgtgcaggaaggccatgcactttaccctgatagcagcaaatccctgggggcgaatggtgcca

SEQ ID NO: 201827 - DNA, 544 bp, Homo sapiens
atggcttttcctgcagaactcaagataaggcgctgttagtgatatcacatccacatccaccatgaatgaagcctggattcggattacaaagctgaataaaccagatatcatctttggcataagtgtggctatttattgstatctaaaggatctgagtctgaaggaaagataaacctaagtatcaataagttgtgaaatctgtttatattagtaccgctgggagtactgtctggatagcagtggcttcactagaaatgcctagaacccactcttctggtgaaggcaatgcatctagattaaggtaaagccactggcacagtgcccattgctttgcccaatgtatttgtgtctgatttatttccttataggcccacgtttccctgtaaattgacaggcaccccctcctgctgacactggacatactagagcaaaccctagatgagggcccatggctattttgaaggctcagctgcttagctgtgtgtgcaggaaggccatgcactttaccctgatagcagcaaatccctgggggcgaatggtgcca

SEQ ID NO: 201828 - DNA, 643 bp, Homo sapiens
aaatgcctagaacccactcttctggtgaaggcaatgcatctagattaaggtaaagccactggcacagtgcccattgctttgcccaatgtatttgtgtctgatttatttccttataggcccacgtttccctgtaaattgacaggcaccccctcctgctgacactggacatactagagcaaaccctagatgagggcccatggctattttgaaggctcagctgcttagctgtgtgtrcaggaaggccatgcactttaccctgatagcagcaaatccctgggggcgaatggtgccacagtcaggagagatggtgaattcttttggtttcattgaggatatttcttccttggtccaagacggtcttttgtagtccacatgctgctcacaatatgaaatgcttttatggccaaggccatccccagggatacgcagtttgtaagtcatggggatcaaagaggtattattgagggaacatatcaaggtatgaggaaaccctggaaaacaaaacatgatgtgagaaataaaagcccccccaacacctcccttgaccctcaatctcccctagaaactgctaagcttcttgaatgaactgtctgtgctattcattactacttaactccaacttgccctaaatattattgtttta

SEQ ID NO: 201829 - DNA, 643 bp, Homo sapiens
aaatgcctagaacccactcttctggtgaaggcaatgcatctagattaaggtaaagccactggcacagtgcccattgctttgcccaatgtatttgtgtctgatttatttccttataggcccacgtttccctgtaaattgacaggcaccccctcctgctgacactggacatactagagcaaaccctagatgagggcccatggctattttgaaggctcagctgcttagctgtgtgtgcaggaaggccatgcactttaccctgatagcagcaaatccctgggggcgaatggtgccacagtcaggagagatggtgaattcttttggtttcattgaggatatttcttccttggtccaagayggtcttttgtagtccacatgctgctcacaatatgaaatgcttttatggccaaggccatccccagggatacgcagtttgtaagtcatggggatcaaagaggtattattgagggaacatatcaaggtatgaggaaaccctggaaaacaaaacatgatgtgagaaataaaagcccccccaacacctcccttgaccctcaatctcccctagaaactgctaagcttcttgaatgaactgtctgtgctattcattactacttaactccaacttgccctaaatattattgtttta

SEQ ID NO: 201830 - DNA, 643 bp, Homo sapiens
aaatgcctagaacccactcttctggtgaaggcaatgcatctagattaaggtaaagccactggcacagtgcccattgctttgcccaatgtatttgtgtctgatttatttccttataggcccacgtttccctgtaaattgacaggcaccccctcctgctgacactggacatactagagcaaaccctagatgagggcccatggctattttgaaggctcagctgcttagctgtgtgtgcaggaaggccatgcactttaccctgatagcagcaaatccctgggggcgaatggtgccacagtcaggagagatggtgaattcttttggtttcattgaggatatttcttccttggtccaagacggtcttttgtagtccacatgctgctcacaatatgaaatgcttttatggccaaggccatccccagggatacgcagtttgtaagtcatggggatcaaagaggtattattgagggaacatatcaaggtatgaggaaaccctggaaaacaaaayatgatgtgagaaataaaagcccccccaacacctcccttgaccctcaatctcccctagaaactgctaagcttcttgaatgaactgtctgtgctattcattactacttaactccaacttgccctaaatattattgtttta

SEQ ID NO: 201831 - DNA, 608 bp, Homo sapiens
tctttactctaaatgttggtctatttctctctcagtgtaaggctttatgatcttggagagatgctgtagcttaaaataaataatagagagattctatgacttctagcttagaaggtattgtaggtagaataatggctcccagagatatctatgtcctaattcccagaacctatgaatatattaggttacakggcaaagaggaattaaggtagcagatggaattagggttgctaattaactgaatttaagatgaggagattatcctgtcttatcctagtaggcccactgtaatcacaagggtgattttaaaaatagaggaaagagacagaagaggaggtcagagtgctgcaatctgagaactcaacctggctttgaacacagaagaaggaaactttgaacacagaagaaggaatccaggaatgtgagcagcctcagaaagccaaaaaaggttaggaaatggttcccctctagagccttcagaaggaaacacagccctgccaacactgattttagcctagctagacctgcattaagtctataaaactgtaaaatattaagtatgtgttgtttgaagctactaaatttgtgataatttgttacaacagcaa

SEQ ID NO: 201832 - DNA, 608 bp, Homo sapiens
tctttactctaaatgttggtctatttctctctcagtgtaaggctttatgatcttggagagatgctgtagcttaaaataaataatagagagattctatgacttctagcttagaaggtattgtaggtagaataatggctcccagagatatctatgtcctaattcccagaacctatgaatatattaggttacatggcaaagaggaattaaggtagcagatggaattagggttgctaattaactgaatttaagatgaggagattatcctgtcttatcctagtaggcccactgtaatcacaagggtgattttaaaaatagaggaaagagacagaagaggaggtcagagtgctgcaatctgagaactcaacctggctttgaacacagaagaaggaaactttgaacacagaagaaggaatccaggaatgtgagcagcctcagaaagccaaaaaaggttaggaaatggttcccctctagagccttcagaaggaaacacagccctgccaacactgattttagcctagctagacctgcattaagtctataaaactgtaaaatattaagtatgtgttgtttraagctactaaatttgtgataatttgttacaacagcaa

SEQ ID NO: 201833 - DNA, 610 bp, Homo sapiens
ctctgggatctttaggagaacagatcagagatttaaaaaattcacccaggaaattacagaagtattattcactattacagcctcctggaatttttttttaaatgacagcttcattgagatataattcacacatcatacaattcacacatttaaagtgtacaaatcaatgttttttgtatattcacaaatatatgcaaccatcactacagtcaatttgagaacgtttttatcacctcaaaaagaaacctcatgccctttagctgtcacccactatcctgcaccctccagccctaagcaaccactaatctacctcagatctatatrgatttgcctactttaaccatttcatataaatggaatcatgtaatgtggtctttcgtgaccgggttctttcataatgttttcaaggttcataatggatgaaccttattttcaaggtttataatggtgtcattatggctgaaccttgaaatcattatgacaagtgaaagaagctagtcacaaaagaccgtggtagcaaggttcattcatgctaccatgttgtagcatctatcagtgcttcattttttttcattcctttttatggtcaaatagtattccattgtataga

SEQ ID NO: 201834 - DNA, 610 bp, Homo sapiens
ctctgggatctttaggagaacagatcagagatttaaaaaattcacccaggaaattacagaagtattattcactattacagcctcctggaatttttttttaaatgacagcttcattgagatataattcacacatcatacaattcacacatttaaagtgtacaaatcaatgttttttgtatattcacaaatatatgcaaccatcactacagtcaatttgagaacgtttttatcacctcaaaaagaaacctcatgccctttagctgtcacccactatcctgcaccctccagccctaagcaaccactaatctacctcagatctatatggatttgcctactttaaccatttcatataaatggaatcatgtaatgtggtctttcgtgaccgggttctttcataatgttttcaaggttcataatggatgaaccttattttcaaggtttataatggtgtcattatggctgaaccttgaaatcattatgacaagtgaaagaagctagtcacaaaagaccgtggtagcaaggttcattcatgctaccatgttgtagcatytatcagtgcttcattttttttcattcctttttatggtcaaatagtattccattgtataga

SEQ ID NO: 201835 - DNA, 518 bp, Homo sapiens
gccacatgtggctagtggctatgtattggacagcacagatagagaatatttctatcattgcttaaagttctagcaaacaactctattatagacaatttgaatgcatttaatagrcttactataattgacatatgtagaacactgcactaaaaaaaatcttctggccccatgctacagttacgaaaaattactgtatactagggcttaaagcagatctcaacaaagaatctgttctgtcagaaatcaatagcaaatagataacaagaaacaaacaagtaaacaaaaacacaggcttagacattttaaaacatacttctgaatagccttagataaaatggacaaattcttagaaaaatacaacttgccaaaactgacttttataaaaaaagaaatctaaatggtcttataaccattaaagaaatagtttcaaatatccccatttttaagaacccactaagtcctgatagatacagaagagttcatccaatgatttaagaaataaattatttcaaacttaa

SEQ ID NO: 201836 - DNA, 518 bp, Homo sapiens
gccacatgtggctagtggctatgtattggacagcacagatagagaatatttctatcattgcttaaagttctagcaaacaactctattatagacaatttgaatgcatttaataggcttactataattgacatatgtagaacactgcactaaaaaaaatcttctggccccatgctacagttaygaaaaattactgtatactagggcttaaagcagatctcaacaaagaatctgttctgtcagaaatcaatagcaaatagataacaagaaacaaacaagtaaacaaaaacacaggcttagacattttaaaacatacttctgaatagccttagataaaatggacaaattcttagaaaaatacaacttgccaaaactgacttttataaaaaaagaaatctaaatggtcttataaccattaaagaaatagtttcaaatatccccatttttaagaacccactaagtcctgatagatacagaagagttcatccaatgatttaagaaataaattatttcaaacttaa

SEQ ID NO: 201837 - DNA, 518 bp, Homo sapiens
gccacatgtggctagtggctatgtattggacagcacagatagagaatatttctatcattgcttaaagttctagcaaacaactctattatagacaatttgaatgcatttaataggcttactataattgacatatgtagaacactgcactaaaaaaaatcttctggccccatgctacagttacgaaaaattactgtatactagggcttaaagcagatctcaacaaagaatctgttctgtcagaaatcaatagcaaatagataacaagaaacaaacaagtaaacaaaaacacaggcttagacattttaaaacatacttctgaatagccttagataaaatggacaaattcttagaaaaatacaacttgccaaaactgacttttataaaaaaagaaatctaaatggtcttataaccattaaagaaatagtttcaaatatccccatttttaagaacccrctaagtcctgatagatacagaagagttcatccaatgatttaagaaataaattatttcaaacttaa

SEQ ID NO: 201838 - DNA, 528 bp, Homo sapiens
tacatggaaaacgcaaaataatcaacagacaaattactagaattaatgaaagaatcgagtgaggaggatggattgatataaagttataaaatttaattgcattttttttttttttgagatggagtctcgccctgtcccctgggctggagtgcaatggtgtgatcttggctcactgcagcctccacctcctgggttctagcaattctcctgcctcaacctcctgagtagctgggattacaggtgcctgccaccacgcccagctaattttgtatttttaatagagacagggttttaccatgttggtcaggctggtctcaaattgctgacctcaggtgatccacccacctcagcctcccaaagygctgggattgcttgcaggcatgagccaacacacccaacctcaattgcatttctgtatagcagcaacaactagaaaatagaatgcagtaaaaaaaaaaaaagtacttagaaataaatgtaacataaaaacacaatatttatggataaatgataattttatttaaagtc

SEQ ID NO: 201839 - DNA, 549 bp, Homo sapiens
tatgagatctatacagaggactgaaattttaaaaggcagtatcacttacaataacattgagaaatataaaataattagagataaatttgacaaaatgtatacaagacccatatactgaaaactgaaagattaatgagagaaattaaagacctaaacaaatagaaaaatayagcttgttcatagattggtaaattcaatatggctattcaataatatcttaatgacatcttaatgccatttctcccccaaattcatctatagatttaattgaaatcaaaattaaaatacaagatggtttttttgtagaaattgacaagctgattctaaaattcacatggaaatgcaaacaacctagaatagctgaaacaactttggaaaagaagaataaaatgaaaggactcctactaccagagttcaagatgatttttaagctaccataatcaagataatccaggataatctccccatttcaaaactcttaatcacatcttttgacttataaggtaatatttacagattcaggaatgaggatgtgaatatctttggggg

SEQ ID NO: 201840 - DNA, 524 bp, Homo sapiens
aacattgagaaatataaaataattagagataaatttgacaaaatgtatacaagacccatatactgaaaactgaaagattaatgagagaaattaaagacctaaacaaatagaaaaatacagcttgttcatagattggtaaattcaatatggctattcaataatatcttaatgacatcttaatgccatttctcccccaaattcatctatagatttaattgaaatcaaaattaaaatmcaagatggtttttttgtagaaattgacaagctgattctaaaattcacatggaaatgcaaacaacctagaatagctgaaacaactttggaaaagaagaataaaatgaaaggactcctactaccagagttcaagatgatttttaagctaccataatcaagataatccaggataatctccccatttcaaaactcttaatcacatcttttgacttataaggtaatatttacagattcaggaatgaggatgtgaatatctttgggggccattattcagcctgccatagatctca

SEQ ID NO: 201841 - DNA, 507 bp, Homo sapiens
ctttgttatggcagccctagcaaagtcatacaacccccaacaactaaggagagtgaacgtgtgtgcctcaagggttctgtggcatgaccaaagcaacctgtcacaatcataatcttttttatttttaagtctcaagacttatctgaaacattcacaagacatttacgttctcttccataatacatgtgtgtttgttataagagaaaaatgagggttgttttccaaatatttgaataacattgactcttcacgaatatgtgcygtgcttatcccagcccatggttaacatcctttgggtatgtatacaacatgagaagggtgggaatacactttcatttatatgaacttcagcccacttcctaccttcataacatctcatctctcatgacaagcagtgaagggtggttctctgaagaagtaggaagaacaaacttgtgaatataaccttgtctccaattcacggatcctctagtcccatgagggcctttgatatgatccagcagatca

SEQ ID NO: 201842 - DNA, 590 bp, Homo sapiens
ctaggatatcttagatggtattttagtctgttcaggctgctataataaaatgccataaacttggtggtttatgaaaaacagaaatttatccaacacaattctggaggctggagaatccaagatcaaggcaccagcagatggtggaaggtgcagacgagcttgctgaggcagcttttrtaaggcactaatcccattcttaagggctacaccctcatgatcataacacctcctaaaggcctcacgtcttaatgccatcatcttgggagttaagatttcaacatatgaatttggggttcaggggacgctaacattcagaccatagcagatggaaagtttttgaaagcccatggtttgcatttcctggtacataatgcaatgggatctgttgcatctggggacttcagggtcattaaaggggttctgtagtgcatctccctacttctcatgtgtgaaataagaacactgcagtcatagatgaggactgctctatgttttaaaatattttggtcttttaataaggagtctgcccttaaagtttactagttcctccatgcttgtatctcttgctgccttttgccaagacaagaaaa

SEQ ID NO: 201843 - DNA, 496 bp, Homo sapiens
atgggatctgttgcatctggggacttcagggtcattaaaggggttctgtagtgcatctccctacttctcatgtgtgaaataagaacactgcagtcatagatgaggactgctctatgttttaaaatattttggtcttttaataaggagtctgcccttaaagtttactagttcctccatgcttgtatctcttgctgccttttgccaagacaagaaaaatatctgcttagaaaatcttgtggaaaagtagcatttgtaatgtgaccctaaaatttatactaacacttagaaactcaaggctgggcattacttgtactcctgttctgggtgaggggagtggctagcaacaaataagacaaactcctttgaagtaattaataactaccaaagaaacattggctcactgctttattacaacacatctcctttttttttttttttttaagaaaggcagtcaaggtaasagatggagaaagttttaggcctgacagttataaat

SEQ ID NO: 201844 - DNA, 598 bp, Homo sapiens
acaggaggaactacaaagtattttaaagatcatctgatagaacctgtttcttaaacagaccctgtgcagtggctgacacctgtaatcccagcactttgggaggccaaggcaggtggatcatttgargttaggagttcgagaccagcctggccaacatggtgaaaccccatctctactaaaaatacaaaaaattaaccagatatggtggtgggtgcctgtaatcccagctacttgggaggctgaggcaggagaatcacttgaaaccaggaggcggaggttacagtgagctgagatctcgccactgcactccagcctgggtgacagagtgagactccatctcaaaaaaaaagaaaaaaagaatctgttttttaaactgagggaaaacccagcgaggatgcagattgccacagcacgcacgcatcagtggcagggttagaatcagacccacagccctgactccaggctgaggtcttccttctctttgctgctaacacctccagccacatgggaaggaggcagagcactcagagagatcactttgcagggacctctgctcttgagaccttttctctctgggacactgagcaaatgagcaccg

SEQ ID NO: 201845 - DNA, 598 bp, Homo sapiens
acaggaggaactacaaagtattttaaagatcatctgatagaacctgtttcttaaacagaccctgtgcagtggctgacacctgtaatcccagcactttgggaggccaaggcaggtggatcatttgaggttaggagttcgagaccagcctggccaacatggtgaaaccccatctctactaaaaatacaaaaaattaaccagatatggtggtgggtgcctgtaatcccagctacttgggaggctgaggcaggagaatcacttgaaaccaggaggcrgaggttacagtgagctgagatctcgccactgcactccagcctgggtgacagagtgagactccatctcaaaaaaaaagaaaaaaagaatctgttttttaaactgagggaaaacccagcgaggatgcagattgccacagcacgcacgcatcagtggcagggttagaatcagacccacagccctgactccaggctgaggtcttccttctctttgctgctaacacctccagccacatgggaaggaggcagagcactcagagagatcactttgcagggacctctgctcttgagaccttttctctctgggacactgagcaaatgagcaccg

SEQ ID NO: 201846 - DNA, 598 bp, Homo sapiens
acaggaggaactacaaagtattttaaagatcatctgatagaacctgtttcttaaacagaccctgtgcagtggctgacacctgtaatcccagcactttgggaggccaaggcaggtggatcatttgaggttaggagttcgagaccagcctggccaacatggtgaaaccccatctctactaaaaatacaaaaaattaaccagatatggtggtgggtgcctgtaatcccagctacttgggaggctgaggcaggagaatcacttgaaaccaggaggcggaggttacrgtgagctgagatctcgccactgcactccagcctgggtgacagagtgagactccatctcaaaaaaaaagaaaaaaagaatctgttttttaaactgagggaaaacccagcgaggatgcagattgccacagcacgcacgcatcagtggcagggttagaatcagacccacagccctgactccaggctgaggtcttccttctctttgctgctaacacctccagccacatgggaaggaggcagagcactcagagagatcactttgcagggacctctgctcttgagaccttttctctctgggacactgagcaaatgagcaccg

SEQ ID NO: 201847 - DNA, 598 bp, Homo sapiens
acaggaggaactacaaagtattttaaagatcatctgatagaacctgtttcttaaacagaccctgtgcagtggctgacacctgtaatcccagcactttgggaggccaaggcaggtggatcatttgaggttaggagttcgagaccagcctggccaacatggtgaaaccccatctctactaaaaatacaaaaaattaaccagatatggtggtgggtgcctgtaatcccagctacttgggaggctgaggcaggagaatcacttgaaaccaggaggcggaggttacagtgagctgagatctcgccactgcactccagcctgggtgacagagtgagactccatctcaaaaaaaaagaaaaaaagaatctgttttttaaactgagggaaaacccagcgaggatgcagattgccacagcaygcacgcatcagtggcagggttagaatcagacccacagccctgactccaggctgaggtcttccttctctttgctgctaacacctccagccacatgggaaggaggcagagcactcagagagatcactttgcagggacctctgctcttgagaccttttctctctgggacactgagcaaatgagcaccg

SEQ ID NO: 201848 - DNA, 173 bp, Homo sapiens
tcaaacacattaacagttgttgkcaatgtttgactctgaaaactaagttgtacaaataaaagttaaatggtgtcatgtcagttcagatgagatttttctgccaaatgagttttagtgcgaagcttatgaaatctcaaaccccccacccccagttttggatcttactgggtttc

SEQ ID NO: 201849 - DNA, 456 bp, Homo sapiens
tctctagctgactttacctctggctgaaaccactccattaggggcagagaacgcatgttgggctgggtgctaacaaatctcccgggaagctccttaaaataaagattcctgaaccttgtcctctgacagattacaattcagcaggtctcaggagttagatttttaacagccttcccaggcaattctaatgggcagccagatttaggagctgccgtgggtaggaatggcagcatgacagctgagratggagctgataattaatatggggctatcactgcagccttaacagctagggacagtgaaaatcagccgaggacaattctgaacacttatgaaatcactccaggtcagcagagacgcctggcgaggctttgccggctcgctgccccacataatagcactcacccatccagcctttgcacccctgtgggatgtgctgcataaagagaaaacaaa

SEQ ID NO: 201850 - DNA, 355 bp, Homo sapiens
ttagtaacttcagggaatggggtaacaggaraggctgggtgggaggacttagtctgaagctttttagggaaagtagatttcaaggagcttgaatagagattcataaagagtgagaggtttccctgatccatcgtcctgtacctgacgtcaggaagaaagagccagagacagtctatggctaaaaagggctgctcagctgaggttcggaatctgccaagacagaaatattctggtacaaaaggatagtcctgggggccagatgtaactgggaaatgtaagtgggaagacaattattcaagtctaatttagccttcaccctgtgtaatgccaaaataagggctcagaatctgtgtcc

SEQ ID NO: 201851 - DNA, 395 bp, Homo sapiens
gaattcagtggatgattatgaacaggagagttagtaacttcagggaatggggtaacaggagaggctgggtgggaggacttagtctgaagctttttagggaaagtagatttcaaggagcttgaatagagaytcataaagagtgagaggtttccctgatccatcgtcctgtacctgacgtcaggaagaaagagccagagacagtctatggctaaaaagggctgctcagctgaggttcggaatctgccaagacagaaatattctggtacaaaaggatagtcctgggggccagatgtaactgggaaatgtaagtgggaagacaattattcaagtctaatttagccttcaccctgtgtaatgccaaaataagggctcagaatctgtgtccgcctttctgt

SEQ ID NO: 201852 - DNA, 394 bp, Homo sapiens
gaattcagtggatgattatgaacaggagagttagtaacttcagggaatggggtaacaggagaggctgggtgggaggacttagtctgaagctttttagggaaagtagatttcaaggagcttgaatagagattcataaagagtgagaggtttccctgatccatcgtcctgtacctgacgtcaggaagaaagagccagagacagtctatggctaaaaagggctgctcagctgaggttcggaatctgccaagacagaaatattctgstacaaaaggatagtcctgggggccagatgtaactgggaaatgtaagtgggaagacaattattcaagtctaatttagccttcaccctgtgtaatgccaaaataagggctcagaatctgtgtccgcctttctg

SEQ ID NO: 201853 - DNA, 595 bp, Homo sapiens
agaagagagagaaatgcccatttatttattctgatatccaaactgatcaaatgcagcatgaagaaggaaatttatgaaccaacgatcacttaacaaaggtgcaaaaattgtaagtaaaatgttagctgagtgaatccagcaatatatatatatatataatatttaaatgcagatggtagcatacagagtgtttttcgtcttccttttcttttcattttacctaacaatatattttacgattaattcaatattagtacwtctagagctgctccatcctttttagttgctacatattattccattacatagttttaacatatttttaaaaactagtttcctactgatagacatttagtttgtttctggtcttttgctattgccattacagattatataggaaataatcttataaacacatcattttgcaaatgtgggaacgtgtatgtagaataaattcttagaaatgaaatttctaggtcaaagtgtaattttgatagataaggccaaattattctctatagagttgttatcaatttacaataactgcagcaatgtaaattcaaatgcttaaaaatctttagaaaaagggcaagga

SEQ ID NO: 201854 - DNA, 595 bp, Homo sapiens
agaagagagagaaatgcccatttatttattctgatatccaaactgatcaaatgcagcatgaagaaggaaatttatgaaccaacgatcacttaacaaaggtgcaaaaattgtaagtaaaatgttagctgagtgaatccagcaatatatatatatatataatatttaaatgcagatggtagcatacagagtgtttttcgtcttccttttcttttcattttacctaacaatatattttacgattaattcaatattagtacttctagagctgctccatcctttttagttgctacatattattccattacatagttttaacatatttttaaaaactagtttcctactgatagacatttagtttgtttctggtcttttgctattgccattacagattatataggaaataatcttataaacacatcattttgcaaatgtgggaacgtgtatgtagaataaattcttagaaatgaaatttctaggtcaaagtrtaattttgatagataaggccaaattattctctatagagttgttatcaatttacaataactgcagcaatgtaaattcaaatgcttaaaaatctttagaaaaagggcaagga

SEQ ID NO: 201855 - DNA, 489 bp, Homo sapiens
tgaactgtttttctaggccgagaaatccgtctgcccctccgaatcaaaggggaaggcatgggacctaagattcacttcaactttgaattgctggatattgggaaagttttcactggatctgcacattgttatgaggtaagcactagagttgttcrttgatacttcaaacagtacttggcttttggggtttgttttatatgtttttatttgatggaaagagtatgcaatcacatttattcgccgttactcatccttgttgagaccctggagtgctcagattcttcctcctcctgcctggccatcatgaggggaacaacttttttatcttcattagccctccttcactttagtgaaagctaaaaagcatcaaagccatagtttcactggttttatcctcattgttttgtagattgcaaagggaaaactcataaatacatctccccatctgtttagtgcttgttctctgacaacataaattccacagatcag

SEQ ID NO: 201856 - DNA, 489 bp, Homo sapiens
tgaactgtttttctaggccgagaaatccgtctgcccctccgaatcaaaggggaaggcatgggacctaagattcacttcaactttgaattgctggatattgggaaagttttcactggatctgcacattgttatgaggtaagcactagagttgttcattgatacttcaaacagtacttggcttttggggtttgttttatatgtttttatttgatggaaagagtatgcaatcacatttattcgccgttactcatccttgttgagaccytggagtgctcagattcttcctcctcctgcctggccatcatgaggggaacaacttttttatcttcattagccctccttcactttagtgaaagctaaaaagcatcaaagccatagtttcactggttttatcctcattgttttgtagattgcaaagggaaaactcataaatacatctccccatctgtttagtgcttgttctctgacaacataaattccacagatcag

SEQ ID NO: 201857 - DNA, 511 bp, Homo sapiens
cacacacaaatgaatacgtctttacttttttttttttttcttgagatggagtcttactctgccgcccaggctggagtrcagtggcacgaactcacctccctgcagcctctgcctcctggattcataggattctcctgcctcaccctcctgagtagctgggattacaggcacgggccaccatgcccggctaatttttttgtatttttagtggagactgggtttcaccatgttggccaggctggtctcaaactcctgacctcaggtgatccacccaccatggcctcccaaagtgctgggattacaggcttgagccaccacacccagccaacattttttaataatagcaaaatactgtaagcaacctaaatgcacatcagtaaggggcttggatagataaaattataatgcatgtaaaatgcaatactatgcagtcattacaagggatgaagaagtatatttactgatgtggaatgatacccagaataatgggttaatgaaaaaagttaccact

SEQ ID NO: 201858 - DNA, 599 bp, Homo sapiens
cagtggggtctttctggctagcagtttttaatagctagccagaccaactggttatcagctgaaataatgggcttaacacatctacaacaagctagcctggtcttagcctcctggtgatggtctcaaggtatccagcatgagcaagaggtgaagcctcaatgcatgagttctttccaagcctctgcttgtgtggttgctaatagccaagttcagaggcaagataggtgggtattaccaaaagcatggatggaagatgcatgaatcattagggaccaatactataacaatctacagcaatcaccctgtgtatatcctcaaaatgttcttgaatcastccgttcttttctatcttcaccgtcatagcctaatccaagtcttcgttttatcacttggtctttctaactttcctcctccacaatccacttactttttattatatttttcttcctagtacccctcagtgatttgttattgtccgttgtgataaagttgtacacatttcttagcttgatcaagccctctcaagatctgaccttaactcatggtctttcatgtctcatgatgatccttttctctaactggacccaaataccaactcc

SEQ ID NO: 201859 - DNA, 602 bp, Homo sapiens
ttgctaataaatgaacacaattttcttagataatcatagaagctgctttcatgacacattttcttgaagagattagctaatcatccccaggattttcragcatttatcatatatcttctttaatagaaatggataataatcatatagggagaaggaactgtgaaatgtttgggaatctttattcagagtaacctacaggataagcatcaggtagtgttatataaatttaaacaactatttcttccacagtgagacaaacatcactttttatttaacatacaccagcatatcttcttgttatattacagtatgcatggtaaatactccctagcaagatttattttagggtcatctattaaccacaaaataatgctataaaatattgcaagtgagatgaaaaatttatgtacactttgcatgaactctctctccccagtttcatgaggtttatctttagtgactaggaggacagaaagctgctcatttattatctcttctctgttctcagagactctaaatcactcagatgacaacatgtacctagttagactaaaaggaagattaaaggggaaaggttattttgttggctccagaagaaactg

SEQ ID NO: 201860 - DNA, 602 bp, Homo sapiens
ttgctaataaatgaacacaattttcttagataatcatagaagctgctttcatgacacattttcttgaagagattagctaatcatccccaggattttcgagcatttatcatatatcttctttaatagaaatggataataatcatatagggagaaggaactgtgaaatgtttgggaatctttattcagagtaacctacaggataagcatcaggtagtgttatataaatttaaacaactatttcttccacagtgagacaaacatcactttttatttaacatacaccagcatatcttcttgttatattacagtatgcatggtaaatactccctagcaagatttattttagggtcatctattaaccacaaaataatgctataaaatattgcaagtgagatgaaaaatttatgtacactttgcatgaactctctctccccagtttyatgaggtttatctttagtgactaggaggacagaaagctgctcatttattatctcttctctgttctcagagactctaaatcactcagatgacaacatgtacctagttagactaaaaggaagattaaaggggaaaggttattttgttggctccagaagaaactg

SEQ ID NO: 201861 - DNA, 638 bp, Homo sapiens
cctacctgaaaaatgtcagaaaagaaaggtcatcagggtttgcagttcttattcatggttatgtcagttataccttagtctctttttcccctccaaaaatctcctycactaacacagagctggttcctgtctttgctctaggtatcattactatgggattggcatcaaagagagcagtgcatattaccactccgtttattctggaaagggcttgacaaggtagagttacaccatcttcaagacaaattctctgtgtttctttaaatatgcatgatacctattgaataaaatgatttcttaattttgcttatcaagatgtttccatttaagcatcagaccttaatgtccgctttgtatggatgattatataatctagattactgggaaaattatataacttgtcataattagtgagaaattaattgtgaactagtgttccagagagatgaagaggagaaatcaaggaagcagaattgcttttaaattagtatttactaataaagcaaagtctattttcaggttggattcaataaaacaaaggcagtaaatgtaaatgtaacttttttctgagacaacctgttttaaagatctatgtgcttgactagtaccttaccaagatagaaagtttattgtaataa

SEQ ID NO: 201862 - DNA, 599 bp, Homo sapiens
ggcttcaccattaacttaatatataagtatgycaagtaaatatcctctctgaatgctttcataatggcccatttattatctaaatctatggttctgtgtggcttttgttgggtataaaatctatagaataaggcagaaattattctatttgaagacaattattctattctatttcttttgagttaactttttatgagtgtttcaattttttgtcaatagaatataaaaaataagttatattttcaagtaaatagattagctatgatggtaacatcaatgagaaatgttactttagcagaatgtctacgtgtgtgtatttatgtccccacagatgtcttagctcttttaatgaatatcaattaattagtgttactttaaagaagcaggatatcagatctaacatggtggaattcactaacaaaattttattctagcaattgcctggaagaaaaaaaagaggagagaacaaaaataaaagaatatgcaagggcctacctccaatgttctcacttctatctgttgactggtttgtttcttctgttctttccttaagcaatatacacatgtaaaccccagtaactcagttctttagggagcac

SEQ ID NO: 201863 - DNA, 590 bp, Homo sapiens
gttctctatttctctttctcaatctcttatttctaaaattctatgtggtggtattattactgtagtctaattttaaaaattaaaacagtttttctgcagtgcaccaggccaaaagccttgaaatatattagaaaacattgtactgaacttggaatatagtgaataatgatgatctaaaaaagataatttatggtttttaccaccatcattaaagttttatactacaaagagaatgctttcatataggtgtcttaaagtcatcagacataactatatatatattaaaagagtgtttgcamttgagaaaaggtcctaatctctagttttacctccttattagatttttggctttgtattcataaggtgaaaagtagtttaaaagtgagcaatttaaaataccctcccaccattgcatgatcctcccaaatgttaactggtcatatcagacctcgaatatggtagttttgggtgtttaaagtaaaaaaaaaaatgacaaaagtagaaaaaacttgttctagatacccacttgtatgatcagaagaattgtctcatttcttttaccttcttttctcttacaaatttaaaactta

SEQ ID NO: 201864 - DNA, 551 bp, Homo sapiens
gaccctccctcccattgacttactccctgaattaagacattttcttggtgtgtacattcttatgcaaaaaaagaagaaagagaactgtggctgttcttcgactttcatcccccatttttcttatgttcctttcttccttgacaatacatagtaaactgaataattaatcccaagtaagataaacagctgatctacctagtaaagtattaacaaaatacctaaactgtagtcataaatttgtttaaccataaggattatgcaaaagtgtatcagaaccttaatatagttgaagagttattctcctgaaaggctttcaatctaaaagcctgatatcctgcaggccagatttatttttcttgccctttctaaataaggagaatatgcaactgtttgtaatgttaaacctctattaattatctcattaagggcttagcagcaccttttcttaaagcctacttttctaaatttaaatttccttactttactgatatttttttccrtaagaccttacagccaagcactatgggggatgctatacatattttatataa

SEQ ID NO: 201865 - DNA, 466 bp, Homo sapiens
gacaatatataacaccatggactatagaatgccttctctaattcagtggtctttcatttcatcctgtgtcattcattttctatatctgtcatcaatcaaatttgtctctaatatatacttgctaagtttccctgataatcaccttctctaaagtaccatgccagaacctttaatcttcccaaaagtgtgcctttctttggtcataattaaatgataattktaaagccctacatgatcccagctaagaagatgtgggtaataaaatgaatgtcattttgcttctgatatctgaatttcctgctggactggatataaattaagaaggaaaagaaagtatctttttgtagataaatgtatgaaataaagtttttgatgataattacagttttcctacctgtttctgaagttaaaatttcatatagaaaattgtaatttttgaaaggagacataatgtctctctatatag

SEQ ID NO: 201866 - DNA, 551 bp, Homo sapiens
gcctccttcttccttaccactcctcccaatgcagatgcctggttttgtcattaaaagtgtctgtaattcttgcaaggttctcacaggtacatgtcggcagatgctttctctcctattcttttcttcaacacaagcccaagcttcacttcctttatgaaggtataaaccaaaaattatctgagacaagtcttaatcagtttagtttattttgccaaggttaargacatgcccatgacacaccctcaggagttcctgatggtatgtgccaaggtggtctagctacagcttagttttatacattttagggagacataagacatcaatcagtacatgtaagatgtacattggttctgtctgaaaagacaaaacaactcaaagtgtgggcttccaggtcataggtggattcagagattttccaattggcaattggttgaaaaagtttatctaaagacctggaatccatagaagggagtgtctgggttaagacaaggggttgtggaaaccaaggttcttattatgccgatgaagcttacaggtaacaggcttgagaa

SEQ ID NO: 201867 - DNA, 551 bp, Homo sapiens
gcctccttcttccttaccactcctcccaatgcagatgcctggttttgtcattaaaagtgtctgtaattcttgcaaggttctcacaggtacatgtcggcagatgctttctctcctattcttttcttcaacacaagcccaagcttcacttcctttatgaaggtataaaccaaaaattatctgagacaagtcttaatcagtttagtttattttgccaaggttaaggacatgcccatgacacaccctcargagttcctgatggtatgtgccaaggtggtctagctacagcttagttttatacattttagggagacataagacatcaatcagtacatgtaagatgtacattggttctgtctgaaaagacaaaacaactcaaagtgtgggcttccaggtcataggtggattcagagattttccaattggcaattggttgaaaaagtttatctaaagacctggaatccatagaagggagtgtctgggttaagacaaggggttgtggaaaccaaggttcttattatgccgatgaagcttacaggtaacaggcttgagaa

SEQ ID NO: 201868 - DNA, 551 bp, Homo sapiens
gcctccttcttccttaccactcctcccaatgcagatgcctggttttgtcattaaaagtgtctgtaattcttgcaaggttctcacaggtacatgtcggcagatgctttctctcctattcttttcttcaacacaagcccaagcttcacttcctttatgaaggtataaaccaaaaattatctgagacaagtcttaatcagtttagtttattttgccaaggttaaggacatgcccatgacacaccctcaggagttcctgatggtatgtgccaaggtggtctagctacagcttagttttatacattttagggagacataagacatcaatcagtacatgtaagatgtacattggttctgtctgaaaagacaaaacaactcaaagtgtgggcttccaggtcataggtggattcagagattttccaattggcaattggttgaaaaagtttatctaaagacctggaatccatagaagggagtgtctgggttaagacaaggggttgtggaaaccaargttcttattatgccgatgaagcttacaggtaacaggcttgagaa

SEQ ID NO: 201869 - DNA, 585 bp, Homo sapiens
atattttagggtaaaatacttcaatttctttcagagcctgctatctgttgtgtaacacaataccagagtcaggctrgaattcagtgtctttttgctacaaaaagtcttaaaaacctctgttttaatgttaatgttggttagttgtgcctgattccaaagggaggagggcgtaaggaggtatgtatgacctccacttcccatcacggcctgaactgggttctcacattaactttgaaatggccttggcctagaagaggggttcattcagatggttagagggcttagaattttatttttagcttacaaaggtaacacttcttacatcttaaaaagtttttctgctcccacaactcctacagcttttatagcactgatcacatttcaatagttctgcctcctgaaccagaacataagttcctggaagataagaagtgagccattttatagtttcatcccttatctttccaccccttagagcacagcagttcccgaaataaaataggagatccatgcatttttgaaatgtattttttaaaatgattcatctctccatgtaagagaagtgttgtaggtggtttctaagat

SEQ ID NO: 201870 - DNA, 617 bp, Homo sapiens
atcttgaaagtcacccaatatgccttattacatggttttccttatatttgaactcaaaacttgactctcattagatagtcaagtagggatgattgcagagtatggagggcttgtaagtgctactagcttgggttttgatagctattagaagatagcctaaaaaawtatataacataagaaaattatctcctctgtataacctaaatgaaaataatttggaagtagaattatgatttgattcacaatagggagaattcagttaaaattgtttaaactcattaatcatgatacaagctatcaaattagaaagacccaataaaccagatggattctgggttcttactggaggtatagagtctaccttttatccggtgtttttaaaaatgtgattcatagactatttacttcataatgctctgaaagacttattttaaaaatacagatttctaggactgtctcaggctactaaattaaaatatctatgggtgagcccaggaatccatatttttactaagtacctcaagtgatttttgaattttaaatgtaacaatacaatacagaaatctcaaatgtgcagctggataaatatttacatatgaatatacccatgtaactgt

SEQ ID NO: 201871 - DNA, 617 bp, Homo sapiens
atcttgaaagtcacccaatatgccttattacatggttttccttatatttgaactcaaaacttgactctcattagatagtcaagtagggatgattgcagagtatggagggcttgtaagtgctactagcttgggttttgatagctattagaagatagcctaaaaaattatataacataagaaaattatctcctctgtataacctaaatgaaaataatttggaagtagaattatgatttgattcacaatagggagaattcagttaaaattgtttaaactcattaatcatgatacaagctatcaaattagaaagacccaataaaccagatggattctgggttcttactggaggtatagagtctaccttttatccggtgtttttaaaaatgtgattcatagactatttacttcataatgctctgaaagacttattttaaaaatacagatttctaggactgtctcaggctactaaattaaaatatctatgggwgagcccaggaatccatatttttactaagtacctcaagtgatttttgaattttaaatgtaacaatacaatacagaaatctcaaatgtgcagctggataaatatttacatatgaatatacccatgtaactgt

SEQ ID NO: 201872 - DNA, 606 bp, Homo sapiens
aggaagggaaggaaagaaaagaaggaacatactacttggaagagggccaagcaggcaacttgagaaaccaagtgccagcgcatatgatcttgccaaaacctttcaatgcctaagtcactcagaaaaaaaaaaaaatccaaaatctaaaaaaatcaagatttcttacgttggtctaaaaaattgtaaattatttgttatctccctaacttcacctcctacacttctcttgcatgttcttcgtttttttttttctttattttccttcatgatgttggatctcttagagtttcttaaactcactaaacatacactcagcttagagcctttgccctccctgagacagactaaaacgcgccttccagagcyatttgggcaactcgctcccttacttccttctgttatctattcaaatgctattttatcagggatggcctttcttgagtacactctgtaaaatagccacttctttctaccttggtgctccctagactttatagatactatatagtcccttttaaagtgtttattgcctatttctctcaactaaactttgagctccataggtcttatttgctttgttccctactctttttccaagaagggaga

SEQ ID NO: 201873 - DNA, 353 bp, Homo sapiens
cttgctccttcctttggaagcttttgtcccagaggagtacctgccagatgccagcygcagctctcctgtatgaggtgtctgtcgacctctgctgggaggtgtctccctttcaggaggcacggggctcagggacccacccaggaaagaggaggcagtctttcctctagcagagctcaagtgctgtgctgagagatccactgctctcttcagagttggccggcaggaacttttaagtcagttgaagctgcacccacagctgccccttcccccaggtgctcttcccagggagacgggaattttatctataagctcctgactggggctgctgcctttctttcagagatgccctaccc

SEQ ID NO: 201874 - DNA, 562 bp, Homo sapiens
ggggatgagagaggaggtggggatggttaatgggtccaaaaaaattaggaagaatgaataagacctactatatgatagcacartaagaacactatagtcaataataacttaattgtatatttttaaataaagaatgtaattggattttttgtaattcaaaagataaatgcctgaggggatggataccccgttctccatgatgtgtttacttcacattacatgcctatactagaacatctcatgtaccccataaatatttatacctactatatacccacaaaaattaaaaaaatattcagtaggaaaagaatgaactattcaatgtatgattctaggacagctggttatccacatggacatggaattaaatgaagttggatcgcttgctcataaagtatttaaatgttaagtctgtgaaaattaaagacctaaatctaagaggcaaaatttaaagcttttaaaagagaattaggagcatattttagtaaagtcagagaataaaaggatttcttaaataagttacagagagcacatactgcaaaggaaaagactgataaataat

SEQ ID NO: 201875 - DNA, 562 bp, Homo sapiens
ggggatgagagaggaggtggggatggttaatgggtccaaaaaaattaggaagaatgaataagacctactatatgatagcacaatargaacactatagtcaataataacttaattgtatatttttaaataaagaatgtaattggattttttgtaattcaaaagataaatgcctgaggggatggataccccgttctccatgatgtgtttacttcacattacatgcctatactagaacatctcatgtaccccataaatatttatacctactatatacccacaaaaattaaaaaaatattcagtaggaaaagaatgaactattcaatgtatgattctaggacagctggttatccacatggacatggaattaaatgaagttggatcgcttgctcataaagtatttaaatgttaagtctgtgaaaattaaagacctaaatctaagaggcaaaatttaaagcttttaaaagagaattaggagcatattttagtaaagtcagagaataaaaggatttcttaaataagttacagagagcacatactgcaaaggaaaagactgataaataat

SEQ ID NO: 201876 - DNA, 562 bp, Homo sapiens
ggggatgagagaggaggtggggatggttaatgggtccaaaaaaattaggaagaatgaataagacctactatatgatagcacaataagaacactatagtcaataataacttaattgtatatttttaaataaagaatgtaattggattttttgtaattcaaaagataaatgcctgaggggatggataccccgttctccatgatgtgtttacttcacattacatgcctatactaraacatctcatgtaccccataaatatttatacctactatatacccacaaaaattaaaaaaatattcagtaggaaaagaatgaactattcaatgtatgattctaggacagctggttatccacatggacatggaattaaatgaagttggatcgcttgctcataaagtatttaaatgttaagtctgtgaaaattaaagacctaaatctaagaggcaaaatttaaagcttttaaaagagaattaggagcatattttagtaaagtcagagaataaaaggatttcttaaataagttacagagagcacatactgcaaaggaaaagactgataaataat

SEQ ID NO: 201877 - DNA, 562 bp, Homo sapiens
ggggatgagagaggaggtggggatggttaatgggtccaaaaaaattaggaagaatgaataagacctactatatgatagcacaataagaacactatagtcaataataacttaattgtatatttttaaataaagaatgtaattggattttttgtaattcaaaagataaatgcctgaggggatggataccccgttctccatgatgtgtttacttcacattacatgcctatactagaacatctcatgtaccccataaatatttatacctactatatacccacaaaaattaaaaaaatattcagtaggaaaagaatgaactattcaatgtatgattctaggacagctggttatccacatggacatggaattaaatgaagttggatcgcttgctcataaastatttaaatgttaagtctgtgaaaattaaagacctaaatctaagaggcaaaatttaaagcttttaaaagagaattaggagcatattttagtaaagtcagagaataaaaggatttcttaaataagttacagagagcacatactgcaaaggaaaagactgataaataat

SEQ ID NO: 201878 - DNA, 607 bp, Homo sapiens
tttttcttgggagtagttatagtcatgtgatatctcctttgactgtcttccctatctcatattttctctatacacccttacattttcacttcattattctctatgttttttatccatgtctatgtaaatattgccttatgttatgatttttcttttctctctctctctctctttttttctactgacgattgttagctcatattttgtgtcctcctgtctcaccattgctaccttgaggtattgtatctttgctgtgacaatttttcttgatttcttaagttacttgaatttaaggaagcatgctgttttttgataacatttttctccatctgtggttcattcatcctgttctttctcttatgtttttttcttaatcatttttaatttatttattatttcctcacctctgaataggatgagtcttaacgagatgatttaattacagaatattcatgggaaaagtaagtggaacaagttctcaaatagcagatattcctcccaattcacacaaaaattccttatgacccagagctgtatggcctyatgcatttggtcaaccggttcactgttttcttcagccagcacaatttgcagctactgagatcat

SEQ ID NO: 201879 - DNA, 607 bp, Homo sapiens
tttttcttgggagtagttatagtcatgtgatatctcctttgactgtcttccctatctcatattttctctatacacccttacattttcacttcattattctctatgttttttatccatgtctatgtaaatattgccttatgttatgatttttcttttctctctctctctctctttttttctactgacgattgttagctcatattttgtgtcctcctgtctcaccattgctaccttgaggtattgtatctttgctgtgacaatttttcttgatttcttaagttacttgaatttaaggaagcatgctgttttttgataacatttttctccatctgtggttcattcatcctgttctttctcttatgtttttttcttaatcatttttaatttatttattatttcctcacctctgaataggatgagtcttaacgagatgatttaattacagaatattcatgggaaaagtaagtggaacaagttctcaaatagcagatattcctcccaattcacacaaaaattccttatgacccagagctgtatggcctcatgcatttggtcaaccggttcactgttttcttcagccagcacratttgcagctactgagatcat

SEQ ID NO: 201880 - DNA, 432 bp, Homo sapiens
agactagcagtattgaggcttaatgtaggttttacttcccagcatacttctgaaggcaacctactcagttttgcaggtgggctatgacgctggctgatatagcttattgagtgccacagctggcagraacaaagaggtaataccaagaactgtgcgttggtcactgtttttgtgtctacttgacctctgggttgtcaagctttgccattttgcctagtcttccctatgaggtgagtacagagtttttcttggtgttgagcatctcaaaaaaaaaaaaaatactctaatctacaaataattgctagttgaacttttctgtgggaaggagtggatctggagacttcctattccaccattttgctgacatcagtctcctaaacacttcaatgtttccacataatgcctatcagtagtgtttatcatttgttgccc

SEQ ID NO: 201881 - DNA, 481 bp, Homo sapiens
atagtagatcttcaaaccctgctgctgctgctttatccactgaatttacgtaatattctaaacccttggtcgtcacttcaacaatgttcatagcatttttaccagaaatagattccatctcaaaaaagcactttctttgctcatccataagaagcaactcctcatctgttcaagttttattatgagtttgcagcaattcagttacagcttcaggggctgcttctaattctagttatcttgctagytccattatatctgcacttccttttgtccctgaatcctttaactccttcaagtcatttatgaggatttgaataaacttctttcaaactcctgtttatttgaaccttccatgaatcatgaatgtcctgaatcctgaatcatggatcctatccagaaggttttcaacttgctttgcccaaatccattagaggaataactatccatggccgctatagccttattaaatgtgttatttaaa

SEQ ID NO: 201882 - DNA, 635 bp, Homo sapiens
tgtttgtattgaataagtgtgaggttctattttggtggctactggacatgagatcggaaacatgactatcaagaccaataaagccctggatatgtccacacttcactgtagaagacatcatttaaaaaatgaattttgtttcatgtaggagaacagatgataaatcattgctggctttgtttatatgcataatatttgtttacggtgaacaaattaacatttttcttgaaagagaagagtatctgcaaaatgtaaatatctggcacaaaggcttgaggtgaaaggttcaaaggcctcctcatccactagtgttggtaatcgtggttatataaattatctcttagcatcagagtctctacctgagtcactccggcccaactccctcccttcagccctggaagaatactttgtggttctctgaaagtttttaaacacctgggcactattacagtgaggattacacctataaacattattcacaaggtgacccgtttacaattaattctggctaataatatttcatttccttcactaccayattttctgttgtagctttggtgtctcccaaagcatggagcacagagggatcaccttgctcactgtactccaacgacagctgtcaccagtcacagata

SEQ ID NO: 201883 - DNA, 606 bp, Homo sapiens
atccacgtaaataaaataatcttggtgtttgtgaatcatctacaggatgtgttaraaaaagtgttagtggccttcaaaagcctttacaaaaacgtcagggtggtcagttaccttagagttttgtttgtttcactttttccttgtttcttttttcataaatttataaaaggatccaaatatatttttaaaaagtaaaataaatattcatgagtactctctgttgaagcgttgtgtatagacgtgcttcactttttttcttcagggccacattccttattctttctatatttccccactataagactacctatgaaataagcaaaatcaatattttgccatctgggcaaatggttaacaagccaccaacttttttttggttaagtgtcttatcataatgtgcttgatgtcaagtccactgccattctactaataaagaaactgacaaataataaaggattattgggatggtccggagctctttatccattttactatgacattatgtgctatccaaggcaaaagtaaaattaactgagagaaagaagctaacagttttcaagtttttaatttaaccaggccactcaataggtgcaattatgattcttc

SEQ ID NO: 201884 - DNA, 606 bp, Homo sapiens
atccacgtaaataaaataatcttggtgtttgtgaatcatctacaggatgtgttagaaaaagtgttagtggccttcaaaagcctttacaaaaacgtcagggtggtyagttaccttagagttttgtttgtttcactttttccttgtttcttttttcataaatttataaaaggatccaaatatatttttaaaaagtaaaataaatattcatgagtactctctgttgaagcgttgtgtatagacgtgcttcactttttttcttcagggccacattccttattctttctatatttccccactataagactacctatgaaataagcaaaatcaatattttgccatctgggcaaatggttaacaagccaccaacttttttttggttaagtgtcttatcataatgtgcttgatgtcaagtccactgccattctactaataaagaaactgacaaataataaaggattattgggatggtccggagctctttatccattttactatgacattatgtgctatccaaggcaaaagtaaaattaactgagagaaagaagctaacagttttcaagtttttaatttaaccaggccactcaataggtgcaattatgattcttc

SEQ ID NO: 201885 - DNA, 622 bp, Homo sapiens
atttttacacaaaatagcagtactggaatagcaacttttattttttcttaataggaggtatcttcacactgtgccaggaagccattaagtatttttaaggctatgaggtaatggactgtgtgttcattgttcttggtctagatatttcttactaagtgttggaaagcacttaggagtaacaaagctaaatcaattctttgtattgacttatgttgatatttttcatatagataaattttctcctttcattaatgaaaaacagaatccacgtaaataaaataatcttggtgtttgtgaatcatctacaggatgtgttagaaaaagtgttagtggccttcaaaagcctttacaaaaacgtcagggtggtcagttaccttagagttttgtttgtttcactttttccttgtttcttttttcataaatttataaaaggatccaaatatatttttaaaaagtaaaataaatattcatgagtactctctgttgaagcgttgtgtatagacrtgcttcactttttttcttcagggccacattccttattctttctatatttccccactataagactacctatgaaataagcaaaatcaatattttgccatctgggcaaatggttaacaag

SEQ ID NO: 201886 - DNA, 546 bp, Homo sapiens
ctctgttgaagcgttgtgtatagacgtgcttcactttttttcttcagggccacattccttattctttctatatttccccactataagactacctatgaaataagcaaaatcaatattttgccatctgggcaaatggttaacaagccaccaacttttttttggttaagtgtcttatcataatgtgcttgatgtcaagtccactgccattctactaataaagaaactgacaaataataaaggattattgggatggtccggagctctttatccattttactatgacattatgtgctatccaaggcaaaagtaaaattaactgagagaaagaagctaacagttttcaagtttttaatttaaccaggccactcaataggtgcaattatgattcttctaacttaatcatcagaacaaatgatatgagatagggttaacactcattttacaattaaggaaactgagaccagaagaagttaataaacttggaggacsctggtctattggagtctaaagtatatgttctttatgccattttcaaaggtgacacat

SEQ ID NO: 201887 - DNA, 573 bp, Homo sapiens
gatataattttttccttgttaggctccgtgtgcttccaaatatgttgtargttaatcatatttttgggctgactacaagaaaaatgaatgggacaatttctatagcagaaatatgttgtcttaggaaagagaaagtggcttttcttatgccttctcacattctggctgctactatgaatctgccatttctaggggttcagatagagtctatagagtcataaacctgaggatgtatgcccaaatgaaattatatctgctgctatgatttcaatgtttgtcccctccaaaactcactttgaaatttaattgccattgtaacagtattaagaggtgagacctttaagagatgattggtatgtgagggttctgccctcatgaatggactaatgtcattattgtgtgagtgagtatcttataaagggcaagttctgtcccctttgctctctctcatcatttcttattcctttcactcttctgccatgtgaggaacagtgtctcctcaccactccgcgtggtcaaggcaccctcttggaagaagagtctaggccattaccagacacaaacacgccaggg

SEQ ID NO: 201888 - DNA, 562 bp, Homo sapiens
aagtagtcttgctgaatgccttcgtgttaagattgaagtatatttaaaagtatgacagtcagggtgtccyccactgcaagttctcctgaagggatatgtgaagtgcatccccatatccccacagtaaacattaatctgcaatttttagcaatgacattataaagtcattctcagaattaaaacaagggtctaaaacataagaacaataacgtatagattaggggatatactttaacataatggaagaacaccaccctagaattcaggagaattttgctttgtttgttatcagtgggtcaagttacataggtccgtgaagctctatttttcaataagttaaataaaaataatagagtgaaaatctcctatctagaactattgaactggttatttaggaaaaaatcacttaatgggtaaacacattttaatgatttatttatgtcatacacgcacacacacatgcacacacacataatttgaacatttaaacaaggtgcatgtcattacaacctttgaactaggatccatatgtttgaatttatatttgctaattggagttctg

SEQ ID NO: 201889 - DNA, 464 bp, Homo sapiens
tttgaactgctcacctttctctgccctttgaatatgagtttccctcctgacaattcctactcatctttcaagttcaacttactatctctgtgaaattataacaaaatcacacagacactttcagtatccctttctctaaaattatataacttcgcattcatatctgtattatattgaytgaatattaatattaattattgaatattataattgaatatatactatatattcaattcatattatacttgatatagtatatattgaataattgatataatcaatatatttaatccacagtgaaatctttctaatatataccttgggccataacttagcttaatattgttataaacacaattcttaaaataattcacaatttgtaaaatagtatactgtccattaactgattcttaatatagactttcattattcattgtttcatttaaaaaattcattgaatacgt

SEQ ID NO: 201890 - DNA, 463 bp, Homo sapiens
gaggcattgagctcaagtgacaaagaagctggtgccaccattcacaaaaaagggaaatgaagatactggaacaattattagtagacaggtatgattaagtcatcagcgaaagattgacgtggagatgcctatcagtatgtgtggaacaggatttcagaaaacggccgatttcacaattaagagatgtgagtgtccaaatagatgcaataattgtgcaatagcagaaggtatttaatatatccaaaatatagtatagacagagtaaaggatgtaggacaggagaaaaaagaccagattacgaggaacatacctgataraaaagataataaacatgatatgacagtcactgtgagaaaaatacagtaaccaacactgtgtgacagtcactgttctgaacactatgcatacattaattcatttaattctccactcaaatatatgaggtaggtgttattattagctt

SEQ ID NO: 201891 - DNA, 375 bp, Homo sapiens
tgcagctgtgaaattggtgactatgagataaacattttatgtaacacttgatgtttttytcactttttgtaatggtcatctttctgatgaagcccattgttctaccatctaagtactttataaagacagagatccttgattagggctgtgaacctgaaaaatagtttccagctttcctagttgtctctgatagctgtataagaaaagacaactttgctaaaaatttataggctgaacctatctggctttttaatagtaatagaatttaatataggtattcatttaatctgcccaggcatacatattatcaggtgatgacaagagcagtgttactcagcatcatctgcaaactggcagcatcagtatcacatggga

SEQ ID NO: 201892 - DNA, 375 bp, Homo sapiens
tgcagctgtgaaattggtgactatgagataaacattttatgtaacacttgatgtttttttcactttttgtaatggtcatctttctgatgaagcccattgttctaccatctaagtactttataaagacagagatccttgattagggctgtgaacctgaaaaatagtttccagctttcctagttgtctctgatagctgtataagaaaagacaactttgctaaaaatttataggctgaacctatctggctttttaatagtaatagaatttaatataggtattcatttaatctgcccrggcatacatattatcaggtgatgacaagagcagtgttactcagcatcatctgcaaactggcagcatcagtatcacatggga

SEQ ID NO: 201893 - DNA, 558 bp, Homo sapiens
atcttatttcttctattcattttggcaacattcttcttttttttttttacttttataaagtgaaagatcaggtcattgaatttgaacttttcttgaactatccatttttttaacactttttgctacatcccagaaaattttgtattttgcattttcattttgattcaactaaaatatttttattatcctttgcaaattctttaatacatgtgtaattttaaactatgcttgtttaacatacaattttagggattttcttagtatatcttagttatgaatttttaatttaattacattgtagtctcagaatatatttttgtatcagttccacttytgtaaatttattagactgttttgtttctgcaaatcatgcatattttgtagtttttggtgtactgtactgtgattatcaatcaggtcaagtttgttattaagtgttttttatcctttttctctacctgttttatcaattttgcaaaatcagttctgaagtattattgtaattgtgcagctatccatttttctctttccagttctagtcattatttttaagttctg

SEQ ID NO: 201894 - DNA, 566 bp, Homo sapiens
tagttttaataagtaggaaagatttgtttgaaagtgaatatttttagatatctgcaataaccacctgctgtttctttcccaaatacaaacatgtttcctaataagagattcactataacttttgcagtcgggatttttcatcttgtacatrtaaaccaagtcagtgcctctgaatctgattttcatctctctttcataagtcatatctaatttttctttgttctggacatatttgcgtatattccctgttgagtacaaacccaattttgaatgcttccaccacaaaaactacattcttctcctgaatgcctctgtctaaaaactattttctcagccactgaaacttgaaaacttagtttttactcccttaccatttcttcccttccagttagtaacagtgtcttgtgcattctacctctgtctgttaaatctcttcattgcctttttgatgcctcctgctggtttttactgctttgtacttggtctatttaaataatttatattttccttctaatacaactttgacactattgccaaattgctttctgcagtgttcagctcagatc

SEQ ID NO: 201895 - DNA, 566 bp, Homo sapiens
tagttttaataagtaggaaagatttgtttgaaagtgaatatttttagatatctgcaataaccacctgctgtttctttcccaaatacaaacatgtttcctaataagagattcactataacttttgcagtcgggatttttcatcttgtacatgtaaaccaagtcagtgcctctgaatctgattttcatctctctttcataagtcatatctaatttttctttgttctggacatatttgygtatattccctgttgagtacaaacccaattttgaatgcttccaccacaaaaactacattcttctcctgaatgcctctgtctaaaaactattttctcagccactgaaacttgaaaacttagtttttactcccttaccatttcttcccttccagttagtaacagtgtcttgtgcattctacctctgtctgttaaatctcttcattgcctttttgatgcctcctgctggtttttactgctttgtacttggtctatttaaataatttatattttccttctaatacaactttgacactattgccaaattgctttctgcagtgttcagctcagatc

SEQ ID NO: 201896 - DNA, 522 bp, Homo sapiens
tatgtcaaagagttttctgtactcccatgttcactgcagcactgttcacaatagctacgataggaaatcaatyaaagtgtccaacagatgatggtatacatacacaatggaatactactgagacttaaaaaaaggaaattctgtcatttgtgacaacgtgggtgagcccaaaagacattatactaaataaaataataaatactacagaatcttatatgtggaatctaaaaaagtcaaactaatagaagcagatagtagaatagtggttaccagaagctgaggtgggtggatggtgatgggggacagatggggagatgttgatcaaaaggtataaaatttgttagaaataactctttgagagccatttcacagcatagtgactatagttaaaaacaatgtcatgtatatttcaaaatcattaaaagcagattttaaatgtaacacaaaaataagcatgtgaggtgatatgttaattagcttgatttaatcattctataatatatgcatatatcaaatatcata

SEQ ID NO: 201897 - DNA, 647 bp, Homo sapiens
taattttgtgtgtcaacatgactgagctaaagagtgcctatatatttggttaaatgttatttctgagygtgtctattagggtgtttatcaaaaagatgaactttttttttctttcgagccatgtttcgctctgcacttaggctggagtgcagtggtgtgagctcagctcactgcaaccttcgcctccagggttcaagcgattctcctgccccagcctcctgagtagctgggattacaggcctgtgccaccatgcctggctaatttttatatttttaggagagatggggtttcaccatgttggccaggctggtctcgaactcctcacctcaagtgatctgcccacctcagcctcccaaagcgctgggattacaggtgtgagccaccacacctggccaagagaaatatttgaatatgtagactgagtagactgttcttcccaatgtaggtaggccacattcaatcctataaagacctaaatataataaaagattgagtaagaaagaattctttgtttttgcctgtctttaaactgggacattggtgttctcttgccattggacagactggaattatatactcagctcttctgggtttggacttgtaagcctctgtaattgcataagccaatcccctacaataaatctct

SEQ ID NO: 201898 - DNA, 647 bp, Homo sapiens
taattttgtgtgtcaacatgactgagctaaagagtgcctatatatttggttaaatgttatttctgagtgtgtctattagggtgtttatcaaaaagatgaactttttttttctttcgagccatgtttcgctctgcacttaggctggagtgcagtggtgtgagctcagctcactgcaaccttcgcctccagggttcaagcrattctcctgccccagcctcctgagtagctgggattacaggcctgtgccaccatgcctggctaatttttatatttttaggagagatggggtttcaccatgttggccaggctggtctcgaactcctcacctcaagtgatctgcccacctcagcctcccaaagcgctgggattacaggtgtgagccaccacacctggccaagagaaatatttgaatatgtagactgagtagactgttcttcccaatgtaggtaggccacattcaatcctataaagacctaaatataataaaagattgagtaagaaagaattctttgtttttgcctgtctttaaactgggacattggtgttctcttgccattggacagactggaattatatactcagctcttctgggtttggacttgtaagcctctgtaattgcataagccaatcccctacaataaatctct

SEQ ID NO: 201899 - DNA, 647 bp, Homo sapiens
taattttgtgtgtcaacatgactgagctaaagagtgcctatatatttggttaaatgttatttctgagtgtgtctattagggtgtttatcaaaaagatgaactttttttttctttcgagccatgtttcgctctgcacttaggctggagtgcagtggtgtgagctcagctcactgcaaccttcgcctccagggttcaagcgattctcctgccccagcctcctgagtagctgggattacaggcctgtgycaccatgcctggctaatttttatatttttaggagagatggggtttcaccatgttggccaggctggtctcgaactcctcacctcaagtgatctgcccacctcagcctcccaaagcgctgggattacaggtgtgagccaccacacctggccaagagaaatatttgaatatgtagactgagtagactgttcttcccaatgtaggtaggccacattcaatcctataaagacctaaatataataaaagattgagtaagaaagaattctttgtttttgcctgtctttaaactgggacattggtgttctcttgccattggacagactggaattatatactcagctcttctgggtttggacttgtaagcctctgtaattgcataagccaatcccctacaataaatctct

SEQ ID NO: 201900 - DNA, 647 bp, Homo sapiens
taattttgtgtgtcaacatgactgagctaaagagtgcctatatatttggttaaatgttatttctgagtgtgtctattagggtgtttatcaaaaagatgaactttttttttctttcgagccatgtttcgctctgcacttaggctggagtgcagtggtgtgagctcagctcactgcaaccttcgcctccagggttcaagcgattctcctgccccagcctcctgagtagctgggattacaggcctgtgccaccatgcctggctaatttttatatttttaggagagatggggtttcaccatgttggccaggctggtctcgaactcctcacctcaagtgatctgcccacctcagcctcccaaagcgctgggattacaggtgtgagccacyacacctggccaagagaaatatttgaatatgtagactgagtagactgttcttcccaatgtaggtaggccacattcaatcctataaagacctaaatataataaaagattgagtaagaaagaattctttgtttttgcctgtctttaaactgggacattggtgttctcttgccattggacagactggaattatatactcagctcttctgggtttggacttgtaagcctctgtaattgcataagccaatcccctacaataaatctct

SEQ ID NO: 201901 - DNA, 457 bp, Homo sapiens
gaattctttgtttttgcctgtctttaaactgggacattggtgttctcttgccattggacagactggaattatatactcagctcttctgggtttggacttgtaagcctctgtaattgcataagccaatcccctacaataaatctctctgtatgtgtttctctctctctctctctctctctstgtgtctctctgtgtctgtgtgtgtgtgtgtgtgtctgtgtgtgtgtgtgggtgtgtgtgcacgtgtgtgcatatacatatagagtagtcctgcatatccatgagagatttgttcaagtgtaccttgcggatgccaaaatccacagatgctcaagttgctcatacaaaattgattagtatttgcaaataacctatgcatatcccccgtatacttctaaaaatctctagattacttactatgtctaatagaatgtaaatgctatggaaacagttgcta

SEQ ID NO: 201902 - DNA, 483 bp, Homo sapiens
tttaaactgggacattggtgttctcttgccattggacagactggaattatatactcagctcttctgggtttggacttgtaagcctctgtaattgcataagccaatcccctacaataaatctctctgtatgtgtttctctctctctctctctctctctgtgtgtctctctgtgtctgtgtgtgtgtgtgtgtgtctgtgtgtgtgtgtgggtgtgtgtgcacgtgtgtgcatatacatatagagtagtcctgcatatccatgagagatttgttcaagkgtaccttgcggatgccaaaatccacagatgctcaagttgctcatacaaaattgattagtatttgcaaataacctatgcatatcccccgtatacttctaaaaatctctagattacttactatgtctaatagaatgtaaatgctatggaaacagttgctatgctgtacttcatattcttttttatttttttaaatattttctatctgc

SEQ ID NO: 201903 - DNA, 518 bp, Homo sapiens
tgaccaccaagttaccatgaaatctgagctgcccatcatgaagrggatatgatctgaccaatcaagccataaagttgagcatgcattgcaacaccctgtcatcaaatggaagtggtatagacatgataggaccagagcaaccctgaatgtacaagtaagttacatgaagaagtggcccaaatgcctatggttcctgcttctgctaccctgccttatttctgtcagcctacatccatgacctaatgaggcatttcctatgatcagttgacagagaaagagaaagcttgggccttgttttcagatggttctgcaggatatgcaggcaccacctcaaatcggacagctatatctgtatagcccctttgtgggacatccatgaaggacagtggtgaagagaaattctcccagttggcagagcttcaagcactgaacctggttgtccactttgcttggaaggagaaatggccagacatgcgattggattacaattcatggactgtggccaatggtttggctag

SEQ ID NO: 201904 - DNA, 518 bp, Homo sapiens
tgaccaccaagttaccatgaaatctgagctgcccatcatgaagaggatatgatctgaccaatcaagccataaagttgagcatgcattgcaacaccctgtcatcaaatggaagtggtatagacatgataggaccagagcaaccctgaatgtacaagtaagttacatgaagaagtggcccaaatgcctatggttcctgcttctgctaccctgccttatttctgtcagcctacatccatgacctaatgaggcatttcctatgatcagttgacagagaaagagaaagcttgggccttgttttcagatggttctgcaggatatgcaggcaccacctcaaatyggacagctatatctgtatagcccctttgtgggacatccatgaaggacagtggtgaagagaaattctcccagttggcagagcttcaagcactgaacctggttgtccactttgcttggaaggagaaatggccagacatgcgattggattacaattcatggactgtggccaatggtttggctag

SEQ ID NO: 201905 - DNA, 577 bp, Homo sapiens
attgttagatggaagtggaacatccaggataaagcattaacagggccaggtggcacaaataaaatgcataaacaggtaacccagacacccatgtcacctgtttctcaacttcagatgaattcaagccttaaagtgccaagcaaaattttgagaaattttggaagaaggcatagatgagtgtatttctgatcttgggtcagaaagaattcctaagatgcaaatggaaaaatcactataacatagacactttgacattttaaattaagaacttttgccataaaaagagactttaaagaaaacgaaaagacagaaagtgtgagaatatgcagcattagctgatgttacattattatgaggactgttagaagtttaaaatcaatgaagaataacagcaatcatgagaaaagtgagaaaaatcatgaaaaggtatttcaaagaaaagaaaacatatttggccaaaagtcatatgcractcaaaacctcattaataatgtaaatacaaaacaggtgaaaaacagatgacattctattggcaaagattaacaagttcaacaatactaaacgttagagaaaatgg

SEQ ID NO: 201906 - DNA, 576 bp, Homo sapiens
gaattcctttgaatggtaagatggtaaggtcttgttaattacaactgctgagttcttgatccagttaagctgtgtggatgaaggcaagctgttttcaatgtggattagaagattccacttaaagttaaggcctatgttagacattattttctattctgtctctgtgtttaaacatacatcrataaaaagttttttttaaaataaaacaataaactatccaagtttccccctttactaacaatagcctagaagcatatttttatcaataatttaaaatttagtaccttaaaacataccataatgagaattaaagacagatttcaaactaggataaaagtattttcacttttaagggaagagataatgaaaatttaaaatacacaactatttcaattactaggagaataagatgaactaaaacagaaaagttgatataaagaaaagaccaagagcaaaaacttacataaggccaatataagcctgagtaaaatttaacctaactagtaatacaaaatatatactaaaatgttggtgaaatgcttttgttgaaaaattagcaaagattcaaatgttaag

SEQ ID NO: 201907 - DNA, 597 bp, Homo sapiens
tattaacaaaggtattagtatctgtgttttacccatgaaaaattagaaacttagaaaaatatcttgttcagtttcacactggtacaatatgagggtatgaaagttgtaactgactctaaagcttgagctattttcttatagatataatttaaataatgtctatcaactttcttgaaatattctcattgttacctaagaatttaaaatattgatatgcaattgatctaagagaggttaaacatgaattggaaattccttctccgatatcaggtttgatttttcacaaatatcaatgtttatgaaagtattcctaaaatttcaggtaaaaccacccaataatatgactgtgaaaaattatgcttcttcctctatgagctactacattcttaaattatctgagcattctattaaaacttaaaaaaatgcttaacttgagtctgcatgaatctgaattccctgcatatttaattttaaagaaaatagtttatttttttgttagaccaatactttacaaacttccccaaccaataagaaagaacaaagaggagaacatgratatccctgggtatttgtgagtaaatccccaagagactaacc

SEQ ID NO: 201908 - DNA, 411 bp, Homo sapiens
tagaattcactgtggactggaggtggtaggggccacaggaagaggcttttctgcctataggaagtggagggaagagcaraaaggactttgtattgtggtttgagtgccaggttagccacactagaatagaacatcaggtaaattgttcatgttttttactgcagtctctgggtcccagacagcatctctggacactcccagggtctgggggagcttgccgccctgaagggaagggccttggacaaggcttactgttgtgctagcttcaggtctgacctagcacagtgccagtcgtggcagcctcaggggtgcttgcatcaccacatcctcagttccaggtggcttagcacacagagagagagactctgtttgtttgggagaaagtaagataaaataacaagtgtcactgtc

SEQ ID NO: 201909 - DNA, 503 bp, Homo sapiens
tgtgggttagccctgctcttcaaggaacagtacctctgctgctgtacactgccacttcaataaaagttactaacaccaccaaaaaaaaaaaaaaaaagaaaaaagaagaaaaagaaattgccttccttttacagttaaataactctctcagcctgcttcctgcccgtaggaagttgggggcttggaaggttttyttcattaaaaaaaaaaaaaaaaaaaaaaagcaaatatgaaactatacctttaaacaatgaataatggtgtagccatttcatcttatagtttctaggatgaattaaaataacatattttatcctatattatgaagaaaagtggtaaaaatctttctcaaattactataaggataataaatataatttaagaattttgtctatgcatccagactaaaatggcatagagacataagcccttatcaataaaaaaaactcttgagcagaattgccattcatagaaggatttgaccataacaaaagattctgtga

SEQ ID NO: 201910 - DNA, 621 bp, Homo sapiens
ataaatttatttttaacataaataaacattaagaatttaaatttaaatgtattgtagatgataaatttgtacagaacagtcaaaagtaagatatggtactgacagaaaaaagaaaagtaaatattgttctttgattgtaaagctaccaggcctgaccaaaacttcatccctttttcagtacatgtaaacagcattccttttagaagtatctgtgattgactaaactggcatgaaaactattatgttactgcatatacatatgtgtgtgtgtgtgtgtgtgtgtgtgtgtgtctgtatgcagaaactttaaacaaatactagcacttgtaagttgacattctcttacagttttgtaggactttatgaatgattcatkattttgtgcccacatattttttattattaatataacttgattatttaattattatgttacctattactttgacaataaaaacaaaataggcccatttagagaaatgtcttttatgaaaatttgaaatgggtcattggattcttatttacagtggtgtcatttaaacttacgtttcaatctttttaattaaaaagaaagcagccctatctgctatatgacaaatcaagacagttatcagctttgta

SEQ ID NO: 201911 - DNA, 621 bp, Homo sapiens
ataaatttatttttaacataaataaacattaagaatttaaatttaaatgtattgtagatgataaatttgtacagaacagtcaaaagtaagatatggtactgacagaaaaaagaaaagtaaatattgttctttgattgtaaagctaccaggcctgaccaaaacttcatccctttttcagtacatgtaaacagcattccttttagaagtatctgtgattgactaaactggcatgaaaactattatgttactgcatatacatatgtgtgtgtgtgtgtgtgtgtgtgtgtgtgtctgtatgcagaaactttaaacaaatactagcacttgtaagttgacattctcttacagttttgtaggactttatgaatgattcatgattttgtrcccacatattttttattattaatataacttgattatttaattattatgttacctattactttgacaataaaaacaaaataggcccatttagagaaatgtcttttatgaaaatttgaaatgggtcattggattcttatttacagtggtgtcatttaaacttacgtttcaatctttttaattaaaaagaaagcagccctatctgctatatgacaaatcaagacagttatcagctttgta

SEQ ID NO: 201912 - DNA, 578 bp, Homo sapiens
tcactcagctaccagctccaatctgaacattttactaccactctcacagctacctctgacagtttttctaggctgtgawcacttttctttacctaaggattgcagaactgcaattgctcaaaaattcaggaagacatttttcagttgtttttggtaatggtttcttactaacttttaccttatgttgatgtgatatacttttaaatatcatacttttttccccggcttacttaaattgcttactctaacattttgtcccaggcaagggttgttcattttaaatgtattacacattgtttagaacagttgtgaaaaaaagtagaaattatatcttatttctacttactttgaaacttcaggatttgagtatacatactttattattgtttttgccaagcattattccaagcctcaaatagaatatagtcaatatctagccattttcctactttgtcatgcctctttcctacaaagcctcttctcaattttccaaaataagcacactgtaaaaaccttgcagaaatatcaccatttaacactttcatagcaaaatgcctctttacttttccatatcctaa

SEQ ID NO: 201913 - DNA, 541 bp, Homo sapiens
ctaaggaggctgaaatggcagtgagccagcagcaggccctgagctcacgtgactataaattggccatggcagctccgcactgcctgggttaatttatctttaccgtgtttttccaagtgacaggagtggtcagggagagagaagcaactgacagtaacattaattcacccatcagatgtccccagctttgtgacctattgcaacaacctcggccaatttattttgttggcttttcccatctgccagcatccaaaaatgagacaagctgaaataaaaactcytcccaggccttaggggtaaataataatttcctcttttcacccaaagacgaagtggtccacttcgcaggcaaatcattttgcaggctttcggagatggctttcaacgtgtttcacccacaaacatctggaaccagctcttctttacaagttattttcagcaagcagcaaaatgccattctgtagtgtaggaatttccaccaggcacgtttcaggctgcctgtgtcgccgtaggcaaatgactacacagattgtcctcctgg

SEQ ID NO: 201914 - DNA, 629 bp, Homo sapiens
tctcagctgtcacagggatttacacgagcaaggggccctgaagcttaagtctcattagcttcatgtaattcagtttctgctgattgtctttctcatttcaagtctattcaggcttttctccttgtcaattcttagacccctaggtggtgaaactataggacagtgatttttctatgacttgctatgggctttttgtacttatggttgttcctaccccagctgctctgttctcttaaagtggaaaagttggcacctttcctgctttccctgggagaaactagcatttgctagagaggaggacaatgattctgcctgaaacaaagactctggaaagtatgtaaattttactaattcattttcccttgctgatattatcatgggtaattcaaaatttattgcaagtgtcaaatcttgatattgtaagtggggaaattgttggtcaaagggtcacacagatagtctcagctttttggtttatatttaagtaaaatatgtaacagaatattccaagttctcaaggtagtgtcrctggaaaatatatttccctgagtggtaaattttcaagtaatactgggtatcatttgtctttatttaatctgagaaattcaacatgcatagcaagcatttat

SEQ ID NO: 201915 - DNA, 493 bp, Homo sapiens
agaaaacgcacttctgtgatgttatctaagtgctcatgtggctcacaacacgaagattgtatatcaataacaatgccagggagtgaactcagtacagcacattcccratggtgtcctctgagattttccaccaaagcactgagcattgcaggagcagagatgacaaaaattcatttattcagctattaacaattcatgcatcaaaaacattggtgctttggcgatataaagactactgctgtgggttctgtgaaagaggatggaggctgtgtattactgctccattttttttttttttagatggagtcttgctcagttgccaggctggagtgcagtggcacgatctcagctcactgcagcctccgcctccggggttcaagtgattctcctgccttagcctcccgagtagctgggactacaggtatgcaccacaaaacccagctaatttttgtatttttagtagagacggggtttcatcatgttggccaggatg

SEQ ID NO: 201916 - DNA, 493 bp, Homo sapiens
agaaaacgcacttctgtgatgttatctaagtgctcatgtggctcacaacacgaagattgtatatcaataacaatgccagggagtgaactcagtacagcacattcccgatggtgtcctctgagattttccaccaaagcactgagcattgcaggagcagagatgacaaaaattcatttattcakctattaacaattcatgcatcaaaaacattggtgctttggcgatataaagactactgctgtgggttctgtgaaagaggatggaggctgtgtattactgctccattttttttttttttagatggagtcttgctcagttgccaggctggagtgcagtggcacgatctcagctcactgcagcctccgcctccggggttcaagtgattctcctgccttagcctcccgagtagctgggactacaggtatgcaccacaaaacccagctaatttttgtatttttagtagagacggggtttcatcatgttggccaggatg

SEQ ID NO: 201917 - DNA, 462 bp, Homo sapiens
gatgttatctaagtgctcatgtggctcacaacacgaagattgtatatcaataacaatgccagggagtgaactcagtacagcacattcccgatggtgtcctctgagattttccaccaaagcactgagcattgcaggagcagagatgacaaaaattcatttattcagctattaacaattcatgcatcaaaaacattggtgctttggygatataaagactactgctgtgggttctgtgaaagaggatggaggctgtgtattactgctccattttttttttttttagatggagtcttgctcagttgccaggctggagtgcagtggcacgatctcagctcactgcagcctccgcctccggggttcaagtgattctcctgccttagcctcccgagtagctgggactacaggtatgcaccacaaaacccagctaatttttgtatttttagtagagacggggtttcatca

SEQ ID NO: 201918 - DNA, 405 bp, Homo sapiens
ttgttgatggttaagtgtgagacaaacagaaaagtcaaaaataacatcaagattttgacttaaataatgagaaaaatgtactttccatttgctgagattatgaggagtgtagaattggggggtggtggcatggaaaagggtgggaataaagtgttcarctttcaaaggtgaaatttttttttctatctatctatctatctatctatctatctaatctaattgggatacaagtggtttttcgttacatggatgaattgcatactggtgaagtctatattttagtgcgctggttccctgactagtatacattacacctaatatgtagttttttatccctcataccccacccatcctccccgcttctgagtctccaaagtccattataccactcacaggttaaatttg

SEQ ID NO: 201919 - DNA, 470 bp, Homo sapiens
ttgagcctaatctttaaagaggaggggaagtcaaagaacagtaaaggctagcactagaaggcaacttggcaattctttctctagtccaacctcttcaatttacagatatagacactgaggccccaagattattcaagactgacatttattgagcaattastatatacccctttaagtgcttcacatgtactatctgattttatcttcacagtgacactattaggtgggcatttatttttatccccattttgtatatgaggaactgaatcttacaggagttacaagccactttgctgtatgcaagggcatagagatagaagttaacagtgatgttaacctttgcagattaacctcagatgccccaaaaccatgctattaaatgatttatctaaggtcatgaagaaagtacacttaagatctggaactagattaaaggattactgatttttttatacaatttcttttctatt

SEQ ID NO: 201920 - DNA, 470 bp, Homo sapiens
ttgagcctaatctttaaagaggaggggaagtcaaagaacagtaaaggctagcactagaaggcaacttggcaattctttctctagtccaacctcttcaatttacagatatagacactgaggccccaagattattcaagactgacatttattgagcaattactatatacccctttaagtgcttcacatgtactatctgattttatsttcacagtgacactattaggtgggcatttatttttatccccattttgtatatgaggaactgaatcttacaggagttacaagccactttgctgtatgcaagggcatagagatagaagttaacagtgatgttaacctttgcagattaacctcagatgccccaaaaccatgctattaaatgatttatctaaggtcatgaagaaagtacacttaagatctggaactagattaaaggattactgatttttttatacaatttcttttctatt

SEQ ID NO: 201921 - DNA, 181 bp, Homo sapiens
agtagtgtgaggcaagaatcatccacatrtagagttaaacaatgaaattttccaagtatatacatgctgtgagaatcaataacctcttctcaaaccagcaaattggtttcaagtattcggttcactggttacatccaacagccacaataagaggccacctttggagtgaaagggaaggtga

SEQ ID NO: 201922 - DNA, 558 bp, Homo sapiens
tttgtccctgtatattttctttaaatcttagatatttgcctctacttgtttccagaaagactacaaaaaggcaaaataaataactgaattagaagcaaataagtatttgggaaaaacttggacatctaagtagattacttaatttgtaggattggtagtcatacaataatattattttctttttggatgattgaattaaaaacaagtacttcaggacttccaaatacagtgacagctaaacaaggttgaactagattgagttcaagggcaggccctgcacctgatttttctttataactcccatcaattggcatgctgtggaagcccatcatgatgttaatgaattttaatgaatgaatacaatgaagaaagtgttaatgtcttaagaagaataagtaaaacaactgacatgagaactgagaggacagatgccagactgagttgtgtggacagagactggctagttgttcaccaaacartatctcctttctcacctggaaatgcagttagacaatattcccggcatgccctgcatttaggtgtggaaatgtgatccgt

SEQ ID NO: 201923 - DNA, 543 bp, Homo sapiens
ttactgtggagtattttgtgcaagaaccatccataggaatttttaaaactctattggagacttttggactccaggcctacatgtatggagcttggaagttgctattccaccttaacaaacattaagctgaacaaactaaaacatcaaaaactcttcttaagtttgaaaaagaagtgagatcacaattgccacaaataaatcaaatacctggtaatacagctaacaagggaagtgaacgatctctacaaggaaaactacaaaccatggctcaaagaaatcagagatgacacaaacaaatgaaaaaatttctcgtgctcacggataggaagaatcaatattgttaaaatggccgtactgcccaaagcaatttatagattcaattctattcccattaaactaccattgacattcttcagagaactagaaaaaccttttttttgtttttgagacagagtctcactctgycacccaggctggagtgcagtagaacaatctcggctcactgcaacctccaccttctgggttcaagtgattcttgtgcct

SEQ ID NO: 201924 - DNA, 516 bp, Homo sapiens
ctaacattttttacctttgccaaagagcctggggcagtttggtgacaagcaatcacaacctcacttctatttctcaactgaaagaaagaccagaatcatctcacaggtgctttcccccatggcagggcactggtttaagctcaaggactaagaaagtttgcttccccttgattcatcattgcctcttgcatcacttattctctggagatatattcaaaggtctatttaagttggagagttgggtcatacaattttaggtggaaagactgaatcacagctttactccatgtgtcagccttgaccacttgattatatactgtgcttggacgtcacttcatctctcaaagccttagctgtgggaaaagcctgggtgattgctctgtgtattagaaactgaaaccccaccactaaatgctgaaaartggtccaggcaaaaggtgctgtggaaatctgaaagccattatcttttccacacttcctctctcttcaccctcattttgtttgggaatgcacatg

SEQ ID NO: 201925 - DNA, 567 bp, Homo sapiens
ccgggtacggtggctcacacctgtaatcccagcactttgagaggtggaggcggacagatcagctgaggtcaggagttcgaggtcaggagtttgagaccagcctggccaacatgattaaaccccatctctactaaaaatacaaatattagctgggcgtggtggtgcacacctgtaatcccagctactcgggaggctgaagcaggagaattgctagaacccgggaggcagaggttgcagtgagccgagattgcaccactgcactccagcctggagacagagtgagattttgtctcaaaaataaacaaataaagaaataaagtcccttagtcaactgattttcaacatggatgtcaaaataattcaatgagrgaaagaatattctttttaacaaattgttctggaacaagcagatatccacatgcaaaaagaatgaagttggatccctgcctcacaccaaaattaactaaaaattgatcaaagacctaaatatcaagacctaaaactataaaattcttacaagaaaaaataggcttaaatctttgtgactttagattaggtaatggtttc

SEQ ID NO: 201926 - DNA, 423 bp, Homo sapiens
gttccccagggccctgattccggtgaagtgggtgatttacacctgccactactttgcagccagttctggggaactgaggaattgccatcggcttcctggctcacaaccaggagcccacagtgagtacgtcagctaaagtcttcctgtgtgcccagcctgtgccaagctggtctgtgaaggagaaggggaaggaartcatgggggctctgagaccagccagggctccgacgcctgagctgagaggctgggaagagagtctggtgggtggagcagtcaggaaaggccccctgggagaaggacttgaatgccaagtgtgcacttggccttgaaggttggaggtgagtgcccaattctccagagcaaggctgtgactgtacccacctaagcgggggcttgcctttgcctcactgtacaaactttagc

SEQ ID NO: 201927 - DNA, 518 bp, Homo sapiens
ctttccatatccctacacttctctctataaaaaagactatttttcataatataacttttcttttagtattttatrtattgagactataaattggcagtcatatcaccaccattatcattagcattcatttcattcctatctaggtaagtgctgattcacaatatgatagaaggtgaaatatcttattctttcagaaaaaggcagaataatatcttcatgatcttgaaattggcaaaattttgttaaatggacacagaaagagttataagaaaaaaatggatgattaaaaacacactagaattaaaaatttcttttccccaaaatagagcattaaaaatgataagggaaaaggcaaggcacagagtataataatatgcttgtagctgaggatagacattctagaatagcactatacaaaagaactttctgcaatgtctgtaactgagctagctgtccactatggtagccactaattgtgcataaatattgattacttgacatgggactagtaagactga

SEQ ID NO: 201928 - DNA, 518 bp, Homo sapiens
ctttccatatccctacacttctctctataaaaaagactatttttcataatataacttttcttttagtattttatatattgagactataaattggcagtcatatcaccaccattatcattagcattcatttcattcctatctaggtaagtgctgattcacaatatgatagaaggtgaaatatcttattctttcagaaaaaggcagaataatatcttcatgatcttgaaattggcaaaattttgttaaatggacacagaaagagttataagaaaaaaatggatgattaaaaacrcactagaattaaaaatttcttttccccaaaatagagcattaaaaatgataagggaaaaggcaaggcacagagtataataatatgcttgtagctgaggatagacattctagaatagcactatacaaaagaactttctgcaatgtctgtaactgagctagctgtccactatggtagccactaattgtgcataaatattgattacttgacatgggactagtaagactga

SEQ ID NO: 201929 - DNA, 583 bp, Homo sapiens
atccatgtttgagtgtgaatttcagctctatgggtcttgtacttcctactgttgtgaccttggaaaatatggttgactgcccattgccttagtatccttatctgtaacatggcgataatagtagaatgaaccacttggggttattctgagaattacatttattaaataagcatgaagtttttagaatgttatctagcaaagagtgagcactcagtaagtgttagctattattgttatcatcatcatcataattataattttcaagtgatgcttttgactcactgttattgcctttttctgggactttgtgrtctcagtcttagactgttgagttctagattcttcaaaattatcttgccttcagtcattccccttcttaatttatgcttttctctgttaattgagtgatcctacacacttttaataaaatttgccatataatctgcttatattatttgcatattcctctacttgactgatatttataagaaggataatgtcttatatatctttttattgctaacccttggcatagagctaaaacttaagtttttgttaaacaacataataaatgaaagtttat

SEQ ID NO: 201930 - DNA, 530 bp, Homo sapiens
gtgttctcattgttcgccttctacttgtaagtgggaatgactagtttttaaaaccagatcaagatcaaatgaatcttttctaagacaccatttcttccactaggaagacttaattgctccatctttacagttaatattacacttcgtagttaagtgtatttcagcatattgcttaaaaagtgtttttattttgcattgtgtttatgtttttttccatccttgactagaatataaaatattaaagtcatgaattttgagtagctaaaaaaatacttgaatggttgaaacaattattcaatgaagtayaaattaaaaacaagtactagataaaaagaaagagaaaaatagtttttttctcattgaaaatattcaaggtactttccctctgggtagtcagttacatttataacacatattcttacactgttacatctttaaatacagaaatacaaagaggctctggggtttgagcttggccctaacttgacaagtgtcaggtcaattcattttagaatatagggagatcacgg

SEQ ID NO: 201931 - DNA, 507 bp, Homo sapiens
tggcagaaccaggatttgaagcatgagttttctcacaaataaagctcttgtttttttcaccctggctacctatccttttagttgagaatgtattcctttttgtcaattatcgggaccttaacagacataaagcgtcacaaagaagaacgttcctgtatatgattatgggtgtaaaaaggagtatcaataggtaaaagttattgcttttaaccagttccaatatcttcattcttagaaaatgaacaatagaatrtagctaggaaatgtctgaaccttgtctcaagggactaggaaagaaggaaatatagaatgatgattgataacatgtagttgtattcctgttcatatgtacattggatactacatgcttaataacatgtagctatgttagcaccttttaaaacattaaaaatctacagattgtggctttacatctagtttcagaatatagcatggtgtcataaagctgccttggtcattgttatctacttagtttagagtaaatga

SEQ ID NO: 201932 - DNA, 582 bp, Homo sapiens
ttgcccgctttcaatttatgatccacacaacaggcagagttatttatttaaaacatatgatagattatagcactcctctgctaacaaccctcagaataaaaaagtcgaagtccttagcaaaaagcctggttactcctctggtatcctctaacttctgtaccccttttaattaccaggatgtacttcttgctattcctggaactctgagaaggcttcaccattatggtcctattacttggtctttcttctgcctggaatgttcttccgtcttacatttccaaggttcaccctttttctagctccaggtctctgcttaaaggcacctaatcaaaaaggctttgcttaactatcttattcaaataacaagcctcttcacagcattactggatcatagtgggtgctccaaaatatttgaatgaatagtcaatatttcaaggaatagtctccatcttggaaatgagtaccttgtggcttaaattgtaggagctaaagygttaggaactaaagaagattttcaagttaatattgggatttatatccccataagataactaaggttttgaagtaaaaaagaattggatt

SEQ ID NO: 201933 - DNA, 454 bp, Homo sapiens
gataggatactaggaaaaaaaagttaatctttgttagatgcctgctatgacaacagtttttcatgcattattgattatcaaakaaagcctgtgaatggatattattatcccattatatatgccaagaactgaggcttacagaggttgtgacttgttcatggtaatatagcaaataagtggcagagcagggatttgtacccaagtatggagttaaggtttgaatattaaaaataatgaaaatatgtatattaaccttggaagaaatataaacagataataagtaaataacagagaatagaatagaatagaatagaaaagataaaagaacaaagaagtttttctggtctagcatttgtacaggcctactgaggaaaaattgtgtgaatcagtggaataatcgataattctgtttggtatttagttgaattatacaactaaggaatctttcagataa

SEQ ID NO: 201934 - DNA, 593 bp, Homo sapiens
aactgtatgaagttattatgatcattactacaattgggaaatttgaactatctcatctgtgatggttctttccatttcttattttttgatttgtacattgtcttttgccatttaatagtatcttaaatctgattttattttacttactctggcttcagagagactaagtttattttcaattcacatttaattttgagggtggtagagttgtcgtaagtattgtatttttaaatatgattatgtacatttcaccatttaggatcaaatgccataatgtatatgaaaatgctttcaaaagcctaaatcactctatatatgcaaaagattaaatcatgtattaggaacattgyagtttaaatctgtttgaaataatttgtttgaaattcacatcatccagcaatttgagagaactacatactcttttactatagctaaaacatagaacttgctttcattttacaaaataaaatttttggagaaggattaactaacaattttctacatagtgtaagattgttctgatattggcacctgaaggctgtttagaattttcctgccaaatgtgcagtttcttggattttttttatgtcatg

SEQ ID NO: 201935 - DNA, 453 bp, Homo sapiens
agtaataaacaaagttgaaaaatgaaaggcaaaattggctcaaactcacctggtttcattctgttagatgcctaaaactgagtggcactgtgcaatctttaaaacagaaaaaataaaaacaaaacaaaaacagagtttggctgtgggttagcctaaaatcatcaaacatttctcctgaggaggtttaagagaaacttttgccmctccatcatgcgctgtccttatgttgcaatgtttcatttatccccctctccatcttcaatttgagagatttcagaactggtcttccgtttttaaactgtcaataaggaataactctttgaccttttgaagtggaatacgttcctttttatttatgggtgtgattgccttgaaatgcatattttagtatttatgtggtatatatataaaacaataaaaaataaagtagaattttttcgaatagctattatt

SEQ ID NO: 201936 - DNA, 441 bp, Homo sapiens
ttggaaaaagtacttaaatcccgtaagtgtatcttcttagtgggaaaatatttatagcaattaaacatcttttgtaataaaattttaaatcaagctgatgatagaaatgagtaatgtcctaaacaaacattccctgacttcataatactttattctttattacttttgtgttccctttctttatttttgtttctaaaagaaatgtgttcaatttggctgtgagaattatgctttcatgcaagatcttttgttaaaagtctatttaggcagctgttaaatatcctttwtggttttagaagagaatgacttattttcatatatattcatatatgtggttaataggaatttgtgaactaaaacttaaaacaaaaaggtaagattttcttttcaaaaatttcacaaattaatagtgttcattttcattttcttcctctttaattt

SEQ ID NO: 201937 - DNA, 541 bp, Homo sapiens
acatgattcagattagcatttgtagctgtgtgaagatttcatagatttaaagttcttcacgtgacgtttccattggctttggctgaagtcactatttggcagaacagaatcaagattctgatgccagatatgtcaccgatgatcagttccatctcacctcgcagttctcagagttcaaatcaattcagcaaatatttattgagtgcttatggctgctgacttttctaagtcagagaaaagtaatgagatgttagtaaaatgtgacatgtctcgggttagacagccacagatatagaaagccactaycatcattgctattttaaaccaaaagtttaattagattgcattaataacaccaatagtgtacattgcttcgagttaccataatttccacactggattcttatttttagctacagaaatcactggatatgaactgaagtccccaaggcttgacttataggtaaaagaacaccatccctcatctagcatcagttatgtatatttctaacagctcagctgagggacagcattaagccat

SEQ ID NO: 201938 - DNA, 527 bp, Homo sapiens
  misc_feature (1)...(527): n = A,T,C or G
attcagcaattttgacacttagatgcaaattgaaagttattattttaacccctaaataacctagtcagttcaaagcattaataaaaaagcatttcttcttttaaaattttgtacttgtattaatttttttgttttgcaaagtctgctttttcaaaatccaaaaataggtcaaaggaaagatatcagactagcaaaagatctgaggtctcaatatatttgcaaacttttgggtgctttaaaaattttattataatgaggaaaatattaaatccacttattttcaatttttatttctttttaccagttaggtggcactgcacagatgtaagagatatttacatttaatgtratttaggggacaagagaatcatcagcaatgctagctggtgtgaaattccctccaatagagttagctcttaaagtattgtatctgggagtcccaacagttgtataagggaagaacataaatttattaacactaattttattgggatcaaacactnataancnnagtgctacactaantg

SEQ ID NO: 201939 - DNA, 527 bp, Homo sapiens
  misc_feature (1)...(527): n = A,T,C or G
attcagcaattttgacacttagatgcaaattgaaagttattattttaacccctaaataacctagtcagttcaaagcattaataaaaaagcatttcttcttttaaaattttgtacttgtattaatttttttgttttgcaaagtctgctttttcaaaatccaaaaataggtcaaaggaaagatatcagactagcaaaagatctgaggtctcaatatatttgcaaacttttgggtgctttaaaaattttattataatgaggaaaatattaaatccacttattttcaatttttatttctttttaccagttaggtggcactgcacagatgtaagagatatttacatttaatgtgatttaggggacaagagaatcatcagcaatgctagctggtgtgaaattccctccaatagagttagctcttaaagyattgtatctgggagtcccaacagttgtataagggaagaacataaatttattaacactaattttattgggatcaaacactnataancnnagtgctacactaantg

SEQ ID NO: 201940 - DNA, 537 bp, Homo sapiens
aggaaaaaatgagctgctactacaagttaagtgactttggaatttggacaacattgagggttactgccctaatttttaaagttttttaatgctatttaaaattaaacaaatcaatgcctgtttaacatttctaatagttcttcatacgtactaagagcccaatttaattatattcccaatagagttgttaaattatgaataagcacaatttagtttgtaaactacataacgcagtgcttgggaacatactgtatcctcgaaactgctagtttcaattcacttataggcccttctaagttgagagtatcagtgctactcggctatgctttttggatgccttcctgtaggaactgaaccttttgtgcaccacaagtggctgggcctmagttatgggcagatgagtgagtctgaaggttgcaggttatgttaagcatagtggggggcagggttagagggttgtgaggggaagagctctatagaggaagacagaaatggcaaaatgtacttgatagcctcaatttgttcttacacacatct

SEQ ID NO: 201941 - DNA, 581 bp, Homo sapiens
tataattcaatccaaacctaaagacctgcttacacttcctccattgttctattcaggtggttcttcaaaggattggataatgcacacccacattggcaagggaattttctttactaggtctattgattcaaatgctaacctcttccagaaacaccttcacagggacattcagaaataatgttttaccagctatctcggtaccccttaacccggtgaagttgacacatataattaaacatcataatccttttatttgattgaacagtaatgtccattctttagaaagagaaactggagactgttgttaagagtgcactgtagaggcttcagtgacaagtgtggttactttgyccctttagaattacataacagtgaaccacagctctgcaaagagtttaaccccatcctgagaaggctgcatatgtgtatttggtttcacagtatttatagctctgtagttgcttctagcttttgaatcccctggaaatctccatcaaacttgtgtcttaaaccacatgagaattcttttctctctgtttcatgctaagccatgtttctatattaaattgggatggtcctac

SEQ ID NO: 201942 - DNA, 584 bp, Homo sapiens
agtggctgaagccaaggagccaagcggtctcgctcagcatgtcccactcccctggaacccagcaagctaagaaccactcacttgaaattctcactgacagcacagcagtctggagttgacctgggactattggcttggtcgggggagggatgactgacattactgtggctttagtagacagttttcccctgacagtgctaaggagactgggaggttccgactttgcagtgcagcaaagcagctgtggccagactgtttctttagatttctcctcactgggcaaagtatctctgcaggaaatccagcagctctagtcaygtgcttacagacaaaactctcatctccctgggacagagcatctggcttgtggcagcggcggttggcatcacagcttcagcagagttaatctttcctgcctgccggctctgaaaagagcggccgattctgacaaaggggattctcccagcacagcgcaccagttctgctaagggacagactgccttcttaagtgggttcctgacccctgtgcctcctgactgggagagaactcccaacaggggtggacagacacctcatacaggaga

SEQ ID NO: 201943 - DNA, 584 bp, Homo sapiens
agtggctgaagccaaggagccaagcggtctcgctcagcatgtcccactcccctggaacccagcaagctaagaaccactcacttgaaattctcactgacagcacagcagtctggagttgacctgggactattggcttggtcgggggagggatgactgacattactgtggctttagtagacagttttcccctgacagtgctaaggagactgggaggttccgactttgcagtgcagcaaagcagctgtggccagactgtttctttagatttctcctcactgggcaaagtatctctgcaggaaatccagcagctctagtcacgtgcttacagacaaaactctcatctccctgggacagagcatctggcttgtggcagsggcggttggcatcacagcttcagcagagttaatctttcctgcctgccggctctgaaaagagcggccgattctgacaaaggggattctcccagcacagcgcaccagttctgctaagggacagactgccttcttaagtgggttcctgacccctgtgcctcctgactgggagagaactcccaacaggggtggacagacacctcatacaggaga

SEQ ID NO: 201944 - DNA, 584 bp, Homo sapiens
agtggctgaagccaaggagccaagcggtctcgctcagcatgtcccactcccctggaacccagcaagctaagaaccactcacttgaaattctcactgacagcacagcagtctggagttgacctgggactattggcttggtcgggggagggatgactgacattactgtggctttagtagacagttttcccctgacagtgctaaggagactgggaggttccgactttgcagtgcagcaaagcagctgtggccagactgtttctttagatttctcctcactgggcaaagtatctctgcaggaaatccagcagctctagtcacgtgcttacagacaaaactctcatctccctgggacagagcatctggcttgtggcagcggcggttggcatcacagcttcagcagagttaatctttcctgcctrccggctctgaaaagagcggccgattctgacaaaggggattctcccagcacagcgcaccagttctgctaagggacagactgccttcttaagtgggttcctgacccctgtgcctcctgactgggagagaactcccaacaggggtggacagacacctcatacaggaga

SEQ ID NO: 201945 - DNA, 592 bp, Homo sapiens
tgagctccttgaaagcacaatctatagcacaaagtcacttcatggcataaactgcacattaattaccataataatgagctaattaacaaattaatgtataaattagattacaaattgactagctcttttttaaaaaaaaaataagctttttcctttttcaaaaataagtcagcattttgatataagaataatataatatggactagagggagagggcacttaagttcaaatacatttaaatagatagatacaaaaataagatagatggtagacacataaaagaaaagggaagacttttgcttacggtagaaagctgagtgccaactaatrtatatggataaagtgctagcatttcaaaatcaccattttacactcatcactgggagaaaaaaaaaactgtatcaggcaagaatcctcaaaggatgctaaatctaggtgaaaattatcataaacagggtatttttatgatcctaaggaatgtcctcaccagctatttattagttgcaaaggaagaaaacagcaatcatacgatgggggaaactggaaaataccttgaataggtagtcaaaattaatatgactaatgagaattt

SEQ ID NO: 201946 - DNA, 429 bp, Homo sapiens
acaggtggtcctgatatggtactgctcacagaggctggatttactgcgcgggagcagagctggccaaaggagaactggcagatcttggcaactcttgagttatggtctggaaagggatgggctaaatctaatcttatgcttttgccttctgtgtaacagagtccttcaaagagaaagaaaaaacaaaacaaaacaaaagataaaggttgccataaaatttatatatatatatatatatatatatacacacacacacacacacacatatgtatctttggtttggtgcaamgtaaacttcagttgatgaatgtggagcttgagaaggaactttgttacaggaaatctaacagtggattgagtgctcaacttactctgaattctataattatatgttctttataatcctcacaacatactataaaatagaaa

SEQ ID NO: 201947 - DNA, 435 bp, Homo sapiens
aattgtgtgaaactttttatatatcaacacaattccacttatttctctcagaagctaaactgctttggtctggatatttgttttagtgtgacttactgtctaaagatatattagtttccctacattgactaattgccatttctagcratgcatcctgagaaaaatgttttcacaatattcagcaaacatgcactgatttctccttctgaacttccttgtaaacaacttatcaagacttccaaattcagactgtcattaatagagtaaaaacagtgtagtaattttttaaactgctgatctagagtaaacaccaaacataaacacacgtgcctttctctgtgtctgcaaacgtacagtatatacccaaacgtgtaatccaaattataattattaccaaaataaccagaaaatacatattagttttccccgaattct

SEQ ID NO: 201948 - DNA, 551 bp, Homo sapiens
cttgcaccctccaaagccatggcttgcactctgcattggcccctttcagccatggctggagtgactgggatgcagggcaccaaatccctaggctgaacacaccatggtgatcctgggcctggcccacgaaaccactttttcctactaggcctccagacctgtaatgggaggggctgtcacaaagaactctgacatgccttggagagattttccccgttgtcttggggattaacattaggctcctcattacttatgcaaatttctgcagctggcttgaatttctcctcagaaaatgggattttcttttgtatggcgttgttaggctgcaaattttccaaamttttatgctctgtttcctgtttaaaacagaatgcctttaacagtacccaagtcacctcttgaatgctttgatgcttagaaatttcttccaccagaaaccctaaatcatctctctcaagttcaaagtaccaaatctcaagggcaggggcaaaatgtggccaatgtctttgctaaaacataacaagtcacctttgttccatttgccagcaagt

SEQ ID NO: 201949 - DNA, 568 bp, Homo sapiens
aggaatatgcaacagaaaccatacgtggcgctcaaaaccaaaaatatttactatctaatccttcccttatcaaaccgtttgcccacctctgccctagatcagtggtgtttgttttttttgagacggagttttcactgttgtcacccaggctggagtgcaatagcgcgatctcagctcaccgcaacctccgcctcccaggttcaagcgattctcctgcctcagcctcccgagtagctgggattacaggcatgcgccaccacgcccggctaattttgtatttttagtagagacgaggtttctccatgttggtcaggctggtctcaaactcctgacctcaggtgatccgcccccctcggcctyccaaagtgctgggattacagtcgtgagctgccgcgcccggcctatatcagtggtttttaaagtgtggctcctagagcagcagtagcaccatcagctgagaacttgttagaagtgcaaattctcgggcctctgttgaatcagaaacttagggagtggggcccaactatctgttttaacaagccctacaggtgatttcggtgcacattaa

SEQ ID NO: 201950 - DNA, 540 bp, Homo sapiens
catactctttctcctatgtagagaaatatgagtcagagtatctgttgcgaactacagggactgcaagaatttttttttagtaacaaaggaacatagtaatacagtccctgtgaatagctccacttgcacaactgtctactaaacaccctgacaagcctttgactaaactgcccagccagggcagttccttgttctaaggaaatgaaagcctcaatttgggaaagttataatcagaagctactaactgaaaaatatcagtactatatatatatataaaaaagaaagattccaaggattaatatactcacttttaagaattaaactagctgagataataaggacaaggtggagtggggagattaaagatagaaagaacagggcagctcattactataacagataaaataaggtcaaagaaggcattaatgtgatggcagtgggcaaagatttgaagggataagggagaaggtaagggaataacggaaagacctraatttaagaggcttggggtcctaaaaaataagacatctggaacagtca

SEQ ID NO: 201951 - DNA, 358 bp, Homo sapiens
taataattctcaagagcctatcttcatgtcaacctgctatgctttttaaagcatcaggaaatgacctggaaaactaaaccacagcacaaatgctaagatattttcttaaacagatgacagaaaataccctaatgtgaaatgtgggaatatatatagatatatatacacacacacacatagagagagagagtacaagcatgtgcctgactttgactaattttagawtcatgaataagacatcttcaaatgaaagagtaaaactaattgtcatatgagtttagctgaagcttttttagtatacttctcagatattggccaagtaaagaactctaatgactggtaaaactcacaagttaca

SEQ ID NO: 201952 - DNA, 601 bp, Homo sapiens
cagaaacctcatcttactgatctttattttcccaggattcagtacagtgagcggcatacagaaaattctctgatctgaaggaggaatggtgctcaattaagacatttgtcttctttcagattagcagggtggagatacttggtgttaagtcactaaagttttcataactttgtttcctctaaatgagcaaaaggtctctgacttgttttcagtgcagttgacccactaactggtatgtcaytgatgtttcaggctcggtgtacaacaaaaaacactcctgtgttttcttcgtcagttcctatgagaaattctacagaggatcatagcacccacacaaagccaaaataggagaaatccaagataagtcatgtcatagtattattattacttttgaaaattatttcattttctaggaatagagcctctgaccccagagaatattgtggtctgtctcaaaggaggccacccagaaaaccatacacagtaaaaacaaaacataaaatatagaaagccttctgcagaggtgagaggtgatatttcacacttttttttctcacctgataaatgatagggcacactgctaaatctcctttcttcattt

SEQ ID NO: 201953 - DNA, 617 bp, Homo sapiens
tatttctaaaaccaaaatatactgcatcttcctctgtgagaagaaaactagccattttattcaagggtatttatgtccaactacatataattttattgcaaaactgtcctgttttcagaaacaagataatcataataagctattgagtctgataatgagcatatgagctaacacatacaattgagaaccactggatcagtaagtaataaccattatacagtagtcccctgttatgcatgrgggatacgttctaagccccctagtggatgcctgacactgcagatactaccaaatcctatgtatactatgtttatttcctctacatacatacccctgataaaatttgatttataaattaggcatagtatgagattaacaacaactaataaaatagaatgtttgtaacaataaaagttaagtgaatatggtctctctcaaaatatcttattgtactataaatatcttattatactaacccttcttatgatgatgatatgaaatgataaaactagaacctcagttgaccacaggtaattgaaaccatggaaagtgaaaccacaaataagaaggactgctatatactttgttcagttatttttaaaataattcagctgtat

SEQ ID NO: 201954 - DNA, 509 bp, Homo sapiens
acattattgacagataagattgcagaatactttagtaagtattgttaattgaatgttgagagatcttagttttggtaagcctttgtttcctttaatttctgtagcctgtgcagcgtatatgtcagtatggtatgtatcttagaggattaaataaaaatgtaatgaacacccgaaccctacatttttttttaaataaaatatgtacacataaacttatagacctttttttagaatggtggagttggaaaagactttagagattatgtaaactcatctctatatttgctatatttgtaaatgatgaaacataatcaatattgattttttttcttaagttaataatatcaaagcagcccttatttatggtccaggtattgtactcagtgctttaccatataggagtaaaagttcattctgtgacttaatattctttcagttctattctcragtgcttccaagaaatgtttactgagtaaacgaatctcttaaacttttgtatgactgaatta

SEQ ID NO: 201955 - DNA, 638 bp, Homo sapiens
ttcagggcaagatctggtttcctcatccgtagataacaggtaacaagctttgtctcaatgaaacttgccacrcttgctatatcttcagcaggtgcatcaaatggttctcccagaactgctcctttgctgcaaagctttaaaaaatatagtactttcaacatcttaataatctttcatataatttatcttttaaataagcaaaacatgtgtatgttttatttatatatgttttgcttatgcttgcttatatgttttgcgtatatgttaaaagtatatatgatgctttttccaaactacaagtaaaatattaatattttgattataaattaaataaattgttcctgttcactattaagtgagtgactgtaatataaaataagggacacattgtactgtaaaatccttcctgtaaaatattttaaaagtatgataggttttaaaggagtgccagttgctaagaatgtctgttttaaaaataaagcacacaataaccaaagatattaacagaaagccaggcataaatcatattaaataccagtgcttttatgaaaacccagctgagcaatgatctagcacactatcaagtttgatttaatataataagaggtatcggaagtaaactcctaggagccattaac

SEQ ID NO: 201956 - DNA, 300 bp, Homo sapiens
tctttcttaagaaaataattcttaagctgcatctttcaccgctattattcctatctattaggctctctgatttttttcacctctttcaggrgagtgcttcaagattgttggctgtatcattcactttattttcattatttactttatagttcattttataagccaatgctagtgataataaatgcaaaaatttaaatactgctaacttagtatgtgggattctccccaaacatctggccctagagtctgtgcgtttaatcacgcaccagagccacacagtaccattcaatgaactaacta

SEQ ID NO: 201957 - DNA, 300 bp, Homo sapiens
tctttcttaagaaaataattcttaagctgcatctttcaccgctattattcctatctattaggctctctgatttttttcacctctttcaggagagtgctkcaagattgttggctgtatcattcactttattttcattatttactttatagttcattttataagccaatgctagtgataataaatgcaaaaatttaaatactgctaacttagtatgtgggattctccccaaacatctggccctagagtctgtgcgtttaatcacgcaccagagccacacagtaccattcaatgaactaacta

SEQ ID NO: 201958 - DNA, 582 bp, Homo sapiens
gaattccatgtttgtaagatgttcccaggagttgcctgaactcagttaaatagatatggaaagcagagttcatctcaattgctctcactttgcagtcaaacaaccaaaatgccacaacatctttttatctgtgtgaagatccactttgaacagtttttaaaaggtctttatcactctcttttttgcatatttccccctctactatttctgcaatgtgttttatctaaggtactcacacattacttcttcctactttttatttactccactgaaatgyctctgtggctcactttctgaccacacatgtttcctcgcagtatgaatgagagagaatgtaagagatgatagtaagtgtccttctgtttcacatttaaataaacaggttttaataaaggtcactagctacaaatgaagctagtaagttcagcattagcaggtaacagccatctgcaaaatagcctccattaagaggtggtgtattgatacatcttgaatccaattgaaagatcaatagaaggctagacacaatttcagaactagatttcagctagtaaaagaatgctagtggtgtgcttatacaga

SEQ ID NO: 201959 - DNA, 554 bp, Homo sapiens
tactaaaactattccaaaaaaatcaaggaggagggacttctctctaagttattctacaaaaccagcatcatcctgataccaaaatctggcaaagacacaatgaaaaaagaaaactacaggcacaaaatcaacaaaatactggcaaactgaatccagcagcacatcaaaaagttaattcaccataataaagtaagcttcattcctggggtacaaggttgattcaacataggtggatcaataaatgtgattcatcacrtaaacagaattaaacacaaaaaccatattatcatctaaatagacacagaaaaagcttccaataaaatccaacattcccttcatgacaaaaaccctcagcaaactaggcattgaagaaacatacctccaaataataaaagccatctatgacaaacctggagtcaacatcatacttatgagatcaggtgcattcagggtggtatggctgtagaccagccagcaacctactaaatgggcaaaagctggaagcattccccttaagaaaaggaagaaacaagtatgccagctcttattcaaca

SEQ ID NO: 201960 - DNA, 477 bp, Homo sapiens
ccattattacacaaagttctgttggtcagtactaaagaaagtaacctatgaaatataagaaatgtagtatttggccagactgagaatagacatttagtgaggagacttagaggccgtttgttcagaatcagtataaatttggattcaccatggtttaaagctaaatgggatctttaaaattttagatttacccctttgttttacagatgaagaaaactagagttccaagagattaagtgattctcttaagaccaaacaagtaattaatggcagagctaaaattagaacccaggtgcctgttctttctattgtaccatagtattagcctcccgttcccaattaggaacagcaaggaaaatttgaactaaaatttacctcatagggtcctagcaactgtagagtcaamtgcatcctccaaagaagaatttatccctaatatttttaatgtttatagtttgttcatggcagtcttatagc

SEQ ID NO: 201961 - DNA, 414 bp, Homo sapiens
tgtgctaaaagcagggtaattagtttggggagtatcttcttcactggtagttcaaaggctgtgttctaccttgcaatggacaactcactcagtatggctgtctttagtttgcaaacctgtgtgacaaaaatttagaggatgttggtccttaaatgaccatttttttcttctgagagttcactgatgcttttgaataaatgyccttctagtctaaaaggagaggtcatagtataacaaaatgcaaataaaaatataagcatatattgagtgtttactttactcaatacatgcttactttatgccaggcactattttaagtacttcttgtgtattaatgcatttaatcctcataacaactctctgaggtaaatattactatttctattttatatatgaggaaattgaatcacagag

SEQ ID NO: 201962 - DNA, 414 bp, Homo sapiens
tgtgctaaaagcagggtaattagtttggggagtatcttcttcactggtagttcaaaggctgtgttctaccttgcaatggacaactcactcagtatggctgtctttagtttgcaaacctgtgtgacaaaaatttagaggatgttggtccttaaatgaccatttttttcttctgagagttcactgatgcttttgaataaatgtccttctagtctaaaaggagaggtcatagtataacaaaatgcaaataaaaatataagcatatattgagtgtttactttactcaatacrtgcttactttatgccaggcactattttaagtacttcttgtgtattaatgcatttaatcctcataacaactctctgaggtaaatattactatttctattttatatatgaggaaattgaatcacagag

SEQ ID NO: 201963 - DNA, 414 bp, Homo sapiens
tgtgctaaaagcagggtaattagtttggggagtatcttcttcactggtagttcaaaggctgtgttctaccttgcaatggacaactcactcagtatggctgtctttagtttgcaaacctgtgtgacaaaaatttagaggatgttggtccttaaatgaccatttttttcttctgagagttcactgatgcttttgaataaatgtccttctagtctaaaaggagaggtcatagtataacaaaatgcaaataaaaatataagcatatattgagtgtttactttactcaatacatgcttactttatgccaggcactattttaagtacttctygtgtattaatgcatttaatcctcataacaactctctgaggtaaatattactatttctattttatatatgaggaaattgaatcacagag

SEQ ID NO: 201964 - DNA, 414 bp, Homo sapiens
tgtgctaaaagcagggtaattagtttggggagtatcttcttcactggtagttcaaaggctgtgttctaccttgcaatggacaactcactcagtatggctgtctttagtttgcaaacctgtgtgacaaaaatttagaggatgttggtccttaaatgaccatttttttcttctgagagttcactgatgcttttgaataaatgtccttctagtctaaaaggagaggtcatagtataacaaaatgcaaataaaaatataagcatatattgagtgtttactttactcaatacatgcttactttatgccaggcactattttaagtacttcttrtgtattaatgcatttaatcctcataacaactctctgaggtaaatattactatttctattttatatatgaggaaattgaatcacagag

SEQ ID NO: 201965 - DNA, 515 bp, Homo sapiens
gtatttttataatacacacccctgaaaatcccacattcagcattcatgattctcagcatttaggaacaaatcttaaaatatgtgaaactttgtatttttgctagataaaattgttaacaatatctgagcagttagctgttaaattagccaaccaatctcatgatttccatgtgawatctgaccttttatcattatctattttatttttatacccattaaatatcatgttaccttttaaagaaaataaagtcctaaagaaagtcatttgtgaattacttcattaatatttaagtgaagatgtctaataaaatatgtctactgattcacgaatcatgagttttagccggttttttgttttgtttttatttttgagacagggtcttgctctgtcacccagactggagtgcagtggtgtgatcatggctcactgcagcctcagccttccaggttcaagtgattctgccacctcagtatcacaagtaggttggtctagaggtgcatgccattatacccag

SEQ ID NO: 201966 - DNA, 439 bp, Homo sapiens
gtgttacctctacagcaaatgatttatgaagaaatttaaataaattatgaatagtgaccatctttaccaatcaattgttgatcagtaattatttgttataaatatctattgatggtcataattaataatttatatgattaatatataaatttaaataaaaaaagtgaatcactgagtatttaaatagattcatrtttctatgccagtaaaatgattaataatagtgttttagaactataacataaaggaggttttagatttcagatatgacatctagttgtacagatgattacatcaaaaatatctattgagagactactgtgagctaggcactattctggacactgagatatagagtagatagataggtagatagatagatagatatagatagatgctaaagacaaacagtaaaaaacttgaatatgtaaattattca

SEQ ID NO: 201967 - DNA, 649 bp, Homo sapiens
aattgcttttatagattacatagacatacatatatrcatatgtatatatattttgtcttttcatagtagttttacacttggcttatatgatgtaactttaatcacaggatgaattcttaagttgaaagtgataccaatattgtaaaacagcttcaagctccagagttgtgcatttgaaatatcaaatgtgattcataatttagtagacattgaatttttttacatttttcataagaaattgaatgagttttcctaaaagtagtacattgtggtatgttgtacagatggtatattatacattttgggaacattagtagatttttgtaaaaactaatttttttctacttaaagagaaaaaaggcaacttgggtaatttctgattcaaacgaggtgacatgaaacagttttttcctggcttctcctcactaaccaccatgatcatccctggaaatggtacaagagataatcaaaagaggactctgaaatgtggtaagaaaaaggcaagctgatttgggatctcaggactggacaaaaagcacagagacagggcatcttgggtcttacttctcaaagaaggcaatttcgatcctacattgcaacaaaatttgtttagaaacacatgtatttagtctctactcccagtacctga

SEQ ID NO: 201968 - DNA, 306 bp, Homo sapiens
tttttctttgctcaagtaataatcttcatctttaaggctgttatgtaagtacagctattccagatttccttgggtttcttatttatttatttatttatttatttatttatttatttatttgagaatgggtcttgctctgtcactcagactgaagcacagtgatgcaatctgggctccctgcaacctccatctcccaggctccagtgatccccacacctcagcctcccaagtagctgaaaygacaggcgcacaccaccatacatggctaatatttgtgtttttggtagagacggggtgttgacatgt

SEQ ID NO: 201969 - DNA, 306 bp, Homo sapiens
tttttctttgctcaagtaataatcttcatctttaaggctgttatgtaagtacagctattccagatttccttgggtttcttatttatttatttatttatttatttatttatttatttatttgagaatgggtcttgctctgtcactcagactgaagcacagtgatgcaatctgggctccctgcaacctccatctcccaggctccagtgatccccacacctcagcctcccaagtagctgaaacgacaggcgcacaccaccatacmtggctaatatttgtgtttttggtagagacggggtgttgacatgt

SEQ ID NO: 201970 - DNA, 484 bp, Homo sapiens
tctcaaaaaataaaaaaagatattatatcttaaggtcaatgaatttcaacacttgtctattacattatgaaaaaaaaactctagcctcatttatttccatttaaagtccaatttactcaataggaatttactgggttgggggaaagtaatactgctacagagcagaaagtttgtaaaaaacaaaatgacccactsggcgcggtggctcacgcccgtaatcccaccgctttgggaggccgaggcgggtgcatcacttgaggtcaggagtttcagaccagcctacccaacatggcggaaccccgtctctactaaaaatgcaaaaattagcccagcgtggtggcgcgtgcccttagtcccagctactcaggaggctgaggcaaggagaatggcttgaacccgggaggcggaggttgcagtgatctaagatagcgccaccgcactccagcctgggtgacagagtgagtatctgtctcaaaaaaaaaat

SEQ ID NO: 201971 - DNA, 515 bp, Homo sapiens
gatctgctgagtttcttcctttgtatatatatccagaagtcatattgctggatccagttatttttgacaaagacattaagaacataaattgaagaaaggacagattatttaataatgatgctggggaaaccagatacccttatgcagaagaaagaaactaaaccctgtctcttaccatatacaaaacccaaataagaatggattaaatactkaaatataaaacctgaaatatgaagctacaagaagataattttgcagaaacacccaggacatgggtctagacatagatttgttgagtaagacctaaaaagcacaggcaacctaagcaaaaaagaaatgaactcatatcaagttaaaaagactttgcacagtaaagaaaaaaaaaagaaacagaataaagagacaaactacagaatgggagaaaatatttgcaaactatgtatctgatgaataattaataaccagactacataatatataactacatatgtatgctacatacgtagcaaaaatca

SEQ ID NO: 201972 - DNA, 511 bp, Homo sapiens
agaagtcatattgctggatccagttatttttgacaaagacattaagaacataaattgaagaaaggacagattatttaataatgatgctggggaaaccagatacccttatgcagaagaaagaaactaaaccctgtctcttaccatatacaaaacccaaataagaatggattaaatacttaaatataaaaccygaaatatgaagctacaagaagataattttgcagaaacacccaggacatgggtctagacatagatttgttgagtaagacctaaaaagcacaggcaacctaagcaaaaaagaaatgaactcatatcaagttaaaaagactttgcacagtaaagaaaaaaaaaagaaacagaataaagagacaaactacagaatgggagaaaatatttgcaaactatgtatctgatgaataattaataaccagactacataatatataactacatatgtatgctacatacgtagcaaaaatcaaataacccaattcaataatggcaaaagatc

SEQ ID NO: 201973 - DNA, 625 bp, Homo sapiens
ggaaagaagttagattctagtttgttaggtgagacacagaggaggcaacttaagatatatgaaatagcagaagcaatgtattacttataaatcccagaaagaagagaacagcacaccttgcagggccaatgggaaatggggagttgtctgggacatgtgcccaagcagcaggtggaragcaagaaagacagtgagggacttgtaggtcaaagcctttatggagtccatggtgttaccaaggtaggtttcccatggggagttataatttgtgggtttagagcaagcaggcatgagttccatgggatcacgtgactgagaagtagtcatggtggcataactgtgcagtccatggggcatgtgggctcagcggtagaagtcaaacaggctgtatttagctgtctcataggaaaatggtcaccaggagacggttgtataaggtagatatctggattaaacacattgaagaaatgagagaagacaaaaaactggaactgtatcaaggataacaaagcccagcttctggtatgagcaagtttaacttataatcaaagtgaatgcgaaggcaccataaaattataagaaatcactacagagggctgggtgtggtggctcatgcctgtaattc

SEQ ID NO: 201974 - DNA, 555 bp, Homo sapiens
aattcattgtccatatcactataatcattttggtcaaagccattcaacaactctctaggaaggcccaactttcctacatattcctttcttctgaaccctccaagtctctaggrgttccaaacattcccatatttttctgtcttcttctgagtccagtaaactattccaacctctgcctgttaccaagttccaaaattgcttccacattttcagatattcttatagcagctccccactctatcagtactaatttattgttttagtctgtcctcatgctgctaatatagacatacctgagactgggtaattgataaaggaaagaggtttaattgtcttacagttgttcagcatggctgcagaagcctcaggaaactgacaatcatggcagaaggggaagcaaacacgtcctattttacatggcaacaggaaggagaattgcctagatgaaagggggtaaagccccttatacaaccatcagttcttgtgagaactcgctcactatcatgaaaacagcatgaggtaactgctcccatgattaaagctcttactgggttc

SEQ ID NO: 201975 - DNA, 495 bp, Homo sapiens
ttttgtaaatatgctgactacatcttatttctcttccgtatttctcttcaactaaatgtatggacacactygtatatatatctgatctaatcaggcttaattgtcaacacagatgttctttagctttattattttataatgtggtttcaagaccattgatgtctagatacagattagtgtgttaatgacctttaaaaattgcaataacttaaatttaaaatattactgtaatgtaaaatcactgacacaaaatgtagtggaaatattacttttagtatttagaaaaaaatgaaactgtatggtggcttaaatatttttaagaggccaggcatggtggctcatgcctgtaatcccagcacttgtggggaagccaaggcaggcggatcacttgaggtcaggagttcaagaccagcctggccaacatggtgaaactcagtctctactaagaaaacaaatattatctgggcgtggtggcatgggcctgtaatccaccta

SEQ ID NO: 201976 - DNA, 470 bp, Homo sapiens
cctctgttggtctgaactactgtcatttgtcaggtagacatcccccttaacctgctatctagtctgcctgtacactttcagtctcccaatctccagcacaattctagatggccccaggaattatctttcctttcatctaaattaaaacatatgcatcctcackgcatgatacaccatctcattttcagggaagactttcctatcctccttgactgagtcaatttcacctaaaagaggtttcactgcattatgagcctctttaacataacactttaaatttcttactagtattagtctcttccattatactataatctcaatattggcaaaggccagttatggactcaattctgcacagtaattgggccttaaaattatttttaccctcattgagcttattgtaaagagaaaaagtgactagaccagggctttgcacttagttagctattactaactatatatatatatat

SEQ ID NO: 201977 - DNA, 648 bp, Homo sapiens
attcagaaaatgaaaattaaatgacttaaattaaatcacctttaaaatgcataggaacatcaaatacaaacagaagaaaataattaaaacaaccatcatatagtaagtaatattgacaattttttataatttatttaaaaaaattgtaagtgtactcacaattaaatacattattaatatttgaatacaatatctattactaggaaattaccctatgatattataatgcatatgacttgattatacattcattataaaatgtttagatattttgaatacactrctgagcaccagtaaagttcttcaaatttaaatttgctttatattttcaaaacatataggatctccctctcatagaggtaaaagtttcccaaaataatgcagctagtcaagaaattagcaagaatttatgcttacatttgtcaaatttcagtatttattattttcttcattttgtgacatcatgttttatttaaagcaataattcaataaatcaagtagcctatattattacaatcattttggatattaaaaattttaaaaactaaacatttaatattatgtaaatgctgcataaaaattaaaacagtaaaatcactgttaaaattatatcctgtgcacacattatagaaatattcaaattgttta

SEQ ID NO: 201978 - DNA, 577 bp, Homo sapiens
agtctcaaaaaagaaaaacaaaacactatatatatacatatatgtgtgtgtgtgtgtgtgtgcatatatatatgtatgtatatataaatatatatatatatattagattgaaccagggaaaaaattgaaaccctgaacagatcaataatgaattccaaaattgaatcagtaataaaaaaaataccaaccagaaaaagctctggaccacagggattcacagttgaattcaaccagatgcatacagaagaactgacacctaccctactgaaactattccaaaaaattgaggagtgggtattcctaatcatcctgaggccagcatctttcaaataccaaaacctggccragacacaatgaaaaaataaaaaaaaaaacttcaggccaatattcctgatgaatatagatgcaaaaattctcaaagaaagtccaccacaccaaatccagcagcacatcaaaaaggtaatccactacaatcaagtagtctttattcctgggatgcaaggtaggtgcaacatacataaatcaagaaatgtgatttatcacataaagagaactaaaaacacaaccaatatgatta

SEQ ID NO: 201979 - DNA, 577 bp, Homo sapiens
agtctcaaaaaagaaaaacaaaacactatatatatacatatatgtgtgtgtgtgtgtgtgtgcatatatatatgtatgtatatataaatatatatatatatattagattgaaccagggaaaaaattgaaaccctgaacagatcaataatgaattccaaaattgaatcagtaataaaaaaaataccaaccagaaaaagctctggaccacagggattcacagttgaattcaaccagatgcatacagaagaactgacacctaccctactgaaactattccaaaaaattgaggagtgggtattcctaatcatcctgaggccagcatctttcaaataccaaaacctggccgagacacaatgaaaaaataaaaaaaaaaacttcaggccaatattcctgatgaatatagatgcaaaaattctcaaagaaagtccaccacaccaaatccagcagcacatcaaaaaggtaatccactacaatcaagtagtctttattcctgggatgcaaggtaggtgcaacatacataaatcaagaaatgtgatttatcacataaagasaactaaaaacacaaccaatatgatta

SEQ ID NO: 201980 - DNA, 573 bp, Homo sapiens
ggtttgtaagaagaagaaaaataatgcttaacgataatttgaataaagaaagaataacatgataatctcagatctgagaatgtgttaaaagaagacatggctaaaccagaaactggtttgaacaagcaagattccccattcaatgctgtgaaagcttcactgtgagccttaatttccatattrtactgcagatgagatactggaattctcaagttataactgtctcaaatgattctcttaaaatattaatgaaaataaataatgacaaatgtttaaagaatgtaaaccataacgtattagtccattctcatgctgctgataaagacatatctgagactgggttatttataaagaaaaaggttaatggactcacagttccatgtggctggggaggactcacaatcatggcaaaatgggaaaggaacatcttacatggcagcagacaatagagagagaatttgtgcagggaaactcacctttataaaaccaacagatctcctgaaacttattcactatcacaagaacaggacaggaaagacctgcccccatgattcaattacctcctagtgggtc

SEQ ID NO: 201981 - DNA, 602 bp, Homo sapiens
tcatagatttttgaaaaattaggcagaaagagaaatatgactcaaattctgtttatgaaattatactcaacacacttaaagtatcaggaagcctaaaatccaaaaagttaaagtttaaaaagctgctgtgctccattaattcctgcaggtctgacaaaggtagcccagaaattccagataaatggaacaaatgattacttactaaaaatgcataggaaacaaaataactattcacataaccaaataaaatccttcccctaaaaactaaaaaaatcacgattttatttatatgcatacataagcaaggcctagaggaggatacacagcaatgaataaaaattggaagccaaaacaaacagaaaatcaaccctaaattttgaggctacagtgctacccagagcctcccaaaacccacataattaatattttattcctggtacacagttsaatatccttaggtccaccaatatcactatacattctatgcgatcaagaaattcactctaggcacatgaccaataagtactctagggccagcactgcccatgtaaaacagtaaacatagtgtcaagcaatgcaagcatgtatgtgaaatttagctc

SEQ ID NO: 201982 - DNA, 574 bp, Homo sapiens
acgtggctgaagactgagacttgagatgttcaaacatttaaagataaagaagaaccaacaaagaaaatggaggacagccagtggggtmggtaggaaacaagagagcagactggaagaattgaaaagaagactagggctgtagataattacaagattaacctaataagtctgggtgttatggactgaattgtgtcccttcaaaattcatatgtggaagccctaatccccgaagtgactgcagttggagattagggcatttagggaggtaattaaggttaaatgaggttatatgggtgggactataactcaacaggactgatgttcttaaaggaaaaggaagagatactagaggtatttccctctgtctctctgtagaggcaaggccacgtgaggacaaagcaagaaggtggacatatagaagccagggaaaaagcccttatcagatacccacccatatggcactttcacaatggactgagcctccagctctgtgagaagatgaatgtctgctgtttaagccacccagtctgtggtatcttgttatggaaacccaagctgactaatacttcaggct

SEQ ID NO: 201983 - DNA, 496 bp, Homo sapiens
agagagaaattcttgtgcatgtgtagctgaggatagacacaagaatgctcattgcagccctgttaacattaccaaagacctgtggatagctcaaatgcctgttatcagaggtgtgataaaaactcaatgagtattatagagctatcaaataaataaatatatccacatgcagcaatgtgggtgaatcacagcaatatggctkgtataatacctttattaaatataattcacaaattctaaaattcactgttttaaaatatacacttcagtattttaaaatatattcacagagatgtattatacaatcattactcctactttagaacattgacatcacccctcaaataaatcctatatcctttaatagttattcctgattccacatcccaactccagcctgagacaatcactaacctactttcagcttctatacatatgcctattttggacattttatatgaatcacgttatacaacatatgttcttttgtgactag

SEQ ID NO: 201984 - DNA, 495 bp, Homo sapiens
tgtcacatatattaatagattgtaaggtcactttcagctttatacctacatgacgttgtatcttattatttttcttaattatttaaatacataatttatactttaatatgtatttaacaaattaatatatatattaacatggcagaataagaccatatgtcctctgaaattataatatgctytctaaatatgttttgctcaatttgtatatatatatgcagttaccttcttttacataaaattattcttgtacacacgtgtctttttgttgcttttctctttaaaatgtaagtcaattgtacaccctgaaacttcagtaagcaaagaataaatcacttaatatttagtcaagagcttaaagttacatgaggagaactgagtatatatacttacattttaattacaaaatatgaaatatatggcaattgactatttacaaaatactacattaaaaattcttactttgctaatgcaagctatttggctttatatttt

SEQ ID NO: 201985 - DNA, 549 bp, Homo sapiens
taaaaacaagataaaatgaacaaacttatagaaaaatattattagtaaaggtatcccaagaattagaaaatctaaagttaycaataaccatacattttaaaattggtatttaatttcacaattagataccaatctcagatttcattgacaaattctactgatttttgaaaaatagatgtttctcaaattataaaattatcacaaaccaacaaaaaactaaaaaaccactaaatgtactgtaagaaataatactaggatgcagcaaagggaaaacctcataaatataaaggcaaaaatacttcgtataaatattacaaaatttatttagtgctggataaaaatacatagtaagcaactaggaattaaaatatcttgtaacattaaacaaatctattcatgtactttacattacaaaaagtatggaaaaaataaaattctacacacatttttgataaaatatcttagcaaactatgaagaaatggaaactttgattaaaatttttaactatagacttacaacaattatcttacttaacattaaacctacag

SEQ ID NO: 201986 - DNA, 549 bp, Homo sapiens
taaaaacaagataaaatgaacaaacttatagaaaaatattattagtaaaggtatcccaagaattagaaaatctaaagttatcaataaccatacattttaaaattggtatttaatttcacaattagataccartctcagatttcattgacaaattctactgatttttgaaaaatagatgtttctcaaattataaaattatcacaaaccaacaaaaaactaaaaaaccactaaatgtactgtaagaaataatactaggatgcagcaaagggaaaacctcataaatataaaggcaaaaatacttcgtataaatattacaaaatttatttagtgctggataaaaatacatagtaagcaactaggaattaaaatatcttgtaacattaaacaaatctattcatgtactttacattacaaaaagtatggaaaaaataaaattctacacacatttttgataaaatatcttagcaaactatgaagaaatggaaactttgattaaaatttttaactatagacttacaacaattatcttacttaacattaaacctacag

SEQ ID NO: 201987 - DNA, 406 bp, Homo sapiens
acaacatcaataaaaaaagaccccacacaaaaaccccatccaaacatcatcagcttcaaaaatcaaaggtagataaatccatgaagatgaggaaaaaccagtgcaaaacctctgaaaattccaaaaaccagaatgcctctyatcccccaaatgatcgcaacatctctccagcaagagtgcataaccgcatggagaatgagattgacagactgacagaagtaggcttcagaaggtggttaataacaaattcctctgaactaaaggagcatattctaactcaatgcaaggaaggtaagaaccttgagaaaaggttacaggaactgctaattagaataaccagtttagagaggagcataaatgacctgatggagctgaaaaacacagcaagagaacattgtgaagcata

SEQ ID NO: 201988 - DNA, 406 bp, Homo sapiens
acaacatcaataaaaaaagaccccacacaaaaaccccatccaaacatcatcagcttcaaaaatcaaaggtagataaatccatgaagatgaggaaaaaccagtgcaaaacctctgaaaattccaaaaaccagaatgcctcttatcccccaaatgatcgcaacatctctccagcaagagtgcawaaccgcatggagaatgagattgacagactgacagaagtaggcttcagaaggtggttaataacaaattcctctgaactaaaggagcatattctaactcaatgcaaggaaggtaagaaccttgagaaaaggttacaggaactgctaattagaataaccagtttagagaggagcataaatgacctgatggagctgaaaaacacagcaagagaacattgtgaagcata

SEQ ID NO: 201989 - DNA, 566 bp, Homo sapiens
atgtacaattgtttagctcaatatttcctacattgaaagagcttaacaacgtcaactattatttgatagaaaccatctgaatggaatttcttaaagtttcaaccactagatctgtaagcctaacttgtcatcttccttcctttcacaatacaagaaatgtacytatggagtcctccttcctgtcttacaaagcatagctattttcttctctaaccctaaccctaattccagcttaaactccagttctaatcatcagtttcctgcataatcaatcactcatgttctactgacatcttgtataatattcggtcatgtcaaagtaaggtgccaggaaaaggtcttagagttctgatagagtaatgcctaccctaaaaattcctggacaactggtgacatgagacatttaggactctcaggaagagcagatatgaaggtttgaaaggagaggagcttaggaacaggggtgagatatgagtagtatcaatggaatccatccatttctctcccctagatccattttgtagggcacattgacacttgataaagagtcggactgaggggaagtg

SEQ ID NO: 201990 - DNA, 551 bp, Homo sapiens
gggaagcaaggcatgtcttacatggtggcagaagaagtagaggaggggaattgccaaacacttttaaaccatcggatcactgtaatgagaacagcatgggggaaaccaccccatgattcaatcacctcccaccaggtcccttcctcaacacgcagggattacaattcaagatgagacatgggtggggacacagagccaaaccatatcaatatcctttcaggccttgctcasattcctcgctacttcatgaaaacttccctggcctctccagctcatagtggtctagcccttatactaacttctacagtaccagagaatgatgtaaatactgagactgtctcatacctaatcatgtaaaattatgctttttattacaaaagaaatgcctgtagagataatagggaaaatccataaaagttcaaggcaggaaatgagttgctatttccaccattgttaatattttggtgtatttccttccagtcttcttggttttgttatttgtgtaaatgtaaatatgtatgtaaacagttgcctttctgagcataactctt

SEQ ID NO: 201991 - DNA, 456 bp, Homo sapiens
tctcttgagcccaggagttcaaggttgcagtgcactataatcacacctgtgaatagccaccacactccagcctgggcaacatagtgagatcctgtttctaaaaatatagagagagagagaaaaagaggaacacagcacatagttcacagtggtagcttttgaagtacagtatatcttgccatctctccagggcaacagatccaamtctagctcatttttaaggagcaataaagaatgccccattgtatgaatataccatcatttattgcacctattgataagcatttatgttacttcctttttttgccactacaaatgatgctgcaataaatatcacagaatataaattctcaggtcctagagcttttattttgataaggtagtgtctatagactttagtgctgacttcggaaacttccatacgaaatgagaaacacagccataagctgagccaaa

SEQ ID NO: 201992 - DNA, 479 bp, Homo sapiens
atggggaaagttagtgcttgttgatgaagaggaaatcttagttgaagggttagatctactggccgaactatagggattctgaactcaaattacccatcaagtgtctccaaggcaagaatgtggtcattgggccacaaagccaaatgacacrtctttcacaggagagaagatggtgttgaatatatatggcgtgtttagcttgcagggtgattggagtcgggagacaggcagtagataaggataaagtgtgaaaaattcaaacaatctccaaagcaagcttgaaataatccttcctttggagacctggtcttcccagtcaagatgcaaacaaaagaaaatggcctgtctttatttggttcactggtccagaaaatgtgccctgggaagataaggccgagctgggtgtttgaggtgaatacaaggagccaagaggccttgttggggatttctttcacccaagaacttcctaaacctggagc

SEQ ID NO: 201993 - DNA, 479 bp, Homo sapiens
atggggaaagttagtgcttgttgatgaagaggaaatcttagttgaagggttagatctactggccgaactatagggattctgaactcaaattacccatcaagtgtctccaaggcaagaatgtggtcattgggccacaaagccaaatgacacgtctttcacaggagagaagatggtgttgaatatatatggcgtgtttagcttgcagggtgattggagtcgggagacaggcagtagataaggataaagtgtgaaaaattcaaacaatctccaragcaagcttgaaataatccttcctttggagacctggtcttcccagtcaagatgcaaacaaaagaaaatggcctgtctttatttggttcactggtccagaaaatgtgccctgggaagataaggccgagctgggtgtttgaggtgaatacaaggagccaagaggccttgttggggatttctttcacccaagaacttcctaaacctggagc

SEQ ID NO: 201994 - DNA, 397 bp, Homo sapiens
tggcaatcaaaaagataatatggtttccattacrtaaccctatcgaagtcattacaccataagatcagtcctgaggggaagtcgtctctaataaattccagtctaaacggacaaaaaataacttacatgaagtttttaattggagtcttccagaaattaagaggaacctgatttgtaaagtcctacacatacccaacatatttcataatcacttttctcagttttcttacactgtagtgtatgtagcctcttcctgcaaatttctggaaacatttattatgatcttttgttcagcaaatattcactttctttccacctcccactgtgggaagaagagactttgcagcccaccgatgttgggctaagccatgtgacttgctttggccaaaggaatatt

SEQ ID NO: 201995 - DNA, 554 bp, Homo sapiens
aggcattctcaattttaatgcttgcttagtgatgtgctggaccagcacttttccttttttgtttttatttgttgagatggagtctcactctgtctccaggctggagagcagtggcgcaatctcggctcactgcaatctccacctcctgggttcaagcgattctcctgcctcagcctcccaagtagctatgattacaggtgcacaccrccacacccagctcatgtttgtatttttagtagagacaggttttcaccatgttgaccaggctggtcttgaactcctgcccttgatcagcacatttcaatgcaactttctgggatgctatgaggcttctctatctgtgttgtccagtctggtagctcccagccatacagcaatagcacttgaaatgtgactagcacaactgaggaactgaattttagaagtatcatctttaaataatttgcatttaaatataattatcacatgagactagttgctaccatatggcacagtgaagcgctagacactacccacttaggacttgtgctagaccagtgctgtccaatggaaat

SEQ ID NO: 201996 - DNA, 640 bp, Homo sapiens
catagtgtgtgtctgctgttctttattgctgagtagtactccatttctctgaatatgctgaagtttgtttattcattctcctattacagatacttggattatttccactttgggaccattatgaacaaagctacaatgcacatcacacataagtctttgtgctcagatatgtattttcctttctcttgggtaaatactgaaaattggaaatgctgggtcacagagtatatgcatagttaattttataagaaactaactgtgrcatcataaaaaaatactatgtttggtttctacccccaggtttctgacacagagctcctaaaactcttggaattttctgaaagataggagtgctaggagcatctttaaaaaaaaaaattggtctttaacactggttcccaacacagatctgctaattcccttggaatttcctgagtgataggagcatctcttgttctaacgaggtgactcttggtggggctcctggatagcttcagaatgaggactggtcaccagaaacacaccaagccatgataagaggcttggaactttcaggtccatcccccgtcctccttggatggtagggaggataaaattgagttaataattggtcatgcctacatgaagcctctataaaaaa

SEQ ID NO: 201997 - DNA, 578 bp, Homo sapiens
ttctaaagttaaatcttacataactaggatacactctatttggtaatgatgaattatttctttctaaaatattcaatttgtctagtattaaattaagaaatgttgtatctaggccaggagggatattggtctataattcttttcttgtaatatccttagtatttaaggttatgtacaccttataagtcagaaagtgttccctctccactattttctgaaaaagtttgtgtgatattggcattatttcttcctkaaatgtttgatagaatttatcagtgaagtcatgtggccctgaatttttcctgtggcaaggcttttaattataaatttaagtttttaaacagatatagagttattcatattttatgcttgatattttgtgagcttcataatttgcatcttttaaagaatttgtcagttttatctaaatattgtaatttattgatatgagattgttaagaaatagtcttttgtcttttaataactgtagaaacctgcagtggtctctcatatttcattcttgatatttgtaatttgtgttctctttttttcttgatcagtgtagctagaggtctatc

SEQ ID NO: 201998 - DNA, 637 bp, Homo sapiens
gttttgttattactagtaggtagtgtgtgataaggataaaagtaaacaatacatgcaaagcaaattgttggaactcaatagatattagtcccattccctgcctctccaagacacaacataacacctcccattcacataatacacagttatttgttgttgttactgttgagtgttttgttgaatacttttagaaaaaagagtaaaaagtattagaaaccaaaccaatagtgaagatttaaatcaaacaaaggcaacstctgtagcaaggtctggggtgaatttatgacaggtatgactcattgtcttcagttttctatgcacaaaggaaatgagaactggcagttcttcaggatgaccctagcattctgcaagatcctcaatcatctctgaaaagggacactgtgttcctttttggttaggactgtttggttgcaagtaacataagctgcctcaagctggcttgcatatgcattttgaggtgtgtgtgtacacgtgcctgtgtgtggtgaaggggtagttcaaagtgccttatggagccaaaacttgtagaaactactcactgtatatctttttcatttttactttcccttacactagtttttgcttcttgtcccaaatggcagaaaaattgctgccc

SEQ ID NO: 201999 - DNA, 428 bp, Homo sapiens
ctaataattggtctgcccaaacttttgagctgtttgcactcagccaagccttaaagtacttgcagaaccaggaaggaaccatctatagcaattctaagtacacctttggagtggctcatacatttggaaaaatttggactgaatgaggtctcattaatagtaaaggtcaagaccttgttcacaaggagctaatcacccaagtactgaataatctttagttgccagaagaaatagstactgtccatgttcccggacaccagaaaagcctttcttttgaaagtccaggaaattacctagcagatcagataggcaagcaggctgctgtatcctctaaaatacctattttccacttaacttcctaccttcctcctcctaccataatccccattttatcttccactgaaaaataaaaactaataaaaatacat

SEQ ID NO: 202000 - DNA, 470 bp, Homo sapiens
gctaagtgttggctaaaggatgtcagatttttttctaaagagtgtggaaaggagagcatttaatatattttaaggcgttggatataggctagatcttatggtggtctttttggtgcagttgttcttgttatcggcaagataattctttgtcagtgtcatatctccatgaaagttcaaactgatgatagcagatagtaaaatatgtatattaaarcaatttatctgcactgtttatgatggtagaaatctagctatactttttataataaggtttcttgaaccacaaatcagaacacacattccagtcttcatgagttcatttgactgtgggaatgcttttaagaattctgttttcaggaacatgggaagtattgttttagaaatgaataccatcatacaatatgagtgcatttccattgaaagaaagaatcagaagactttcagtgatgctgatattccattgtgaccca

SEQ ID NO: 202001 - DNA, 595 bp, Homo sapiens
tacttacattttactggaagctgatggtaattcgactcccctatggccaggagtaaatgatttttaatggtgcttgtttgcgttaattactcagtaagaaagagaaaaaatagtgamgcgttattgaaaggtagcaatgcagcagggaagtaattgaggcaggagggaatatcattcagctcacaagaggatggatgggatgtcttcagtgtgagtatcaacctcttcagagattgctgggcagtcgagcaaagcccttcgtgttcattctgtgcaatgatgctccatatggctcttgctaggtggtaggccttctcctttttgggattccctgagatatgcttcccagattgcagcctccatctggtaactcttctcgcctcctccagctgtctcaggttttgtctccactctcatcactactgcctagtatgacacataaaatcttctctctttttcaagagaacattgtggctgggctaagcatgtcatttaaagacccagcaaagacattttttaaaataaagcagaacactattattaattacggtggtacaaagaacagttgggattgtcctggcctaactagaagaca

SEQ ID NO: 202002 - DNA, 595 bp, Homo sapiens
tacttacattttactggaagctgatggtaattcgactcccctatggccaggagtaaatgatttttaatggtgcttgtttgcgttaattactcagtaagaaagagaaaaaatagtgacgcgttattgaaaggtagcaatgcagcagggaagtaattgaggcaggagggaatatcattcagctcacaagaggatggatgggatgtcttcagtgtgagtatcaacctcttcagagattgctgggcagtcgagcaaagcccttcgtgttcattctgtgcaatgatsctccatatggctcttgctaggtggtaggccttctcctttttgggattccctgagatatgcttcccagattgcagcctccatctggtaactcttctcgcctcctccagctgtctcaggttttgtctccactctcatcactactgcctagtatgacacataaaatcttctctctttttcaagagaacattgtggctgggctaagcatgtcatttaaagacccagcaaagacattttttaaaataaagcagaacactattattaattacggtggtacaaagaacagttgggattgtcctggcctaactagaagaca

SEQ ID NO: 202003 - DNA, 465 bp, Homo sapiens
acaatgagtcttaacttattaggctaaacattgtttttcagacttatctatctgtatagaaattctgagttagggactaataattggaagacttttgtgtaatgcaagggaarctatatcaaacatgtttataaagttgagtattctttatattaatttgcaaaacatatttccattgaatacatttgatagcccaggtctcatttcaggcagtaaagatacctcaatgaacaaaacaaacttcatactccccatggatgaaggcacaaataaccaagtacttcaatataatatgtgacataaaacatttatcatatacatgacttacataaaataacgcatcacttgccaggcagtaataaatgctatccaaaaaagtaagataaaaataaaggaaagtagagttagttgaggacaggtgattttaaatgtaataatcatggacaccttctttaatgacaagct

SEQ ID NO: 202004 - DNA, 484 bp, Homo sapiens
tgttcaaatataatcaggttctgctgaatggattcctacttgtaaagactcttctatgcgatctcatcgagtgtccctgttctgatcattatgtctcgttctggttagatattggcatgactaacactaaaatctggttctcttactacatcccccaaccctggtcaaagcacaccagcagcaaaactcattgtcaccatcttcccaacaagcaatgtgtggtatctaagacaatgaacttaaccaatgaatgtggtgtgtgttctgatggctctactggtgagccattctcctgtctctctccatctcctcaggcctccctagtccctgagacacarcagtattaaaattaggctaatgaataacccctaagatagcatctaagtgctcaagcaacagaaaaattcccatatatcacagtttaaaagctagacataattaatcttagtgagaaggcacgtcagaagctgagataggctgaagg

SEQ ID NO: 202005 - DNA, 484 bp, Homo sapiens
tgttcaaatataatcaggttctgctgaatggattcctacttgtaaagactcttctatgcgatctcatcgagtgtccctgttctgatcattatgtctcgttctggttagatattggcatgactaacactaaaatctggttctcttactacatcccccaaccctggtcaaagcacaccagcagcaaaactcattgtcaccatcttcccaacaagcaatgtgtggtatctaagacaatgaacttaaccaatgaatgtggtgtgtgttctgatggctctactggtgagccattctcctgtctctctccatctcctcaggcctccctagtccctgagacacagcagtattaaaatyaggctaatgaataacccctaagatagcatctaagtgctcaagcaacagaaaaattcccatatatcacagtttaaaagctagacataattaatcttagtgagaaggcacgtcagaagctgagataggctgaagg

SEQ ID NO: 202006 - DNA, 540 bp, Homo sapiens
agggcctcactgaagttcttcttggccacctccagctcactcacaaaggtcgccattgctccattcgttgataattaaatctttggctgtgcagacatgtttagtttaattaggtcccatttatttatgtttttgttgaatttgctttggggttctcagtcaaattatttgcctaggccaatgtccagaaaagtttttcctaggaatttttttgagaatttttatggcttcaggtcttaaatttaacattttcatmcacattgagataatttttatatatggtgagagtcacgaatatagttcattcttccccttgtggctcttcaattttcccagcaccgtatcttgagggtgtcatttccccagtgtatgtttttgtctgctgtgtcaaagatcagttggttgtaaatatttggctttatttctgggttctctattctgctccattggtctaggtatttacttttataccagtgccatagtgttttggttagtatagccttgtagtataatttgaagttgggtaatttgatgcctcca

SEQ ID NO: 202007 - DNA, 587 bp, Homo sapiens
ttagccaggcactatgaacccagttctcgagggtggagacttcacatctgttcccacttctcctccagatctccaaatgtgaagagtctctcctccacctatcaatactttgggtcagctttctccatgtttgctcccatcttccctttsagagcctggcaaggtcaaaagaggaaagcctgtgggaagttcagaaaccccctagctctgtggtccccaggggcttcacattctcctgctaacccatattcaccctttagcaatttgttaaagttgttaaattactgaccttcctaatgggttttatatcatgaagcagtgtctgtacaagtaagtacctgctgaagccctgtttatacctgaaggcacctgtctctatccaggttttgaattaatggtttgccatgtgaccttaatacattcaataatttgtgattgtctagatttttcttattataaacagaaaaatgactctccttctctctatatttccaagttgaagctggaaatcttcattaatttttaattttcctttttattttcctaaagtacttaaaaagtgatgtaaagcctgataaatactgttt

SEQ ID NO: 202008 - DNA, 533 bp, Homo sapiens
tggtaaatgtataattcctcttctacacgtcttatttttgatatgcatcattcatttctgaaggaagtttgctgagatctttcaccatgaagttctctataatcttgtgtgtctttcaagtctgtcttacatctattcagatgacgttttaaagtcatctttatgtacaatgaactgaatctagttaaagtacacaaggcaatgagttttgacaaaygtacataaccatgaaaccaccacaatgaaaaatcagaacctttctaaatcaccgaaagattgttccttccatgtagaagttgatcgtatgctctgaatccttgacaaatgatttacttgtcaccatagatgagatctcgtttgctagggtttcatattaatggaaccacatagtgtgtactcttttttacttattcttcataatgattctgacattcattcatgtttttgcatgtatccatagttcctttgtattttgcggtggtactctattttgctaatgaattcacctgctgctggatgtttaggcagttacc

SEQ ID NO: 202009 - DNA, 635 bp, Homo sapiens
tcattcatgtttttgcatgtatccatagttcctttgtattttgcggtggtactctattttgctaatgaattcacctgctgctggatgtttaggcagttaccaagttgaggctattgtaaataaggtattgctgaaacaggataatctcccttattcccctcacagggtgtgtgacagggatgtgsttcacttcttcggtgccctgatgctcaaaccactatggggagcatgcagatgggcaggatgtgggagcgttttggtggctcccaccccatggcagtgtctagggttcggtgtttacagctcccgaagccctagtcagcgtgtgttacagtgtgttctttcagtttcaccatctgcaggtggctcaattagaccctccgccttatcacaaggatagagagctttctgtatcctgggttctggcccttgtgtaccagaaacataattggatcaaatgtgggcttgagaatgagtacaagatttttttctcatgtttgcttgtttgtttgtttttttggagatggagtcttgctctgtcaccaggttggaatgcagtggcacgatctcggcttactgcaacctctttctcccgggttcaagcaattctccctcagcctcgcaagtagctggga

SEQ ID NO: 202010 - DNA, 635 bp, Homo sapiens
tcattcatgtttttgcatgtatccatagttcctttgtattttgcggtggtactctattttgctaatgaattcacctgctgctggatgtttaggcagttaccaagttgaggctattgtaaataaggtattgctgaaacaggataatctcccttattcccctcacagggtgtgtgacagggatgtgcttcacttcttcggtgccctgatgctcaaaccactatggggagcatgcagatgggcaggatgtgggagcgttttggtggctccsaccccatggcagtgtctagggttcggtgtttacagctcccgaagccctagtcagcgtgtgttacagtgtgttctttcagtttcaccatctgcaggtggctcaattagaccctccgccttatcacaaggatagagagctttctgtatcctgggttctggcccttgtgtaccagaaacataattggatcaaatgtgggcttgagaatgagtacaagatttttttctcatgtttgcttgtttgtttgtttttttggagatggagtcttgctctgtcaccaggttggaatgcagtggcacgatctcggcttactgcaacctctttctcccgggttcaagcaattctccctcagcctcgcaagtagctggga

SEQ ID NO: 202011 - DNA, 635 bp, Homo sapiens
tcattcatgtttttgcatgtatccatagttcctttgtattttgcggtggtactctattttgctaatgaattcacctgctgctggatgtttaggcagttaccaagttgaggctattgtaaataaggtattgctgaaacaggataatctcccttattcccctcacagggtgtgtgacagggatgtgcttcacttcttcggtgccctgatgctcaaaccactatggggagcatgcagatgggcaggatgtgggagcgttttggtggctcccaccccatggcagtgtctagggttcggtgtttacagctcccgaagccctagtcagcgtgtgttacagtgtgttctttcagtttcaccatctgcaggtggctcaattagaccctccgccttatcacaaggatagagagctttctgtatcctgggttctggcccttgtgtaccagaaacataattggatcaaatgtgggcttgagaatragtacaagatttttttctcatgtttgcttgtttgtttgtttttttggagatggagtcttgctctgtcaccaggttggaatgcagtggcacgatctcggcttactgcaacctctttctcccgggttcaagcaattctccctcagcctcgcaagtagctggga

SEQ ID NO: 202012 - DNA, 635 bp, Homo sapiens
tcattcatgtttttgcatgtatccatagttcctttgtattttgcggtggtactctattttgctaatgaattcacctgctgctggatgtttaggcagttaccaagttgaggctattgtaaataaggtattgctgaaacaggataatctcccttattcccctcacagggtgtgtgacagggatgtgcttcacttcttcggtgccctgatgctcaaaccactatggggagcatgcagatgggcaggatgtgggagcgttttggtggctcccaccccatggcagtgtctagggttcggtgtttacagctcccgaagccctagtcagcgtgtgttacagtgtgttctttcagtttcaccatctgcaggtggctcaattagaccctccgccttatcacaaggatagagagctttctgtatcctgggttctggcccttgtgtaccagaaacataattggatcaaatgtgggcttgagaatgagtacaagatttttttctcatgtttgyttgtttgtttgtttttttggagatggagtcttgctctgtcaccaggttggaatgcagtggcacgatctcggcttactgcaacctctttctcccgggttcaagcaattctccctcagcctcgcaagtagctggga

SEQ ID NO: 202013 - DNA, 614 bp, Homo sapiens
ggtcaagcagatatctgatctgaatctcaaacacattcttaagacattcttaatgaaggatgaatgatggtggagtgtattagtttctacggaaccacagcccgttactaatgccagtttcttcacctaaagacttctgaatgtctctctatagtgatctactctgtgtgctcrcctgggcatgttcctgtaataagaacacactttcctgctatcacttttgaaagctgggttaattaatttactgaattctcaatgtggtaaactaggaattggaatcttcacaaaacggtttaagtgaatgcacaaaatcaataagtgagagcctaagagctgttaattgacaactgagctttctgttctcagctctctgctctaacatctatctttgtattaggcaatacgaagaaatatcattgcagattgcaagcatgttaggtgtgaagaaagaggcgagacactagtggaaagtacgaaactctattctcttaagcaacaagtttcaacttgtcatttccctgattcaactgttcaagtgaccttggttcaattctcggtattgacttgtgtggttgatcctagtatgtaggctctgactgagataaatgtttttc

SEQ ID NO: 202014 - DNA, 614 bp, Homo sapiens
ggtcaagcagatatctgatctgaatctcaaacacattcttaagacattcttaatgaaggatgaatgatggtggagtgtattagtttctacggaaccacagcccgttactaatgccagtttcttcacctaaagacttctgaatgtctctctatagtgatctactctgtgtgctcacctgggcatgttcctgtaataagaacacactttcctgctatcacttttgaaagctgggttaattaatttactgaattctcaatgtggtaaactaggaatkggaatcttcacaaaacggtttaagtgaatgcacaaaatcaataagtgagagcctaagagctgttaattgacaactgagctttctgttctcagctctctgctctaacatctatctttgtattaggcaatacgaagaaatatcattgcagattgcaagcatgttaggtgtgaagaaagaggcgagacactagtggaaagtacgaaactctattctcttaagcaacaagtttcaacttgtcatttccctgattcaactgttcaagtgaccttggttcaattctcggtattgacttgtgtggttgatcctagtatgtaggctctgactgagataaatgtttttc

SEQ ID NO: 202015 - DNA, 598 bp, Homo sapiens
gtgacccttgcttcacggaaaccaagtcccccacgtttctcacattttggaaactgaacaagtttccaggacggcactgtccctcctgggacaatgtcctgtggatcactgaggaacaggggtgggcttcctcataggrctgcacctctctaaaaccatacctctgtttcaccaaagagagtgttccctcgaattatcaacagtaccaacgcaacccagtgcagctctctattcttacctctacctctactgatcctgactccactttaggttgcttctatggcaggggagctaacttggccaaaagacctcatagggtcttttgaaatgctttttgttaatccctccccctctttatccccttccccctcttgtccgtttggaccttcttccgatcaaactgtcatcccttccatacccaatgataggaccacagtagacattgtagaagtaaatgatttaaaacaaagttcagcaacagagacaggatatcaagatgcaaatgcctggttggaatggattaaatattccatctgcacattaaacgaaagcaattgttatgcttgtgagcatggtaggccagagacccagatagtcc

SEQ ID NO: 202016 - DNA, 598 bp, Homo sapiens
gtgacccttgcttcacggaaaccaagtcccccacgtttctcacattttggaaactgaacaagtttccaggacggcactgtccctcctgggacaatgtcctgtggatcactgaggaacaggggtgggcttcctcataggactgcacctctctaaaaccatacctctgtttcaccaaagagagtgttccctcgaattatcaacagtaccaacgcaacccagtgcagctctctattcttacctctacctctactgatcctgactccactttaggttgcttctatggcaggggagctaacttggccaaaagacctcatagggtcttttgaaatgctttttrttaatccctccccctctttatccccttccccctcttgtccgtttggaccttcttccgatcaaactgtcatcccttccatacccaatgataggaccacagtagacattgtagaagtaaatgatttaaaacaaagttcagcaacagagacaggatatcaagatgcaaatgcctggttggaatggattaaatattccatctgcacattaaacgaaagcaattgttatgcttgtgagcatggtaggccagagacccagatagtcc

SEQ ID NO: 202017 - DNA, 598 bp, Homo sapiens
gtgacccttgcttcacggaaaccaagtcccccacgtttctcacattttggaaactgaacaagtttccaggacggcactgtccctcctgggacaatgtcctgtggatcactgaggaacaggggtgggcttcctcataggactgcacctctctaaaaccatacctctgtttcaccaaagagagtgttccctcgaattatcaacagtaccaacgcaacccagtgcagctctctattcttacctctacctctactgatcctgactccactttaggttgcttctatggcaggggagctaacttggccaaaagacctcatagggtcttttgaaatgctttttgttaatccctccccctctttatccccttccccctcttgtccgtttggaccttcttccgatcaaactgtcatcccttccatacccaatgataggaccacagtagacattgtagaagtaaatgatttaaaacaaagttcagcaacagagacaggatatcaagatgcaaatgcctggttggaatggattaaatattccatctgcacattaaacgaaagcaattgktatgcttgtgagcatggtaggccagagacccagatagtcc

SEQ ID NO: 202018 - DNA, 420 bp, Homo sapiens
caggctttactgatcagccctcatctgccatttgyttccccgtatatgtgccttcccacacttgccacactagatactcaatgtcttttcactttgtcttatctgtttcccaaaaatgcactgttcttttgctaagatattatatcaacccaagtcctaaccatgccttcgagttactcatctctgagagttcttatagatatatatggtgcacgtgttgttaaatttttctcttgattgagataggaggtgggtcttgactctggagctggggcttgacaccggaccagattgaggaatagctaaaacagggaagaggttaaagcaactctccctaagacacactcaccagcgtgccatgtgtttaccattcccatggcaacacccagaggttaccgcccatttccatggcactgacct

SEQ ID NO: 202019 - DNA, 619 bp, Homo sapiens
aagtaccggggtacttccaactgcgtagataagtttactctcagaggttaaattacacaagtgagttatgtgaatcaggctgccttcgtaasttacgtgaaatcaccattttctgaacacttccttttcccctcaagaccttgctcacgtgttaaacgttgcatggagtcactgcactgagacaatttggtcaccaagaaggtgctgaatctgttgggcccttatttttcattgattctgtattattataatattccctgtcaggcagaccagagtattaacgccgggagatgctacattgccttccttgcttttaacatatatttaactacccacgctgttgcttcaagatatctctctctgaagtggataagctcttcttataactgaaattaatttctctttctgttaaactccttctatcattttatgaacactaagctagacggttatcacacaaggatttaaactgtaattcagcacatattataggcttaaaactatagtttataatatcttccacatttgtctttccttttcctttttctctttcattctctgaaaacagaaaatgaatcttaactctgtatctgcattttttttggaaaatctgttaaaa

SEQ ID NO: 202020 - DNA, 595 bp, Homo sapiens
ttgtctgtgtacttacttttaccagtgagttttgtaccatcagacgatttctgaattttagcttggaaagtcatgggtttacattcccaactcaaatagtttaccacatctaataccaaatcttatcctagacaaattgacatctgtaatcgatagagctgggcatggcaaggcctctgattctcaccattcttaagacttttctttggcctaacatatggccttagtgaaaaatctagtcattctttcaaaactaaatgcttctgaatttgagtcttcctctggttgatttccagagccatggaattgttsttttttatctttgtttttttttgctttagtgctttataacaattatttcatagaaggtggtagagacattggaatattatatctatgatagaaggatgaacttaaagtaatgatttatgtgaaaggtgcaaatttaatgactaagtaataacactgaaaatgggaaaataaattacaactacaagcttgttgtggcataattttaaaaaagtgcttagtaagaaaggtgagaaaaacaagagtagttgggatgaaaaataaacattaaaatatttataatgtg

SEQ ID NO: 202021 - DNA, 541 bp, Homo sapiens
aatatttaggccacttaataagtgcaggcaagmaaagaacagggctggaatgagttgaaggaatcgtgtcctcacacttacctccaacaagaactcaggaaatatgtagggttagttggatgccactgcttatggactgacttatatgcactacacagtaaactgttacatcaaaaacttgtccaggggaagcctgaccgcttcctgtggacttctgaggaagttgatctagttgaagagctgaaagagtcataaccacctctgttttagccttaccttcccttgggaagccattccacctttttgtcaatgtgaacaatggagtagctttggaagtgattactcaagaataggggggtcatcaaccagcctgcggacttactttcaaatgtcttagacccagttacttgtggatggcctcagtattgcggttacaacagtattggtcaaagaaagtagaaagtttacctttcaaggaaaattgacagtaagcacgtttcaccaagttacaactatcttaaaccagaaagcagggaggtgg

SEQ ID NO: 202022 - DNA, 529 bp, Homo sapiens
atacctacaattactctaagatagcarcgctaaaaataggacaacatattgagagttgaaagaaaggttccttgggtacataaagtgtaccttaccagaaagataatttagacaccaggctgtgtcaatacttgatattgactataagtattcattagcactatttgcttatatgaatatgcatttgtagagtgactgtctacacaaactagaataattgagaaatcctaacgaaacattaaatagctctctgtatacccagaatacatttaaaggtgctattctatgctctaattaaatattttatatttttatattaatgtgtgatatttacccttgtaatagggtataatttctattctgaattgaagagccagaattcatgatcattgatgaaaaatgtgtttattataccgaacttttcaactatttttcacatggtgctttttccaccagggtcttctgcacacttttgttcatgaattgtctaatttaaatggctatttagaaaagcaaaggttgcgaaaac

SEQ ID NO: 202023 - DNA, 529 bp, Homo sapiens
atacctacaattactctaagatagcaacgctaaaaataggacaacatattgagagttgaaagaaaggttccttgggtacataaagtgtaccttaccagaaagataatttagacaccaggctgtgtcaatacttgatattgactataagtattcattagcactatttgcttatatgaatatgcatttgtagagtgactgtctacacaaactagaataattgagaaatcctaacgaaacattaaatagctctctgtatacccagaatacatttaaaggtgctattctatgctctaattaaatattttatatttttatattaatgtgtgatattyacccttgtaatagggtataatttctattctgaattgaagagccagaattcatgatcattgatgaaaaatgtgtttattataccgaacttttcaactatttttcacatggtgctttttccaccagggtcttctgcacacttttgttcatgaattgtctaatttaaatggctatttagaaaagcaaaggttgcgaaaac

SEQ ID NO: 202024 - DNA, 529 bp, Homo sapiens
atacctacaattactctaagatagcaacgctaaaaataggacaacatattgagagttgaaagaaaggttccttgggtacataaagtgtaccttaccagaaagataatttagacaccaggctgtgtcaatacttgatattgactataagtattcattagcactatttgcttatatgaatatgcatttgtagagtgactgtctacacaaactagaataattgagaaatcctaacgaaacattaaatagctctctgtatacccagaatacatttaaaggtgctattctatgctctaattaaatattttatatttttatattaatgtgtgatatttacccttgtaatagggtataatttctattctgaattgaagagccagaattcakgatcattgatgaaaaatgtgtttattataccgaacttttcaactatttttcacatggtgctttttccaccagggtcttctgcacacttttgttcatgaattgtctaatttaaatggctatttagaaaagcaaaggttgcgaaaac

SEQ ID NO: 202025 - DNA, 541 bp, Homo sapiens
aatatttaggccacttaataagtgcaggcaagaaaagaacagggctggaatgagttgaaggaatcgtgtcctcacacttacctccaacaagaactcaggaaatatgtagggttagttggatgccactgcttatggactgacttatatgcactacacagtaaactgttacatcaaaaacttgtccaggggaagcctgaccgcttcctgtggacttctgaggaagttgatctagttgaagagctgaaagagtcataaccacctctgttttagccttaccttcccttgggaagccattccacctttttgtcaatgtgaacaayggagtagctttggaagtgattactcaagaataggggggtcatcaaccagcctgcggacttactttcaaatgtcttagacccagttacttgtggatggcctcagtattgcggttacaacagtattggtcaaagaaagtagaaagtttacctttcaaggaaaattgacagtaagcacgtttcaccaagttacaactatcttaaaccagaaagcagggaggtgg

SEQ ID NO: 202026 - DNA, 541 bp, Homo sapiens
aatatttaggccacttaataagtgcaggcaagaaaagaacagggctggaatgagttgaaggaatcgtgtcctcacacttacctccaacaagaactcaggaaatatgtagggttagttggatgccactgcttatggactgacttatatgcactacacagtaaactgttacatcaaaaacttgtccaggggaagcctgaccgcttcctgtggacttctgaggaagttgatctagttgaagagctgaaagagtcataaccacctctgttttagccttaccttcccttgggaagccattccacctttttgtcaatgtgaacaatggagtagctttggaagtgattactcaagaataggggggtcatcaaccagcctgcggacttactttcaaatgtcttagacccagttacttgtggatggcctcagtattgcggttacaacastattggtcaaagaaagtagaaagtttacctttcaaggaaaattgacagtaagcacgtttcaccaagttacaactatcttaaaccagaaagcagggaggtgg

SEQ ID NO: 202027 - DNA, 580 bp, Homo sapiens
atcacagtaagtcatttcatgtttaaagtttttagaaagtataattatctgaatgtagttacaaatagaggtgtttttttttttgtccaaggaaaattgccactttctatttgtgaactacgacaaatwtgcattcttttagaataaatagagataggatgtgtatttgtctactgagttgagggttgcaagttgaaaatttaataaaattatttctctactttgcttacagggtaaatattttcatgcatattacctatatttgcaaagaagtggcactttgtaaaaccttagtcatatgttctttttgctttaaaagtcatgtctgccaggcattgatgatagtagtgctaataatttatgtaaaaaaaaaaacatcttgatgtgtaaaaactataagaagaatcctttcctggtaagtatttagcaaagaacattgatttttctcattatctattgccttatctttccatttgtctatttatgtgccattatgaaaaataatcatatcttaattcttcacatattcaggaaggtataattatcaggaagaagttgacacccaatggtcctgctctgt

SEQ ID NO: 202028 - DNA, 580 bp, Homo sapiens
atcacagtaagtcatttcatgtttaaagtttttagaaagtataattatctgaatgtagttacaaatagaggtgtttttttttttgtccaaggaaaattgccactttctatttgtgaactacgacaaatttgcattcttttagaataaatagagataggatgtgtatttgtctactgagttgagggttgcaagttgaaaatttaataaaattatttctctactttgcttacagggtaaatattttcatgcatrttacctatatttgcaaagaagtggcactttgtaaaaccttagtcatatgttctttttgctttaaaagtcatgtctgccaggcattgatgatagtagtgctaataatttatgtaaaaaaaaaaacatcttgatgtgtaaaaactataagaagaatcctttcctggtaagtatttagcaaagaacattgatttttctcattatctattgccttatctttccatttgtctatttatgtgccattatgaaaaataatcatatcttaattcttcacatattcaggaaggtataattatcaggaagaagttgacacccaatggtcctgctctgt

SEQ ID NO: 202029 - DNA, 583 bp, Homo sapiens
atttatcctttctttgtgttacaaacaatccaattataccctttagttatcttaaaatgtacaataaattattgttgcctgtaatcaccctattgtgctatcaaatactagatattgttcattctatctaactacatgtttgtacccattgaccatccccacatttccctcccctgctactatcctttccagcctctggtaactgtcctgctctctatctccatgagtttaattgtttaaaattttagcttccacaaataagtaagaacatgcaaagttagtctttctgtgcctggcttatttcatgtaatgacctgcatccatgttgttgcaaatgacaggatcttattygtttttaagactgaatagtactccattgtgtatacgggccacattttccttacacattcctctgttaatggacacttaggttatttccaaatcttggctattgtaaatgctgcaataaacatggaagtgtagttatctcttcaatatactggtttcctttcttttgggtatatacctagcagtcagattgctggattatatggtagctctatttttagttttttgagggatc

SEQ ID NO: 202030 - DNA, 566 bp, Homo sapiens
caaatagtgtaattatggcctggcatgcgtggctcacgcctgtaatctcagcactttgggagactgaggcggacggatcacttgaggtcaggagttcgagactagcctggccaacatggtaaaaccctgtctctactaaaaatacaaaaattagctgagcgtggtggtaggcgcctataatcccagctactcaggaagctgaggcaggagaatcacttgaacccgggaggcggaggctgcagtgagctcagattgcaccactgcactctggcctgggggatagggtgaaacttttcctccaaaaaaaaaaaaaaaaaaaaaaaaaccccacccccccaaaaaaaacccagtgtaattacttcccattattgaacatgatgycaatactcttcagtggctcatgacgaactcttcattgtattatttgaaaatttaaaaatattattaaaaacttaaatctatattgtctaatactttcttccaaccctcacgttgcccacgaacaaaactctttcaagtctaggtctgtatacttcacgatcttttcttcttcaagttttacaaga

SEQ ID NO: 202031 - DNA, 566 bp, Homo sapiens
caaatagtgtaattatggcctggcatgcgtggctcacgcctgtaatctcagcactttgggagactgaggcggacggatcacttgaggtcaggagttcgagactagcctggccaacatggtaaaaccctgtctctactaaaaatacaaaaattagctgagcgtggtggtaggcgcctataatcccagctactcaggaagctgaggcaggagaatcacttgaacccgggaggcggaggctgcagtgagctcagattgcaccactgcactctggcctgggggatagggtgaaacttttcctccaaaaaaaaaaaaaaaaaaaaaaaaaccccacccccccaaaaaaaacccagtgtaattacttcccattattgaacatgatgtcaatactcttcagtggctcatgacgaactcttcattgtattatttgaaaatttaaaaatattattaaaaacttaaatctatattgtctaatactttcttccaaccctcacgttgcccacgaacaaaactctttcaagtctaggtctgtatacttcacratcttttcttcttcaagttttacaaga

SEQ ID NO: 202032 - DNA, 579 bp, Homo sapiens
cttttaactttatatgcctggaaactagaacactgcacctggcatatggtaataattagttagcacttattaagtgtttactaagtatcacacatatttgaagtatgaatttacagatattatttcatttaatcttcacaacatctcgattagataggtactgtaattatgtcctttttgttgataatgaaactgagcctctcagaggttaaattatttgcttgcgattatatagccacaaatggcagagccagaatttgaacctggrtagtcttactccagtatttgtgcttgaaacctcaacgttctcttgcctctcaagtaagatactgaactgaatatataaatggagtctgtggaaacataattcatgaaaaagaaaccttctagtgaattataaataatatcctcaagagagtttgaaactatacatctatgaaaaagcaattaaaaacataattgttacaattaaaatgcaatggaagggcttgaagaaaatttttttcttatgtgttcattttatctctatatttaggaatttaaaaacattacaaaatatagaggatgaagttaaagctt

SEQ ID NO: 202033 - DNA, 458 bp, Homo sapiens
gtatcaactcacccctcccctgtcatgccatcaaggacatggccgccacattgtgcacctcggttgacattctaaggatggttcacagctgcgaagagggagtaaaaggagttcagatgatgtgtccaaaacttagatctggcctctctctgacacagaccagctgtgcagcctggggaaagttacttaacccctctgaatttttctctaatawaagggagttataaagatcgcctctaagctttgatgttttgtaattatcagactgtactgtccaaagtatttcagagagtagagtacctatggcaaaagcttacattgaaactgctggtcaacaaaaagcatgggtacgtaatgcaagagaacagtggtgggtattgggatttgtgatgtgtcccttttctgaaaccgggctggtgatgcgataaatgctcagttctttggagtagaagccctta

SEQ ID NO: 202034 - DNA, 450 bp, Homo sapiens
agcattttttagctaatttttgcattcattttatttgccagaattttgtcccattgctgtcctcagacaaaagggaatttttaaaagtgagttttagatttttaacctttaggagaacaaaacaagagaaagcgggaacagggttgtaaatgatgcagtgaaggctcttcatgatatagattaaggttcagtgacattttttgttggtttactatatttctcagctgtgacttcaaactgcaaagayactcaagagtcacatatgccaaaaagctttagtgaatttctaccctaaaattgctggtgccacatctggataggtggattaaaattgattcgttgttcacattacccctgcctggtctcagagtggctctggatttgataattacacaatctctgatgatatatttctaattcaagattcaaactgtggcttcccccacataa

SEQ ID NO: 202035 - DNA, 552 bp, Homo sapiens
atgaatgatttcattgttctccatctgttagaaattcaattaaatgctgtttagtttatgtaaccacaaacctcctgctaccacttcattctcagtattaactctactgtgtgttgacaccactgaagggtaaattacaactatctagaagggaaatagcatgattcttactataaatgccatgacttatctacgttctaaattttatccactatatttcattcattcaaaattgattcagtggtagaaagcaacagatcccctgaatccctgggcacactttgccctctaccttcagggttcctctgactattgggaactcyctccctctctgcacttaccctgcagtgttgccatgacgtatttacatggtgacttcttctcaaatgataaggagttctttcaggtcagggacagtatctaactcattatgaagtaataggacaaaaaatattatttaaggacaaagctgattgtaccatcttcttacccattaggaaaaatgccattattctattaggcaaaaatgacatttgatgtgctcttttaccc

SEQ ID NO: 202036 - DNA, 468 bp, Homo sapiens
ttactcatgaacctaaaagcatgactaccccgtttagcaagatggagccaagaaagagatgaggatcttttcgtagatgataataggggagttttaggtgacattaagcacaatatgagtcaaaggtggttaaaagcaacttgctccaactcctcagcatcaacaaaccaaatgtcaacttagggcagtgatagaacccttctgcctccctgaytgagactaattggaagaaatctggagtgctgcattttggtcaaagcatagaagtgtagcatgctaggaagatgaaaggacttaaaaccatgttaccgaagagtggttgaagaaactgaggatatttagccaagaggagaaaagacatagagggagagctaatagctcctgtcatgtgtctgaaggacctcagaaaaaaacaaaaacaaacaaacaaacaaaaaagattatttgattatctttctccccttgggg

SEQ ID NO: 202037 - DNA, 468 bp, Homo sapiens
ttactcatgaacctaaaagcatgactaccccgtttagcaagatggagccaagaaagagatgaggatcttttcgtagatgataataggggagttttaggtgacattaagcacaatatgagtcaaaggtggttaaaagcaacttgctccaactcctcagcatcaacaaaccaaatgtcaacttagggcagtgatagaacccttctgcctccctgactgagactaattggaagaaatctggartgctgcattttggtcaaagcatagaagtgtagcatgctaggaagatgaaaggacttaaaaccatgttaccgaagagtggttgaagaaactgaggatatttagccaagaggagaaaagacatagagggagagctaatagctcctgtcatgtgtctgaaggacctcagaaaaaaacaaaaacaaacaaacaaacaaaaaagattatttgattatctttctccccttgggg

SEQ ID NO: 202038 - DNA, 528 bp, Homo sapiens
aaaaacaaaaacaaacaaacaaacaaaaaagattatttgattatctttctccccttggggccaaaataaataaataaataaataaatagataaatttagcttaataacagaaagatctttctggaagttgaatcttcaaaaagatggaaatgattgactcaggaatttttgcacaacccagctgcttattacagtcatctatgggactttctaacaytgtagataccaaggccccaactccaaggagatgtggagagataattttgtatttttttaaagttccacaggtgattatgatgttcagttagaatttaaaaacactcctttgatggataatggtaataataactatttatgatgataactatgcaccagggattgcactacatgctttatatatataaaatttcatttcattctcatctccaaagtttaatgtagtaatgatgatctcattttactggtggatgaactgaaccaaattaaagtacttgcccaaggtttccaaggatggtagaggtgataagg

SEQ ID NO: 202039 - DNA, 444 bp, Homo sapiens
tgcttcacttagaaaataatttcttccgtcaaaaaagttaaattggcagatatctgaaaaatgtaattttttaaatcttctaaaaatgtttcctttaaatatatttttattcatcaaaacatctgtgttttgataaatatacacacctgttttgatgaatatatatactcataaatatatatgtctactgtgtacccacgaaaattaaaaaaaatacaatataaacagtagattgaaaaaaattgttttgtcagttggtatatccagatttttagtygagaaaaatgtgcccatcatagctataggtaaagcttaaaagaattgatgtgacagataatactattatgaatctaaccaggatggagtttaatgatggaaatctccctcccatctcacctctcactttagatttgcagaaatccaattctccatgttgtatttttt

SEQ ID NO: 202040 - DNA, 630 bp, Homo sapiens
aaactattttccataagtgattcccagtttctttacactttctagttacattatacaacttcactraagtgtaagctctgcgagagccagaactttttttttcactgttttatcctctgtgcctagagtagtatgcatttaataaagaattgctgaataaatgaatatgttatttgaccacaaaaactgggaaaaggcagctaatgggacaagctaaaaagacacaaacaccaaagacattatctctggtgaaacaccctttgtctatttggaaatattgacaactgaaacttatcaggtaagtggcggggaaagaataataagttgtggtttccatagcatcaggttttatcataattcttggtctgaaagcagatgttgaatttttttctgcttgtattattcaaggactctgggctacaagtaaaaaaagaaaaaaaagtacaaatttgcttatgtagaaagcaatttgctagtaacatttggacaaggtttctgttcatctctgtcttcagtttgtttctggatgttggggctattatcttctaccatagactagcttcttttcaggtaagaagacacagatgaccagaaatctggaactaacatattaaccttccatagccggag

SEQ ID NO: 202041 - DNA, 630 bp, Homo sapiens
aaactattttccataagtgattcccagtttctttacactttctagttacattatacaacttcactaaagtgtaagctctgcgagagccagaactttttttttcactgttttatcctctgtgcctagagtagtatgyatttaataaagaattgctgaataaatgaatatgttatttgaccacaaaaactgggaaaaggcagctaatgggacaagctaaaaagacacaaacaccaaagacattatctctggtgaaacaccctttgtctatttggaaatattgacaactgaaacttatcaggtaagtggcggggaaagaataataagttgtggtttccatagcatcaggttttatcataattcttggtctgaaagcagatgttgaatttttttctgcttgtattattcaaggactctgggctacaagtaaaaaaagaaaaaaaagtacaaatttgcttatgtagaaagcaatttgctagtaacatttggacaaggtttctgttcatctctgtcttcagtttgtttctggatgttggggctattatcttctaccatagactagcttcttttcaggtaagaagacacagatgaccagaaatctggaactaacatattaaccttccatagccggag

SEQ ID NO: 202042 - DNA, 516 bp, Homo sapiens
agcctggccaagatggtgaatccccaactctactaaaaaaatgcaaaaattagccaggcaccatggcaggtgcctgtgatcctagctacctgggaggctgaggcaagagaattgcttgaacccaggaggcaaagkttgcagtgagctgagatctcaccactgcactccagcctgggcaatagagtgagaatctatctcaaaaaaaaaaaaaacatggagaaactccatctctactaaaaatacaaaattatccaggcttggtggcacatgcctgtaatcccagctacttgggaggctgaggcaagagaatcgcttgaacctgggaagcagaggtttcggggaggcggaggttgaggtgagccaagatcatggcattgcactacagcctgggcaacaagagtaaaactctgtctaaaaaacaaacaaacaaacaaaacaaaacaaagaaaattacgcacaacttatttcctggtttgtgataatctgtgaaatacattttgaaatgaattggaattc

SEQ ID NO: 202043 - DNA, 614 bp, Homo sapiens
taagtggaaaacagaggtacattaaaaaaaaaaataagcaccatttcattcactacttagcaatttcctaagttttccatctctggtaatgcattctctcttaatagctaccctgagaaatagatctttcatggttgtagccaaacaatgctattcatttttcttaggaaattacttttacatgtttcctttaactagcacaagatactacagcacatcagaaaatgttttcttagggtgagtaacaatattaagggagtagtcaaatactataaaaattctcactgcttgaatccctttgttgttgttgttgttgttgttttggatacagagttttgctcttgtcamccaggctggagtgcagtggcgcagtcttggctcactgcaacctccacctcctgggtgcaagcgattctcctgcctcaacctcctgagtagctgggattacaggcacctgccaccaagcctggctacttttatatttttagtagagatggggtttcaacatgttggccaggctgatctcaaactcctgacctcaggtgattcgcccgcctcggcctcccaaagtgctgggattacaggtgtgagccaccatgctcggccttgaattc

SEQ ID NO: 202044 - DNA, 504 bp, Homo sapiens
tttcagcaggcttactgccaatttttaaaagatctaattgtcttgaggttggcgttcctctcctttaacaaaatctattgtgtgtgcaggtacttccctggaaaaaaatggatcttaggaagtaagtgcaaaaatgctctgcctaatgctcttaccgtaagtaagaaactgtgctttgtctctgacattggagtctcatgtcatctccaagaatccatgacactgtgacaagctaacttgcaagtagggtaaaaatctcggaccattcaaatkcttagcacaaagattacataaaggcatgaatacctggagtgcgggatcactggagacaatcttaagggttgcctaccacaatagccatctctttattttcttacaatggaagaagagaaggacagaagaaagagaagaaatgggggaaaaatcaatcatttactgagtttatttcatgctccaggaatttaaacacaaattaatttccttgacgcttagcagagcaacaag

SEQ ID NO: 202045 - DNA, 601 bp, Homo sapiens
cactactggtgttagcaaatcacaacagtgcattttttttctagaatgttacaggtatggatcatgtaatcttatttgaatattccagtaagagagtaaagataatcattgaaatgactgctcctgataggtctttgtctcatatatttatctctaagtaacagctcaaaaatctatatcaaagttttacatgcctatctattactttggtattgaaatcttctttctaatggaatatttaagtgaaacacraggctaaacttcaggacttttattaacttctagtataaaataatattatattagatgaactgtacacagataatttatattttagaggatttctcagtctatcaagtttgttatcaaggaaattacatttatatttttgaaattgttatttagtgctttgctgtctccagtacttgggtttgactacaatcaatgaagtttagtcatttttctgttttatcctatcttttaaaaagtgttcaacacacagtctgatctgttgtgtcatccaagcattacttattcaattctgttgggattaagtggatctttatattttaaatctattaagtttaattcaaacaaactt

SEQ ID NO: 202046 - DNA, 536 bp, Homo sapiens
ctcaccacacattcactttctcccatcaatcctcaatatccgcccctgtaaaatcaggtattggtactacatggtttttaaagatccttcctgttctaacattttttcatataacaaaaatcataatgaatgataytaactgtgaaaacaaacactattaccacttactcatttctgttggagctaggcactatgctagctagtttttcacgtctaaggtttttaacctataaatgaaactttcttttaaatatgattttcacccctttgtttcagaggagaaaactgaagctcagaaaatataagtaacttgcctaaggtcgtaggatttctaatggctgaactgaaattgaaaaccatgtctaactatctgtgcttattataaaagccattctgtttctcaggtggaaacatatacattttttattcattatctccataaacatttactgagtactggaacttctatatgagcaaatccatctttattaaaaatgttcttccttgaaatgaatatatattactgtttaaattga

SEQ ID NO: 202047 - DNA, 583 bp, Homo sapiens
attttatcattcacatttaagtaactgtgagcaattaaaaggaaactgacactttccaagggcttcgtagaactaaatttaactctctttaacaattgctaagagaatattatatgctgcacagtatatataaaatcctcaacattattatccatcaaagaaaaattaaaactacaatcaatactattacacagataataaaatggctaaaattgtaaagagaggaaatatcaattattggcaaggatgtggagtaactgaaaatcttatacacagatggtaggaatgtgggttggtacattcactttggaaaatgacttggcagtttcataaaaagctatacatacatctacatatgatctatatttatccaagaaaaataagaacataagttcatatgaagacttatacaaaaatgtcataacagttttatttttaatatccacaaacaacaaaaactccaaatgcccatcaatgtatcaataaattgtggtatacattccattcagtgatacaaataattacagagacatgtaataccatgaataaataktaaaattattctgcagagtgaaagaagcca

SEQ ID NO: 202048 - DNA, 509 bp, Homo sapiens
ttctgcatgtacatccagtttccccagcactatctattgaagagactgtcttttccccagtgtatgttcttggcattttgtcaaaaacgaatttactgtgggtgtatggatttgtttctaggttctctattctgtttcatttgtctgtgtgtcttttttttttttgcttgcataatgttttggttacaatagctctgtagtataatttgaagtcaggtaaaacgawtcctccagttttgttattttgcttagtacagctttggctattcttggtcttttgtagttccgtatcaattttagaattgttttttctatttctgtgaagaatatcattggtattttgatagaggttgctttgaatctgtagatttgtttgggtggtgtggacgttttatcaatatgaatgcttctagtacatgaacatgaaatactttttcatttttggggtgtctcttcaatttcttttatcagtgttttatagtttttattatagagatcttttacttctt

SEQ ID NO: 202049 - DNA, 509 bp, Homo sapiens
ttctgcatgtacatccagtttccccagcactatctattgaagagactgtcttttccccagtgtatgttcttggcattttgtcaaaaacgaatttactgtgggtgtatggatttgtttctaggttctctattctgtttcatttgtctgtgtgtcttttttttttttgcttgcataatgttttggttacaatagctctgtagtataatttgaagtcaggtaaaacgattcctccagttttgttattttgcttagtacagctttggctattctkggtcttttgtagttccgtatcaattttagaattgttttttctatttctgtgaagaatatcattggtattttgatagaggttgctttgaatctgtagatttgtttgggtggtgtggacgttttatcaatatgaatgcttctagtacatgaacatgaaatactttttcatttttggggtgtctcttcaatttcttttatcagtgttttatagtttttattatagagatcttttacttctt

SEQ ID NO: 202050 - DNA, 570 bp, Homo sapiens
gatgacaggtttgtaaaggkttgctaattgtgtggttgataacagtgtggcatttttttttttttttttacattagagccttagagtctcctactgagataataccatcattcaagtcttattgattgccatatgtttaaagagctcactatagttccggatcctgctttttgaatattatatgaaatgaaactgggtcctgggttacacatttctacaaattggtaaatttgttagtctattttccatgctacatttattatctctcttactattttcatttatagtacttgaatttgacatgaagaaatacatttataaaattctattctgaggatctgggagtttgattatatgcatttgctcccaaaatttcagtaaagtcatcccattacctttacactaaagtaattccaaagataagttaagtaaagtatctactggctgagaggagggccttttggtctgtttggtattgctataacagaataactgagactgactaatttataaaaaaaaaaaagaggttcatttgcctcacagttttggtggctagaaagtctaagagca

SEQ ID NO: 202051 - DNA, 462 bp, Homo sapiens
taaagtaggaacctattatcttctttttcggtaaaatacatccaccgcatatttaatcttcaaaagcatgtatttataattccagacaagctagcttttctatgtagttgttggttatgtgactgaagggaagttgcaagtggtgcaatttaggatgatctgtttttattcattactgcataatagatggcagttggagatttcatatggccaactctgtttttgcatcctaatcttgctagacatttggtcttcaaaggctgaaacagaacccatcaccagaactttcccttctggattacataagaatgtagacatctctggtaataaatttactctgacagctgctaaaaaatttacaaagcttgacaacatactctgaaagcaaaggagaaaatcgagaccttggttgattatttacytaaaacatttatcttttggggaaacacagagagagagaga
